(19) United States
(12) Patent Application Publication
(10) Pub. No.: US 2025/0376534 A1
(43) Pub. Date: Dec. 11, 2025

(54) CIRCULAR RNA ENCODING CHIMERIC ANTIGEN RECEPTORS TARGETING BCMA

(71) Applicant: Orna Therapeutics, Inc., Watertown, MA (US)

(72) Inventors: Thomas Barnes, Watertown, MA (US); Amy M. Becker, Watertown, MA (US); Brian Goodman, Watertown, MA (US); Jui Dutta-Simmons, Watertown, MA (US)

(21) Appl. No.: 18/876,542

(22) PCT Filed: Jun. 21, 2023
(86) PCT No.: PCT/US2023/068812

§ 371 Date: Dec. 18, 2024

Related U.S. Application Data
(63) Continuation of application No. 17/853,576, filed on Jun. 29, 2022, now Pat. No. 12,297,285.
(60) Provisional application No. 63/355,527, filed on Jun. 24, 2022.

(51) Int. Cl. C07K 16/28; A61K 38/00; A61K 39/00; A61K 40/00; A61K 47/28; A61K 47/69; A61K 48/00; A61P 35/00; C07K 14/725

(52) U.S. Cl. CPC C07K 16/2878; A61K 40/00; A61K 47/28; A61K 47/6929; A61K 48/0033; A61P 35/00; C07K 14/7051; C07K 16/2803; A61K 38/00; A61K 39/00; C07K 2319/00

(57) ABSTRACT

Circular RNA, along with related compositions and methods are described herein. In some embodiments, the inventive circular RNA comprises group I intron fragments, spacers, an IRES, duplex forming regions, and an expression sequence. In some embodiments, the expression sequence encodes an antigen. In some embodiments, circular RNA of the invention has improved expression, functional stability, immunogenicity, ease of manufacturing, and/or half-life when compared to linear RNA. In some embodiments, inventive methods and constructs result in improved circularization efficiency, splicing efficiency, and/or purity when compared to existing RNA circularization approaches.

### CROSS REFERENCE

[0001] This application claims the benefit of priority of U.S. Provisional Application No. 63/355,527, filed on Jun. 24, 2022, and U.S. application Ser. No. 17/853,576, filed Jun. 29, 2022, the contents of which are hereby incorporated by reference in their entirety for all purposes.

### SEQUENCE LISTING

[0002] This application contains a Sequence Listing XML in computer readable form. The computer readable form is incorporated herein by reference. Said XML copy, created on May 31, 2023, is named OBS-027WO_SL.txt and is 6,585,018 bytes in size.

### BACKGROUND OF THE INVENTION

[0003] Conventional gene therapy involves the use of DNA for insertion of desired genetic information into host cells. The DNA introduced into the cell is usually integrated to a certain extent into the genome of one or more transfected cells, allowing for long-lasting action of the introduced genetic material in the host. While there may be substantial benefits to such sustained action, integration of exogenous DNA into a host genome may also have many deleterious effects. For example, it is possible that the introduced DNA will be inserted into an intact gene, resulting in a mutation which impedes or even totally eliminates the function of the endogenous gene. Thus, gene therapy with DNA may result in the impairment of a vital genetic function in the treated host, such as e.g., elimination or deleteriously reduced production of an essential enzyme or interruption of a gene critical for the regulation of cell growth, resulting in unregulated or cancerous cell proliferation. In addition, with conventional DNA based gene therapy it is necessary for effective expression of the desired gene product to include a strong promoter sequence, which again may lead to undesirable changes in the regulation of normal gene expression in the cell. It is also possible that the DNA based genetic material will result in the induction of undesired anti-DNA antibodies, which in turn, may trigger a possibly fatal immune response. Gene therapy approaches using viral vectors can also result in an adverse immune response. In some circumstances, the viral vector may even integrate into the host genome. In addition, production of clinical grade viral vectors is also expensive and time consuming. Targeting delivery of the introduced genetic material using viral vectors can also be difficult to control. Thus, while DNA based gene therapy has been evaluated for delivery of secreted proteins using viral vectors (U.S. Pat. No. 6,066,626; U.S. Publication No. US2004/0110709), these approaches may be limited for these various reasons.

[0004] In contrast to DNA, the use of RNA as a gene therapy agent is substantially safer because RNA does not involve the risk of being stably integrated into the genome of the transfected cell, thus eliminating the concern that the introduced genetic material will disrupt the normal functioning of an essential gene, or cause a mutation that results in deleterious or oncogenic effects, and extraneous promoter sequences are not required for effective translation of the encoded protein, again avoiding possible deleterious side effects. In addition, it is not necessary for mRNA to enter the nucleus to perform its function, while DNA must overcome this major barrier.

[0005] Circular RNA is useful in the design and production of stable forms of RNA. The circularization of an RNA molecule provides an advantage to the study of RNA structure and function, especially in the case of molecules that are prone to folding in an inactive conformation (Wang and Ruffner, 1998). Circular RNA can also be particularly interesting and useful for in vivo applications, especially in the research area of RNA-based control of gene expression and therapeutics, including protein replacement therapy and vaccination.

[0006] Prior to this invention, there were three main techniques for making circularized RNA in vitro: the splint-mediated method, the permuted intron-exon method, and the RNA ligase-mediated method. However, the existing methodologies are limited by the size of RNA that can be circularized, thus limiting their therapeutic application.

### SUMMARY

[0007] In one aspect, provided herein are precursor RNA polynucleotides comprising: a. a 5′ enhanced intron element, b. a 5′ enhanced exon element, c. a core functional element, d. a 3′ enhanced exon element, and e. a 3′ enhanced intron element, wherein the core functional element comprises: i. a translation initiation element (TIE), ii. a coding element encoding a CAR that specifically binds to BCMA, and iii. optionally, a stop codon or a stop cassette. In some embodiments, the CAR comprises an amino acid sequence selected from the group consisting of SEQ ID NO: 3690-3695.

[0008] In some embodiments, the translation initiation element (TIE) comprises an UTR or a fragment thereof, an aptamer complex or a fragment thereof, or a combination thereof. In some embodiments, the UTR or fragment thereof comprises a viral internal ribosome entry site (IRES) or a eukaryotic IRES. In some embodiments, the 5′ enhanced intron element comprises a group I intron or fragment thereof. In some embodiments, the 3′ enhanced intron element comprises a group I intron or fragment thereof. In some embodiments, the 5′ enhanced intron element further comprises a first or a first and a second nucleotide of a 3′ group I intron splice site dinucleotide. In some embodiments, the 3′ enhanced intron element further comprises a second nucleotide of a 3′ group I intron splice site dinucleotide.

[0009] In one aspect, provided herein is a circular RNA polynucleotide comprising a coding element encoding a chimeric antigen receptor (CAR), wherein the CAR comprises an antigen binding molecule that specifically binds to BCMA and comprises an amino acid sequence selected from the group consisting of SEQ ID NO: 3690-3695. In some embodiments, a circular RNA polynucleotide disclosed herein, further comprises a polynucleotide sequence encoding a CAR comprising an antigen binding molecule that specifically binds to CD19. In some embodiments, the coding element is codon optimized. In some embodiments, the CAR comprises an amino acid sequence of SEQ ID NO: 3690. In some embodiments, the circular RNA is formed from a precursor RNA polynucleotide that was transcribed from a vector or DNA comprising a PCR product, a linearized plasmid, non-linearized plasmid, linearized minicircle, a non-linearized minicircle, viral vector, cosmid, ceDNA, or an artificial chromosome. In some embodiments, a circular RNA polynucleotide disclosed herein, further comprises a translation initiation element (TIE), wherein the TIE comprises internal ribosome entry site (IRES). In some embodiments, the IRES is derived from Enterovirus, Bopivirus, Mischivirus, Gallivirus, Oscivirus, Cardiovirus, Kobuvirus, Rabovirus, Salivirus, Caliciviridae, Parechovirus, Hunnivirus, Tottorivirus, Passerivirus, Cosavirus, Sicinivirus, Shanbavirus, Allexivirus, or Megrivirus. In some embodiments, a circular RNA polynucleotide disclosed herein, further comprises an internal spacer sequence. In some embodiments, a circular RNA polynucleotide disclosed herein, further comprises 1 to 100 natural nucleotides derived from a natural exon.

[0010] In one aspect, provided herein is a pharmaceutical composition comprising: a. a circular RNA polynucleotide comprising a coding element encoding a chimeric antigen receptor (CAR), wherein the CAR comprises an antigen binding molecule that specifically binds to BCMA; and b. a nanoparticle, and optionally, a targeting moiety operably connected to the nanoparticle.

[0011] In some embodiments, the nanoparticle is a lipid nanoparticle, a core-shell particle, or a biodegradable nanoparticle. In some embodiments, the nanoparticle comprises one or more cationic lipids, ionizable lipids, or poly β-amino esters. In some embodiments, the nanoparticle comprises one or more non-cationic lipids. In some embodiments, the nanoparticle comprises one or more PEG-modified lipids, polyglutamic acid lipids, or hyaluronic acid lipids. In some embodiments, the nanoparticle comprises cholesterol. In some embodiments, the nanoparticle comprises arachidonic acid, leukotriene, or oleic acid.

[0012] In one aspect, provided herein is an improved expression construct encoding a chimeric antigen receptor (CAR), wherein the CAR comprises an antigen-binding molecule that specifically binds to BCMA, the improvement comprising a circular RNA polynucleotide expression sequence.

[0013] In one aspect, provided herein is a method of treating a subject in need thereof comprising administering a therapeutically effective amount of a composition comprising the circular RNA disclosed herein, a nanoparticle, and optionally, a targeting moiety operably connected to the nanoparticle.

[0014] In some embodiments, the subject has a cancer selected from the group consisting of: acute myeloid leukemia (AML); alveolar rhabdomyosarcoma; B cell malignancies; bladder cancer (e.g., bladder carcinoma); bone cancer; brain cancer (e.g., medulloblastoma and glioblastoma multiforme); breast cancer; cancer of the anus, anal canal, or anorectum; cancer of the eye; cancer of the intrahepatic bile duct; cancer of the joints; cancer of the neck; gallbladder cancer; cancer of the pleura; cancer of the nose, nasal cavity, or middle ear; cancer of the oral cavity; cancer of the vulva; chronic lymphocytic leukemia; chronic myeloid cancer; colon cancer; esophageal cancer, cervical cancer; fibrosarcoma; gastrointestinal carcinoid tumor; head and neck cancer (e.g., head and neck squamous cell carcinoma); Hodgkin lymphoma; hypopharynx cancer; kidney cancer; larynx cancer; leukemia; liquid tumors; lipoma; liver cancer; lung cancer (e.g., non-small cell lung carcinoma, lung adenocarcinoma, and small cell lung carcinoma); lymphoma; mesothelioma; mastocytoma; melanoma; multiple myeloma; nasopharynx cancer; non-Hodgkin lymphoma; B-chronic lymphocytic leukemia; hairy cell leukemia; Burkitt's lymphoma; ovarian cancer; pancreatic cancer; cancer of the peritoneum; cancer of the omentum; mesentery cancer; pharynx cancer; prostate cancer; rectal cancer; renal cancer; skin cancer; small intestine cancer; soft tissue cancer; solid tumors; synovial sarcoma; gastric cancer; teratoma; testicular cancer; thyroid cancer; and ureter cancer.

[0015] In one aspect, provided herein is a eukaryotic cell comprising a circular RNA polynucleotide disclosed herein. In some embodiments, the eukaryotic cell is an immune cell. In some embodiments, the eukaryotic cell is a T cell, dendritic cell, macrophage, B cell, neutrophil or basophil.

[0016] In one aspect, provided herein are circular RNA polynucleotide expression vectors encoding a chimeric antigen receptor (CAR), wherein the CAR comprises an antigen-binding molecule that specifically binds to BCMA.

[0017] In some embodiments, a CAR disclosed herein comprises an amino acid sequence selected from the group consisting of SEQ ID NO: 3690-3695.

[0018] In some embodiments, a circular RNA polynucleotide expression vector disclosed herein further comprises a polynucleotide sequence encoding a CAR comprising an antigen binding molecule that specifically binds to CD19.

[0019] In some embodiments, the protein coding or non-coding sequence is codon optimized.

[0020] In some embodiments, a circular RNA polynucleotide expression vector disclosed herein is optimized to lack at least one microRNA binding site present in an equivalent pre-optimized polynucleotide.

[0021] In some embodiments, a circular RNA polynucleotide expression vector disclosed herein is optimized to lack at least one RNA-editing susceptible site present in an equivalent pre-optimized polynucleotide.

[0022] In some embodiments, a circular RNA polynucleotide expression vector disclosed herein has an in vivo duration of therapeutic effect in humans of at least 20 hours.

[0023] In some embodiments, a circular RNA polynucleotide expression vector disclosed herein has a functional half-life of at least 6 hours.

[0024] In some embodiments, a circular RNA polynucleotide expression vector disclosed herein has a duration of therapeutic effect in a human cell greater than or equal to that of an equivalent linear RNA polynucleotide comprising the same expression sequence.

[0025] In some embodiments, a circular RNA polynucleotide expression vector disclosed herein has an in vivo duration of therapeutic effect in human greater than that of an equivalent linear RNA polynucleotide having the same expression sequence.

[0026] In some embodiments, the precursor RNA polynucleotide is transcribed from a vector or DNA comprising a PCR product, a linearized plasmid, non-linearized plasmid, linearized minicircle, a non-linearized minicircle, viral vector, cosmid, ceDNA, or an artificial chromosome.

[0027] In some embodiments, a pharmaceutical composition comprises a circular RNA polynucleotide expression vector disclosed herein, a nanoparticle, and optionally, a targeting moiety operably connected to the nanoparticle.

[0028] In some embodiments, the nanoparticle is a lipid nanoparticle, a core-shell nanoparticle, a biodegradable nanoparticle, a biodegradable lipid nanoparticle, a polymer nanoparticle, a polyplex or a biodegradable polymer nanoparticle.

[0029] In some embodiments, a pharmaceutical composition disclosed herein comprises a targeting moiety, wherein the targeting moiety mediates receptor-mediated endocytosis, endosome fusion, or direct fusion into selected cells of a selected cell population or tissue in the absence of cell isolation or purification.

[0030] In some embodiments, a pharmaceutical composition disclosed herein comprises a targeting moiety operably connected to the nanoparticle.

[0031] In some embodiments, the targeting moiety is a small molecule, scFv, nanobody, peptide, cyclic peptide, di or tri cyclic peptide, minibody, polynucleotide aptamer, engineered scaffold protein, heavy chain variable region, light chain variable region, or a fragment thereof.

[0032] In some embodiments, a pharmaceutical composition disclosed herein, wherein less than 1%, by weight, of the polynucleotides in the composition are double stranded RNA, DNA splints, DNA template, or triphosphorylated RNA.

[0033] In some embodiments, a pharmaceutical composition disclosed herein, wherein less than 1%, by weight, of the polynucleotides and proteins in the pharmaceutical composition are double stranded RNA, DNA splints, DNA template, triphosphorylated RNA, phosphatase proteins, protein ligases, RNA polymerases, and capping enzymes.

[0034] In one aspect, provided herein is a pharmaceutical composition comprising a circular RNA polynucleotide disclosed herein and a pharmaceutical salt, buffer, diluent or combination thereof.

[0035] In one aspect, provided herein is an improved expression construct encoding a chimeric antigen receptor (CAR), wherein the CAR comprises an antigen-binding molecule that specifically binds to BCMA, the improvement comprising a circular RNA polynucleotide expression vector.

[0036] In one aspect, provided herein is a circular RNA polynucleotide expression vector encoding a chimeric antigen receptor (CAR), wherein the CAR comprises means for specifically binding to BCMA.

[0037] In one aspect, provided herein is a recombinant cell, expressing the CAR encoded by the circular RNA polynucleotide expression vector disclosed herein.

[0038] In some embodiments, the cell is an immune cell.

[0039] In some embodiments, the immune cell is a T cell, an NK cell, or a macrophage.

[0040] In one aspect, provided herein are precursor RNA polynucleotides comprising, in the following order: a. a 5′ enhanced intron element, b. a 5′ enhanced exon element, c. a core functional element, d. a 3′ enhanced exon element, and e. a 3′ enhanced intron element, wherein the core functional element comprises, in the following order: i. a translation initiation element (TIE), ii. a coding element encoding a CAR that specifically binds to BCMA, and iii. optionally, a stop codon or a stop cassette.

[0041] In one aspect, provided herein are precursor RNA polynucleotides comprising, in the following order: a. a 5′ enhanced intron element, b. a 5′ enhanced exon element, c. a core functional element, d. a 3′ enhanced exon element, and e. a 3′ enhanced intron element wherein the core functional element comprises, in the following order: i. a coding region encoding a CAR that specifically binds to BCMA, ii. optionally, a stop codon or a stop cassette, and iii. a translation initiation element (TIE).

[0042] In some embodiments, the core functional element further comprises a noncoding element.

[0043] In some embodiments, the TIE comprises an untranslated region (UTR) or a fragment thereof, an aptamer complex or a fragment thereof, or a combination thereof.

[0044] In some embodiments, the UTR or fragment thereof is derived from a viral or eukaryotic messenger RNA. In some embodiments, the UTR or fragment thereof comprises a viral internal ribosome entry site (IRES) or eukaryotic IRES. In some embodiments, the IRES comprises a sequence selected from Table_A or a fragment thereof. In some embodiments, the IRES comprises one or more modified nucleotides compared to the wild-type viral IRES or eukaryotic IRES.

[0045] In some embodiments, the aptamer complex or a fragment thereof comprises a natural or synthetic aptamer sequence. In some embodiments, the aptamer complex or a fragment thereof comprises a sequence selected from any of the ASCII tables. In some embodiments, the aptamer complex or a fragment thereof comprises more than one aptamer.

[0046] In some embodiments, the TIE comprises an UTR and an aptamer complex. In some embodiments, the UTR is located upstream to the aptamer complex. In some embodiments, the TIE further comprises an accessory element. In some embodiments, the accessory element comprises a miRNA binding site or a fragment thereof, a restriction site or a fragment thereof, an RNA editing motif or a fragment thereof, a zip code element or a fragment thereof, an RNA trafficking element or a fragment thereof, or a combination thereof. In some embodiments, the accessory element comprises a binding domain to an IRES transacting factor (ITAF). In some embodiments, the binding domain comprises a polyA region, a polyC region, a poly AC region, a polyprimidine tract, or a combination or variant thereof. In some embodiments, the ITAF comprises a poly(rC)-binding protein 1 (PCBP1), PCBP2, PCBP3, PCBP4, poly(A)-binding protein 1 (PABP1), polyprimidine-tract binding protein (PTB), Argonaute protein family member, HNRNPK (heterogeneous nuclear ribonucleoprotein K protein), or La protein, or a fragment or combination thereof.

[0047] In some embodiments, the noncoding element comprises more than one noncoding element. In some embodiments, the noncoding element comprises 50 to 15,000 nucleotides in length. In some embodiments, the noncoding element sequence comprises or consists of a sequence selected from any of the ASCII tables.

[0048] In some embodiments, the core functional element comprises a termination sequence. In some embodiments, the termination sequence is located at the 5′ end of the 3′ enhanced exon element. In some embodiments, the termination sequence is a stop codon. In some embodiments, termination sequence is a stop cassette. In some embodiments, the stop cassette comprises one or more stop codons in one or more frames. In some embodiments, each frame comprises a stop codon. In some embodiments, each frame comprises two or more stop codons.

[0049] In some embodiments, the 5′ enhanced intron element comprises a 3′ intron fragment. In some embodiments, the 3′ intron fragment further comprises a first or a first and a second nucleotides of a 3′ group I intron splice site dinucleotide. In some embodiments, the 3′ intron fragment is located at the 3′ end of the 5′ enhanced intron element. In some embodiments, the group I intron comprises is derived from a bacterial phage, viral vector, organelle genome, nuclear rDNA gene. In some embodiments, the nuclear rDNA gene comprises a nuclear rDNA gene derived from a fungi, plant, or algae, or a fragment thereof.

[0050] In some embodiments, the 5′ enhanced intron element comprises a leading untranslated sequence located at the 5′ end. In some embodiments, the leading untranslated sequence comprises a spacer. In some embodiments, the leading untranslated sequence comprises the last nucleotide of a transcription start site. In some embodiments, the leading untranslated sequence comprises 1 to 100 additional nucleotides.

[0051] In some embodiments, the 5′ enhanced intron element comprises a 5′ affinity sequence. In some embodiments, the 5′ affinity sequence comprises a polyA, polyAC, or polypyrimidine sequence. In some embodiments, the 5′ affinity sequence comprises 10 to 100 nucleotides. In some embodiments, the 5′ enhanced intron element comprises a 5′ external spacer sequence. In some embodiments, the 5′ external spacer sequence is located between the 5′ affinity sequence and the 3′ intron fragment. In some embodiments, the 5′ external spacer sequence has a length of about 6 to 60 nucleotides. In some embodiments, the 5′ external spacer sequence comprises or consists of a sequence selected from any of the ASCII tables.

[0052] In some embodiments, the 5′ enhanced intron element comprises, in the following order: a. a leading untranslated sequence; b. a 5′ affinity sequence; c. a 5′ external spacer sequence; and d. a 3′ intron fragment including the first nucleotide of a 3′ Group I intron splice site; wherein the leading untranslated sequence comprises the last nucleotide of a transcription start site and 1 to 100 nucleotides.

[0053] In some embodiments, the 5′ enhanced intron element comprises, in the following order: a. a leading untranslated sequence; b. a 5′ external spacer sequence; c. a 5′ affinity sequence; and d. a 3′ intron fragment including the first nucleotide of a 3′ group I splice site; wherein the leading untranslated sequence comprises the last nucleotide of a transcription start site and 1 to 100 nucleotide.

[0054] In some embodiments, the 5′ enhanced intron element comprises, in the following order: a. a leading untranslated sequence; b. a 5′ affinity sequence; c. a 5′ external spacer sequence; and d. a 3′ intron fragment including the first and second nucleotides of a 3′ Group I intron splice site; wherein the leading untranslated sequence comprises the last nucleotide of a transcription start site and 1 to 100 nucleotides; and wherein the 5′ enhanced exon element comprises a 3′ exon fragment lacking the second nucleotide of a 3′ group I splice site dinucleotide.

[0055] In some embodiments, the 5′ enhanced intron element comprises, in the following order: a. a leading untranslated sequence; b. a 5′ external spacer sequence; c. a 5′ affinity sequence; and d. a 3′ intron fragment including the first and second nucleotides of a 3′ Group I splice site; wherein the leading untranslated sequence comprises the last nucleotide of a transcription start site and 1 to 100 nucleotide; and wherein the 5′ enhanced exon element comprises a 3′ exon fragment lacking the second nucleotide of a 3′ group I splice site dinucleotide.

[0056] In some embodiments, the 5′ enhanced exon element comprises a 3′ exon fragment. In some embodiments, the 3′ exon fragment further comprises the second nucleotide of a 3′ group I intron splice site dinucleotide. In some embodiments, the 3′ exon fragment comprises 1 to 100 natural nucleotides derived from a natural exon. In some embodiments, the natural exon derived from a Group I intron containing gene or a fragment thereof. In some embodiments, the natural exon derived from an Anabaena bacterium, T4 phage virus, twort bacteriophage, tetrahymena, or Azoarcus bacterium.

[0057] In some embodiments, the 5′ enhanced exon element comprises a 5′ internal spacer sequence located downstream from the 3′ exon fragment. In some embodiments, the 5′ internal spacer sequence is about 6 to 60 nucleotides in length. In some embodiments, the 5′ internal spacer sequence comprises or consists of a sequence selected from any of the ASCII tables.

[0058] In some embodiments, the 5′ enhanced exon element comprises in the following order: a. a 3′ exon fragment including the second nucleotide of a 3′ group I intron splice site dinucleotide; and b. a 5′ internal spacer sequence, wherein the 3′ exon fragment comprises 1 to 100 natural nucleotides derived from a natural exon.

[0059] In some embodiments, the 5′ enhanced exon element comprises in the following order: a. a 3′ exon fragment; and b. a 5′ internal spacer sequence, wherein the 3′ exon fragment comprises 1 to 100 natural nucleotides derived from a natural exon; and wherein the 5′ enhanced intron element comprises a 3′ intron fragment comprising the first and second nucleotides of a 3′ group I splice site dinucleotide.

[0060] In some embodiments, the 3′ enhanced exon element comprises a 5′ exon fragment. In some embodiments, the 5′ exon fragment comprises the first nucleotide of a 5′ group I intron fragment. In some embodiments, the 5′ exon fragment further comprises 1 to 100 nucleotides derived from a natural exon. In some embodiments, the natural exon is derived from a Group I intron containing gene or a fragment thereof.

[0061] In some embodiments, the 3′ enhanced exon element comprises a 3′ internal spacer sequence. In some embodiments, the 3′ internal spacer sequence is located between the termination sequence and the 5′ exon fragment. In some embodiments, the 3′ internal spacer is about 6 to 60 nucleotides in length. In some embodiments, the 3′ internal spacer comprises or consists of a sequence selected from any of the ASCII tables.

[0062] In some embodiments, the 3′ enhanced exon element comprises: a. a 3′ internal spacer sequence; and b. a 5′ exon fragment including the first nucleotide of a 5′ group I intron splice site dinucleotide, wherein the 5′ exon fragment comprises 1 to 100 nucleotides derived from a natural exon.

[0063] In some embodiments, the 3′ enhanced exon element comprises: a. a 3′ internal spacer sequence; and b. a 5′ exon fragment, wherein the 5′ exon fragment comprises 1 to 100 nucleotides derived from a natural exon; wherein the 3′ enhanced intron element comprises a 5′ intron fragment comprising the first and second nucleotide of a 5′ group I intron splice site dinucleotide.

[0064] In some embodiments, the 3′ enhanced intron element comprises a 5′ intron fragment. In some embodiments, the 5′ intron fragment comprises a second nucleotide of a 5′ group I intron splice site dinucleotide.

[0065] In some embodiments, the 3′ enhanced intron element comprises a trailing untranslated sequence located at the 3′ end of the 5′ intron. In some embodiments, the trailing untranslated sequence comprises 3 to 12 nucleotides.

[0066] In some embodiments, the 3′ enhanced intron fragment comprises a 3′ external spacer sequence. In some embodiments, the 3′ external spacer sequence is located between the 5′ intron fragment and trailing untranslated sequence. In some embodiments, the 3′ external spacer sequence has a length of 6 to 60 nucleotides in length. In some embodiments, the 3′ external spacer sequence comprises or consists of a sequence selected from any of the ASCII tables.

[0067] In some embodiments, the 3′ enhanced intron element comprises a 3′ affinity sequence. In some embodiments, the 3′ affinity sequence is located between the 3′ external spacer sequence and the trailing untranslated sequence. In some embodiments, the 3′ affinity sequence comprises a polyA, poly AC, or polypyrimidine sequence. In some embodiments, the affinity sequence comprises 10 to 100 nucleotides.

[0068] In some embodiments, the 5′ enhanced intron element further comprises a 5′ external duplex sequence; wherein the 3′ enhanced intron element further comprises a 3′ external duplex sequence. In some embodiments, the 5′ external duplex sequence and 3′ external duplex sequence are fully or partially complementary to each other. In some embodiments, the 5′ external duplex sequence comprises fully synthetic or partially synthetic nucleotides. In some embodiments, the 3′ external duplex sequence comprises fully synthetic or partially synthetic nucleotides. In some embodiments, the 3′ external duplex sequence is about 6 to about 50 nucleotides. In some embodiments, the 5′ external duplex sequence is about 6 to about 50 nucleotides. In some embodiments, the 3′ external duplex sequence comprises or consists of a sequence selected from any of the ASCII tables. In some embodiments, the 5′ external duplex sequence comprises or consists of a sequence selected from any of the ASCII tables.

[0069] In some embodiments, the 5′ enhanced exon element further comprises a 5′ internal duplex sequence; wherein the 3′ enhanced exon element further comprises a 3′ internal duplex sequence. In some embodiments, the 5′ internal duplex sequence and 3′ internal duplex sequence are fully or partially complementary to each other. In some embodiments, the 5′ internal duplex sequence comprises fully synthetic or partially synthetic nucleotides. In some embodiments, the 3′ internal duplex sequence comprises fully synthetic or partially synthetic nucleotides. In some embodiments, the 3′ internal duplex sequence is about 6 to about 19 nucleotides. In some embodiments, the 5′ internal duplex sequence is about 6 to about 19 nucleotides. In some embodiments, the 3′ internal duplex sequence comprises or consists of a sequence selected from any of the ASCII tables. In some embodiments, the 5′ internal duplex sequence comprises or consists of a sequence selected from any of the ASCII tables.

[0070] In some embodiments, the 3′ enhanced intron fragment comprises in the following order: a. a 5′ intron fragment including the second nucleotide of a 5′ group I intron splice site dinucleotide; b. a 3′ external spacer sequence; and c. a 3′ affinity sequence.

[0071] In some embodiments, the 3′ enhanced intron fragment comprises in the following order: a. a 5′ intron fragment including the first and second nucleotide of a 5′ group I intron splice site dinucleotide; b. a 3′ external spacer sequence; and c. a 3′ affinity sequence, wherein the 3′ enhanced exon element comprises a 5′ exon fragment lacking the first nucleotide of a 5′ group I intron splice site dinucleotide.

[0072] In some embodiments, a provided precursor RNA polynucleotide comprises in the following order: a. a leading untranslated sequence; b. a 5′ affinity sequence; c. 5′ external duplex sequence; d. 5′ spacer sequence; e. 3′ intron fragment; f. 3′ exon fragment; g. 5′ internal duplex sequence; h. 5′ internal spacer sequence; i. a translation initiation element; j. a coding element; k. a termination sequence; 1. a 3′ internal spacer sequence; m. a 3′ internal duplex sequence; n. a 5′ exon fragment; o. a 5′ intron fragment; p. a 3′ external duplex sequence; q. a 3′ affinity sequence; and r. a trailing untranslated sequence.

[0073] In some embodiments, a provided precursor RNA polynucleotide comprises in the following order: a. a leading untranslated sequence; b. a 5′ affinity sequence; c. a 5′ external spacer sequence; d. a 3′ intron fragment; e. a 3′ exon fragment; f. a 5′ internal duplex sequence; g. a 5′ internal spacer sequence; h. a noncoding element; i. a 3′ internal spacer sequence; j. a 3′ internal duplex sequence; k. a 5′ exon fragment; 1. a 5′ intron fragment; m. a 3′ external spacer sequence; n. a 3′ affinity sequence; and o. a trailing untranslated sequence.

[0074] In some embodiments, a provided precursor RNA polynucleotide comprises in the following order: a. a leading untranslated sequence; b. a 5′ affinity sequence; c. a 5′ external spacer sequence; d. a 3′ intron fragment; e. a 3′ exon fragment; f. a 5′ internal duplex sequence; g. a 5′ internal spacer sequence; h. a translation initiation element; i. a coding element encoding a CAR that specifically binds to BCMA; j. a termination sequence; k. a 3′ internal spacer sequence; 1. a 3′ internal duplex sequence; m. a 5′ exon fragment; n. a 5′ intron fragment; o. a 3′ external spacer sequence; and p. a 3′ affinity sequence.

[0075] In some embodiments, a provided precursor RNA polynucleotide comprises in the following order: a. a leading untranslated sequence; b. a 5′ affinity sequence; c. a 5′ external spacer sequence; d. a 3′ intron fragment; e. a 3′ exon fragment; f. a 5′ internal spacer sequence; g. a translation initiation element; h. a coding element encoding a CAR that specifically binds to BCMA; i. a termination sequence; j. a 3′ internal spacer sequence; k. a 5′ exon fragment; 1. a 5′ intron fragment; m. a 3′ external spacer sequence; and n. a 3′ affinity sequence.

[0076] In some embodiments, a provided precursor RNA polynucleotide comprises in the following order: a. a leading untranslated sequence; b. a 5′ affinity sequence; c. a 5′ external spacer sequence; d. a 3′ intron fragment; e. a 3′ exon fragment; f. a 5′ internal spacer sequence; g. a noncoding element; h. a 3′ internal spacer sequence; i. a 5′ exon fragment; j. a 5′ intron fragment; k. a 3′ external spacer sequence; 1. a 3′ affinity sequence; and m. a trailing untranslated sequence.

[0077] In some embodiments, a provided precursor RNA polynucleotide comprises in the following order: a. a leading untranslated sequence; b. a 5′ affinity sequence; c. 5′ external duplex sequence; d. 5′ spacer sequence; e. 3′ intron fragment; f. 3′ exon fragment; g. 5′ internal duplex sequence; h. 5′ internal spacer sequence; i. a termination sequence; j. a coding element encoding a CAR that specifically binds to BCMA; k. a translation initiation element; 1. a 3′ internal spacer sequence; m. a 3′ internal duplex sequence; n. a 5′ exon fragment; o. a 5′ intron fragment; p. a 3′ external duplex sequence; q. a 3′ affinity sequence; and r. a trailing untranslated sequence.

[0078] In some embodiments, the coding element comprises two or more protein coding regions. In some embodiments, the precursor RNA polynucleotide comprises a polynucleotide sequence encoding a proteolytic cleavage site or a ribosomal stuttering element between the first and second expression sequence. In some embodiments, the ribosomal stuttering element is a self-cleaving spacer. In some embodiments, the precursor RNA polynucleotide comprises a polynucleotide sequence encoding 2A ribosomal stuttering peptide.

[0079] In some embodiments, the core functional element comprises two or more internal ribosome entry sites (IRESs). In some embodiments, the core functional element comprises a TIE, a coding element, a termination sequence, optionally a spacer, a TIE, a coding element, and a termination sequence, wherein the TIE comprises an IRES.

[0080] Also provided herein are circular RNA polynucleotides produced from the precursor RNA polynucleotides provided herein. In some embodiments, the precursor RNA polynucleotide is transcribed from a vector or DNA comprising a PCR product, a linearized plasmid, non-linearized plasmid, linearized minicircle, a non-linearized minicircle, viral vector, cosmid, ceDNA, or an artificial chromosome. In some embodiments, the circular RNA polynucleotide consists of natural nucleotides. In some embodiments, the protein coding or non-coding sequence is codon optimized. In some embodiments, the circular RNA polynucleotide is from about 0.1 to about 15 kilobases in length. In some embodiments, the circular RNA polynucleotide is optimized to lack at least one microRNA binding site present in an equivalent pre-optimized polynucleotide. In some embodiments, the circular RNA polynucleotide is optimized to lack at least one RNA-editing susceptible site present in an equivalent pre-optimized polynucleotide. In some embodiments, the circular RNA polynucleotide has an in vivo duration of therapeutic effect in humans of at least 20 hours. In some embodiments, the circular RNA polynucleotide has a functional half-life of at least 6 hours. In some embodiments, the circular RNA polynucleotide has a duration of therapeutic effect in a human cell greater than or equal to that of an equivalent linear RNA polynucleotide comprising the same expression sequence. In some embodiments, the circular RNA polynucleotide has an in vivo duration of therapeutic effect in human greater than that of an equivalent linear RNA polynucleotide having the same expression sequence.

[0081] Also provided herein is a method of making a translation initiation element (TIE) comprising: a. obtaining a viral untranslated region (UTR); b. determining the functional unit of the UTR capable of binding to an initiation factor and/or initiating translation by progressively deleting sequence; c. removing non-functional units of the UTR; and optionally, modifying the ends of the UTR. In some embodiments, the modification of the ends of the UTR is about 1 percent to 75% of the viral UTR. In some embodiments, the functional unit of UTR is determined by deletion scanning from the 5′ and 3′ ends of the UTR or mutational scanning across the length of the UTR to identify important regions.

[0082] Also provided herein is a pharmaceutical composition comprising a circular RNA polynucleotide provided herein, a nanoparticle, and optionally, a targeting moiety operably connected to the nanoparticle. In some embodiments, the nanoparticle is a lipid nanoparticle, a core-shell nanoparticle, a biodegradable nanoparticle, a biodegradable lipid nanoparticle, a polymer nanoparticle, a polyplex or a biodegradable polymer nanoparticle. In some embodiments, the pharmaceutical composition comprises a targeting moiety, wherein the targeting moiety mediates receptor-mediated endocytosis, endosome fusion, or direct fusion into selected cells of a selected cell population or tissue in the absence of cell isolation or purification. In some embodiments, the pharmaceutical composition comprises a targeting moiety operably connected to the nanoparticle. In some embodiments, the targeting moiety is a small molecule, scFv, nanobody, peptide, cyclic peptide, di or tri cyclic peptide, minibody, polynucleotide aptamer, engineered scaffold protein, heavy chain variable region, light chain variable region, or a fragment thereof. In some embodiments, less than 1%, by weight, of the polynucleotides in the composition are double stranded RNA, DNA splints, DNA template, or triphosphorylated RNA. In some embodiments, less than 1%, by weight, of the polynucleotides and proteins in the pharmaceutical composition are double stranded RNA, DNA splints, DNA template, triphosphorylated RNA, phosphatase proteins, protein ligases, RNA polymerases, and capping enzymes.

[0083] Also provided herein is a pharmaceutical composition comprising a circular RNA polynucleotide provided herein and a liposome, dendrimer, carbohydrate carrier, glycan nanomaterial, fusome, exosome, or a combination thereof.

[0084] Also provided herein is a pharmaceutical composition a circular RNA polynucleotide provided herein and a pharmaceutical salt, buffer, diluent or combination thereof.

[0085] Also provided herein is a method of treating a subject in need thereof comprising administering a therapeutically effective amount of a composition comprising the circular RNA polynucleotide provided herein, a nanoparticle, and optionally, a targeting moiety operably connected to the nanoparticle. In some embodiments, the targeting moiety is a small molecule, scFv, nanobody, peptide, cyclic peptide, di or tri cyclic peptide, minibody, heavy chain variable region, engineered scaffold protein, light chain variable region or fragment thereof. In some embodiments, the nanoparticle is a lipid nanoparticle, a core-shell nanoparticle, or a biodegradable nanoparticle. In some embodiments, the nanoparticle comprises one or more cationic lipids, ionizable lipids, or poly β-amino esters. In some embodiments, the nanoparticle comprises one or more non-cationic lipids. In some embodiments, the nanoparticle comprises one or more PEG-modified lipids, polyglutamic acid lipids, or hyaluronic acid lipids. In some embodiments, the nanoparticle comprises cholesterol. In some embodiments, the nanoparticle comprises arachidonic acid, leukotriene, or oleic acid. In some embodiments, the composition comprises a targeting moiety, wherein the targeting moiety mediates receptor-mediated endocytosis selectively into cells of a selected cell population in the absence of cell selection or purification. In some embodiments, the nanoparticle comprises more than one circular RNA polynucleotide. In some embodiments, the subject has a cancer selected from the group consisting of: acute myeloid leukemia (AML); alveolar rhabdomyosarcoma; B cell malignancies; bladder cancer (e.g., bladder carcinoma); bone cancer; brain cancer (e.g., medulloblastoma and glioblastoma multiforme); breast cancer; cancer of the anus, anal canal, or anorectum; cancer of the eye; cancer of the intrahepatic bile duct; cancer of the joints; cancer of the neck; gallbladder cancer; cancer of the pleura; cancer of the nose, nasal cavity, or middle ear; cancer of the oral cavity; cancer of the vulva; chronic lymphocytic leukemia; chronic myeloid cancer; colon cancer; esophageal cancer, cervical cancer; fibrosarcoma; gastrointestinal carcinoid tumor; head and neck cancer (e.g., head and neck squamous cell carcinoma); Hodgkin lymphoma; hypopharynx cancer; kidney cancer; larynx cancer; leukemia; liquid tumors; lipoma; liver cancer; lung cancer (e.g., non-small cell lung carcinoma, lung adenocarcinoma, and small cell lung carcinoma); lymphoma; mesothelioma; mastocytoma; melanoma; multiple myeloma; nasopharynx cancer; non-Hodgkin lymphoma; B-chronic lymphocytic leukemia; hairy cell leukemia; Burkitt's lymphoma; ovarian cancer; pancreatic cancer; cancer of the peritoneum; cancer of the omentum; mesentery cancer; pharynx cancer; prostate cancer; rectal cancer; renal cancer; skin cancer; small intestine cancer; soft tissue cancer; solid tumors; synovial sarcoma; gastric cancer; teratoma; testicular cancer; thyroid cancer; and ureter cancer. In some embodiments, the subject has an autoimmune disorder selected from scleroderma, Grave's disease, Crohn's disease, Sjogren's disease, multiple sclerosis, Hashimoto's disease, psoriasis, myasthenia gravis, autoimmune polyendocrinopathy syndromes, Type I diabetes mellitus (TIDM), autoimmune gastritis, autoimmune uveoretinitis, polymyositis, colitis, thyroiditis, and the generalized autoimmune diseases typified by human Lupus.

[0086] Also provided herein is a eukaryotic cell comprising a circular RNA polynucleotide or pharmaceutical composition provided herein. In some embodiments, the eukaryotic cell is a human cell. In some embodiments, the eukaryotic cell is an immune cell. In some embodiments, the eukaryotic cell is a T cell, dendritic cell, macrophage, B cell, neutrophil, or basophil.

[0087] Also provided herein is a prokaryotic cell comprising a circular RNA polynucleotide provided herein.

[0088] In another aspect, provided herein are methods of purifying circular RNA, comprising hybridizing an oligonucleotide conjugated to a solid surface with an affinity sequence.

[0089] In some embodiments, one or more copies of the affinity sequence is present in a precursor RNA. In some embodiments, the precursor RNA is the precursor described herein. In some embodiments, the circular RNA is the circular RNA described herein. In some embodiments, the affinity sequence is removed during formation of the circular RNA. In some embodiments, the method comprises separating the circular RNA from the precursor RNA.

[0090] In some embodiments, the affinity sequence comprises a polyA sequence. In some embodiments, the oligonucleotide that hybridizes to the affinity sequence is a deoxythymidine oligonucleotide. In some embodiments, the affinity sequence comprises a dedicated binding site (DBS). In some embodiments, the DBS comprises the nucleotide sequence of: of TATAATTCTACCCTATTGAGGCATTGACTA (SEQ ID NO: 3667). In some embodiments, the oligonucleotide that hybridizes to the affinity sequence comprises a sequence complementary to the DBS.

[0091] In another aspect, provided herein are methods of purifying circular RNA comprising: a. contacting a composition comprising linear RNA and circular RNA with a binding agent that preferentially binds to the linear RNA over the circular RNA; and b. separating RNA bound to the binding agent from RNA that is not bound to the binding agent.

[0092] In some embodiments, the binding agent is conjugated to a solid support. In some embodiments, the solid support comprises agarose, an agarose-derived resin, cellulose, a cellulose fiber, a magnetic bead, a high throughput microtiter plate, a non-agarose resin, a glass surface, a polymer surface, or a combination thereof. In some embodiments, the solid support comprises agarose or cellulose.

[0093] In some embodiments, the binding agent comprises an oligonucleotide that is complementary to a sequence present in the linear RNA and absent from the circular RNA. In some embodiments, the binding agent comprises an oligonucleotide that is 100% complementary to a sequence present in the linear RNA and absent from the circular RNA. In some embodiments, the sequence present in the linear RNA and absent from the circular RNA is an affinity sequence. In some embodiments, the sequence present in the linear RNA and absent from the circular RNA comprises a polyA sequence. In some embodiments, the binding agent comprises an oligonucleotide comprising a poly-deoxythymidine sequence. In some embodiments, the sequence present in the linear RNA and absent from the circular RNA comprises a DBS sequence. In some embodiments, the DBS sequence comprises the nucleotide sequence of: of TATAATTCTACCCTATTGAGGCATTGACTA (SEQ ID NO: 3667). In some embodiments, the sequence present in the linear RNA and absent from the circular RNA is 10-150 nucleotides in length. In some embodiments, the sequence present in the linear RNA and absent from the circular RNA is 10-70 nucleotides in length. In some embodiments, the sequence present in the linear RNA and absent from the circular RNA is 20-30 nucleotides in length. In some embodiments, the sequence present in the linear RNA and absent from the circular RNA is present at two locations in the linear RNA. In some embodiments, the sequence present in the linear RNA and absent from the circular RNA is encoded into the linear RNA during transcription of the linear RNA. In some embodiments, the sequence present in the linear RNA and absent from the circular RNA is enzymatically added to the linear RNA. In some embodiments, the linear RNA does not comprise a methylguanylate cap. In some embodiments, the linear RNA comprises a precursor RNA or a fragment thereof.

[0094] In some embodiments, the precursor RNA is the precursor RNA described herein or a fragment thereof. In some embodiments, the precursor RNA is produced using in vitro transcription (IVT). In some embodiments, the fragment comprises an intron. In some embodiments, the linear RNA comprises a prematurely terminated RNA or RNA formed by abortive transcription.

[0095] In some embodiments, the circular RNA comprises the circular RNA described herein. In some embodiments, the circular RNA is produced using a method comprising splicing the precursor RNA. In some embodiments, the sequence present in the linear RNA and absent from the circular RNA is excised during the splicing. In some embodiments, the circular RNA is less than 6 kilobases in size.

[0096] In some embodiments, the separating comprises removing the unbound RNA from the solid support. In some embodiments, the removing comprises eluting the unbound RNA from the solid support.

[0097] In some embodiments, the method comprises heating the composition. In some embodiments, the method comprises buffer exchange. In some embodiments, buffer exchange is performed before the contacting. In some embodiments, buffer exchange is performed after the separating. In some embodiments, buffer exchange is performed before the contacting, and the resulting buffer comprises greater than 1 mM monovalent salt. In some embodiments, the monovalent salt is NaCl or KCl. In some embodiments, the resulting buffer comprises Tris. In some embodiments, the resulting buffer comprises EDTA. In some embodiments, buffer exchange is performed after the separating into storage buffer, wherein the storage buffer comprises 1 mM sodium citrate, pH 6.5. In some embodiments, the method comprises filtering the circular RNA after the separating.

### BRIEF DESCRIPTION OF THE DRAWINGS

[0098] FIGS. 1A-1E depict luminescence in supernatants of HEK293 (FIGS. 1A, 1D, and 1E), HepG2 (FIG. 1B), or 1C1C7 (FIG. 1C) cells 24 hours after transfection with circular RNA comprising a Gaussia luciferase expression sequence and various IRES sequences.

[0099] FIGS. 2A-2C depict luminescence in supernatants of HEK293 (FIG. 2A), HepG2 (FIG. 2B), or 1C1C7 (FIG. 2C) cells 24 hours after transfection with circular RNA comprising a Gaussia luciferase expression sequence and various IRES sequences having different lengths.

[0100] FIGS. 3A and 3B depict stability of select IRES constructs in HepG2 (FIG. 3A) or 1C1C7 (FIG. 3B) cells over 3 days as measured by luminescence.

[0101] FIGS. 4A and 4B depict protein expression from select IRES constructs in Jurkat cells, as measured by luminescence from secreted Gaussia luciferase in cell supernatants.

[0102] FIGS. 5A and 5B depict stability of select IRES constructs in Jurkat cells over 3 days as measured by luminescence.

[0103] FIGS. 6A and 6B depict comparisons of 24 hour luminescence (FIG. 6A) or relative luminescence over 3 days (FIG. 6B) of modified linear, unpurified circular, or purified circular RNA encoding Gaussia luciferase.

[0104] FIGS. 7A-7F depict transcript induction of IFNγ (FIG. 7A), IL-6 (FIG. 7B), IL-2 (FIG. 7C), RIG-I (FIG. 7D), IFN-β1 (FIG. 7E), and TNFα (FIG. 7F) after electroporation of Jurkat cells with modified linear, unpurified circular, or purified circular RNA.

[0105] FIGS. 8A-8C depict a comparison of luminescence of circular RNA and modified linear RNA encoding Gaussia luciferase in human primary monocytes (FIG. 8A) and macrophages (FIG. 8B and FIG. 8C).

[0106] FIGS. 9A-9B depicts relative luminescence over 3 days (FIG. 9A) in supernatant of primary T cells after transduction with circular RNA comprising a Gaussia luciferase expression sequence and varying IRES sequences or 24 hour luminescence (FIG. 9B).

[0107] FIGS. 10A-10C depict 24 hour luminescence in supernatant of primary T cells (FIG. 10A) after transduction with circular RNA or modified linear RNA comprising a Gaussia luciferase expression sequence, or relative luminescence over 3 days (FIG. 10B), and 24 hour luminescence in PBMCs (FIG. 10C).

[0108] FIGS. 11A and 11B depict HPLC chromatograms (FIG. 11A) and circularization efficiencies (FIG. 11B) of RNA constructs having different permutation sites.

[0109] FIGS. 12A and 12B depict HPLC chromatograms (FIG. 12A) and circularization efficiencies (FIG. 12B) of RNA constructs having different introns and/or permutation sites.

[0110] FIGS. 13A and 13B depict HPLC chromatograms (FIG. 13A) and circularization efficiencies (FIG. 13B) of 3 RNA constructs with or without homology arms.

[0111] FIG. 14 depicts circularization efficiencies of 3 RNA constructs without homology arms or with homology arms having various lengths and GC content.

[0112] FIGS. 15A and 15B depict HPLC HPLC chromatograms showing the contribution of strong homology arms to improved splicing efficiency, the relationship between circularization efficiency and nicking in select constructs, and combinations of permutations sites and homology arms hypothesized to demonstrate improved circularization efficiency.

[0113] FIG. 16 shows fluorescent images of T cells mock electroporated (left) or electroporated with circular RNA encoding a CAR (right) in co-cultured with Raji cells expressing GFP and firefly luciferase.

[0114] FIG. 17 shows bright field (left), fluorescent (center), and overlay (right) images of T cells mock electroporated (top) or electroporated with circular RNA encoding a CAR (bottom) and co-cultured with Raji cells expressing GFP and firefly luciferase.

[0115] FIG. 18 depicts specific lysis of Raji target cells by T cells mock electroporated or electroporated with circular RNA encoding different CAR sequences.

[0116] FIGS. 19A and 19B depict luminescence in supernatants of Jurkat cells (left) or resting primary human CD3+ T cells (right) 24 hours after transduction with linear or circular RNA comprising a Gaussia luciferase expression sequence and varying IRES sequences (FIG. 19A), and relative luminescence over 3 days (FIG. 19B).

[0117] FIGS. 20A-20F depict transcript induction of IFN-β1 (FIG. 20A), RIG-I (FIG. 20B), IL-2 (FIG. 20C), IL-6 (FIG. 20D), IFNγ (FIG. 20E), and TNFα (FIG. 20F) after electroporation of human CD3+ T cells with modified linear, unpurified circular, or purified circular RNA.

[0118] FIGS. 21A and 21B depict specific lysis of Raji target cells by human primary CD3+ T cells electroporated with circRNA encoding a CAR as determined by detection of firefly luminescence (FIG. 21A), and IFNγ transcript induction 24 hours after electroporation with different quantities of circular or linear RNA encoding a CAR sequence (FIG. 21B).

[0119] FIGS. 22A and 22B depict specific lysis of target or non-target cells by human primary CD3+ T cells electroporated with circular or linear RNA encoding a CAR at different E:T ratios (FIG. 22A and FIG. 22B) as determined by detection of firefly luminescence.

[0120] FIG. 23 depicts specific lysis of target cells by human CD3+ T cells electroporated with RNA encoding a CAR at 1, 3, 5, and 7 days post electroporation.

[0121] FIG. 24 depicts specific lysis of target cells by human CD3+ T cells electroporated with circular RNA encoding a CD19 or BCMA targeted CAR.

[0122] FIG. 25 depicts total Flux of organs harvested from CD-1 mice dosed with circular RNA encoding FLuc and formulated with 50% Lipid 10b-15, 10% DSPC, 1.5% PEG-DMG, and 38.5% cholesterol.

[0123] FIG. 26 shows images highlighting the luminescence of organs harvested from CD-1 mice dosed with circular RNA encoding FLuc and formulated with 50% Lipid 10b-15, 10% DSPC, 1.5% PEG-DMG, and 38.5% cholesterol.

[0124] FIGS. 27A-27F depict molecular characterization of Lipids 10a-26 and 10a-27. FIG. 27A shows the proton nuclear magnetic resonance (NMR) spectrum of Lipid Lipid 10a-26. FIG. 27B shows the retention time of Lipid 10a-26 measured by liquid chromatography-mass spectrometry (LC-MS). FIG. 27C shows the mass spectrum of Lipid 10a-26. FIG. 27D shows the proton NMR spectrum of Lipid 10a-27. FIG. 27E shows the retention time of Lipid 10a-27 measured by LC-MS. FIG. 27F shows the mass spectrum of Lipid 10a-27.

[0125] FIGS. 28A-28C depict molecular characterization of Lipid 22-S14 and its synthetic intermediates. FIG. 28A depicts the NMR spectrum of 2-(tetradecylthio)ethan-1-ol. FIG. 28B depicts the NMR spectrum of 2-(tetradecylthio)ethyl acrylate. FIG. 28C depicts the NMR spectrum of bis(2-(tetradecylthio)ethyl) 3,3′-((3-(2-methyl-1H-imidazol-1-yl)propyl)azanediyl)dipropionate (Lipid 22-S14).

[0126] FIG. 29 depicts the NMR spectrum of bis(2-(tetradecylthio)ethyl) 3,3′-((3-(1H-imidazol-1-yl)propyl)azanediyl)dipropionate (Lipid 93-S14).

[0127] FIGS. 30A-30C depict molecular characterization of heptadecan-9-yl 8-((3-(2-methyl-1H-imidazol-1-yl)propyl)(8-(nonyloxy)-8-oxooctyl)amino)octanoate (Lipid 10a-54). FIG. 30A shows the proton NMR spectrum of Lipid 10a-54. FIG. 30B shows the retention time of Lipid 10a-54 measured by LC-MS. FIG. 30C shows the mass spectrum of Lipid 10a-54.

[0128] FIGS. 31A-31C depict molecular characterization of heptadecan-9-yl 8-((3-(1H-imidazol-1-yl)propyl)(8-(nonyloxy)-8-oxooctyl)amino)octanoate (Lipid 10a-53). FIG. 31A shows the proton NMR spectrum of Lipid 10a-53. FIG. 31B shows the retention time of Lipid 10a-53 measured by LC-MS. FIG. 31C shows the mass spectrum of Lipid 10a-53.

[0129] FIG. 32A depicts total flux of spleen and liver harvested from CD-1 mice dosed with circular RNA encoding firefly luciferase (FLuc) and formulated with ionizable lipid of interest, DSPC, cholesterol, and DSPE-PEG 2000 (Avanti Polar Lipids Inc.) at a weight ratio of 16:1:4:1 or 62:4:33:1 molar ratio. FIG. 32B depicts average radiance for biodistribution of protein expression.

[0130] FIG. 33A depicts images highlighting the luminescence of organs harvested from CD-1 mice dosed with circular RNA encoding FLuc and formulated with ionizable Lipid 22-514, DSPC, cholesterol, and DSPE-PEG 2000 (Avanti Polar Lipids Inc.) at a weight ratio of 16:1:4:1 or 62:4:33:1 molar ratio. FIG. 33B depicts whole body IVIS images of CD-1 mice dosed with circular RNA encoding FLuc and formulated with ionizable Lipid 22-S14, DSPC, cholesterol, and DSPE-PEG 2000 (Avanti Polar Lipids Inc.) at a weight ratio of 16:1:4:1 or 62:4:33:1 molar ratio.

[0131] FIG. 34A depicts images highlighting the luminescence of organs harvested from CD-1 mice dosed with circular RNA encoding FLuc and formulated with ionizable Lipid 93-S14, DSPC, cholesterol, and DSPE-PEG 2000 (Avanti Polar Lipids Inc.) at a weight ratio of 16:1:4:1 or 62:4:33:1 molar ratio. FIG. 34B depicts whole body IVIS images of CD-1 mice dosed with circular RNA encoding FLuc and formulated with ionizable Lipid 93-S14, DSPC, cholesterol, and DSPE-PEG 2000 (Avanti Polar Lipids Inc.) at a weight ratio of 16:1:4:1 or 62:4:33:1 molar ratio.

[0132] FIG. 35A depicts images highlighting the luminescence of organs harvested from CD-1 mice dosed with circular RNA encoding FLuc and formulated with ionizable Lipid 10a-26, DSPC, cholesterol, and DSPE-PEG 2000 (Avanti Polar Lipids Inc.) at a weight ratio of 16:1:4:1 or 62:4:33:1 molar ratio. FIG. 35B depicts whole body IVIS images of CD-1 mice dosed with circular RNA encoding FLuc and formulated with ionizable Lipid 10a-26, DSPC, cholesterol, and DSPE-PEG 2000 (Avanti Polar Lipids Inc.) at a weight ratio of 16:1:4:1 or 62:4:33:1 molar ratio.

[0133] FIGS. 36A-36D depict images highlighting the luminescence of organs harvested from c57BL/6J mice dosed with circular RNA encoding FLuc and encapsulated in lipid nanoparticles formed with Lipid 10b-15 (FIG. 36A), Lipid 10a-53 (FIG. 36B), or Lipid 10a-54 (FIG. 36C). PBS was used as control (FIG. 36D).

[0134] FIGS. 37A and 37B depict relative luminescence in the lysates of human PBMCs after 24-hour incubation with testing lipid nanoparticles containing circular RNA encoding firefly luciferase.

[0135] FIGS. 38A and 38B show the expression of GFP (FIG. 38A) and CD19 CAR (FIG. 38B) in human PBMCs after incubating with testing lipid nanoparticle containing circular RNA encoding either GFP or CD19 CAR.

[0136] FIG. 39 depicts the expression of an anti-murine CD19 CAR in 1C1C7 cells lipotransfected with circular RNA comprising an anti-murine CD19 CAR expression sequence and varying IRES sequences.

[0137] FIG. 40 shows the cytotoxicity of an anti-murine CD19 CAR to murine T cells. The CD19 CAR is encoded by and expressed from a circular RNA, which is electroporated into the murine T cells.

[0138] FIGS. 41A-41C depict the B cell counts in peripheral blood (FIGS. 40A and 40B) or spleen (FIG. 40C) in C57BL/6J mice injected every other day with testing lipid nanoparticles encapsulating a circular RNA encoding an anti-murine CD19 CAR.

[0139] FIGS. 42A and 42B compare the expression level of an anti-human CD19 CAR expressed from a circular RNA with that expressed from a linear mRNA.

[0140] FIGS. 43A and 43B compare the cytotoxic effect of an anti-human CD19 CAR expressed from a circular RNA with that expressed from a linear mRNA

[0141] FIG. 44 depicts the cytotoxicity of two CARs (anti-human CD19 CAR and anti-human BCMA CAR) expressed from a single circular RNA in T cells.

[0142] FIG. 45A shows representative FACS plots with frequencies of tdTomato expression in various spleen immune cell subsets following treatment with LNPs formed with Lipid 10a-27 or 10a-26 or Lipid 10b-15. FIG. 45B shows the quantification of the proportion of myeloid cells, B cells, and T cells expressing tdTomato (mean+std. dev., n=3), equivalent to the proportion of each cell population successfully transfected with Cre circular RNA. FIG. 45C illustrates the proportion of additional splenic immune cell populations, including NK cells, classical monocytes, nonclassical monocytes, neutrophils, and dendritic cells, expressing tdTomato after treatment with Lipids 27 and 26 (mean+std. dev., n=3).

[0143] FIG. 46A depicts an exemplary RNA construct design with built-in polyA sequences in the introns. FIG. 46B shows the chromatography trace of unpurified circular RNA. FIG. 46C shows the chromatography trace of affinity-purified circular RNA. FIG. 46D shows the immunogenicity of the circular RNAs prepared with varying in vitro transcription (IVT) conditions and purification methods. (Commercial=commercial IVT mix; Custom=customerized IVT mix; Aff=affinity purification; Enz=enzyme purification; GMP:GTP ratio=8, 12.5, or 13.75).

[0144] FIG. 47A depicts an exemplary RNA construct design with a dedicated binding sequence of TATAATTCTACCCTATTGAGGCATTGACTA (SEQ ID NO: 3667) as an alternative to polyA for hybridization purification. FIG. 47B shows the chromatography trace of unpurified circular RNA. FIG. 47C shows the chromatography trace of affinity-purified circular RNA.

[0145] FIG. 48A shows the chromatography trace of unpurified circular RNA encoding dystrophin. FIG. 48B shows the chromatography trace of enzyme-purified circular RNA encoding dystrophin.

[0146] FIGS. 49A and 49B compare the expression (FIG. 49A) and stability (FIG. 49B) of purified circRNAs with different 5′ spacers between the 3′ intron fragment/5′ internal duplex region and the IRES in Jurkat cells. (AC=only A and C were used in the spacer sequence; UC=only U and C were used in the spacer sequence.)

[0147] FIG. 50 shows luminescence expression levels and stability of expression in primary T cells from circular RNAs containing the original or modified IRES elements indicated.

[0148] FIG. 51 shows luminescence expression levels and stability of expression in HepG2 cells from circular RNAs containing the original or modified IRES elements indicated.

[0149] FIG. 52 shows luminescence expression levels and stability of expression in 1C1C7 cells from circular RNAs containing the original or modified IRES elements indicated.

[0150] FIG. 53 shows luminescence expression levels and stability of expression in HepG2 cells from circular RNAs containing IRES elements with untranslated regions (UTRs) inserted or hybrid IRES elements. “Scr” means Scrambled, which was used as a control.

[0151] FIG. 54 shows luminescence expression levels and stability of expression in 1C1C7 cells from circular RNAs containing an IRES and variable stop codon cassettes operably linked to a Gaussia luciferase coding sequence.

[0152] FIG. 55 shows luminescence expression levels and stability of expression in 1C1C7 cells from circular RNAs containing an IRES and variable untranslated regions (UTRs) inserted before the start codon of a gaussian luciferase coding sequence.

[0153] FIG. 56 shows expression levels of human erythropoietin (hEPO) in Huh7 cells from circular RNAs containing two miR-122 target sites downstream from the hEPO coding sequence.

[0154] FIG. 57 shows luminescence expression levels in SupT1 cells (from a human T cell tumor line) and MV4-11 cells (from a human macrophage line) from LNPs transfected with circular RNAs encoding for Firefly luciferase in vitro.

[0155] FIG. 58 shows a comparison of transfected primary human T cells LNPs containing circular RNAs dependency of ApoE based on the different helper lipid, PEG lipid, and ionizable lipid:phosphate ratio formulations.

[0156] FIG. 59 shows uptake of LNP containing circular RNAs encoding eGFP into activated primary human T cells with or without the aid of ApoE3.

[0157] FIG. 60 shows immune cell expression from a LNP containing circular RNA encoding for a Cre fluorescent protein in a Cre reporter mouse model.

[0158] FIG. 61 shows immune cell expression of mOX40L in wildtype mice following intravenous injection of LNPs that have been transfected with circular RNAs encoding mOX40L.

[0159] FIGS. 62A-62C show single dose of mOX40L in LNPs transfected with circular RNAs capable of expressing mOX40L. FIGS. 62A and 62B provide percent of mOX40L expression in splenic T cells, CD4+ T cells, CD8+ T cells, B cells, NK cells, dendritic cells, and other myloid cells. FIG. 62C provides mouse weight change 24 hours after transfection.

[0160] FIGS. 63A-63C show B cell depletion of LNPs transfected intravenously with circular RNAs in mice. FIG. 63A quantifies B cell depletion through B220+ B cells of live, CD45+ immune cells and FIG. 63B compares B cell depletion of B220+ B cells of live, CD45+ immune cells in comparison to luciferase expressing circular RNAs. FIG. 63C provides B cell weight gain of the transfected cells.

[0161] FIGS. 64A and 64B show CAR expression levels in the peripheral blood (FIG. 64A) and spleen (FIG. 64B) when treated with LNP encapsulating circular RNA that expresses anti-CD19 CAR. Anti-CD20 (aCD20) and circular RNA encoding luciferase (oLuc) were used for comparison.

[0162] FIGS. 65A-65C show the overall frequency of anti-CD19 CAR expression, the frequency of anti-CD19 CAR expression on the surface of cells and effect on anti-tumor response of IRES specific circular RNA encoding anti-CD19 CARs on T-cells. FIG. 65A shows anti-CD19 CAR geometric mean florescence intensity, FIG. 65B shows percentage of anti-CD19 CAR expression, and FIG. 65C shows the percentage target cell lysis performed by the anti-CD19 CAR. (CK=Caprine Kobuvirus; AP=Apodemus Picornavirus; CK*=Caprine Kobuvirus with codon optimization; PV=Parabovirus; SV=Salivirus.)

[0163] FIG. 66 shows CAR expression levels of A20 FLuc target cells when treated with IRES specific circular RNA constructs.

[0164] FIGS. 67A and 67B show luminescence expression levels for cytosolic (FIG. 67A) and surface (FIG. 67B) proteins from circular RNA in primary human T-cells.

[0165] FIGS. 68A-68F show luminescence expression in human T-cells when treated with IRES specific circular constructs. Expression in circular RNA constructs were compared to linear mRNA. FIG. 68A, FIG. 68B, and FIG. 68G provide Gaussia luciferase expression in multiple donor cells. FIG. 68C, FIG. 68D, FIG. 68E, and FIG. 68F provides firefly luciferase expression in multiple donor cells.

[0166] FIGS. 69A and 69B show anti-CD19 CAR (FIG. 69A and FIG. 69B) and anti-BCMA CAR (FIG. 69B) expression in human T-cells following treatment of a lipid nanoparticle encompassing a circular RNA that encodes either an anti-CD19 or anti-BCMA CAR to a firefly luciferase expressing K562 cell.

[0167] FIGS. 70A and 70B show anti-CD19 CAR expression levels resulting from delivery via electroporation in vitro of a circular RNA encoding an anti-CD19 CAR in a specific antigen-dependent manner. FIG. 70A shows Nalm6 cell lysing with an anti-CD19 CAR. FIG. 70B shows K562 cell lysing with an anti-CD19 CAR.

[0168] FIGS. 71A-71E show transfection of LNP mediated by use of ApoE3 in solutions containing LNP and circular RNA expressing green fluorescence protein (GFP). FIG. 71A showed the live-dead results. FIG. 71B, FIG. 71C, FIG. 71D, and FIG. 71E provide the frequency of expression for multiple donors.

[0169] FIG. 72A, FIG. 72B, FIG. 72C, FIG. 72D, FIG. 72E, FIG. 72F, FIG. 72G, FIG. 72H, FIG. 72I, FIG. 72J, FIG. 72K, and FIG. 72L show total flux and precent expression for varying lipid formulations. See Example 74.

[0170] FIGS. 73A-73C show circularization efficiency of an RNA molecule encoding a stabilized (double proline mutant) SARS-CoV2 spike protein. FIG. 73A shows the in vitro transcription product of the ˜4.5 kb SARS-CoV2 spike-encoding circRNA. FIG. 73B shows a histogram of spike protein surface expression via flow cytometry after transfection of spike-encoding circRNA into 293 cells. Transfected 293 cells were stained 24 hours after transfection with CR3022 primary antibody and APC-labeled secondary antibody. FIG. 73C shows a flow cytometry plot of spike protein surface expression on 293 cells after transfection of spike-encoding circRNA. Transfected 293 cells were stained 24 hours after transfection with CR3022 primary antibody and APC-labeled secondary antibody.

[0171] FIG. 74 provides multiple controlled adjuvant strategies. CircRNA as indicated on the figure entails an unpurified sense circular RNA splicing reaction using GTP as an indicator molecule in vitro. 3p-circRNA entails a purified sense circular RNA as well as a purified antisense circular RNA mixed containing triphosphorylated 5′ termini. Bars show in vivo cytokine response to formulated circRNA generated using the indicated strategy.

[0172] FIGS. 75A-75C illustrate an intramuscular delivery of LNP containing circular RNA constructs. FIG. 75A provides a live whole body flux post a 6 hour period and 75B provides whole body IVIS 6 hours following a 1 μg dose of the LNP-circular RNA construct. FIG. 75C provides an ex vivo expression distribution over a 24-hour period.

[0173] FIGS. 76A and 76B illustrate expression of multiple circular RNAs from a single lipid formulation. FIG. 76A provides hEPO titers from a single and mixed set of LNP containing circular RNA constructs, while FIG. 76B provides total flux of bioluminescence expression from single or mixed set of LNP containing circular RNA constructs.

[0174] FIGS. 77A-77C illustrate SARS-CoV2 spike protein expression of circular RNA encoding spike SARS-CoV2 proteins. FIG. 77A shows frequency of spike CoV2 expression; FIG. 77B shows geometric mean fluorescence intensity (gMFI) of the spike CoV2 expression; and FIG. 77C compares gMFI expression of the construct to the frequency of expression.

[0175] FIG. 78 depicts a general sequence construct of a linear RNA polynucleotide precursor (10). The sequence as provided is illustrated in a 5′ to 3′ order of a 5′ enhanced intron element (20), a 5′ enhanced exon element (30), a core functional element (40), a 3′ enhanced exon element (50) and a 3′ enhanced intron element (60).

[0176] FIG. 79 depicts various exemplary iterations of the 5′ enhanced exon element (20). As illustrated, one iteration of the 5′ enhanced exon element (20) comprises in a 5′ to 3′ order in the following order: a leading untranslated sequence (21), a 5′ affinity tag (22), a 5′ external duplex region (24), a 5′ external spacer (26), and a 3′ intron fragment (28).

[0177] FIG. 80 depicts various exemplary iterations of the 5′ enhanced exon element (30). As illustrated, one iteration of the 5′ enhanced exon element (30) comprises in a 5′ to 3′ order: a 3′ exon fragment (32), a 5′ internal duplex region (34), and a 5′ internal spacer (36).

[0178] FIG. 81 depicts various exemplary iterations of the core functional element (40). As illustrated, one iteration of the core functional element (40) comprises a TIE (42), a coding region (46) and a stop region (e.g., a stop codon or stop cassette) (48). Another iteration is illustrated to show the core functional element (47) comprising a noncoding region (47).

[0179] FIG. 82 depicts various exemplary iterations of the 3′ enhanced exon element (50). As illustrated, one of the iterations of the 3′ enhanced exon element (50) comprises, in the following 5′ to 3′ order: a 3′ internal spacer (52), a 3′ internal duplex region (54), and a 5′ exon fragment (56).

[0180] FIG. 83 depicts various exemplary iterations of the 3′ enhanced intron element (60). As illustrated, one of the iterations of the 3′ enhanced intron element (60) comprises, in the following order, a 5′ intron fragment (62), a 3′ external spacer (64), a 3′ external duplex region (66), a 3′ affinity tag (68) and a terminal untranslated sequence (69).

[0181] FIG. 84 depicts various exemplary iterations a translation initiation element (TIE) (42). TIE (42) sequence as illustrated in one iteration is solely an IRES (43). In another iteration, the TIE (42) is an aptamer (44). In two different iterations, the TIE (42) is an aptamer (44) and IRES (43) combination. In another iteration, the TIE (42) is an aptamer complex (45).

[0182] FIG. 85 illustrates an exemplary linear RNA polynucleotide precursor (10) comprising in the following 5′ to 3′ order, a leading untranslated sequence (21), a 5′ affinity tag (22), a 5′ external duplex region (24), a 5′ external spacer (26), a 3′ intron fragment (28), a 3′ exon fragment (32), a 5′ internal duplex region (34), a 5′ internal spacer (36), a TIE (42), a coding element (46), a stop region (48), a 3′ internal spacer (52), a 3′ internal duplex region (54), a 5′ exon fragment (56), a 5′ intron fragment (62), a 3′ external spacer (64), a 3′ external duplex region (66), a 3′ affinity tag (68) and a terminal untranslated sequence (69).

[0183] FIG. 86 illustrates an exemplary linear RNA polynucleotide precursor (10) comprising in the following 5′ to 3′ order, a leading untranslated sequence (21), a 5′ affinity tag (22), a 5′ external duplex region (24), a 5′ external spacer (26), a 3′ intron fragment (28), a 3′ exon fragment (32), a 5′ internal duplex region (34), a 5′ internal spacer (36), a coding element (46), a stop region (48), a TIE (42), a 3′ internal spacer (52), a 3′ internal duplex region (54), a 5′ exon fragment (56), a 5′ intron fragment (62), a 3′ external spacer (64), a 3′ external duplex region (66), a 3′ affinity tag (68) and a terminal untranslated sequence (69).

[0184] FIG. 87 illustrates an exemplary linear RNA polynucleotide precursor (10) comprising in the following 5′ to 3′ order, a leading untranslated sequence (21), a 5′ affinity tag (22), a 5′ external duplex region (24), a 5′ external spacer (26), a 3′ intron fragment (28), a 3′ exon fragment (32), a 5′ internal duplex region (34), a 5′ internal spacer (36), a noncoding element (47), a 3′ internal spacer (52), a 3′ internal duplex region (54), a 5′ exon fragment (56), a 5′ intron fragment (62), a 3′ external spacer (64), a 3′ external duplex region (66), a 3′ affinity tag (68) and a terminal untranslated sequence (69).

[0185] FIG. 88 illustrates the general circular RNA (8) structure formed post splicing. The circular RNA as depicted includes a 5′ exon element (30), a core functional element (40) and a 3′ exon element (50).

[0186] FIGS. 89A-89E illustrate the various ways an accessory element (70) (e.g., a miRNA binding site) may be included in a linear RNA polynucleotide. FIG. 89A shows a linear RNA polynucleotide comprising an accessory element (70) at the spacer regions. FIG. 89B shows a linear RNA polynucleotide comprising an accessory element (70) located between each of the external duplex regions and the exon fragments. FIG. 89C depicts an accessory element (70) within a spacer. FIG. 89D illustrates various iterations of an accessory element (70) located within the core functional element. FIG. 89E illustrates an accessory element (70) located within an internal ribosome entry site (IRES).

[0187] FIGS. 90A-90C illustrate a screening of a LNP formulated with circular RNA encoding firefly luciferase and having a TIE in primary human (FIG. 90A), mouse (FIG. 90B), and cynomolgus monkey (FIG. 90C) hepatocyte with varying dosages in vitro.

[0188] FIGS. 91A-91C illustrate a screening of a LNP formulated with circular RNA encoding firefly luciferase and having a TIE, in primary human hepatocyte from three different donors (Donor 1—FIG. 91A; Donor 2—FIG. 91B; and Donor 3—FIG. 91C) with varying dosages in vitro.

[0189] FIG. 92 illustrates in vitro expression of LNP formulated with circular RNA encoding for GFP and having a TIE, in HeLa, HEK293, and HUH7 human cell models.

[0190] FIG. 93 illustrates in vitro expression of LNP formulated with circular RNAs encoding a GFO protein and having a TIE, in primary human hepatocytes.

[0191] FIGS. 94A and 94B illustrate in vitro expression of circular RNA encoding firefly luciferase and having a TIE, in mouse myoblast (FIG. 94A) and primary human muscle myoblast (FIG. 94B) cells.

[0192] FIGS. 95A and 95B illustrate in vitro expression of circular RNA encoding for firefly luciferase and having a TIE, in myoblasts and differentiated primary human skeletal muscle myotubes. FIG. 95A provides the data related to cells received from human donor 1; FIG. 95B provides the data related to cell received from human donor 2.

[0193] FIGS. 96A and 96B illustrate cell-free in vitro translation of circular RNA of variable sizes. In FIG. 96A circular RNA encoding for firefly luciferase and linear mRNA encoding for firefly luciferase was tested for expression. In FIG. 96B, human and mouse cells were given circular RNAs encoding for ATP7B proteins. Some of the circular RNAs tested were codon optimized. Circular RNA expressing firefly luciferase was used for comparison.

[0194] FIGS. 97A and 97B show an exemplary RNA circularization process. The schematic shown in FIG. 97A depicts an autocatalytic circularization process. Briefly, precursor RNA molecules containing intron segments and accessory elements that enhance circularization efficiency undergo splicing, resulting in a synthetic circular RNA and two excised intron/accessory sequence segments (spliced out intron segments/fragments). Some circularized RNA (oRNA) is nicked during synthesis. FIG. 97B shows an exemplary chromatogram showing peak residence of different species after size exclusion HPLC analysis.

[0195] FIG. 98 depicts an exemplary negative selection purification method for circular RNA molecules such as oRNA. Oligonucleotides that are complementary to sequences present in the precursor RNA (such as the intron segments or external accessory regions) but not the oRNA are bound to a solid support, such as a bead. oRNA preparations are washed over the bead; precursor RNA, partially spliced RNA, incomplete transcripts, and post-splicing intron segments bind to the oligonucleotide under certain buffer conditions while oRNA and nicked oRNA flow through. Flowthrough is collected for further processing.

[0196] FIG. 99A and FIG. 99B depict an exemplary negative selection purification method for circular RNA molecule such as oRNA. The schematic shown in FIG. 99A depicts enzymatic polyadenylation of in vitro transcription reaction products containing oRNA and linear RNA, resulting in polyadenylation of only the linear RNA. The mixture of linear and circular RNA is washed over beads conjugated to deoxythymidine oligonucleotides (“Oligo dT”) under specific buffer conditions. Polyadenylated linear RNA anneals to the beads while oRNA flows through for collection. FIG. 99B shows exemplary SEC-HPLC chromatograms of in vitro transcription (IVT) reaction products prior to polyadenylation and purification (left panel) and of the eluant following polyadenylation using E. coli polyA polymerase and purification with oligo-dT beads in binding buffer (right panel).

[0197] FIG. 100A and FIG. 100B depict an exemplary circular RNA enzymatic purification method. In this method, oRNA is synthesized by IVT in the presence of excess GMP and is autocatalytically spliced during the process. The resulting reaction products are digested with Xrn1 (a 5′ to 3′ exonuclease requiring a 5′ terminal monophosphate) and RNase R (a 3′ to 5′ exonuclease) to remove non-circular RNA molecules. FIG. 100A shows such Xrn1 and RNaseR digestion of linear RNA. FIG. 100B shows exemplary SEC-HPLC chromatograms of IVT reaction products prior to enzymatic digestion (left pane) and of the final, enzymatically purified material (right panel).

[0198] FIG. 101A and FIG. 101B show induction of RIG-1 and IFNB1 RNA expression, markers of immune stimulation, following transfection of the cells with the various RNA preparations indicated. All RNA preparations except for the commercially available 3phpRNA were produced using in vitro transcription and circularization of RNA comprising an Anabaena permuted intron, GLuc reading frame, strong homology arms, 5′ and 3′ spacers, and a CVB3 IRES. RIG-1 and IFNB1 RNA expression was measured using RT-qPCR. In FIG. 101, “IVT” indicates an unpurified reaction mixture: “+GMfP” indicates an unpurified reaction mixture in which the in vitro transcription was performed in the presence of 12.5-fold GM 1P relative to GTP; “+HPLC” indicates a reaction mixture purified by HPLC; “+H1 PLC/GM P” indicates a reaction mixture purified by HPLC in which the in vitro transcription was performed in the presence of 12.5-fold GMP relative to GTP; “3phpRNA” indicates a positive control comprising a triphosphate hairpin RNA (tlrl-hprna, Invivogen); and “mock” indicates a preparation containing no RNA. FIG. 101A shows immune stimulation of HeLa cells, and FIG. 101B shows immune stimulation of A594 cells.

[0199] FIG. 102A and FIG. 102B show anti-CD19 CAR expression levels resulting from in vitro delivery via electroporation of various circular RNA encoding chimeric antigen receptors in human T cells. FIG. 102A provides representative dot plots from FACs analysis of human T cell expression of CD19-41BBξ, CD19-CD28ξ, HER2-41BBξ, and HER2-CD28ξ CARs. FIG. 102B depicts cumulative data for the MFI of CD19-41BBξ, CD19-CD28ξ, HER2-41BBξ, and HER2-CD28ξ expression collected via fluorescence-activated cell sorting (FACS).

[0200] FIGS. 103A-103C illustrate cytotoxic response to tumor cells upon electroporation of T cells with circular RNA encoding CD19-41BBξ and CD19-CD28ξ and subsequent co-culture with tumor cells. FIG. 103A provides the % specific lysis of tumor cells after coculture with T cells expressing oRNA encoding CD19-41BBξ, CD19-CD28ξ, HER2-41BBξ, and HER2-CD28ξ CARs in comparison to T cells expressing a circular RNA encoding mOX40L. FIGS. 103B and 103C depict IFN-g and IL-2 cytokine in pg/mL, respectively, secreted by T cells expressing the listed oRNA as compared to a circular RNA encoding mOX40L after co-cultured with tumor cells.

[0201] FIG. 104A and FIG. 104B show in vivo mOX40L expression in the splenic and peripheral blood T cells of humanized mice following intravenous administration of LNP formulated with circular RNAs encoding mOX40L. LNPs were formulated with either PBS (indicated as “vehicle” in said figure), or LNP-oRNA constructs formulated with lipid 10b-15 (Table 10b, Lipid 15), 10a-27 (Table 10a, Lipid 27), or 10a-26 (Table 10a, Lipid 26). FIG. 104A depicts mOX40L detection in T cells in the spleen of the humanized mice. FIG. 104B depicts mOX40L detection in T cells in the peripheral blood of the humanized mice.

[0202] FIG. 105 illustrates B cell aplasia in humanized mice after intravenous administration of LNP formulated with circular RNA encoding anti-CD19 chimeric antigen receptor (CAR). Representative FACS dot plots from the peripheral blood of untreated animals (left) and treated animals (right) show the percentage of B cells post 6 days from intravenous administration.

[0203] FIG. 106A and FIG. 106B show % killing of Nalm6 tumor cells after co-culture with LNP-oRNA encoding CAR or control (FIG. 106A) and chimeric antigen receptor (CAR) surface expression (FIG. 106B) following in vitro transfection of LNP-circular RNA (oRNA) encoding CD19-41BBξ or CD19-CD28ξ CARs. FIG. 106A illustrates killing of Nalm6 tumor cells after co-culture of T cells transfected with LNP-oRNA constructs encoding CARs of CD19-41BB ζ and CD19-CD28ζ CARs along with HER2-41BBz, HER2-CD28z, or the control LNP-oRNA mOX40L. FIG. 106B provides mean fluorescence intensity (MFI) of the CAR surface expression on T cells treated with the LNP-oRNA CAR constructs.

[0204] FIG. 107 depicts antigen-dependent tumor regression measured by total flux (in photons/sec) following dosing of mice with either PBS, PBMC, LNP-oRNA encoding for mOx40L, LNP-oRNA encoding for CD19-41BBζ (“CD19-41BBξ isCAR”), oRNA encoding for and CD19-CD28ξ (“CD19-CD28ξ isCAR”), LNP-oRNA encoding for HER2-41BBz CAR (“HER2-41BBz isCAR”), or LNP-oRNA encoding for HER2-CD28z CAR (“HER2-CD28z isCAR”). PBS and PBMC solutions lacking oRNAs were used as negative control.

[0205] FIG. 108A depicts expression of BCMA CARs detected with soluble BCMA.PE post introduction of exemplary circular RNAs (circRNAs) via electroporation encoding BCMA-41BBζ C CARs at 10 ng, 30 ng, or 100 ng dosages per 0.1×10⁶ T cell in comparison a “mock” control T cell not electroporated with any circRNAs. Expression was analyzed for the T cell at 24 hours, 48 hours, and 72 hours post introduction of the circular RNAs. FIG. 108B depicts expression of BCMA CARs quantified using geometric mean fluorescent intensity (gMFI) activity over the span of 24 hours post introduction of circular RNAs encoding BCMA-41BBζ CARs at 10 ng, 30 ng, or 100 ng dosages per 0.1×10⁶ T cell. “A”, “B” and “C” correspond to “DNA Template A”, “DNA Template B”, and “DNA Template C” in Table 28 respectively, i.e., circular RNA construct “A” comprises the IRES sequence of DNA Template A and the BCMA sequence of DNA Template A; circular RNA construct B” comprises the IRES sequence of DNA Template B and the BCMA sequence of DNA Template B; circular RNA construct “C” comprises the IRES sequence of DNA Template C and the BCMA sequence of DNA Template C; etc.

[0206] FIGS. 109A-109G depicts anti-BCMA chimeric antigen receptor (CAR) expression for exemplary circular RNAs encoding BCMA-41BBζ CAR post electroporation of the circular RNA into T cells. “A”, “B”, “C”, “D”, and “E” correspond to “DNA Template A”, “DNA Template B”, “DNA Template C”, “DNA Template D”, and “DNA Template E” in Table 28 respectively. “Mock” in the figure represents data for a control T cell that was not electroporated with circular RNA. FIG. 109A depicts percent CAR expression detected by soluble BCMA PE detection reagent over the span of 24-72 hours post electroporation of circRNAs formed from DNA Template A, DNA Template B, and DNA Template C and dosed at either 10 ng, 30 ng, or 100 ng per 0.1×10⁶ T cell into T cells. FIG. 109B depicts geometric mean fluorescence intensity (gMFI) of the T cells detected by soluble BCMA PE detection reagent over the span of 24-72 hours post electroporation of circRNAs formed from DNA Template A, DNA Template B, and DNA Template C and dosed at either 10 ng, 30 ng, or 100 ng per 0.1×10⁶ T cell into T cells. FIG. 109C provides fluorescence activated cell sorting (FACS) imaging post introduction of circular RNA depicted in FIG. 109A and FIG. 109B to T cells at a dosage of 30 ng after 24 hours. FIG. 109D depicts percent CAR expression detected by soluble BCMA PE detection reagent over the span of 24-96 hours post electroporation of circRNAs formed from DNA Template A, DNA Template B, DNA Template C, DNA Template D, and DNA Template E and dosed at either 10 ng, 30 ng, or 100 ng per 0.1×10⁶ T cell into T cells. FIG. 109E depicts percent CAR expression detected by anti-Whitlow PE detection reagent over the span of 24-96 hours post electroporation of circRNAs formed from DNA Template A, DNA Template B, DNA Template C, DNA Template D, and DNA Template E and dosed at either 10 ng, 30 ng, or 100 ng per 0.1×10⁶ T cell into T cells. FIG. 109F depicts percent CAR expression detected by anti-G4S detection reagent over the span of 24-96 hours post electroporation of circRNAs formed from DNA Template A, DNA Template B, DNA Template C, DNA Template D, and DNA Template E and dosed at either 10 ng, 30 ng, or 100 ng per 0.1×10⁶ T cell into T cells. FIG. 109G depicts average MFI (%) of the T cells detected by soluble BCMA PE detection reagent over the span of 24-96 hours post electroporation of circRNAs formed from DNA Template A, DNA Template B, DNA Template C, DNA Template D, and DNA Template E and dosed at either 10 ng, 30 ng, or 100 ng per 0.1×10⁶ T cell into T cells.

[0207] FIG. 110 depicts an exemplary gating method used to analyze flow cytometry results for T cells electroporated with circular RNAs encoding BCMA CARs at a dose of 10 ng×10. BCMA CAR expression was detected with either soluble BCMA PE, anti-Whitlow PE or anti-G4S linker.

[0208] FIG. 111 shows target protein expression on multiple myeloma positive cells (e.g., MM1S, NCI-H929, and RPMI-8226) and negative target cell line (e.g., Nalm6 target cell line).

[0209] FIG. 112 depicts percent of live T cells collected at 24 hours post electroporation of circular RNAs comprising BCMA-41BBζ CAR or CD19-CD28ζ CAR compared to “Mock” solutions comprising no circular RNA and only electroporation buffer solution. “F”, “C”, “G”, “H”, “A”, “I” and “J” correspond to “DNA Template F”, “DNA Template C”, “DNA Template G”, “DNA Template H”, “DNA Template A”, “DNA Template I”, and “DNA Template J” that were used to form the circular RNAs.

[0210] FIGS. 113A-113D provides gMFI collected from various circular RNA construct encoding a BCMA-41BBζ or BCMA-CD28ζ CAR or CD19-CD28 ζ CAR electroporated onto T cells at a dosage of 50 ng per 0.1×10⁶ T cells compared to “Mock” control T cells lacking any circular RNA (containing only electroporation buffer). Each of the circular RNAs solutions were given either soluble BCMA (sBCMA-PE), anti-Whitlow-PE, or anti-G4S linker PE (G4S-AF647) detection reagent. FIG. 113A shows the histograms of the gMFI collected from the cells. FIGS. 113B-113D provides the gMFI for each of cells wherein sBCMA-PE (FIG. 113B), anti-Whitlow-PE (FIG. 113C) and G4S-AF647 (FIG. 113D) detection reagents were used to collect the gMFI. “F”, “C”, “G”, “H”, “A”, “I” and “J” correspond to “DNA Template F”, “DNA Template C”, “DNA Template G”, “DNA Template H”, “DNA Template A”, “DNA Template I”, and “DNA Template J” that were used to form the circular RNAs.

[0211] FIG. 114 depicts an exemplary gating process of the oCAR-T cells 24 hours post electroporation. On the top row of boxes (from left to right) provides the FACS imaging of lymphocytes, CD3 negative cells, live T cells, and BCMA positive cells. The bottom two boxes are histograms of BCMA CAR detected by either soluble BCMA or anti-Whitlow detection reagent (left bottom) or anti-GS4-PE Fluorescence (right bottom).

[0212] FIGS. 115A-115C depict percent expression of the detection reagent used (i.e., soluble BCMA PE (indicated by “sBCMA” in FIG. 115A), anti-Whitlow-PE (indicated by “Whitlow” in FIG. 115B) and anti-G4S linker PE (indicated by “G4S” in FIG. 115C)). Percent expression was calculated from the presence of the relevant detection reagent at 24 hours post electroporation of circular RNAs encoding BCMA-41BBζ, BCMA-CD28ζ, or HER2 CAR gated on live T cells. “F”, “C”, “G”, “H”, “A”, “I” and “J” correspond to “DNA Template F”, “DNA Template C”, “DNA Template G”, “DNA Template H”, “DNA Template A”, “DNA Template I”, and “DNA Template J” that were used to form the circular RNAs. “Mock” in the figure represents data for a control T cell that was not electroporated with circular RNA.

[0213] FIGS. 116A-116E shows BCMA expression via gMFI (FIGS. 116A, 116B and 116D) or percent soluble BCMA PE detection (indicated as “% sBCMA-PE”) (FIG. 116C or 116E) post electroporation of circular RNAs encoding BCMA-41BBζ, BCMA-CD-CD28ζ, or CD19-CD28ζ gated onto CD3+ cells. “Mock” indicates T cell solutions not electroporated with the circular RNA constructs. FIG. 116A provides a histogram with 24- and 48-hour collection of soluble BCMA-PE or anti-Whitlow.PE detection for the circular RNA constructs. FIG. 116B and FIG. 116C provide gMFI and % sBCMA-PE expression over the span of 24-72 for each of the constructs after CD3+ cells comprising the circular RNAs have been co-cultured with multiple myeloma (MM1S) cells. FIG. 116D and FIG. 116E provide gMFI and % sBCMA-PE expression at 72 post electroporation for each of the constructs after CD3+ cells comprising the circular RNAs have been co-cultured with multiple myeloma (VMIS) cells, NCI-H929 (indicated in the figures as “H929”), Nalm6 or K562.CD19 cells. “C”, “G”, “H”, “A”, “I” and “J” correspond to “DNA Template C”, “DNA Template G”, “DNA Template H”, “DNA Template A”, “DNA Template I”, and “DNA Template J” that were used to form the circular RNAs. “Mock” in the figure represents data for a control T cell that was not electroporated with circular RNA.

[0214] FIGS. 117A-117C depict cytotoxicity of circular RNA constructs encoding a BCMA-41BBζ chimeric antigen receptor (CAR), wherein the circular RNA comprises a BCMA sequence and IRES sequence from Table 28, 30 or 31 CD19-CD28ζ CAR or HER2-CD28ζ CARs on various cell types over the span of 0 to 72 or 96 hours post co-culture. FIG. 117A provides cytotoxicity of each of the circular RNAs encoding CAR constructs at a dosage of either 10 or 30 ng per 0.1×10⁶ T cells on MM1S cells. Mock T cells (i.e., T cells not electroporated circular RNA referred to as “Mock” in the figure) and MM1S cells not co-cultured with T cells indicated as “MM1S” in FIG. 117A were used as controls. FIG. 117B provides cytotoxicity of each of the circular RNAs encoding CAR constructs at a dosage of either 10 or 30 ng per 0.1×10⁶ T cells on Nalm6 cells. Mock T cells (i.e., T cells not electroporated circular RNA indicated as “Mock” in the figure) and Nalm6 cells not co-cultured with T cells as referred to as in FIG. 117B as “Nalm6” were used as controls. FIG. 117C provides cytotoxicity of each of the circular RNAs encoding CAR constructs at a dosage of 20 ng per 0.1×10⁶ T cells on CD19 T stable cell line. Mock T cells (i.e., tumor T cells not electroporated circular RNA indicated as “Mock” in the figure) and CD19 T stable cells not co-cultured with T cells referred to as in FIG. 117C as “tumor” were used as controls. % Cytotoxicity was calculated by the (green area+red area/green area) produced by the live-cell analysis portfolio system imaging. “A”, “B”, “C”, “F”, and “K” correspond to “DNA Template A”, “DNA Template B”, “DNA Template C”, “DNA Template F”, and “DNA Template K” that were used to form the circular RNAs.

[0215] FIGS. 118A-118C depict cytotoxicity analysis of various engineered circular RNAs across multiple cell types. FIG. 118A provides the FACS imaging of the cells (e.g., lymphocytes, CD3 negative cells, live cells, and BCMA positive cells) at 24 hours post co-culture of oCAR-T cells formed from introduction of circular RNA comprising a 3′ Anabaena exon, a Caprine Kobuvirus internal ribosome entry site (IRES), a BCMA-41BBζ CAR, and a 5′ Anabaena exon. FIG. 118B shows the percent cytotoxicity acquired from circular RNAs encoding BCMA-41BBζ, CD19-CD28ζ or HER2-CD28ζ CARs on MM1S (FIG. 118B) or Nalm6 (FIG. 118C). “MM1S+Mock” and “MM1S” as depicted in FIG. 118B refers to MM1S cell that was co-cultured with a T cell that was not transfected with a circular RNA. “Nalm6+Mock” and “Nalm6” as depicted in FIG. 118C refers to a Nalm6 cell that was co-cultured with a T cell that was not transfected with a circular RNA. “A”, “B”, “C”, “F”, and “K” correspond to “DNA Template A”, “DNA Template B”, “DNA Template C”, “DNA Template F”, and “DNA Template K” that were used to form the circular RNAs.

[0216] FIG. 119A depicts FACS imaging of “Mock+MM1S” (i.e., MM1S tumor cells cocultured with T cells not electroporated with circular RNAs, “Mock+Nalm6” (i.e., Nalm6 tumor cells cocultured with T cells not electroporated with circular RNAs), “Mock+H929” (i.e., NCI-H929 tumor cells cocultured with T cells not electroporated with circular RNAs), and “Mock+K562.CD19” (i.e., K562.CD19 tumor cells cocultured with T cells not electroporated with circular RNAs). FIG. 119B depicts FACS imaging for CD19+CD3+ cells.

[0217] FIG. 120A-120D depicts % target cell viability (top) and % target cell killing of T cells (bottom) that have been electroporated with circular RNAs derived from DNA Templates in Tables 28, 30 and/or 31 and later co-cultured with a target cell (e.g., MM1S (FIG. 120A), NCI-H929 (depicted as “H929” in FIG. 120B), Nalm6 (FIG. 120C), or K562.CD19 (FIG. 120D)) for 24 (left) or 48 (right) hours post co-culture. “Mock+MM1S” (i.e., MM1S tumor cells cocultured with T cells not electroporated with circular RNAs, “Mock+Nalm6” (i.e., Nalm6 tumor cells cocultured with T cells not electroporated with circular RNAs), “Mock+H929” (i.e., NCI-H929 tumor cells cocultured with T cells not electroporated with circular RNAs), and “Mock+K562.CD19” (i.e., K562.CD19 tumor cells cocultured with T cells not electroporated with circular RNAs). “A”, “G”, “C”, “F”, “H”, “I”, and “J” correspond to “DNA Template A”, “DNA Template G”, “DNA Template C”, “DNA Template F”, “DNA Template H”, “DNA Template I”, and “DNA Template J” that were used to form the circular RNAs.

[0218] FIGS. 121A and 121B depict IFNγ cytokine secretion produced from circular RNAs encoding BCMA-41BBζ, CD19-CD28ζ and HER2-CD28ζ CARs at 10, 30, or 100 ng dose per 0.1×10⁶ T cells on MM1S (FIG. 121A) or Nalm6 (FIG. 121B) cells post co-culture of the MM1S or Nalm6 with T cells containing the circular RNAs. Cytotoxicity levels were calculated from a cytokine and chemokine kit (e.g., MSD). “MM1S+Mock” refers to MM1S tumor cells that were co-cultured with T cells that had not be electroporated with circular RNAs. “MM1S” refers to tumor cells that were not co-cultured with T cells. “Nalm6+Mock” refers to Nalm6 tumor cells that were co-cultured with T cells that had not been electroporated with circular RNAs. “Nalm6” refers to tumor cells that were not co-cultured with T cells. “A”, “B”, “C”, “F”, and “K” correspond to “DNA Template A”, “DNA Template B”, “DNA Template C”, “DNA Template F”, and “DNA Template K” that were used to form the circular RNAs.

[0219] FIGS. 122A-122P depict cytokine levels (pg/mL) at 24 and 48 hours (left and right respectively in each figure) in cocultured T cells comprising circular RNA encoding BMCA-41BBζ, BCMA-CD28ζ, or CD19-CD28ζ CAR and target cells. The target cells include MM1S (FIGS. 122A, 122E, 122I and 122M), NCI-H929 (indicated as “H929”) (FIGS. 122B, 122F, 122J, 122N), Nalm6 (FIGS. 122C, 122G, 122K, 122O), and K562.CD19 (FIGS. 122D, 122H, 122L, 122P). FIGS. 122A-122D provide INFγ cytokine levels, FIGS. 122E-122H provides TNFα cytokine levels, FIGS. 122I-122L provides IL-2 cytokine levels, and FIGS. 122M-122P GM-CSF levels. “A”, “G”, “C”, “F”, “H”, “I”, and “J” correspond to “DNA Template A”, “DNA Template G”, “DNA Template C”, “DNA Template F”, “DNA Template H”, “DNA Template I”, and “DNA Template J” that were used to form the circular RNAs.

[0220] FIG. 123 depicts percent apoptosis of target cell (e.g., Nalm6) collected from live-cell analysis portfolio system (e.g., an IncuCyte) (e.g., % apoptotic target cells=(green area+red area)/green area) over the span of 72 hours post introduction of circular RNAs encoding HER2 CAR. Green areas indicate target cells. Red areas indicate Annexin V reagent present in the apoptotic cells. For control, Nalm6 comprising no circular RNAs was used.

[0221] FIGS. 124A-124C depicts % Annexin V/phase post introduction of circular RNAs encoding HER2.28ζ, HER2.BBζ or CD19.28ζ CAR to activated PBMC T cells and co-cultured in BT474 (FIG. 124A), SKBR3 (FIG. 124B), and JIMT1 (FIG. 124C) HER2 positive cell. For comparison purposes, activated PBMC T cells lacking any circular RNAs were used (indicated as “Mock”). “% Annexin V/phase” as referenced in FIGS. 124A-124C pertains to percent of apoptotic cells per phase. “K”, “L”, and “M” correspond to “DNA Template K”, “DNA Template L”, and “DNA Template M” that were used to form the circular RNAs.

[0222] FIG. 125A depicts frozen and fresh LNP delivered CAR expression of three different circular RNA constructs encoding HER2 CAR. “Mock” cells were T cells given empty LNPs (without circular RNAs). FIG. 125B provides % cytotoxicity collected from live-cell analysis portfolio system (e.g., an IncuCyte) analysis of T cells comprising circular RNA constructs encoding HER2-28ζ, HER2-BBζ or CD19-28 (CAR cocultured with BT-474 target cells at a 1:1 E:T ratio, wherein the circular RNAs were delivered with either a fresh or frozen LNP. The fresh and frozen LNPs comprised an ionizable lipid from Table 10c. FIG. 125C provides the cytokine release (top graph of FIG. 125C: INFγ and bottom graph of FIG. 125C: TNFα) produced by the T cells co-cultured in the BT-474 for each of the circular RNA constructs. “K”, “L”, and “F” correspond to “DNA Template K”, “DNA Template L”, and “DNA Template F” that were used to form the circular RNAs. “Fresh” indicates that the LNP was not previously frozen. “Frozen” indicates that the LNP was previously frozen.

[0223] FIGS. 126A-126L depict anti-HER2 expression of circular RNAs encoding HER2.28ζ, HER2.BBζ or CD19.28ζ CAR injected intravenously and delivered using lipid nanoparticles into JIMT-1 (FIGS. 126A-126L) and BT-474 (FIGS. 126G-126L) mouse models.

[0224] FIGS. 126C-126F are some of the spider plots of the data collected in FIGS. 126A-126B. FIGS. 126I-126L are spider plots of the data collected in FIG. 126G and FIG. 126H. “K”, “L”, and “F” correspond to “DNA Template K”, “DNA Template L”, and “DNA Template F” that were used to form the circular RNAs. “Fresh” indicates that the LNP was not previously frozen. “Frozen” indicates that the LNP was previously frozen.

### DETAILED DESCRIPTION

[0225] The present invention provides, among other things, methods and compositions for treating an autoimmune disorder, deficiency disease, or cancer based on circular RNA therapy. In particular, the present invention provides methods for treating an autoimmune disorder, deficiency disease, or cancer by administering to a subject in need of treatment a composition comprising a circular RNA encoding at least one therapeutic protein at an effective dose and an administration interval such that at least one symptom or feature of the relevant disease or disorder is reduced in intensity, severity, or frequency or is delayed in onset.

[0226] As disclosed herein, the improved circular RNA therapy, along with associated compositions and methods, allows for increased circular RNA stability, expression, and prolonged half-life, among other things. In some embodiments, the inventive circular RNA is transcribed from a linear RNA polynucleotide construct comprising enhanced intron elements, enhanced exon elements, and a core functional element. The enhanced intron element, in some embodiments, comprises post splicing group I intron fragments, spacers, duplex sequences, affinity sequences, and unique untranslated sequences that allows for optimal circularization. In some embodiments, the enhanced exon element comprises an exon fragment, spacers and duplex sequences to aid with the circularization process and for maintaining stability of the circular RNA post circularization. Within the same embodiments, the core functional element includes the essential elements for protein translation of a translation initiation element (TIE), a coding or noncoding element, and a termination sequence (e.g., a stop codon or stop cassette). Together, the enhanced intron elements, enhanced exon elements, and core functional element comprising a coding element provides an optimal circular RNA polynucleotide for encoding a therapeutic protein. In one embodiment, the enhanced intron elements, enhanced exon elements, and core functional element comprising a noncoding element provides an optimal circular RNA polynucleotide for triggering an immune system as an adjuvant.

[0227] Also disclosed herein is a DNA template (e.g., a vector) for making circular RNA. In some embodiments, the DNA template comprises a 3′ enhanced intron fragment, a 3′ enhanced exon fragment, a core functional element, a 5′ enhanced exon fragment, and a 5′ enhanced intron fragment. In some embodiments, these elements are positioned in the DNA template in the above order.

[0228] Additional embodiments include circular RNA polynucleotides, including circular RNA polynucleotides (e.g., a circular RNA comprising 3′ enhanced exon element, a core functional element, and a 5′ enhanced exon element) made using the DNA template provided herein, compositions comprising such circular RNA, cells comprising such circular RNA, methods of using and making such DNA template, circular RNA, compositions and cells.

[0229] In some embodiments, provided herein are methods comprising administration of circular RNA polynucleotides provided herein into cells for therapy or production of useful proteins. In some embodiments, the method is advantageous in providing the production of a desired polypeptide inside eukaryotic cells with a longer half-life than linear RNA, due to the resistance of the circular RNA to ribonucleases.

[0230] Circular RNA polynucleotides lack the free ends necessary for exonuclease-mediated degradation, causing them to be resistant to several mechanisms of RNA degradation and granting extended half-lives when compared to an equivalent linear RNA. Circularization may allow for the stabilization of RNA polynucleotides that generally suffer from short half-lives and may improve the overall efficacy of exogenous mRNA in a variety of applications. In an embodiment, the functional half-life of the circular RNA polynucleotides provided herein in eukaryotic cells (e.g., mammalian cells, such as human cells) as assessed by protein synthesis is at least 20 hours (e.g., at least 80 hours).

[0231] Various aspects of the invention are described in detail in the following sections. The use of sections is not meant to limit the invention. Each section can apply to any aspect of the invention. In this application, the use of “or” means “and/or” unless stated otherwise.

### 1. Definitions

[0232] As used herein, the term “circRNA,” “circular polyribonucleotide,” “circular RNA,” “circularized RNA,” or “oRNA” are used interchangeably and refers to a polyribonucleotide that forms a circular structure through covalent bonds. As used herein, such terms also include preparations comprising circRNA, circular polyribonucleotides, circular RNAs or oRNAs.

[0233] As used herein, the term “DNA template” refers to a DNA sequence capable of transcribing a linear RNA polynucleotide. For example, but not intending to be limiting, a DNA template may include a DNA vector, PCR product or plasmid.

[0234] As used herein, the term “3′ group I intron fragment” refers to a sequence with 75% or higher similarity to the 3′-proximal end of a natural group I intron including the splice site dinucleotide.

[0235] As used herein, the term “5′ group I intron fragment” refers to a sequence with 75% or higher similarity to the 5′-proximal end of a natural group I intron including the splice site dinucleotide.

[0236] As used herein, the term “permutation site” refers to the site in a group I intron where a cut is made prior to permutation of the intron. This cut generates 3′ and 5′ group I intron fragments that are permuted to be on either side of a stretch of precursor RNA to be circularized.

[0237] As used herein, the term “splice site” refers to a dinucleotide that is partially or fully included in a group I intron and between which a phosphodiester bond is cleaved during RNA circularization. (As used herein, “splice site” refers to the dinucleotide or dinucleotides between which cleavage of the phosphodiester bond occurs during a splicing reaction. A “5′ splice site” refers to the natural 5′ dinucleotide of the intron e.g., group I intron, while a “3′ splice site” refers to the natural 3′ dinucleotide of the intron).

[0238] As used herein, the term “expression sequence” refers to a nucleic acid sequence that encodes a product, e.g., a peptide or polypeptide, regulatory nucleic acid, or non-coding nucleic acid. An exemplary expression sequence that codes for a peptide or polypeptide can comprise a plurality of nucleotide triads, each of which can code for an amino acid and is termed as a “codon.”

[0239] As used herein, “coding element” or “coding region” is region located within the expression sequence and encodings for one or more proteins or polypeptides (e.g., therapeutic protein).

[0240] As used herein, a “noncoding element” or “non-coding nucleic acid” is a region located within the expression sequence. This sequence, but itself does not encode for a protein or polypeptide, but may have other regulatory functions, including but not limited, allow the overall polynucleotide to act as a biomarker or adjuvant to a specific cell.

[0241] As used herein, the term “therapeutic protein” refers to any protein that, when administered to a subject directly or indirectly in the form of a translated nucleic acid, has a therapeutic, diagnostic, and/or prophylactic effect and/or elicits a desired biological and/or pharmacological effect.

[0242] As used herein, the term “immunogenic” refers to a potential to induce an immune response to a substance. An immune response may be induced when an immune system of an organism or a certain type of immune cells is exposed to an immunogenic substance. The term “non-immunogenic” refers to a lack of or absence of an immune response above a detectable threshold to a substance. No immune response is detected when an immune system of an organism or a certain type of immune cells is exposed to a non-immunogenic substance. In some embodiments, a non-immunogenic circular polyribonucleotide as provided herein, does not induce an immune response above a pre-determined threshold when measured by an immunogenicity assay. In some embodiments, no innate immune response is detected when an immune system of an organism or a certain type of immune cells is exposed to a non-immunogenic circular polyribonucleotide as provided herein. In some embodiments, no adaptive immune response is detected when an immune system of an organism or a certain type of immune cell is exposed to a non-immunogenic circular polyribonucleotide as provided herein.

[0243] As used herein, the term “circularization efficiency” refers to a measurement of the rate of formation of amount of resultant circular polyribonucleotide as compared to its linear starting material.

[0244] As used herein, the term “translation efficiency” refers to a rate or amount of protein or peptide production from a ribonucleotide transcript. In some embodiments, translation efficiency can be expressed as amount of protein or peptide produced per given amount of transcript that codes for the protein or peptide.

[0245] The term “nucleotide” refers to a ribonucleotide, a deoxyribonucleotide, a modified form thereof, or an analog thereof. Nucleotides include species that comprise purines, e.g., adenine, hypoxanthine, guanine, and their derivatives and analogs, as well as pyrimidines, e.g., cytosine, uracil, thymine, and their derivatives and analogs. Nucleotide analogs include nucleotides having modifications in the chemical structure of the base, sugar and/or phosphate, including, but not limited to, 5′-position pyrimidine modifications, 8′-position purine modifications, modifications at cytosine exocyclic amines, and substitution of 5-bromo-uracil; and 2′-position sugar modifications, including but not limited to, sugar-modified ribonucleotides in which the 2′-OH is replaced by a group such as an H, OR, R, halo, SH, SR, NH2, NHR, NR2, or CN, wherein R is an alkyl moiety as defined herein. Nucleotide analogs are also meant to include nucleotides with bases such as inosine, queuosine, xanthine; sugars such as 2′-methyl ribose; non-natural phosphodiester linkages such as methylphosphonate, phosphorothioate and peptide linkages. Nucleotide analogs include 5-methoxyuridine, 1-methylpseudouridine, and 6-methyladenosine.

[0246] The terms “nucleic acid” and “polynucleotide” are used interchangeably herein to describe a polymer of any length, e.g., greater than about 2 bases, greater than about 10 bases, greater than about 100 bases, greater than about 500 bases, greater than 1000 bases, or up to about 10,000 or more bases, composed of nucleotides, e.g., deoxyribonucleotides or ribonucleotides, and may be produced enzymatically or synthetically (e.g., as described in U.S. Pat. No. 5,948,902 and the references cited therein), which can hybridize with naturally occurring nucleic acids in a sequence specific manner analogous to that of two naturally occurring nucleic acids, e.g., can participate in Watson-Crick base pairing interactions. An “oligonucleotide” is a polynucleotide comprising fewer than 1000 nucleotides, such as a polynucleotide comprising fewer than 500 nucleotides or fewer than 100 nucleotides. Naturally occurring nucleic acids are comprised of nucleotides, including guanine, cytosine, adenine, thymine, and uracil containing nucleotides (G, C, A, T, and U respectively). As used herein, “polyA” means a polynucleotide or a portion of a polynucleotide consisting of nucleotides comprising adenine. As used herein, “polyT” means a polynucleotide or a portion of a polynucleotide consisting of nucleotides comprising thymine. As used herein, “polyAC” means a polynucleotide or a portion of a polynucleotide consisting of nucleotides comprising adenine or cytosine.

[0247] The terms “ribonucleic acid” and “RNA” as used herein mean a polymer composed of ribonucleotides.

[0248] The terms “deoxyribonucleic acid” and “DNA” as used herein mean a polymer composed of deoxyribonucleotides.

[0249] “Isolated” or “purified” generally refers to isolation of a substance (for example, in some embodiments, a compound, a polynucleotide, a protein, a polypeptide, a polynucleotide composition, or a polypeptide composition) such that the substance comprises a significant percent (e.g., greater than 1%, greater than 2%, greater than 5%, greater than 10%, greater than 20%, greater than 50%, or more, usually up to about 90%-100%) of the sample in which it resides. In certain embodiments, a substantially purified component comprises at least 50, 60, 70, 75, 80, 85, 90, 95, 96, 97, 98, or 99% of the sample. In additional embodiments, a substantially purified component comprises about, 80%-85%, or 90%-95%, 95-99%, 96-99%, 97-99%, or 95-100% of the sample. Techniques for purifying polynucleotides and polypeptides of interest are well-known in the art and include, for example, ion-exchange chromatography, affinity chromatography and sedimentation according to density. Generally, a substance is purified when it exists in a sample in an amount, relative to other components of the sample, that is more than as it is found naturally.

[0250] The terms “duplexed,” “double-stranded,” or “hybridized” as used herein refer to nucleic acids formed by hybridization of two single strands of nucleic acids containing complementary sequences. In most cases, genomic DNA is double-stranded. Sequences can be fully complementary or partially complementary.

[0251] As used herein, “unstructured” with regard to RNA refers to an RNA sequence that is not predicted by RNA structure predictive tools to form a structure (e.g., a hairpin loop) with itself or other sequences in the same RNA molecule. In some embodiments, unstructured RNA can be functionally characterized using nuclease protection assays.

[0252] As used herein, “structured” with regard to RNA refers to an RNA sequence that is predicted by the RNAFold software or similar predictive tools to form a structure (e.g., a hairpin loop) with itself or other sequences in the same RNA molecule.

[0253] As used herein, two “duplex sequences,” “duplex region,” “duplex regions,” “homology arms,” or “homology regions” may be any two regions that are thermodynamically favored to cross-pair in a sequence specific interaction. In some embodiments, two duplex sequences, duplex regions, homology arms, or homology regions, share a sufficient level of sequence identity to one another's reverse complement to act as substrates for a hybridization reaction. As used herein polynucleotide sequences have “homology” when they are either identical or share sequence identity to a reverse complement or “complementary” sequence. The percent sequence identity between a homology region and a counterpart homology region's reverse complement can be any percent of sequence identity that allows for hybridization to occur. In some embodiments, an internal duplex region of an inventive polynucleotide is capable of forming a duplex with another internal duplex region and does not form a duplex with an external duplex region.

[0254] As used herein, an “affinity sequence” or “affinity tag” is a region of polynucleotide sequences polynucleotide sequence ranging from 1 nucleotide to hundreds or thousands of nucleotides containing a repeated set of nucleotides for the purposes of aiding purification of a polynucleotide sequence. For example, an affinity sequence may comprise, but is not limited to, a polyA or polyAC sequence. In some embodiments, affinity tags are used in purification methods, referred to herein as “affinity-purification,” in which selective binding of a binding agent to molecules comprising an affinity tag facilitates separation from molecules that do not comprise an affinity tag. In some embodiments, an affinity-purification method is a “negative selection” purification method, in which unwanted species, such as linear RNA, are selectively bound and removed and wanted species, such as circular RNA, are eluted and separated from unwanted species.

[0255] As used herein, a “spacer” refers to a region of a polynucleotide sequence ranging from 1 nucleotide to hundreds or thousands of nucleotides separating two other elements along a polynucleotide sequence. The sequences can be defined or can be random. A spacer is typically non-coding. In some embodiments, spacers include duplex regions.

[0256] Linear nucleic acid molecules are said to have a “5′-terminus” (5′ end) and a “3′-terminus” (3′ end) because nucleic acid phosphodiester linkages occur at the 5′ carbon and 3′ carbon of the sugar moieties of the substituent mononucleotides. The end nucleotide of a polynucleotide at which a new linkage would be to a 5′ carbon is its 5′ terminal nucleotide. The end nucleotide of a polynucleotide at which a new linkage would be to a 3′ carbon is its 3′ terminal nucleotide. A terminal nucleotide, as used herein, is the nucleotide at the end position of the 3′- or 5′-terminus.

[0257] As used herein, a “leading untranslated sequence” is a region of polynucleotide sequences ranging from 1 nucleotide to hundreds of nucleotides located at the upmost 5′ end of a polynucleotide sequence. The sequences can be defined or can be random. An leading untranslated sequence is non-coding.

[0258] As used herein, a “terminal untranslated sequence” is a region of polynucleotide sequences ranging from 1 nucleotide to hundreds of nucleotides located at the downmost 3′ end of a polynucleotide sequence. The sequences can be defined or can be random. A terminal untranslated sequence is non-coding.

[0259] “Transcription” means the formation or synthesis of an RNA molecule by an RNA polymerase using a DNA molecule as a template. The invention is not limited with respect to the RNA polymerase that is used for transcription. For example, in some embodiments, a T7-type RNA polymerase can be used.

[0260] “Translation” means the formation of a polypeptide molecule by a ribosome based upon an RNA template.

[0261] It is to be understood that the terminology used herein is for the purpose of describing particular embodiments only, and is not intended to be limiting. As used in this specification and the appended claims, the singular forms “a,” “an,” and “the” include plural referents unless the content clearly dictates otherwise. Thus, for example, reference to “a cell” includes combinations of two or more cells, or entire cultures of cells; reference to “a polynucleotide” includes, as a practical matter, many copies of that polynucleotide. Unless specifically stated or obvious from context, as used herein, the term “or” is understood to be inclusive. Unless defined herein and below in the reminder of the specification, all technical and scientific terms used herein have the same meaning as commonly understood by one of ordinary skill in the art to which the invention pertains.

[0262] Unless specifically stated or obvious from context, as used herein, the term “about,” is understood as within a range of normal tolerance in the art, for example within 2 standard deviations of the mean. “About” can be understood as within 10%, 9%, 8%, 7%, 6%, 5%, 4%, 3%, 2%, 1%, 0.9%, 0.8%, 0.7%, 0.6%, 0.5%, 0.4%, 0.3%, 0.2%, 0.1%, 0.09%, 0.08%, 0.07%, 0.06%, 0.05%, 0.04%, 0.03%, 0.02%, or 0.01% of the stated value. Unless otherwise clear from the context, all numerical values provided herein are modified by the term “about.”

[0263] As used herein, the term “encode” refers broadly to any process whereby the information in a polymeric macromolecule is used to direct the production of a second molecule that is different from the first. The second molecule may have a chemical structure that is different from the chemical nature of the first molecule.

[0264] By “co-administering” is meant administering a therapeutic agent provided herein in conjunction with one or more additional therapeutic agents sufficiently close in time such that the therapeutic agent provided herein can enhance the effect of the one or more additional therapeutic agents, or vice versa.

[0265] The terms “treat,” and “prevent” as well as words stemming therefrom, as used herein, do not necessarily imply 100% or complete treatment or prevention. Rather, there are varying degrees of treatment or prevention of which one of ordinary skill in the art recognizes as having a potential benefit or therapeutic effect. The treatment or prevention provided by the method disclosed herein can include treatment or prevention of one or more conditions or symptoms of the disease. Also, for purposes herein, “prevention” can encompass delaying the onset of the disease, or a symptom or condition thereof.

[0266] As used herein, “aptamer” refers in general to either an oligonucleotide of a single defined sequence or a mixture of said nucleotides, wherein the mixture retains the properties of binding specifically to the target molecule (e.g., eukaryotic initiation factor, 40S ribosome, polyC binding protein, polyA binding protein, polypyrimidine tract-binding protein, argonaute protein family, Heterogeneous nuclear ribonucleoprotein K and La and related RNA-binding protein). Thus, as used herein “aptamer” denotes both singular and plural sequences of nucleotides, as defined hereinabove. The term “aptamer” is meant to refer to a single- or double-stranded nucleic acid which is capable of binding to a protein or other molecule. In general, aptamers preferably comprise about 10 to about 100 nucleotides, preferably about 15 to about 40 nucleotides, more preferably about 20 to about 40 nucleotides, in that oligonucleotides of a length that falls within these ranges are readily prepared by conventional techniques. Optionally, aptamers can further comprise a minimum of approximately 6 nucleotides, preferably 10, and more preferably 14 or 15 nucleotides, that are necessary to effect specific binding.

[0267] An “eukaryotic initiation factor” or “eIF” refers to a protein or protein complex used in assembling an initiator tRNA, 40S and 60S ribosomal subunits required for initiating eukaryotic translation.

[0268] As used herein, an “internal ribosome entry site” or “IRES” refers to an RNA sequence or structural element ranging in size from 10 nt to 1000 nt or more, capable of initiating translation of a polypeptide in the absence of a typical RNA cap structure. An IRES is typically about 500 nt to about 700 nt in length.

[0269] As used herein, a “miRNA site” refers to a stretch of nucleotides within a polynucleotide that is capable of forming a duplex with at least 8 nucleotides of a natural miRNA sequence.

[0270] As used herein, an “endonuclease site” refers to a stretch of nucleotides within a polynucleotide that is capable of being recognized and cleaved by an endonuclease protein.

[0271] As used herein, “bicistronic RNA” refers to a polynucleotide that includes two expression sequences coding for two distinct proteins. These expression sequences can be separated by a nucleotide sequence encoding a cleavable peptide such as a protease cleavage site. They can also be separated by a ribosomal skipping element.

[0272] As used herein, the term “ribosomal skipping element” refers to a nucleotide sequence encoding a short peptide sequence capable of causing generation of two peptide chains from translation of one RNA molecule. While not wishing to be bound by theory, it is hypothesized that ribosomal skipping elements function by (1) terminating translation of the first peptide chain and re-initiating translation of the second peptide chain; or (2) cleavage of a peptide bond in the peptide sequence encoded by the ribosomal skipping element by an intrinsic protease activity of the encoded peptide, or by another protease in the environment (e.g., cytosol).

[0273] As used herein, the term “co-formulate” refers to a nanoparticle formulation comprising two or more nucleic acids or a nucleic acid and other active drug substance. Typically, the ratios are equimolar or defined in the ratiometric amount of the two or more nucleic acids or the nucleic acid and other active drug substance.

[0274] As used herein, “transfer vehicle” includes any of the standard pharmaceutical carriers, diluents, excipients, and the like, which are generally intended for use in connection with the administration of biologically active agents, including nucleic acids.

[0275] As used herein, the phrase “lipid nanoparticle” refers to a transfer vehicle comprising one or more cationic or ionizable lipids, stabilizing lipids, structural lipids, and helper lipids.

[0276] As used herein, the phrase “ionizable lipid” refers to any of a number of lipid species that carry a net positive charge at a selected pH, such as physiological pH 4 and a neutral charge at other pHs such as physiological pH 7.

[0277] In some embodiments, a lipid, e.g., an ionizable lipid, disclosed herein comprises one or more cleavable groups. The terms “cleave” and “cleavable” are used herein to mean that one or more chemical bonds (e.g., one or more of covalent bonds, hydrogen-bonds, van der Waals' forces and/or ionic interactions) between atoms in or adjacent to the subject functional group are broken (e.g., hydrolyzed) or are capable of being broken upon exposure to selected conditions (e.g., upon exposure to enzymatic conditions). In certain embodiments, the cleavable group is a disulfide functional group, and in particular embodiments is a disulfide group that is capable of being cleaved upon exposure to selected biological conditions (e.g., intracellular conditions). In certain embodiments, the cleavable group is an ester functional group that is capable of being cleaved upon exposure to selected biological conditions. For example, the disulfide groups may be cleaved enzymatically or by a hydrolysis, oxidation or reduction reaction. Upon cleavage of such disulfide functional group, the one or more functional moieties or groups (e.g., one or more of a head-group and/or a tail-group) that are bound thereto may be liberated. Exemplary cleavable groups may include, but are not limited to, disulfide groups, ester groups, ether groups, and any derivatives thereof (e.g., alkyl and aryl esters). In certain embodiments, the cleavable group is not an ester group or an ether group. In some embodiments, a cleavable group is bound (e.g., bound by one or more of hydrogen-bonds, van der Waals' forces, ionic interactions and covalent bonds) to one or more functional moieties or groups (e.g., at least one head-group and at least one tail-group). In certain embodiments, at least one of the functional moieties or groups is hydrophilic (e.g., a hydrophilic head-group comprising one or more of imidazole, guanidinium, amino, imine, enamine, optionally-substituted alkyl amino and pyridyl).

[0278] As used herein, the term “hydrophilic” is used to indicate in qualitative terms that a functional group is water-preferring, and typically such groups are water-soluble. For example, disclosed herein are compounds that comprise a cleavable disulfide (S—S) functional group bound to one or more hydrophilic groups (e.g., a hydrophilic head-group), wherein such hydrophilic groups comprise or are selected from the group consisting of imidazole, guanidinium, amino, imine, enamine, an optionally-substituted alkyl amino (e.g., an alkyl amino such as dimethylamino) and pyridyl.

[0279] In certain embodiments, at least one of the functional groups of moieties that comprise the compounds disclosed herein is hydrophobic in nature (e.g., a hydrophobic tail-group comprising a naturally occurring lipid such as cholesterol). As used herein, the term “hydrophobic” is used to indicate in qualitative terms that a functional group is water-avoiding, and typically such groups are not water soluble. For example, disclosed herein are compounds that comprise a cleavable functional group (e.g., a disulfide (S—S) group) bound to one or more hydrophobic groups, wherein such hydrophobic groups comprise one or more naturally occurring lipids such as cholesterol, and/or an optionally substituted, variably saturated or unsaturated C6-C20 alkyl and/or an optionally substituted, variably saturated or unsaturated C6-C20 acyl.

[0280] Compound described herein may also comprise one or more isotopic substitutions. For example, H may be in any isotopic form, including 1H, 2H (D or deuterium), and 3H (T or tritium); C may be in any isotopic form, including 12C, 13C, and 14C; O may be in any isotopic form, including 16O and 18O; F may be in any isotopic form, including 18F and 19F; and the like.

[0281] When describing the invention, which may include compounds and pharmaceutically acceptable salts thereof, pharmaceutical compositions containing such compounds and methods of using such compounds and compositions, the following terms, if present, have the following meanings unless otherwise indicated. It should also be understood that when described herein any of the moieties defined forth below may be substituted with a variety of substituents, and that the respective definitions are intended to include such substituted moieties within their scope as set out below. Unless otherwise stated, the term “substituted” is to be defined as set out below. It should be further understood that the terms “groups” and “radicals” can be considered interchangeable when used herein.

[0282] When a range of values is listed, it is intended to encompass each value and sub-range within the range. For example, “C1-6 alkyl” is intended to encompass, C1, C2, C3, C4, C5, C6, C1-6, C1-5, C1-4, C1-3, C1-2, C2-6, C2-5, C2-4, C2-3, C3-6, C3-5, C3-4, C4-6, C4-5, and C5-6 alkyl.

[0283] In certain embodiments, the compounds disclosed herein comprise, for example, at least one hydrophilic head-group and at least one hydrophobic tail-group, each bound to at least one cleavable group, thereby rendering such compounds amphiphilic. As used herein to describe a compound or composition, the term “amphiphilic” means the ability to dissolve in both polar (e.g., water) and non-polar (e.g., lipid) environments. For example, in certain embodiments, the compounds disclosed herein comprise at least one lipophilic tail-group (e.g., cholesterol or a C6-C20 alkyl) and at least one hydrophilic head-group (e.g., imidazole), each bound to a cleavable group (e.g., disulfide).

[0284] It should be noted that the terms “head-group” and “tail-group” as used describe the compounds of the present invention, and in particular functional groups that comprise such compounds, are used for ease of reference to describe the orientation of one or more functional groups relative to other functional groups. For example, in certain embodiments a hydrophilic head-group (e.g., guanidinium) is bound (e.g., by one or more of hydrogen-bonds, van der Waals' forces, ionic interactions and covalent bonds) to a cleavable functional group (e.g., a disulfide group), which in turn is bound to a hydrophobic tail-group (e.g., cholesterol).

[0285] As used herein, the term “alkyl” refers to both straight and branched chain C1-C40 hydrocarbons (e.g., C6-C20 hydrocarbons), and include both saturated and unsaturated hydrocarbons. In certain embodiments, the alkyl may comprise one or more cyclic alkyls and/or one or more heteroatoms such as oxygen, nitrogen, or sulfur and may optionally be substituted with substituents (e.g., one or more of alkyl, halo, alkoxyl, hydroxy, amino, aryl, ether, ester or amide). In certain embodiments, a contemplated alkyl includes (9Z,12Z)-octadeca-9,12-dien. The use of designations such as, for example, “C6-C20” is intended to refer to an alkyl (e.g., straight or branched chain and inclusive of alkenes and alkyls) having the recited range carbon atoms. In some embodiments, an alkyl group has 1 to 10 carbon atoms (“C1-10 alkyl”). In some embodiments, an alkyl group has 1 to 9 carbon atoms (“C1-9 alkyl”). In some embodiments, an alkyl group has 1 to 8 carbon atoms (“C1-8 alkyl”). In some embodiments, an alkyl group has 1 to 7 carbon atoms (“C1-7 alkyl”). In some embodiments, an alkyl group has 1 to 6 carbon atoms (“C1-6 alkyl”). In some embodiments, an alkyl group has 1 to 5 carbon atoms (“C1-5 alkyl”). In some embodiments, an alkyl group has 1 to 4 carbon atoms (“C1-4 alkyl”). In some embodiments, an alkyl group has 1 to 3 carbon atoms (“C1-3 alkyl”). In some embodiments, an alkyl group has 1 to 2 carbon atoms (“C1-2 alkyl”). In some embodiments, an alkyl group has 1 carbon atom (“C1 alkyl”). Examples of C1-6 alkyl groups include methyl, ethyl, propyl, isopropyl, butyl, isobutyl, pentyl, hexyl, and the like.

[0286] As used herein, “alkenyl” refers to a radical of a straight-chain or branched hydrocarbon group having from 2 to 20 carbon atoms, one or more carbon-carbon double bonds (e.g., 1, 2, 3, or 4 carbon-carbon double bonds), and optionally one or more carbon-carbon triple bonds (e.g., 1, 2, 3, or 4 carbon-carbon triple bonds) (“C2-20 alkenyl”). In certain embodiments, alkenyl does not contain any triple bonds. In some embodiments, an alkenyl group has 2 to 10 carbon atoms (“C2-10 alkenyl”). In some embodiments, an alkenyl group has 2 to 9 carbon atoms (“C2-9 alkenyl”). In some embodiments, an alkenyl group has 2 to 8 carbon atoms (“C2-8 alkenyl”). In some embodiments, an alkenyl group has 2 to 7 carbon atoms (“C2-7 alkenyl”). In some embodiments, an alkenyl group has 2 to 6 carbon atoms (“C2-6 alkenyl”). In some embodiments, an alkenyl group has 2 to 5 carbon atoms (“C2-5 alkenyl”). In some embodiments, an alkenyl group has 2 to 4 carbon atoms (“C2-4 alkenyl”). In some embodiments, an alkenyl group has 2 to 3 carbon atoms (“C2-3 alkenyl”). In some embodiments, an alkenyl group has 2 carbon atoms (“C2 alkenyl”). The one or more carbon-carbon double bonds can be internal (such as in 2-butenyl) or terminal (such as in 1-butenyl). Examples of C2-4 alkenyl groups include ethenyl (C2), 1-propenyl (C3), 2-propenyl (C3), 1-butenyl (C4), 2-butenyl (C4), butadienyl (C4), and the like. Examples of C2-6 alkenyl groups include the aforementioned C2-4 alkenyl groups as well as pentenyl (C5), pentadienyl (C5), hexenyl (C6), and the like. Additional examples of alkenyl include heptenyl (C7), octenyl (C8), octatrienyl (C8), and the like.

[0287] As used herein, “alkynyl” refers to a radical of a straight-chain or branched hydrocarbon group having from 2 to 20 carbon atoms, one or more carbon-carbon triple bonds (e.g., 1, 2, 3, or 4 carbon-carbon triple bonds), and optionally one or more carbon-carbon double bonds (e.g., 1, 2, 3, or 4 carbon-carbon double bonds) (“C2-20 alkynyl”). In certain embodiments, alkynyl does not contain any double bonds. In some embodiments, an alkynyl group has 2 to 10 carbon atoms (“C2-10 alkynyl”). In some embodiments, an alkynyl group has 2 to 9 carbon atoms (“C2-9 alkynyl”). In some embodiments, an alkynyl group has 2 to 8 carbon atoms (“C2-8 alkynyl”). In some embodiments, an alkynyl group has 2 to 7 carbon atoms (“C2-7 alkynyl”). In some embodiments, an alkynyl group has 2 to 6 carbon atoms (“C2-6 alkynyl”). In some embodiments, an alkynyl group has 2 to 5 carbon atoms (“C2-5 alkynyl”). In some embodiments, an alkynyl group has 2 to 4 carbon atoms (“C2-4 alkynyl”). In some embodiments, an alkynyl group has 2 to 3 carbon atoms (“C2-3 alkynyl”). In some embodiments, an alkynyl group has 2 carbon atoms (“C2 alkynyl”). The one or more carbon-carbon triple bonds can be internal (such as in 2-butynyl) or terminal (such as in 1-butynyl). Examples of C2-4 alkynyl groups include, without limitation, ethynyl (C2), 1-propynyl (C3), 2-propynyl (C3), 1-butynyl (C4), 2-butynyl (C4), and the like. Examples of C2-6 alkenyl groups include the aforementioned C2-4 alkynyl groups as well as pentynyl (C5), hexynyl (C6), and the like. Additional examples of alkynyl include heptynyl (C7), octynyl (C8), and the like.

[0288] As used herein, “alkylene,” “alkenylene,” and “alkynylene,” refer to a divalent radical of an alkyl, alkenyl, and alkynyl group respectively. When a range or number of carbons is provided for a particular “alkylene,” “alkenylene,” or “alkynylene,” group, it is understood that the range or number refers to the range or number of carbons in the linear carbon divalent chain. “Alkylene,” “alkenylene,” and “alkynylene,” groups may be substituted or unsubstituted with one or more substituents as described herein.

[0289] As used herein, the term “aryl” refers to aromatic groups (e.g., monocyclic, bicyclic and tricyclic structures) containing six to ten carbons in the ring portion. The aryl groups may be optionally substituted through available carbon atoms and in certain embodiments may include one or more heteroatoms such as oxygen, nitrogen or sulfur. In some embodiments, an aryl group has six ring carbon atoms (“C6 aryl”; e.g., phenyl). In some embodiments, an aryl group has ten ring carbon atoms (“C10 aryl”; e.g., naphthyl such as 1-naphthyl and 2-naphthyl).

[0290] As used herein, “heteroaryl” refers to a radical of a 5-10 membered monocyclic or bicyclic 4n+2 aromatic ring system (e.g., having 6 or 10 electrons shared in a cyclic array) having ring carbon atoms and 1-4 ring heteroatoms provided in the aromatic ring system, wherein each heteroatom is independently selected from nitrogen, oxygen and sulfur (“5-10 membered heteroaryl”). In heteroaryl groups that contain one or more nitrogen atoms, the point of attachment can be a carbon or nitrogen atom, as valency permits. Heteroaryl bicyclic ring systems can include one or more heteroatoms in one or both rings. “Heteroaryl” includes ring systems wherein the heteroaryl ring, as defined above, is fused with one or more carbocyclyl or heterocyclyl groups wherein the point of attachment is on the heteroaryl ring, and in such instances, the number of ring members continue to designate the number of ring members in the heteroaryl ring system. “Heteroaryl” also includes ring systems wherein the heteroaryl ring, as defined above, is fused with one or more aryl groups wherein the point of attachment is either on the aryl or heteroaryl ring, and in such instances, the number of ring members designates the number of ring members in the fused (aryl/heteroaryl) ring system. Bicyclic heteroaryl groups wherein one ring does not contain a heteroatom (e.g., indolyl, quinolinyl, carbazolyl, and the like) the point of attachment can be on either ring, i.e., either the ring bearing a heteroatom (e.g., 2-indolyl) or the ring that does not contain a heteroatom (e.g., 5-indolyl).

[0291] The term “cycloalkyl” refers to a monovalent saturated cyclic, bicyclic, or bridged cyclic (e.g., adamantyl) hydrocarbon group of 3-12, 3-8, 4-8, or 4-6 carbons, referred to herein, e.g., as “C4-8cycloalkyl,” derived from a cycloalkane. Exemplary cycloalkyl groups include, but are not limited to, cyclohexanes, cyclopentanes, cyclobutanes and cyclopropanes.

[0292] As used herein, “heterocyclyl” or “heterocyclic” refers to a radical of a 3- to 10-membered non-aromatic ring system having ring carbon atoms and 1 to 4 ring heteroatoms, wherein each heteroatom is independently selected from nitrogen, oxygen, sulfur, boron, phosphorus, and silicon (“3-10 membered heterocyclyl”). In heterocyclyl groups that contain one or more nitrogen atoms, the point of attachment can be a carbon or nitrogen atom, as valency permits. A heterocyclyl group can either be monocyclic (“monocyclic heterocyclyl”) or a fused, bridged or spiro ring system such as a bicyclic system (“bicyclic heterocyclyl”), and can be saturated or can be partially unsaturated. Heterocyclyl bicyclic ring systems can include one or more heteroatoms in one or both rings. “Heterocyclyl” also includes ring systems wherein the heterocyclyl ring, as defined above, is fused with one or more carbocyclyl groups wherein the point of attachment is either on the carbocyclyl or heterocyclyl ring, or ring systems wherein the heterocyclyl ring, as defined above, is fused with one or more aryl or heteroaryl groups, wherein the point of attachment is on the heterocyclyl ring, and in such instances, the number of ring members continue to designate the number of ring members in the heterocyclyl ring system. The terms “heterocycle,” “heterocyclyl,” “heterocyclyl ring,” “heterocyclic group,” “heterocyclic moiety,” and “heterocyclic radical,” may be used interchangeably.

[0293] As used herein, “cyano” refers to —CN.

[0294] The terms “halo” and “halogen” as used herein refer to an atom selected from fluorine (fluoro, F), chlorine (chloro, C1), bromine (bromo, Br), and iodine (iodo, I). In certain embodiments, the halo group is either fluoro or chloro.

[0295] The term “alkoxy,” as used herein, refers to an alkyl group which is attached to another moiety via an oxygen atom (—O(alkyl)). Non-limiting examples include e.g., methoxy, ethoxy, propoxy, and butoxy.

[0296] As used herein, “oxo” refers to —C═O.

[0297] In general, the term “substituted”, whether preceded by the term “optionally” or not, means that at least one hydrogen present on a group (e.g., a carbon or nitrogen atom) is replaced with a permissible substituent, e.g., a substituent which upon substitution results in a stable compound, e.g., a compound which does not spontaneously undergo transformation such as by rearrangement, cyclization, elimination, or other reaction. Unless otherwise indicated, a “substituted” group has a substituent at one or more substitutable positions of the group, and when more than one position in any given structure is substituted, the substituent is either the same or different at each position.

[0298] As used herein, “pharmaceutically acceptable salt” refers to those salts which are, within the scope of sound medical judgment, suitable for use in contact with the tissues of humans and lower animals without undue toxicity, irritation, allergic response and the like, and are commensurate with a reasonable benefit/risk ratio. Pharmaceutically acceptable salts are well known in the art. For example, Berge et al., describes pharmaceutically acceptable salts in detail in J. Pharmaceutical Sciences (1977) 66:1-19. Pharmaceutically acceptable salts of the compounds of this invention include those derived from suitable inorganic and organic acids and bases. Examples of pharmaceutically acceptable, nontoxic acid addition salts are salts of an amino group formed with inorganic acids such as hydrochloric acid, hydrobromic acid, phosphoric acid, sulfuric acid and perchloric acid or with organic acids such as acetic acid, oxalic acid, maleic acid, tartaric acid, citric acid, succinic acid or malonic acid or by using other methods used in the art such as ion exchange. Other pharmaceutically acceptable salts include adipate, alginate, ascorbate, aspartate, benzenesulfonate, benzoate, bisulfate, borate, butyrate, camphorate, camphorsulfonate, citrate, cyclopentanepropionate, digluconate, dodecylsulfate, ethanesulfonate, formate, fumarate, glucoheptonate, glycerophosphate, gluconate, hemisulfate, heptanoate, hexanoate, hydroiodide, 2-hydroxy-ethanesulfonate, lactobionate, lactate, laurate, lauryl sulfate, malate, maleate, malonate, methanesulfonate, 2-naphthalenesulfonate, nicotinate, nitrate, oleate, oxalate, palmitate, pamoate, pectinate, persulfate, 3-phenylpropionate, phosphate, picrate, pivalate, propionate, stearate, succinate, sulfate, tartrate, thiocyanate, p-toluenesulfonate, undecanoate, valerate salts, and the like. Pharmaceutically acceptable salts derived from appropriate bases include alkali metal, alkaline earth metal, ammonium and N+(C1-4alkyl)4 salts. Representative alkali or alkaline earth metal salts include sodium, lithium, potassium, calcium, magnesium, and the like. Further pharmaceutically acceptable salts include, when appropriate, nontoxic ammonium, quaternary ammonium, and amine cations formed using counterions such as halide, hydroxide, carboxylate, sulfate, phosphate, nitrate, lower alkyl sulfonate, and aryl sulfonate.

[0299] In typical embodiments, the present invention is intended to encompass the compounds disclosed herein, and the pharmaceutically acceptable salts, pharmaceutically acceptable esters, tautomeric forms, polymorphs, and prodrugs of such compounds. In some embodiments, the present invention includes a pharmaceutically acceptable addition salt, a pharmaceutically acceptable ester, a solvate (e.g., hydrate) of an addition salt, a tautomeric form, a polymorph, an enantiomer, a mixture of enantiomers, a stereoisomer or mixture of stereoisomers (pure or as a racemic or non-racemic mixture) of a compound described herein.

[0300] Compounds described herein can comprise one or more asymmetric centers, and thus can exist in various isomeric forms, e.g., enantiomers and/or diastereomers. For example, the compounds described herein can be in the form of an individual enantiomer, diastereomer or geometric isomer, or can be in the form of a mixture of stereoisomers, including racemic mixtures and mixtures enriched in one or more stereoisomer. Isomers can be isolated from mixtures by methods known to those skilled in the art, including chiral high pressure liquid chromatography (HPLC) and the formation and crystallization of chiral salts; or preferred isomers can be prepared by asymmetric syntheses. See, for example, Jacques et al., Enantiomers, Racemates and Resolutions (Wiley Interscience, New York, 1981); Wilen et al., Tetrahedron 33:2725 (1977); Eliel, Stereochemistry of Carbon Compounds (McGraw-Hill, NY, 1962); and Wilen, Tables of Resolving Agents and Optical Resolutions p. 268 (E. L. Eliel, Ed., Univ. of Notre Dame Press, Notre Dame, IN 1972). The invention additionally encompasses compounds described herein as individual isomers substantially free of other isomers, and alternatively, as mixtures of various isomers.

[0301] In certain embodiments the compounds and the transfer vehicles of which such compounds are a component (e.g., lipid nanoparticles) exhibit an enhanced (e.g., increased) ability to transfect one or more target cells. Accordingly, also provided herein are methods of transfecting one or more target cells. Such methods generally comprise the step of contacting the one or more target cells with the compounds and/or pharmaceutical compositions disclosed herein such that the one or more target cells are transfected with the circular RNA encapsulated therein. As used herein, the terms “transfect” or “transfection” refer to the intracellular introduction of one or more encapsulated materials (e.g., nucleic acids and/or polynucleotides) into a cell, or preferably into a target cell. The term “transfection efficiency” refers to the relative amount of such encapsulated material (e.g., polynucleotides) up-taken by, introduced into and/or expressed by the target cell which is subject to transfection. In some embodiments, transfection efficiency may be estimated by the amount of a reporter polynucleotide product produced by the target cells following transfection. In some embodiments, a transfer vehicle has high transfection efficiency. In some embodiments, a transfer vehicle has at least about 10%, 20%, 30%, 40%, 50%, 60%, 70%, 80%, or 90% transfection efficiency.

[0302] As used herein, the term “liposome” generally refers to a vesicle composed of lipids (e.g., amphiphilic lipids) arranged in one or more spherical bilayer or bilayers. Such liposomes may be unilamellar or multilamellar vesicles which have a membrane formed from a lipophilic material and an aqueous interior that contains the encapsulated circRNA to be delivered to one or more target cells, tissues and organs. In certain embodiments, the compositions described herein comprise one or more lipid nanoparticles. Examples of suitable lipids (e.g., ionizable lipids) that may be used to form the liposomes and lipid nanoparticles contemplated include one or more of the compounds disclosed herein (e.g., HGT4001, HGT4002, HGT4003, HGT4004 and/or HGT4005). Such liposomes and lipid nanoparticles may also comprise additional ionizable lipids such as C12-200, DLin-KC2-DMA, and/or HGT5001, helper lipids, structural lipids, PEG-modified lipids, MC3, DLinDMA, DLinkC2DMA, cKK-E12, ICE, HGT5000, DODAC, DDAB, DMRIE, DOSPA, DOGS, DODAP, DODMA, DMDMA, DODAC, DLenDMA, DMRIE, CLinDMA, CpLinDMA, DMOBA, DOcarbDAP, DLinDAP, DLincarbDAP, DLinCDAP, KLin-K-DMA, DLin-K-XTC2-DMA, HGT4003, and combinations thereof.

[0303] As used herein, the phrase “biodegradable lipid” or “degradable lipid” refers to any of a number of lipid species that are broken down in a host environment on the order of minutes, hours, or days ideally making them less toxic and unlikely to accumulate in a host over time. Common modifications to lipids include ester bonds, and disulfide bonds among others to increase the biodegradability of a lipid.

[0304] As used herein, the phrase “biodegradable PEG lipid” or “degradable PEG lipid” refers to any of a number of lipid species where the PEG molecules are cleaved from the lipid in a host environment on the order of minutes, hours, or days ideally making them less immunogenic. Common modifications to PEG lipids include ester bonds, and disulfide bonds among others to increase the biodegradability of a lipid.

[0305] In certain embodiments of the present invention, the transfer vehicles (e.g., lipid nanoparticles) are prepared to encapsulate one or more materials or therapeutic agents (e.g., circRNA). The process of incorporating a desired therapeutic agent (e.g., circRNA) into a transfer vehicle is referred to herein as or “loading” or “encapsulating” (Lasic, et al., FEBS Lett., 312: 255-258, 1992). The transfer vehicle-loaded or -encapsulated materials (e.g., circRNA) may be completely or partially located in the interior space of the transfer vehicle, within a bilayer membrane of the transfer vehicle, or associated with the exterior surface of the transfer vehicle.

[0306] As used herein, the term “structural lipid” refers to sterols and also to lipids containing sterol moieties.

[0307] As defined herein, “sterols” are a subgroup of steroids consisting of steroid alcohols.

[0308] As used herein, the term “PEG” means any polyethylene glycol or other polyalkylene ether polymer.

[0309] As generally defined herein, a “PEG-OH lipid” (also referred to herein as “hydroxy-PEGylated lipid”) is a PEGylated lipid having one or more hydroxyl (—OH) groups on the lipid.

[0310] As used herein, a “phospholipid” is a lipid that includes a phosphate moiety and one or more carbon chains, such as unsaturated fatty acid chains.

[0311] All nucleotide sequences disclosed herein can represent an RNA sequence or a corresponding DNA sequence. It is understood that deoxythymidine (dT or T) in a DNA is transcribed into a uridine (U) in an RNA. As such, “T” and “U” are used interchangeably herein in nucleotide sequences.

[0312] The recitations “sequence identity” or, for example, comprising a “sequence 50% identical to,” as used herein, refer to the extent that sequences are identical on a nucleotide-by-nucleotide basis or an amino acid-by-amino acid basis over a window of comparison. Thus, a “percentage of sequence identity” may be calculated by comparing two optimally aligned sequences over the window of comparison, determining the number of positions at which the identical nucleic acid base (e.g., A, T, C, G, I) or the identical amino acid residue (e.g., Ala, Pro, Ser, Thr, Gly, Val, Leu, Ile, Phe, Tyr, Trp, Lys, Arg, His, Asp, Glu, Asn, Gln, Cys and Met) occurs in both sequences to yield the number of matched positions, dividing the number of matched positions by the total number of positions in the window of comparison (i.e., the window size), and multiplying the result by 100 to yield the percentage of sequence identity. Included are nucleotides and polypeptides having at least about 50%, 55%, 60%, 65%, 70%, 75%, 80%, 85%, 90%, 95%, 96%, 97%, 98%, 99% or 100% sequence identity to any of the reference sequences described herein, typically where the polypeptide variant maintains at least one biological activity of the reference polypeptide.

[0313] The expression sequences in the polynucleotide construct may be separated by a “cleavage site” sequence which enables polypeptides encoded by the expression sequences, once translated, to be expressed separately by the cell.

[0314] A “self-cleaving peptide” refers to a peptide which is translated without a peptide bond between two adjacent amino acids, or functions such that when the polypeptide comprising the proteins and the self-cleaving peptide is produced, it is immediately cleaved or separated into distinct and discrete first and second polypeptides without the need for any external cleavage activity.

[0315] The α and β chains of αβ TCR's are generally regarded as each having two domains or regions, namely variable and constant domains/regions. The variable domain consists of a concatenation of variable regions and joining regions. In the present specification and claims, the term “TCR alpha variable domain” therefore refers to the concatenation of TRAV and TRAJ regions, and the term TCR alpha constant domain refers to the extracellular TRAC region, or to a C-terminal truncated TRAC sequence. Likewise, the term “TCR beta variable domain” refers to the concatenation of TRBV and TRBD/TRBJ regions, and the term TCR beta constant domain refers to the extracellular TRBC region, or to a C-terminal truncated TRBC sequence.

[0316] As used herein, “autoimmunity” is defined as persistent and progressive immune reactions to non-infectious self-antigens, as distinct from infectious non self-antigens from bacterial, viral, fungal, or parasitic organisms which invade and persist within mammals and humans. Autoimmune conditions include scleroderma, Grave's disease, Crohn's disease, Sjorgen's disease, multiple sclerosis, Hashimoto's disease, psoriasis, myasthenia gravis, autoimmune polyendocrinopathy syndromes, Type I diabetes mellitus (TIDM), autoimmune gastritis, autoimmune uveoretinitis, polymyositis, colitis, and thyroiditis, as well as in the generalized autoimmune diseases typified by human Lupus. “Autoantigen” or “self-antigen” as used herein refers to an antigen or epitope which is native to the mammal and which is immunogenic in said mammal.

[0317] As used herein, the term “cationic lipid” or “ionizable lipid” refers to any of a number of lipid species that carry a net positive charge at a selected pH, such as physiological pH.

[0318] The term “antibody” (Ab) includes, without limitation, a glycoprotein immunoglobulin which binds specifically to an antigen. In general, an antibody may comprise at least two heavy (H) chains and two light (L) chains interconnected by disulfide bonds, or an antigen-binding molecule thereof. Each H chain may comprise a heavy chain variable region (abbreviated herein as VH) and a heavy chain constant region. The heavy chain constant region can comprise three constant domains, CH1, CH2 and CH3. Each light chain can comprise a light chain variable region (abbreviated herein as VL) and a light chain constant region. The light chain constant region can comprise one constant domain, CL. The VH and VL regions may be further subdivided into regions of hypervariability, termed complementarity determining regions (CDRs), interspersed with regions that are more conserved, termed framework regions (FR). Each VH and VL may comprise three CDRs and four FRs, arranged from amino-terminus to carboxy-terminus in the following order: FR1, CDR1, FR2, CDR2, FR3, CDR3, and FR4. The variable regions of the heavy and light chains contain a binding domain that interacts with an antigen. The constant regions of the Abs may mediate the binding of the immunoglobulin to host tissues or factors, including various cells of the immune system (e.g., effector cells) and the first component of the classical complement system. Antibodies may include, for example, monoclonal antibodies, recombinantly produced antibodies, monospecific antibodies, multispecific antibodies (including bispecific antibodies), human antibodies, engineered antibodies, humanized antibodies, chimeric antibodies, immunoglobulins, synthetic antibodies, tetrameric antibodies comprising two heavy chain and two light chain molecules, an antibody light chain monomer, an antibody heavy chain monomer, an antibody light chain dimer, an antibody heavy chain dimer, an antibody light chain-antibody heavy chain pair, intrabodies, antibody fusions (sometimes referred to herein as “antibody conjugates”), heteroconjugate antibodies, single domain antibodies, monovalent antibodies, single chain antibodies or single-chain variable fragments (scFv), camelized antibodies, affybodies, Fab fragments, F(ab′)2 fragments, disulfide-linked variable fragments (sdFv), anti-idiotypic (anti-id) antibodies (including, e.g., anti-anti-Id antibodies), minibodies, domain antibodies, synthetic antibodies (sometimes referred to herein as “antibody mimetics”), and antigen-binding fragments of any of the above. In some embodiments, antibodies described herein refer to polyclonal antibody populations.

[0319] An immunoglobulin may derive from any of the commonly known isotypes, including but not limited to IgA, secretory IgA, IgG and IgM. IgG subclasses are also well known to those in the art and include but are not limited to human IgG1, IgG2, IgG3 and IgG4. “Isotype” refers to the Ab class or subclass (e.g., IgM or IgG1) that is encoded by the heavy chain constant region genes. The term “antibody” includes, by way of example, both naturally occurring and non-naturally occurring Abs; monoclonal and polyclonal Abs; chimeric and humanized Abs; human or nonhuman Abs; wholly synthetic Abs; and single chain Abs. A nonhuman Ab may be humanized by recombinant methods to reduce its immunogenicity in humans. Where not expressly stated, and unless the context indicates otherwise, the term “antibody” also includes an antigen-binding fragment or an antigen-binding portion of any of the aforementioned immunoglobulins, and includes a monovalent and a divalent fragment or portion, and a single chain Ab.

[0320] An “antigen binding molecule,” “antigen binding portion,” or “antibody fragment” refers to any molecule that comprises the antigen binding parts (e.g., CDRs) of the antibody from which the molecule is derived. An antigen binding molecule may include the antigenic complementarity determining regions (CDRs). Examples of antibody fragments include, but are not limited to, Fab, Fab′, F(ab′)2, Fv fragments, dAb, linear antibodies, scFv antibodies, and multispecific antibodies formed from antigen binding molecules. Peptibodies (i.e. Fc fusion molecules comprising peptide binding domains) are another example of suitable antigen binding molecules. In some embodiments, the antigen binding molecule binds to an antigen on a tumor cell. In some embodiments, the antigen binding molecule binds to an antigen on a cell involved in a hyperproliferative disease or to a viral or bacterial antigen. In some embodiments, the antigen binding molecule binds to BCMA. In further embodiments, the antigen binding molecule is an antibody fragment, including one or more of the complementarity determining regions (CDRs) thereof, that specifically binds to the antigen. In further embodiments, the antigen binding molecule is a single chain variable fragment (scFv). In some embodiments, the antigen binding molecule comprises or consists of avimers.

[0321] As used herein, the term “variable region” or “variable domain” is used interchangeably and are common in the art. The variable region typically refers to a portion of an antibody, generally, a portion of a light or heavy chain, typically about the amino-terminal 110 to 120 amino acids in the mature heavy chain and about 90 to 115 amino acids in the mature light chain, which differ extensively in sequence among antibodies and are used in the binding and specificity of a particular antibody for its particular antigen. The variability in sequence is concentrated in those regions called complementarity determining regions (CDRs) while the more highly conserved regions in the variable domain are called framework regions (FR). Without wishing to be bound by any particular mechanism or theory, it is believed that the CDRs of the light and heavy chains are primarily responsible for the interaction and specificity of the antibody with antigen. In some embodiments, the variable region is a human variable region. In some embodiments, the variable region comprises rodent or murine CDRs and human framework regions (FRs). In particular embodiments, the variable region is a primate (e.g., non-human primate) variable region. In some embodiments, the variable region comprises rodent or murine CDRs and primate (e.g., non-human primate) framework regions (FRs).

[0322] The terms “VL” and “VL domain” are used interchangeably to refer to the light chain variable region of an antibody or an antigen-binding molecule thereof.

[0323] The terms “VH” and “VH domain” are used interchangeably to refer to the heavy chain variable region of an antibody or an antigen-binding molecule thereof.

[0324] A number of definitions of the CDRs are commonly in use: Kabat numbering, Chothia numbering, AbM numbering, or contact numbering. The AbM definition is a compromise between the two used by Oxford Molecular's AbM antibody modelling software. The contact definition is based on an analysis of the available complex crystal structures. The term “Kabat numbering” and like terms are recognized in the art and refer to a system of numbering amino acid residues in the heavy and light chain variable regions of an antibody, or an antigen-binding molecule thereof. In certain aspects, the CDRs of an antibody may be determined according to the Kabat numbering system (see, e.g., Kabat E A & Wu T T (1971) Ann NY Acad Sci 190: 382-391 and Kabat E A et al., (1991) Sequences of Proteins of Immunological Interest, Fifth Edition, U.S. Department of Health and Human Services, NIH Publication No. 91-3242). Using the Kabat numbering system, CDRs within an antibody heavy chain molecule are typically present at amino acid positions 31 to 35, which optionally may include one or two additional amino acids, following 35 (referred to in the Kabat numbering scheme as 35A and 35B) (CDR1), amino acid positions 50 to 65 (CDR2), and amino acid positions 95 to 102 (CDR3). Using the Kabat numbering system, CDRs within an antibody light chain molecule are typically present at amino acid positions 24 to 34 (CDR1), amino acid positions 50 to 56 (CDR2), and amino acid positions 89 to 97 (CDR3). In a specific embodiment, the CDRs of the antibodies described herein have been determined according to the Kabat numbering scheme. In certain aspects, the CDRs of an antibody may be determined according to the Chothia numbering scheme, which refers to the location of immunoglobulin structural loops (see, e.g., Chothia C & Lesk AM, (1987), J Mol Biol 196: 901-917; Al-Lazikani B et al, (1997) J Mol Biol 273: 927-948; Chothia C et al., (1992) J Mol Biol 227: 799-817; Tramontano A et al, (1990) J Mol Biol 215(1): 175-82; and U.S. Pat. No. 7,709,226). Typically, when using the Kabat numbering convention, the Chothia CDR-H1 loop is present at heavy chain amino acids 26 to 32, 33, or 34, the Chothia CDR-H2 loop is present at heavy chain amino acids 52 to 56, and the Chothia CDR-H3 loop is present at heavy chain amino acids 95 to 102, while the Chothia CDR-L¹ loop is present at light chain amino acids 24 to 34, the Chothia CDR-L² loop is present at light chain amino acids 50 to 56, and the Chothia CDR-L³ loop is present at light chain amino acids 89 to 97. The end of the Chothia CDR-HI loop when numbered using the Kabat numbering convention varies between H32 and H34 depending on the length of the loop (this is because the Kabat numbering scheme places the insertions at H35A and H35B; if neither 35A nor 35B is present, the loop ends at 32; if only 35A is present, the loop ends at 33; if both 35A and 35B are present, the loop ends at 34). In a specific embodiment, the CDRs of the antibodies described herein have been determined according to the Chothia numbering scheme.

[0325] As used herein, the terms “constant region” and “constant domain” are interchangeable and have a meaning common in the art. The constant region is an antibody portion, e.g., a carboxyl terminal portion of a light and/or heavy chain which is not directly involved in binding of an antibody to antigen but which may exhibit various effector functions, such as interaction with the Fc receptor. The constant region of an immunoglobulin molecule generally has a more conserved amino acid sequence relative to an immunoglobulin variable domain.

[0326] “Binding affinity” generally refers to the strength of the sum total of non-covalent interactions between a single binding site of a molecule (e.g., an antibody) and its binding partner (e.g., an antigen). Unless indicated otherwise, as used herein, “binding affinity” refers to intrinsic binding affinity which reflects a 1:1 interaction between members of a binding pair (e.g., antibody and antigen). The affinity of a molecule X for its partner Y may generally be represented by the dissociation constant (KD or Kd). Affinity may be measured and/or expressed in a number of ways known in the art, including, but not limited to, equilibrium dissociation constant (KD), and equilibrium association constant (KA or Ka). The KD is calculated from the quotient of koff/kon, whereas KA is calculated from the quotient of kon/koff. kon refers to the association rate constant of, e.g., an antibody to an antigen, and koff refers to the dissociation of, e.g., an antibody to an antigen. The kon and koff may be determined by techniques known to one of ordinary skill in the art, such as BIACORE® or KinExA.

[0327] As used herein, a “conservative amino acid substitution” is one in which the amino acid residue is replaced with an amino acid residue having a similar side chain. Families of amino acid residues having similar side chains have been defined in the art. These families include amino acids with basic side chains (e.g., lysine, arginine, histidine), acidic side chains (e.g., aspartic acid, glutamic acid), uncharged polar side chains (e.g., glycine, asparagine, glutamine, serine, threonine, tyrosine, cysteine, tryptophan), nonpolar side chains (e.g., alanine, valine, leucine, isoleucine, proline, phenylalanine, methionine), beta-branched side chains (e.g., threonine, valine, isoleucine) and aromatic side chains (e.g., tyrosine, phenylalanine, tryptophan, histidine). In some embodiments, one or more amino acid residues within a CDR(s) or within a framework region(s) of an antibody or antigen-binding molecule thereof may be replaced with an amino acid residue with a similar side chain.

[0328] As, used herein, the term “heterologous” means from any source other than naturally occurring sequences.

[0329] As used herein, an “epitope” is a term in the art and refers to a localized region of an antigen to which an antibody may specifically bind. An epitope may be, for example, contiguous amino acids of a polypeptide (linear or contiguous epitope) or an epitope can, for example, come together from two or more non-contiguous regions of a polypeptide or polypeptides (conformational, non-linear, discontinuous, or non-contiguous epitope). In some embodiments, the epitope to which an antibody binds may be determined by, e.g., NMR spectroscopy, X-ray diffraction crystallography studies, ELISA assays, hydrogen/deuterium exchange coupled with mass spectrometry (e.g., liquid chromatography electrospray mass spectrometry), array-based oligo-peptide scanning assays, and/or mutagenesis mapping (e.g., site-directed mutagenesis mapping). For X-ray crystallography, crystallization may be accomplished using any of the known methods in the art (e.g., Giege R et al., (1994) Acta Crystallogr D Biol Crystallogr 50(Pt 4): 339-350; McPherson A (1990) Eur J Biochem 189: 1-23; Chayen NE (1997) Structure 5: 1269-1274; McPherson A (1976) J Biol Chem 251: 6300-6303). Antibody: antigen crystals may be studied using well known X-ray diffraction techniques and may be refined using computer software such as X-PLOR (Yale University, 1992, distributed by Molecular Simulations, Inc.; see e.g. Meth Enzymol (1985) volumes 114 & 115, eds Wyckoff H W et al.; U.S. Patent Publication No. 2004/0014194), and BUSTER (Bricogne G (1993) Acta Crystallogr D Biol Crystallogr 49(Pt 1): 37-60; Bricogne G (1997) Meth Enzymol 276A: 361-423, ed Carter C W; Roversi P et al., (2000) Acta Crystallogr D Biol Crystallogr 56(Pt 10): 1316-1323).

[0330] As used herein, an antigen binding molecule, an antibody, or an antigen binding molecule thereof “cross-competes” with a reference antibody or an antigen binding molecule thereof if the interaction between an antigen and the first binding molecule, an antibody, or an antigen binding molecule thereof blocks, limits, inhibits, or otherwise reduces the ability of the reference binding molecule, reference antibody, or an antigen binding molecule thereof to interact with the antigen. Cross competition may be complete, e.g., binding of the binding molecule to the antigen completely blocks the ability of the reference binding molecule to bind the antigen, or it may be partial, e.g., binding of the binding molecule to the antigen reduces the ability of the reference binding molecule to bind the antigen. In some embodiments, an antigen binding molecule that cross-competes with a reference antigen binding molecule binds the same or an overlapping epitope as the reference antigen binding molecule. In other embodiments, the antigen binding molecule that cross-competes with a reference antigen binding molecule binds a different epitope as the reference antigen binding molecule. Numerous types of competitive binding assays may be used to determine if one antigen binding molecule competes with another, for example: solid phase direct or indirect radioimmunoassay (RIA); solid phase direct or indirect enzyme immunoassay (EIA); sandwich competition assay (Stahli et al., 1983, Methods in Enzymology 9:242-253); solid phase direct biotin-avidin EIA (Kirkland et al., 1986, J. Immunol. 137:3614-3619); solid phase direct labeled assay, solid phase direct labeled sandwich assay (Harlow and Lane, 1988, Antibodies, A Laboratory Manual, Cold Spring Harbor Press); solid phase direct label RIA using 1-125 label (Morel et al., 1988, Molec. Immunol. 25:7-15); solid phase direct biotin-avidin EIA (Cheung, et al., 1990, Virology 176:546-552); and direct labeled RIA (Moldenhauer et al., 1990, Scand. J. Immunol. 32:77-82).

[0331] As used herein, the terms “immunospecifically binds,” “immunospecifically recognizes,” “specifically binds,” and “specifically recognizes” are analogous terms in the context of antibodies and refer to molecules that bind to an antigen (e.g., epitope or immune complex) as such binding is understood by one skilled in the art. For example, a molecule that specifically binds to an antigen may bind to other peptides or polypeptides, generally with lower affinity as determined by, e.g., immunoassays, BIACORE®, KinExA 3000 instrument (Sapidyne Instruments, Boise, ID), or other assays known in the art. In a specific embodiment, molecules that specifically bind to an antigen bind to the antigen with a KA that is at least 2 logs, 2.5 logs, 3 logs, 4 logs or greater than the KA when the molecules bind to another antigen.

[0332] An “antigen” refers to any molecule that provokes an immune response or is capable of being bound by an antibody or an antigen binding molecule. The immune response may involve either antibody production, or the activation of specific immunologically-competent cells, or both. A person of skill in the art would readily understand that any macromolecule, including virtually all proteins or peptides, may serve as an antigen. An antigen may be endogenously expressed, i.e. expressed by genomic DNA, or may be recombinantly expressed. An antigen may be specific to a certain tissue, such as a cancer cell, or it may be broadly expressed. In addition, fragments of larger molecules may act as antigens. In some embodiments, antigens are tumor antigens.

[0333] The term “autologous” refers to any material derived from the same individual to which it is later to be re-introduced. For example, the engineered autologous cell therapy (eACT™) method described herein involves collection of lymphocytes from a patient, which are then engineered to express, e.g., a CAR construct, and then administered back to the same patient.

[0334] The term “allogeneic” refers to any material derived from one individual which is then introduced to another individual of the same species, e.g., allogeneic T cell transplantation.

[0335] A “cancer” refers to a broad group of various diseases characterized by the uncontrolled growth of abnormal cells in the body. Unregulated cell division and growth results in the formation of malignant tumors that invade neighboring tissues and may also metastasize to distant parts of the body through the lymphatic system or bloodstream. A “cancer” or “cancer tissue” may include a tumor. Examples of cancers that may be treated by the methods disclosed herein include, but are not limited to, cancers of the immune system including lymphoma, leukemia, myeloma, and other leukocyte malignancies. In some embodiments, the methods disclosed herein may be used to reduce the tumor size of a tumor derived from, for example, bone cancer, pancreatic cancer, skin cancer, cancer of the head or neck, cutaneous or intraocular malignant melanoma, uterine cancer, ovarian cancer, rectal cancer, cancer of the anal region, stomach cancer, testicular cancer, uterine cancer, multiple myeloma, Hodgkin's Disease, non-Hodgkin's lymphoma (NHL), primary mediastinal large B cell lymphoma (PMBC), diffuse large B cell lymphoma (DLBCL), follicular lymphoma (FL), transformed follicular lymphoma, splenic marginal zone lymphoma (SMZL), cancer of the esophagus, cancer of the small intestine, cancer of the endocrine system, cancer of the thyroid gland, cancer of the parathyroid gland, cancer of the adrenal gland, cancer of the urethra, cancer of the penis, chronic or acute leukemia, acute myeloid leukemia, chronic myeloid leukemia, acute lymphoblastic leukemia (ALL) (including non T cell ALL), chronic lymphocytic leukemia (CLL), solid tumors of childhood, lymphocytic lymphoma, cancer of the bladder, cancer of the kidney or ureter, neoplasm of the central nervous system (CNS), primary CNS lymphoma, tumor angiogenesis, spinal axis tumor, brain stem glioma, pituitary adenoma, epidermoid cancer, squamous cell cancer, T cell lymphoma, environmentally induced cancers including those induced by asbestos, other B cell malignancies, and combinations of said cancers. In some embodiments, the methods disclosed herein may be used to reduce the tumor size of a tumor derived from, for example, sarcomas and carcinomas, fibrosarcoma, myxosarcoma, liposarcoma, chondrosarcoma, osteogenic sarcoma, Kaposi's sarcoma, sarcoma of soft tissue, and other sarcomas, synovioma, mesothelioma, Ewing's tumor, leiomyosarcoma, rhabdomyosarcoma, colon carcinoma, pancreatic cancer, breast cancer, ovarian cancer, prostate cancer, hepatocellular carcinoma, lung cancer, colorectal cancer, squamous cell carcinoma, basal cell carcinoma, adenocarcinoma (for example adenocarcinoma of the pancreas, colon, ovary, lung, breast, stomach, prostate, cervix, or esophagus), sweat gland carcinoma, sebaceous gland carcinoma, papillary carcinoma, papillary adenocarcinomas, medullary carcinoma, bronchogenic carcinoma, renal cell carcinoma, hepatoma, bile duct carcinoma, choriocarcinoma, Wilms' tumor, cervical cancer, testicular tumor, bladder carcinoma, carcinoma of the fallopian tubes, carcinoma of the endometrium, carcinoma of the cervix, carcinoma of the vagina, carcinoma of the vulva, carcinoma of the renal pelvis, CNS tumors (such as a glioma, astrocytoma, medulloblastoma, craniopharyogioma, ependymoma, pinealoma, hemangioblastoma, acoustic neuroma, oligodendroglioma, menangioma, melanoma, neuroblastoma and retinoblastoma). The particular cancer may be responsive to chemo- or radiation therapy or the cancer may be refractory. A refractory cancer refers to a cancer that is not amenable to surgical intervention and the cancer is either initially unresponsive to chemo- or radiation therapy or the cancer becomes unresponsive over time.

[0336] An “anti-tumor effect” as used herein, refers to a biological effect that may present as a decrease in tumor volume, a decrease in the number of tumor cells, a decrease in tumor cell proliferation, a decrease in the number of metastases, an increase in overall or progression-free survival, an increase in life expectancy, or amelioration of various physiological symptoms associated with the tumor. An anti-tumor effect may also refer to the prevention of the occurrence of a tumor, e.g., a vaccine.

[0337] A “cytokine,” as used herein, refers to a non-antibody protein that is released by one cell in response to contact with a specific antigen, wherein the cytokine interacts with a second cell to mediate a response in the second cell. “Cytokine” as used herein is meant to refer to proteins released by one cell population that act on another cell as intercellular mediators. A cytokine may be endogenously expressed by a cell or administered to a subject. Cytokines may be released by immune cells, including macrophages, B cells, T cells, neutrophils, dendritic cells, eosinophils and mast cells to propagate an immune response. Cytokines may induce various responses in the recipient cell. Cytokines may include homeostatic cytokines, chemokines, pro-inflammatory cytokines, effectors, and acute-phase proteins. For example, homeostatic cytokines, including interleukin (IL) 7 and IL-15, promote immune cell survival and proliferation, and pro-inflammatory cytokines may promote an inflammatory response. Examples of homeostatic cytokines include, but are not limited to, IL-2, IL-4, IL-5, IL-7, IL-10, IL-12p40, IL-12p70, IL-15, and interferon (IFN) gamma. Examples of pro-inflammatory cytokines include, but are not limited to, IL-1a, IL-1b, IL-6, IL-13, IL-17a, IL-23, IL-27, tumor necrosis factor (TNF)-alpha, TNF-beta, fibroblast growth factor (FGF) 2, granulocyte macrophage colony-stimulating factor (GM-CSF), soluble intercellular adhesion molecule 1 (sICAM-1), soluble vascular adhesion molecule 1 (sVCAM-1), vascular endothelial growth factor (VEGF), VEGF-C, VEGF-D, and placental growth factor (PLGF). Examples of effectors include, but are not limited to, granzyme A, granzyme B, soluble Fas ligand (sFasL), TGF-beta, IL-35, and perform. Examples of acute phase-proteins include, but are not limited to, C-reactive protein (CRP) and serum amyloid A (SAA).

[0338] The term “lymphocyte” as used herein includes natural killer (NK) cells, T cells, or B cells. NK cells are a type of cytotoxic (cell toxic) lymphocyte that represent a major component of the innate immune system. NK cells reject tumors and cells infected by viruses. It works through the process of apoptosis or programmed cell death. They were termed “natural killers” because they do not require activation in order to kill cells. T cells play a major role in cell-mediated-immunity (no antibody involvement). T cell receptors (TCR) differentiate T cells from other lymphocyte types. The thymus, a specialized organ of the immune system, is the primary site for T cell maturation. There are numerous types of T cells, including: helper T cells (e.g., CD4+ cells), cytotoxic T cells (also known as TC, cytotoxic T lymphocytes, CTL, T-killer cells, cytolytic T cells, CD8+ T cells or killer T cells), memory T cells ((i) stem memory cells (TSCM), like naive cells, are CD45RO−, CCR7+, CD45RA+, CD62L+(L-selectin), CD27+, CD28+ and IL-7Ra+, but also express large amounts of CD95, IL-2R, CXCR3, and LFA-1, and show numerous functional attributes distinctive of memory cells); (ii) central memory cells (TCM) express L-selectin and CCR7, they secrete IL-2, but not IFNγ or IL-4, and (iii) effector memory cells (TEM), however, do not express L-selectin or CCR7 but produce effector cytokines like IFNγ and IL-4), regulatory T cells (Tregs, suppressor T cells, or CD4+CD25+ or CD4+FoxP3+ regulatory T cells), natural killer T cells (NKT) and gamma delta T cells. B-cells, on the other hand, play a principal role in humoral immunity (with antibody involvement). B-cells make antibodies, are capable of acting as antigen-presenting cells (APCs) and turn into memory B-cells and plasma cells, both short-lived and long-lived, after activation by antigen interaction. In mammals, immature B-cells are formed in the bone marrow.

[0339] The term “genetically engineered” or “engineered” refers to a method of modifying the genome of a cell, including, but not limited to, deleting a coding or non-coding region or a portion thereof or inserting a coding region or a portion thereof. In some embodiments, the cell that is modified is a lymphocyte, e.g., a T cell, which may either be obtained from a patient or a donor. The cell may be modified to express an exogenous construct, such as, e.g., a chimeric antigen receptor (CAR) or a T cell receptor (TCR), which is incorporated into the cell's genome.

[0340] An “immune response” refers to the action of a cell of the immune system (for example, T lymphocytes, B lymphocytes, natural killer (NK) cells, macrophages, eosinophils, mast cells, dendritic cells and neutrophils) and soluble macromolecules produced by any of these cells or the liver (including Abs, cytokines, and complement) that results in selective targeting, binding to, damage to, destruction of, and/or elimination from a vertebrate's body of invading pathogens, cells or tissues infected with pathogens, cancerous or other abnormal cells, or, in cases of autoimmunity or pathological inflammation, normal human cells or tissues.

[0341] A “costimulatory signal,” as used herein, refers to a signal, which in combination with a primary signal, such as TCR/CD3 ligation, leads to a T cell response, such as, but not limited to, proliferation and/or upregulation or down regulation of key molecules.

[0342] A “costimulatory ligand,” as used herein, includes a molecule on an antigen presenting cell that specifically binds a cognate co-stimulatory molecule on a T cell. Binding of the costimulatory ligand provides a signal that mediates a T cell response, including, but not limited to, proliferation, activation, differentiation, and the like. A costimulatory ligand induces a signal that is in addition to the primary signal provided by a stimulatory molecule, for instance, by binding of a T cell receptor (TCR)/CD3 complex with a major histocompatibility complex (MHC) molecule loaded with peptide. A co-stimulatory ligand may include, but is not limited to, 3/TR6, 4—IBB ligand, agonist or antibody that binds Toll-like receptor, B7-1 (CD80), B7-2 (CD86), CD30 ligand, CD40, CD7, CD70, CD83, herpes virus entry mediator (HVEM), human leukocyte antigen G (HLA-G), ILT4, immunoglobulin-like transcript (ILT) 3, inducible costimulatory ligand (ICOS-L), intercellular adhesion molecule (ICAM), ligand that specifically binds with B7-H3, lymphotoxin beta receptor, MHC class I chain-related protein A (MICA), MHC class I chain-related protein B (MICB), OX40 ligand, PD-L², or programmed death (PD) LI. A co-stimulatory ligand includes, without limitation, an antibody that specifically binds with a co-stimulatory molecule present on a T cell, such as, but not limited to, 4-1BB, B7-H3, CD2, CD27, CD28, CD30, CD40, CD7, ICOS, ligand that specifically binds with CD83, lymphocyte function-associated antigen-1 (LFA-1), natural killer cell receptor C (NKG2C), OX40, PD-1, or tumor necrosis factor superfamily member 14 (TNFSF14 or LIGHT).

[0343] A “costimulatory molecule” is a cognate binding partner on a T cell that specifically binds with a costimulatory ligand, thereby mediating a costimulatory response by the T cell, such as, but not limited to, proliferation. Costimulatory molecules include, but are not limited to, 4-1BB/CD137, B7-H3, BAFFR, BLAME (SLAMF8), BTLA, CD 33, CD 45, CD100 (SEMA4D), CD103, CD134, CD137, CD154, CD16, CD160 (BY55), CD 18, CD19, CD19a, CD2, CD22, CD247, CD27, CD276 (B7-H3), CD28, CD29, CD3 (alpha; beta; delta; epsilon; gamma; zeta), CD30, CD37, CD4, CD4, CD40, CD49a, CD49D, CD49f, CD5, CD64, CD69, CD7, CD80, CD83 ligand, CD84, CD86, CD8alpha, CD8beta, CD9, CD96 (Tactile), CD1-1a, CD1-1b, CD1-lc, CD1-ld, CDS, CEACAM1, CRT AM, DAP-10, DNAM1 (CD226), Fc gamma receptor, GADS, GITR, HVEM (LIGHTR), IA4, ICAM-1, ICAM-1, ICOS, Ig alpha (CD79a), IL²R beta, IL²R gamma, IL⁷R alpha, integrin, ITGA4, ITGA4, ITGA6, IT GAD, ITGAE, ITGAL, ITGAM, ITGAX, ITGB2, ITGB7, ITGB1, KIRDS2, LAT, LFA-1, LFA-1, LIGHT, LIGHT (tumor necrosis factor superfamily member 14; TNFSF14), LTBR, Ly9 (CD229), lymphocyte function-associated antigen-1 (LFA-1 (CD11a/CD18), MHC class I molecule, NKG2C, NKG2D, NKp30, NKp44, NKp46, NKp80 (KLRF1), OX40, PAG/Cbp, PD-1, PSGL¹, SELPLG (CD162), signaling lymphocytic activation molecule, SLAM (SLAMF1; CD150; IPO-3), SLAMF4 (CD244; 2B4), SLAMF6 (NTB-A; Lyl08), SLAMF7, SLP-76, TNF, TNFr, TNFR2, Toll ligand receptor, TRANCE/RANKL, VLA1, or VLA-6, or fragments, truncations, or combinations thereof.

[0344] As used herein, a “vaccine” refers to a composition for generating immunity for the prophylaxis and/or treatment of diseases. Accordingly, vaccines are medicaments which comprise antigens and are intended to be used in humans or animals for generating specific defense and protective substances upon administration to the human or animal.

[0345] As used herein, a “neoantigen” refers to a class of tumor antigens which arises from tumor-specific mutations in an expressed protein.

[0346] As used herein, a “fusion protein” is a protein with at least two domains that are encoded by separate genes that have been joined to transcribe for a single peptide.

### 2. DNA Template, Precursor RNA & Circular RNA

[0347] According to the present invention, transcription of a DNA template provided herein (e.g., comprising a 3′ enhanced intron element, 3′ enhanced exon element, a core functional element, a 5′ enhanced exon element, and a 5′ enhanced intron element) results in formation of a precursor linear RNA polynucleotide capable of circularizing. In some embodiments, this DNA template comprises a vector, PCR product, plasmid, minicircle DNA, cosmid, artificial chromosome, complementary DNA (cDNA), extrachromosomal DNA (ecDNA), or a fragment therein. In certain embodiments, the minicircle DNA may be linearized or non-linearized. In certain embodiments, the plasmid may be linearized or non-linearized. In some embodiments, the DNA template may be single-stranded. In other embodiments, the DNA template may be double-stranded. In some embodiments, the DNA template comprises in whole or in part from a viral, bacterial or eukaryotic vector.

[0348] The present invention, as provided herein, comprises a DNA template that shares the same sequence as the precursor linear RNA polynucleotide prior to splicing of the precursor linear RNA polynucleotide (e.g., a 3′ enhanced intron element, a 3′ enhanced exon element, a core functional element, and a 5′ enhanced exon element, a 5′ enhanced intron element). In some embodiments, said linear precursor RNA polynucleotide undergoes splicing leading to the removal of the 3′ enhanced intron element and 5′ enhanced intron element during the process of circularization. In some embodiments, the resulting circular RNA polynucleotide lacks a 3′ enhanced intron fragment and a 5′ enhanced intron fragment, but maintains a 3′ enhanced exon fragment, a core functional element, and a 5′ enhanced exon element.

[0349] In some embodiments, the precursor linear RNA polynucleotide circularizes when incubated in the presence of one or more guanosine nucleotides or nucleoside (e.g., GTP) and a divalent cation (e.g., Mg²⁺). In some embodiments, the 3′ enhanced exon element, 5′ enhanced exon element, and/or core functional element in whole or in part promotes the circularization of the precursor linear RNA polynucleotide to form the circular RNA polynucleotide provided herein.

[0350] In certain embodiments circular RNA provided herein is produced inside a cell. In some embodiments, precursor RNA is transcribed using a DNA template (e.g., in some embodiments, using a vector provided herein) in the cytoplasm by a bacteriophage RNA polymerase, or in the nucleus by host RNA polymerase II and then circularized.

[0351] In certain embodiments, the circular RNA provided herein is injected into an animal (e.g., a human), such that a polypeptide encoded by the circular RNA molecule is expressed inside the animal.

[0352] In some embodiments, the DNA (e.g., vector), linear RNA (e.g., precursor RNA), and/or circular RNA polynucleotide provided herein is between 300 and 10000, 400 and 9000, 500 and 8000, 600 and 7000, 700 and 6000, 800 and 5000, 900 and 5000, 1000 and 5000, 1100 and 5000, 1200 and 5000, 1300 and 5000, 1400 and 5000, and/or 1500 and 5000 nucleotides in length. In some embodiments, the polynucleotide is at least 300 nt, 400 nt, 500 nt, 600 nt, 700 nt, 800 nt, 900 nt, 1000 nt, 1100 nt, 1200 nt, 1300 nt, 1400 nt, 1500 nt, 2000 nt, 2500 nt, 3000 nt, 3500 nt, 4000 nt, 4500 nt, or 5000 nt in length. In some embodiments, the polynucleotide is no more than 3000 nt, 3500 nt, 4000 nt, 4500 nt, 5000 nt, 6000 nt, 7000 nt, 8000 nt, 9000 nt, or 10000 nt in length. In some embodiments, the length of a DNA, linear RNA, and/or circular RNA polynucleotide provided herein is about 300 nt, 400 nt, 500 nt, 600 nt, 700 nt, 800 nt, 900 nt, 1000 nt, 1100 nt, 1200 nt, 1300 nt, 1400 nt, 1500 nt, 2000 nt, 2500 nt, 3000 nt, 3500 nt, 4000 nt, 4500 nt, 5000 nt, 6000 nt, 7000 nt, 8000 nt, 9000 nt, or 10000 nt.

[0353] In some embodiments, the circular RNA provided herein has higher functional stability than mRNA comprising the same expression sequence. In some embodiments, the circular RNA provided herein has higher functional stability than mRNA comprising the same expression sequence, SmoU modifications, an optimized UTR, a cap, and/or a polyA tail.

[0354] In some embodiments, the circular RNA polynucleotide provided herein has a functional half-life of at least 5 hours, 10 hours, 15 hours, 20 hours. 30 hours, 40 hours, 50 hours, 60 hours, 70 hours or 80 hours. In some embodiments, the circular RNA polynucleotide provided herein has a functional half-life of 5-80, 10-70, 15-60, and/or 20-50 hours. In some embodiments, the circular RNA polynucleotide provided herein has a functional half-life greater than (e.g., at least 1.5-fold greater than, at least 2-fold greater than) that of an equivalent linear RNA polynucleotide encoding the same protein. In some embodiments, functional half-life can be assessed through the detection of functional protein synthesis.

[0355] In some embodiments, the circular RNA polynucleotide provided herein has a half-life of at least 5 hours, 10 hours, 15 hours, 20 hours. 30 hours, 40 hours, 50 hours, 60 hours, 70 hours or 80 hours. In some embodiments, the circular RNA polynucleotide provided herein has a half-life of 5-80, 10-70, 15-60, and/or 20-50 hours. In some embodiments, the circular RNA polynucleotide provided herein has a half-life greater than (e.g., at least 1.5-fold greater than, at least 2-fold greater than) that of an equivalent linear RNA polynucleotide encoding the same protein. In some embodiments, the circular RNA polynucleotide, or pharmaceutical composition thereof, has a functional half-life in a human cell greater than or equal to that of a pre-determined threshold value. In some embodiments the functional half-life is determined by a functional protein assay. For example in some embodiments, the functional half-life is determined by an in vitro luciferase assay, wherein the activity of Gaussia luciferase (GLuc) is measured in the media of human cells (e.g. HepG2) expressing the circular RNA polynucleotide every 1, 2, 6, 12, or 24 hours over 1, 2, 3, 4, 5, 6, 7, or 14 days. In other embodiments, the functional half-life is determined by an in vivo assay, wherein levels of a protein encoded by the expression sequence of the circular RNA polynucleotide are measured in patient serum or tissue samples every 1, 2, 6, 12, or 24 hours over 1, 2, 3, 4, 5, 6, 7, or 14 days. In some embodiments, the pre-determined threshold value is the functional half-life of a reference linear RNA polynucleotide comprising the same expression sequence as the circular RNA polynucleotide.

[0356] In some embodiments, the circular RNA provided herein may have a higher magnitude of expression than equivalent linear mRNA, e.g., a higher magnitude of expression 24 hours after administration of RNA to cells. In some embodiments, the circular RNA provided herein has a higher magnitude of expression than mRNA comprising the same expression sequence, 5moU modifications, an optimized UTR, a cap, and/or a polyA tail.

[0357] In some embodiments, the circular RNA provided herein may be less immunogenic than an equivalent mRNA when exposed to an immune system of an organism or a certain type of immune cell. In some embodiments, the circular RNA provided herein is associated with modulated production of cytokines when exposed to an immune system of an organism or a certain type of immune cell. For example, in some embodiments, the circular RNA provided herein is associated with reduced production of IFN-β1, RIG-I, IL-2, IL-6, IFNγ, and/or TNFα when exposed to an immune system of an organism or a certain type of immune cell as compared to mRNA comprising the same expression sequence. In some embodiments, the circular RNA provided herein is associated with less IFN-β1, RIG-I, IL-2, IL-6, IFNγ, and/or TNFα transcript induction when exposed to an immune system of an organism or a certain type of immune cell as compared to mRNA comprising the same expression sequence. In some embodiments, the circular RNA provided herein is less immunogenic than mRNA comprising the same expression sequence. In some embodiments, the circular RNA provided herein is less immunogenic than mRNA comprising the same expression sequence, 5moU modifications, an optimized UTR, a cap, and/or a polyA tail.

[0358] In certain embodiments, the circular RNA provided herein can be transfected into a cell as is, or can be transfected in DNA vector form and transcribed in the cell. Transcription of circular RNA from a transfected DNA vector can be via added polymerases or polymerases encoded by nucleic acids transfected into the cell, or preferably via endogenous polymerases.

a. Enhanced Intron Elements & Enhanced Exon Elements

[0359] As present in the invention herein, the enhanced intron elements and enhanced exon elements may comprise spacers, duplex regions, affinity sequences, intron fragments, exon fragments and various untranslated elements. These sequences within the enhanced intron elements or enhanced exon elements are arranged to optimize circularization or protein expression.

[0360] In certain embodiments, the DNA template, precursor linear RNA polynucleotide and circular RNA provided herein comprise a first (5′) and/or a second (3′) spacer. In some embodiments, the DNA template or precursor linear RNA polynucleotide comprises one or more spacers in the enhanced intron elements. In some embodiments, the DNA template, precursor linear RNA polynucleotide comprises one or more spacers in the enhanced exon elements. In certain embodiments, the DNA template or linear RNA polynucleotide comprises a spacer in the 3′ enhanced intron fragment and a spacer in the 5′ enhanced intron fragment. In certain embodiments, DNA template, precursor linear RNA polynucleotide, or circular RNA comprises a spacer in the 3′ enhanced exon fragment and another spacer in the 5′ enhanced exon fragment to aid with circularization or protein expression due to symmetry created in the overall sequence.

[0361] In some embodiments, including a spacer between the 3′ group I intron fragment and the core functional element may conserve secondary structures in those regions by preventing them from interacting, thus increasing splicing efficiency. In some embodiments, the first (between 3′ group I intron fragment and core functional element) and second (between the two expression sequences and core functional element) spacers comprise additional base pairing regions that are predicted to base pair with each other and not to the first and second duplex regions. In other embodiments, the first (between 3′ group I intron fragment and core functional element) and second (between the one of the core functional element and 5′ group I intron fragment) spacers comprise additional base pairing regions that are predicted to base pair with each other and not to the first and second duplex regions. In some embodiments, such spacer base pairing brings the group I intron fragments in close proximity to each other, further increasing splicing efficiency. Additionally, in some embodiments, the combination of base pairing between the first and second duplex regions, and separately, base pairing between the first and second spacers, promotes the formation of a splicing bubble containing the group I intron fragments flanked by adjacent regions of base pairing. Typical spacers are contiguous sequences with one or more of the following qualities: 1) predicted to avoid interfering with proximal structures, for example, the IRES, expression sequence, aptamer, or intron; 2) is at least 7 nt long and no longer than 100 nt; 3) is located after and adjacent to the 3′ intron fragment and/or before and adjacent to the 5′ intron fragment; and 4) contains one or more of the following: a) an unstructured region at least 5 nt long, b) a region of base pairing at least 5 nt long to a distal sequence, including another spacer, and c) a structured region at least 7 nt long limited in scope to the sequence of the spacer. Spacers may have several regions, including an unstructured region, a base pairing region, a hairpin/structured region, and combinations thereof. In an embodiment, the spacer has a structured region with high GC content. In an embodiment, a region within a spacer base pairs with another region within the same spacer. In an embodiment, a region within a spacer base pairs with a region within another spacer. In an embodiment, a spacer comprises one or more hairpin structures. In an embodiment, a spacer comprises one or more hairpin structures with a stem of 4 to 12 nucleotides and a loop of 2 to 10 nucleotides. In an embodiment, there is an additional spacer between the 3′ group I intron fragment and the core functional element. In an embodiment, this additional spacer prevents the structured regions of the IRES or aptamer of a TIE from interfering with the folding of the 3′ group I intron fragment or reduces the extent to which this occurs. In some embodiments, the 5′ spacer sequence is at least 7, 8, 9, 10, 11, 12, 13, 14, 15, 16, 17, 18, 19, 20, 25 or 30 nucleotides in length. In some embodiments, the 5′ spacer sequence is no more than 100, 90, 80, 70, 60, 50, 45, 40, 35 or 30 nucleotides in length. In some embodiments the 5′ spacer sequence is between 5 and 50, 10 and 50, 20 and 50, 20 and 40, and/or 25 and 35 nucleotides in length. In certain embodiments, the 5′ spacer sequence is 10, 11, 12, 13, 14, 15, 16, 17, 18, 19, 20, 21, 22, 23, 24, 25, 26, 27, 28, 29, 30, 31, 32, 33, 34, 35, 36, 37, 38, 39, 40, 41, 42, 43, 44, 45, 46, 47, 48, 49 or 50 nucleotides in length. In one embodiment, the 5′ spacer sequence is a polyA sequence. In another embodiment, the 5′ spacer sequence is a polyAC sequence. In one embodiment, a spacer comprises about 10%, 20%, 30%, 40%, 50%, 60%, 70%, 80%, 90%, or 100% polyAC content. In one embodiment, a spacer comprises about 10%, 20%, 30%, 40%, 50%, 60%, 70%, 80%, 90%, or 100% polypyrimidine (C/T or C/U) content.

[0362] In some embodiments, the DNA template and precursor linear RNA polynucleotides and circular RNA polynucleotide provided herein comprise a first (5′) duplex region and a second (3′) duplex region. In certain embodiments, the DNA template and precursor linear RNA polynucleotide comprises a 5′ external duplex region located within the 3′ enhanced intron fragment and a 3′ external duplex region located within the 5′ enhanced intron fragment. In some embodiments, the DNA template, precursor linear RNA polynucleotide and circular RNA polynucleotide comprise a 5′ internal duplex region located within the 3′ enhanced exon fragment and a 3′ internal duplex region located within the 5′ enhanced exon fragment. In some embodiments, the DNA polynucleotide and precursor linear RNA polynucleotide comprises a 5′ external duplex region, 5′ internal duplex region, a 3′ internal duplex region, and a 3′ external duplex region.

[0363] In certain embodiments, the first and second duplex regions may form perfect or imperfect duplexes. Thus, in certain embodiments at least 75%, 80%, 85%, 90%, 91%, 92%, 93%, 94%, 95%, 96%, 97%, 98%, 99% or 100% of the first and second duplex regions may be base paired with one another. In some embodiments, the duplex regions are predicted to have less than 50% (e.g., less than 45%, less than 40%, less than 35%, less than 30%, less than 25%) base pairing with unintended sequences in the RNA (e.g., non-duplex region sequences). In some embodiments, including such duplex regions on the ends of the precursor RNA strand, and adjacent or very close to the group I intron fragment, bring the group I intron fragments in close proximity to each other, increasing splicing efficiency. In some embodiments, the duplex regions are 3 to 100 nucleotides in length (e.g., 3-75 nucleotides in length, 3-50 nucleotides in length, 20-50 nucleotides in length, 35-50 nucleotides in length, 5-25 nucleotides in length, 9-19 nucleotides in length). In some embodiments, the duplex regions are about 3, 4, 5, 6, 7, 8, 9, 10, 11, 12, 13, 14, 15, 16, 17, 18, 19, 20, 21, 22, 23, 24, 25, 26, 27, 28, 29, 30, 31, 32, 33, 34, 35, 36, 37, 38, 39, 40, 41, 42, 43, 44, 45, 46, 47, 48, 49 or 50 nucleotides in length. In some embodiments, the duplex regions have a length of about 9 to about 50 nucleotides. In one embodiment, the duplex regions have a length of about 9 to about 19 nucleotides. In some embodiments, the duplex regions have a length of about 20 to about 40 nucleotides. In certain embodiments, the duplex regions have a length of about 30 nucleotides.

[0364] In other embodiments, the DNA template, precursor linear RNA polynucleotide, or circular RNA polynucleotide does not comprise of any duplex regions to optimize translation or circularization.

[0365] As provided herein, the DNA template or precursor linear RNA polynucleotide may comprise an affinity tag. In some embodiments, the affinity tag is located in the 3′ enhanced intron element. In some embodiments, the affinity tag is located in the 5′ enhanced intron element. In some embodiments, both (3′ and 5′) enhanced intron elements each comprise an affinity tag. In one embodiment, an affinity tag of the 3′ enhanced intron element is the length as an affinity tag in the 5′ enhanced intron element. In some embodiments, an affinity tag of the 3′ enhanced intron element is the same sequence as an affinity tag in the 5′ enhanced intron element. In some embodiments, the affinity sequence is placed to optimize oligo-dT purification.

[0366] In some embodiments, the one or more affinity tags present in a precursor linear RNA polynucleotide are removed upon circularization. See, for example, FIG. 97A and FIG. 97B. In some embodiments, affinity tags are added to remaining linear RNA after circularization of RNA is performed. In some such embodiments, the affinity tags are added enzymatically to linear RNA. The presence of one or more affinity tags in linear RNA and their absence from circular RNA can facilitate purification of circular RNA. In some embodiments, such purification is performed using a negative selection or affinity-purification method. In some embodiments, such purification is performed using a binding agent that preferentially or specifically binds to the affinity tag.

[0367] In some embodiments, an affinity tag comprises a polyA region. In some embodiments the polyA region is at least 15, 30, or 60 nucleotides long. In some embodiments, the affinity tag comprising a polyA region is present in two places in a precursor linear RNA. In some embodiments, one or both polyA regions is 15-50 nucleotides long. In some embodiments, one or both polyA regions is 20-25 nucleotides long. The polyA sequence(s) is removed upon circularization. Thus, an oligonucleotide hybridizing with the polyA sequence, such as a deoxythymidine oligonucleotide (oligo(dT)) conjugated to a solid surface (e.g., a resin), can be used to separate circular RNA from its precursor RNA.

[0368] In some embodiments, an affinity tag comprises a sequence that is absent from the circular RNA product. In some such embodiments, the sequence that is absent from the circular RNA product is a dedicated binding site (DBS). In some embodiments, the DBS is an unstructured sequence, i.e., a sequence that does not form a defined structural element, such as a hairpin loop, contiguous dsRNA region, or triple helix. In some embodiments, the DBS sequence forms a random coil. In some embodiments, the DBS comprises at least 25% GC content, at least 50% GC content, at least 75% GC content, or at least 100% GC content. In some embodiments, the DBS comprises at least 25% AC content, at least 50% AC content, at least 75% AC content, or 100% AC content. In some embodiments, the DBS is at least 15, 30, or 60 nucleotides long. In some embodiments, the affinity tag comprising a DBS is present in two places in a precursor linear RNA. In some embodiments, the DBS sequences are each independently 15-50 nucleotides long. In some embodiments, the DBS sequences are each independently 20-25 nucleotides long.

[0369] In some embodiments, the DBS sequence(s) is removed upon circularization. Thus, binding agents comprising oligonucleotides comprising a sequence that is complementary to the DBS can be used to facilitate purification of circular RNA. For example, the binding agent may comprise an oligonucleotide complementary to a DBS conjugated to a solid surface (e.g., a resin).

[0370] In some embodiments, an affinity sequence or other type of affinity handle, such as biotin, is added to linear RNA by ligation. In some embodiments, an oligonucleotide comprising an affinity sequence is ligated to the linear RNA. In some embodiments, an oligonucleotide conjugated to an affinity handle is ligated to the linear RNA. In some embodiments, a solution comprising the linear RNA ligated to the affinity sequence or handle and the circular RNA that does not comprise an affinity sequence or handle are contacted with a binding agent comprising a solid support conjugated to an oligonucleotide complementary to the affinity sequence or to a binding partner of the affinity handle, such that the linear RNA binds to the binding agent, and the circular RNA is eluted or separated from the solid support.

[0371] Any purification method for circular RNA described herein may comprise one or more buffer exchange steps. In some embodiments, buffer exchange is performed after in vitro transcription (IVT) and before additional purification steps. In some such embodiments, the IVT reaction solution is buffer exchanged into a buffer comprising Tris. In some embodiments, the IVT reaction solution is buffer exchanged into a buffer comprising greater than 1 mM or greater than 10 mM one or more monovalent salts, such as NaCl or KCl, and optionally comprising EDTA. In some embodiments, buffer exchange is performed after purification of circular RNA is complete. In some embodiments, buffer exchange is performed after IVT and after purification of circular RNA. In some embodiments, the buffer exchange that is performed after purification of circular RNA comprises exchange of the circular RNA into water or storage buffer. In some embodiments, the storage buffer comprises 1 mM sodium citrate, pH 6.5.

[0372] In certain embodiments, the 3′ enhanced intron element comprises a leading untranslated sequence. In some embodiments, the leading untranslated sequence is a the 5′ end of the 3′ enhanced intron fragment. In some embodiments, the leading untranslated sequence comprises of the last nucleotide of a transcription start site (TSS). In some embodiments, the TSS is chosen from a viral, bacterial, or eukaryotic DNA template. In one embodiment, the leading untranslated sequence comprise the last nucleotide of a TSS and 0 to 100 additional nucleotides. In some embodiments, the TSS is a terminal spacer. In one embodiment, the leading untranslated sequence contains a guanosine at the 5′ end upon translation of an RNA T7 polymerase.

[0373] In certain embodiments, the 5′ enhanced intron element comprises a trailing untranslated sequence. In some embodiments, the 5′ trailing untranslated sequence is located at the 3′ end of the 5′ enhanced intron element. In some embodiments, the trailing untranslated sequence is a partial restriction digest sequence. In one embodiment, the trailing untranslated sequence is in whole or in part a restriction digest site used to linearize the DNA template. In some embodiments, the restriction digest site is in whole or in part from a natural viral, bacterial or eukaryotic DNA template. In some embodiments, the trailing untranslated sequence is a terminal restriction site fragment.

a. Enhanced Intron Fragments

[0374] According to the present invention, the 3′ enhanced intron element and 5′ enhanced intron element each comprise an intron fragment. In certain embodiments, a 3′ intron fragment is a contiguous sequence at least 75% homologous (e.g., at least 80%, 85%, 90%, 91%, 92%, 93%, 94%, 95%, 96%, 97%, 98%, 99% or 100% homologous) to a 3′ proximal fragment of a natural group I intron including the 3′ splice site dinucleotide. Typically, a 5′ intron fragment is a contiguous sequence at least 75% homologous (e.g., at least 80%, 85%, 90%, 91%, 92%, 93%, 94%, 95%, 96%, 97%, 98%, 99% or 100% homologous) to a 5′ proximal fragment of a natural group I intron including the 5′ splice site dinucleotide. In some embodiments, the 3′ intron fragment includes the first nucleotide of a 3′ group I splice site dinucleotide. In some embodiments, the 5′ intron fragment includes the first nucleotide of a 5′ group I splice site dinucleotide. In other embodiments, the 3′ intron fragment includes the first and second nucleotides of a 3′ group I intron fragment splice site dinucleotide; and the 5′ intron fragment includes the first and second nucleotides of a 3′ group I intron fragment dinucleotide.

b. Enhanced Exon Fragments

[0375] In certain embodiments, as provided herein, the DNA template, linear precursor RNA polynucleotide, and circular RNA polynucleotide each comprise an enhanced exon fragment. In some embodiments, following a 5′ to 3′ order, the 3′ enhanced exon element is located upstream to core functional element. In some embodiments, following a 5′ to 3′ order, the 5′ enhanced intron element is located downstream to the core functional element.

[0376] According to the present invention, the 3′ enhanced exon element and 5′ enhanced exon element each comprise an exon fragment. In some embodiments, the 3′ enhanced exon element comprises a 3′ exon fragment. In some embodiments, the 5′ enhanced exon element comprises a 5′ exon fragment. In certain embodiments, as provided herein, the 3′ exon fragment and 5′ exon fragment each comprises a group I intron fragment and 1 to 100 nucleotides of an exon sequence. In certain embodiments, a 3′ intron fragment is a contiguous sequence at least 75% homologous (e.g., at least 80%, 85%, 90%, 91%, 92%, 93%, 94%, 95%, 96%, 97%, 98%, 99% or 100% homologous) to a 3′ proximal fragment of a natural group I intron including the 3′ splice site dinucleotide. Typically, a 5′ group I intron fragment is a contiguous sequence at least 75% homologous (e.g., at least 80%, 85%, 90%, 91%, 92%, 93%, 94%, 95%, 96%, 97%, 98%, 99% or 100% homologous) to a 5′ proximal fragment of a natural group I intron including the 5′ splice site dinucleotide. In some embodiments, the 3′ exon fragment comprises a second nucleotide of a 3′ group I intron splice site dinucleotide and 1 to 100 nucleotides of an exon sequence. In some embodiments, the 5′ exon fragment comprises the first nucleotide of a 5′ group I intron splice site dinucleotide and 1 to 100 nucleotides of an exon sequence. In some embodiments, the exon sequence comprises in part or in whole from a naturally occurring exon sequence from a virus, bacterium or eukaryotic DNA vector. In other embodiments, the exon sequence further comprises a synthetic, genetically modified (e.g., containing modified nucleotide), or other engineered exon sequence.

[0377] In one embodiment, where the 3′ intron fragment comprises both nucleotides of a 3′ group I splice site dinucleotide and the 5′ intron fragment comprises both nucleotides of a 5′ group I splice site dinucleotide, the exon fragments located within the 5′ enhanced exon element and 3′ enhanced exon element does not comprise of a group I splice site dinucleotide.

c. Exemplary Permutation of the Enhanced Intron Elements & Enhanced Exon Elements

[0378] For means of example and not intended to be limiting, in some embodiment, a 3′ enhanced intron element comprises in the following 5′ to 3′ order: a leading untranslated sequence, a 5′ affinity tag, an optional 5′ external duplex region, a 5′ external spacer, and a 3′ intron fragment. In same embodiments, the 3′ enhanced exon element comprises in the following 5′ to 3′ order: a 3′ exon fragment, an optional 5′ internal duplex region, an optional 5′ internal duplex region, and a 5′ internal spacer. In the same embodiments, the 5′ enhanced exon element comprises in the following 5′ to 3′ order: a 3′ internal spacer, an optional 3′ internal duplex region, and a 5′ exon fragment. In still the same embodiments, the 3′ enhanced intron element comprises in the following 5′ to 3′ order: a 5′ intron fragment, a 3′ external spacer, an optional 3′ external duplex region, a 3′ affinity tag, and a trailing untranslated sequence.

### B. Core Functional Element

[0379] In some embodiments, the DNA template, linear precursor RNA polynucleotide, and circular RNA polynucleotide comprise a core functional element. In some embodiments, the core functional element comprises a coding or noncoding element. In certain embodiments, the core functional element may contain both a coding and noncoding element. In some embodiments, the core functional element further comprises translation initiation element (TIE) upstream to the coding or noncoding element. In some embodiments, the core functional element comprises a termination element. In some embodiments, the termination element is located downstream to the TIE and coding element. In some embodiments, the termination element is located downstream to the coding element but upstream to the TIE. In certain embodiments, where the coding element comprises a noncoding region, a core functional element lacks a TIE and/or a termination element.

a. Coding or Noncoding Element

[0380] In some embodiments, the polynucleotides herein comprise coding or noncoding element or a combination of both. In some embodiments, the coding element comprises an expression sequence. In some embodiments, the coding element encodes at least one therapeutic protein.

[0381] In some embodiments, the circular RNA encodes two or more polypeptides. In some embodiments, the circular RNA is a bicistronic RNA. The sequences encoding the two or more polypeptides can be separated by a ribosomal skipping element or a nucleotide sequence encoding a protease cleavage site. In certain embodiments, the ribosomal skipping element encodes thosea-asigna virus 2A peptide (T2A), porcine teschovirus-1 2 A peptide (P2A), foot-and-mouth disease virus 2 A peptide (F2A), equine rhinitis A vims 2A peptide (E2A), cytoplasmic polyhedrosis vims 2A peptide (BmCPV 2A), or flacherie vims of B. mori 2A peptide (BmIFV 2A).

b. Translation Initiation Element (Tie)

[0382] As provided herein in some embodiments, the core functional element comprises at least one translation initiation element (TIE). TIEs are designed to allow translation efficiency of an encoded protein. Thus, optimal core functional elements comprising only of noncoding elements lack any TIEs. In some embodiments, core functional elements comprising one or more coding element will further comprise one or more TIEs.

[0383] In some embodiments, a TIE comprises an untranslated region (UTR). In certain embodiments, the TIE provided herein comprise an internal ribosome entry site (IRES). Inclusion of an IRES permits the translation of one or more open reading frames from a circular RNA (e.g., open reading frames that form the expression sequences). The IRES element attracts a eukaryotic ribosomal translation initiation complex and promotes translation initiation. See, e.g., Kaufman et al., Nuc. Acids Res. (1991) 19:4485-4490; Gurtu et al., Biochem. Biophys. Res. Comm. (1996) 229:295-298; Rees et al., BioTechniques (1996) 20: 102-110; Kobayashi et al., BioTechniques (1996) 21:399-402; and Mosser et al., BioTechniques 1997 22 150-161.

[0384] For driving protein expression, the circular RNA comprises an IRES operably linked to a protein coding sequence. Exemplary IRES sequences are provided in Table_A_IRES. In some embodiments, the circular RNA disclosed herein comprises an IRES sequence at least 80%, 85%, 90%, 91%, 92%, 93%, 94%, 95%, 96%, 97%, 98%, or 99% identical to an IRES sequence in Table_A_IRES. In some embodiments, the circular RNA disclosed herein comprises an IRES sequence in Table_A_IRES. Modifications of IRES and accessory sequences are disclosed herein to increase or reduce IRES activities, for example, by truncating the 5′ and/or 3′ ends of the IRES, adding a spacer 5′ to the IRES, modifying the 6 nucleotides 5′ to the translation initiation site (Kozak sequence), modification of alternative translation initiation sites, and creating chimeric/hybrid IRES sequences. In some embodiments, the IRES sequence in the circular RNA disclosed herein comprises one or more of these modifications relative to a native IRES (e.g., a native IRES disclosed in Table_A_IRES).

[0385] A multitude of IRES sequences are available and include sequences derived from a wide variety of viruses, such as from leader sequences of picornaviruses such as the encephalomyocarditis virus (EMCV) UTR (Jang et al. J. Virol. (1989) 63: 1651-1660), the polio leader sequence, the hepatitis A virus leader, the hepatitis C virus IRES, human rhinovirus type 2 IRES (Dobrikova et al., Proc. Natl. Acad. Sci. (2003) 100(25): 15125-15130), an IRES element from the foot and mouth disease virus (Ramesh et al., Nucl. Acid Res. (1996) 24:2697-2700), a giardiavirus IRES (Garlapati et al., J. Biol. Chem. (2004) 279(5):3389-3397), and the like.

i. Natural Ties: Viral, & Eukaryotic/Cellular Internal Ribosome Entry Site (IRES)

[0386] A multitude of IRES sequences are available and include sequences derived from a wide variety of viruses, such as from leader sequences of picornaviruses such as the encephalomyocarditis virus (EMCV) UTR (Jang et al., J. Virol. (1989) 63: 1651-1660), the polio leader sequence, the hepatitis A virus leader, the hepatitis C virus IRES, human rhinovirus type 2 IRES (Dobrikova et al., Proc. Natl. Acad. Sci. (2003) 100(25): 15125-15130), an IRES element from the foot and mouth disease virus (Ramesh et al., Nucl. Acid Res. (1996) 24:2697-2700), a giardiavirus IRES (Garlapati et al., J. Biol. Chem. (2004) 279(5):3389-3397), and the like. Different IRES sequences have varying ability to drive protein expression, and the ability of any particular identified or predicted IRES sequence to drive protein expression from linear mRNA or circular RNA constructs is unknown and unpredictable. In certain embodiments, potential IRES sequences can be bioinformatically identified based on sequence positions in viral sequences. However, the activity of such sequences has been previously uncharacterized. As demonstrated herein, such IRES sequences may have differing protein expression capability depending on cell type, for example in T cells, liver cells, or muscle cells. In some embodiments, the novel IRES sequences described herein may have at least 2, 3, 4, 5, 6, 7, 8, 9, 10, 20, 50, or 100 fold increased expression in a particular cell type compared to previously described EMCV IRES sequences.

[0387] For driving protein expression, the circular RNA comprises an IRES operably linked to a protein coding sequence. Exemplary IRES sequences are provided in Table_A_IRES below. In some embodiments, the circular RNA disclosed herein comprises an IRES sequence at least 80%, 85%, 90%, 91%, 92%, 93%, 94%, 95%, 96%, 97%, 98%, or 99% identical to an IRES sequence in Table_A_IRES. In some embodiments, the circular RNA disclosed herein comprises an IRES sequence in Table_A_IRES. Modifications of IRES and accessory sequences are disclosed herein to increase or reduce IRES activities, for example, by truncating the 5′ and/or 3′ ends of the IRES, adding a spacer 5′ to the IRES, modifying the 6 nucleotides 5′ to the translation initiation site (Kozak sequence), modification of alternative translation initiation sites, and creating chimeric/hybrid IRES sequences. In some embodiments, the IRES sequence in the circular RNA disclosed herein comprises one or more of these modifications relative to a native IRES (e.g., a native IRES disclosed in Table_A_IRES).

[0388] In some embodiments, the IRES is an Aalivirus, Ailurivirus, Ampivirus, Anativirus, Aphthovirus, Aquamavirus, Avihepatovirus, Avisivirus, Boosepivirus, Bopivirus, Caecilivirus, Cardiovirus, Cosavirus, Crahelivirus, Crohivirus, Danipivirus, Dicipivirus, Diresapivirus, Enterovirus, Erbovirus, Felipivirus, Fipivirus, Gallivirus, Gruhelivirus, Grusopivirus, Harkavirus, Hemipivirus, Hepatovirus, Hunnivirus, Kobuvirus, Kunsagivirus, Limnipivirus, Livupivirus, Ludopivirus, Malagasivirus, Marsupivirus, Megrivirus, Mischivirus, Mosavirus, Mupivirus, Myrropivirus, Orivirus, Oscivirus, Parabovirus, Parechovirus, Pasivirus, Passerivirus, Pemapivirus, Poecivirus, Potamipivirus, Pygoscepivirus, Rabovirus, Rafivirus, Rajidapivirus, Rohelivirus, Rosavirus, Sakobuvirus, Salivirus, Sapelovirus, Senecavirus, Shanbavirus, Sicinivirus, Symapivirus, Teschovirus, Torchivirus, Tottorivirus, Tremovirus, Tropivirus, Hepacivirus, Pegivirus, Pestivirus, Flavivirus IRES.

[0389] In some embodiments, the IRES is an IRES sequence of Taura syndrome virus, Triatoma virus, Theiler's encephalomyelitis virus, Simian Virus 40, Solenopsis invicta virus 1, Rhopalosiphum padi virus, Reticuloendotheliosis virus, Human poliovirus 1, Plautia stali intestine virus, Kashmir bee virus, Human rhinovirus 2, Homalodisca coagulata virus-1, Human Immunodeficiency Virus type 1, Himetobi P virus, Hepatitis C virus, Hepatitis A virus, Hepatitis GB virus, Foot and mouth disease virus, Human enterovirus 71, Equine rhinitis virus, Ectropis obliqua picorna-like virus, Encephalomyocarditis virus, Drosophila C Virus, Human coxsackievirus B3, Crucifer tobamovirus, Cricket paralysis virus, Bovine viral diarrhea virus 1, Black Queen Cell Virus, Aphid lethal paralysis virus, Avian encephalomyelitis virus, Acute bee paralysis virus, Hibiscus chlorotic ringspot virus, Classical swine fever virus, Human FGF2, Human SFTPA1, Human AML¹/RUNX1, Drosophila antennapedia, Human AQP4, Human ATIR, Human BAG-1, Human BCL², Human BiP, Human c-IAPI, Human c-myc, Human eIF4G, Mouse NDST4L, Human LEF1, Mouse HIF1 alpha, Human n.myc, Mouse Gtx, Human p27kipl, Human PDGF2/c-sis, Human p53, Human Pim-1, Mouse Rbm3, Drosophila reaper, Canine Scamper, Drosophila Ubx, Human UNR, Mouse UtrA, Human VEGF-A, Human XIAP, Drosophila hairless, S. cerevisiae TFIID, S. cerevisiae YAP1, tobacco etch virus, turnip crinkle virus, EMCV-A, EMCV-B, EMCV-Bf, EMCV-Cf, EMCV pEC9, Picobirnavirus, HCV QC64, Human Cosavirus E/D, Human Cosavirus F, Human Cosavirus JMY, Rhinovirus NAT001, HRV14, HRV89, HRVC-02, HRV-A21, Salivirus A SH1, Salivirus FHB, Salivirus NG-J1, Human Parechovirus 1, Crohivirus B, Yc-3, Rosavirus M-7, Shanbavirus A, Pasivirus A, Pasivirus A 2, Echovirus E14, Human Parechovirus 5, Aichi Virus, Hepatitis A Virus HA16, Phopivirus, CVA10, Enterovirus C, Enterovirus D, Enterovirus J, Human Pegivirus 2, GBV-C GT110, GBV-C K1737, GBV-C Iowa, Pegivirus A 1220, Pasivirus A 3, Sapelovirus, Rosavirus B, Bakunsa Virus, Tremovirus A, Swine Pasivirus 1, PLV-CHN, Pasivirus A, Sicinivirus, Hepacivirus K, Hepacivirus A, BVDV1, Border Disease Virus, BVDV2, CSFV-PK15C, SF573 Dicistrovirus, Hubei Picorna-like Virus, CRPV, Salivirus A BN5, Salivirus A BN2, Salivirus A 02394, Salivirus A GUT, Salivirus A CH, Salivirus A SZ1, Salivirus FHB, CVB3, CVB1, Echovirus 7, CVB5, EVA71, CVA3, CVA12, EV24 or an aptamer to eIF4G.

[0390] In some embodiments, the IRES comprises in whole or in part from a eukaryotic or cellular IRES. In certain embodiments, the IRES is from a human gene, where the human gene is ABCF1, ABCG1, ACAD10, ACOT7, ACSS3, ACTG2, ADCYAP1, ADK, AGTR1, AHCYL², AHIl, AKAP8L, AKR1A1, ALDH3A1, ALDOA, ALG13, AMMECR1L, ANGPTL⁴, ANK3, AOC3, AP4B1, AP4E1, APAF1, APBB1, APC, APH1A, APOBEC3D, APOM, APP, AQP4, ARHGAP36, ARL¹³B, ARMC8, ARMCX6, ARPC1A, ARPC2, ARRDC3, ASAP1, ASB3, ASB5, ASCL¹, ASMTL, ATF2, ATF3, ATG4A, ATP5B, ATP6VOA1, ATXN3, AURKA, AURKA, AURKA, AURKA, B3GALNT1, B3GNTL¹, B4GALT3, BAAT, BAGI, BAIAP2, BAIAP2L², BAZ2A, BBX, BCAR1, BCL², BCS1L, BET1, BID, BIRC2, BPGM, BPIFA2, BRINP2, BSG, BTN3A2, C12orf43, C14orf93, C17orf62, Clorf226, C21orf62, C2orfl5, C4BPB, C4orf22, C9orf84, CACNA1A, CALCOCO2, CAPN11, CASP12, CASP8AP2, CAV1, CBX5, CCDC120, CCDC17, CCDC186, CCDC51, CCN1, CCND1, CCNT1, CD2BP2, CD9, CDC25C, CDC42, CDC7, CDCA7L, CDIP1, CDK1, CDK11A, CDKN1B, CEACAM7, CEP295NL, CFLAR, CHCHD7, CHIA, CHIC1, CHMP2A, CHRNA2, CLCN3, CLEC12A, CLEC7A, CLECLI, CLRN1, CMSS1, CNIH1, CNR1, CNTN5, COG4, COMMD1, COMMD5, CPEB1, CPS1, CRACR2B, CRBN, CREM, CRYBG1, CSDE1, CSF2RA, CSNK2A1, CSTF3, CTCFL, CTH, CTNNA3, CTNNB1, CTNNB1, CTNND1, CTSL, CUTA, CXCR5, CYB5R3, CYP24A1, CYP3A5, DAGI, DAP3, DAP5, DAXX, DCAF4, DCAF7, DCLRE1A, DCP1A, DCTN1, DCTN2, DDX19B, DDX46, DEFB123, DGKA, DGKD, DHRS4, DHX15, DI03, DLG1, DLL⁴, DMD UTR, DMD ex5, DMKN, DNAH6, DNAL⁴, DUSP13, DUSP19, DYNC1I2, DYNLRB2, DYRKIA, ECI2, ECT2, EIF1AD, EIF2B4, EIF4G1, EIF4G2, EIF4G3, ELANE, ELOVL⁶, ELP5, EMCN, ENO1, EPB41, ERMN, ERVV-1, ESRRG, ETFB, ETFBKMT, ETV1, ETV4, EXD1, EXT1, EZH2, FAM111B, FAM157A, FAM213A, FBXO25, FBXO9, FBXW7, FCMR, FGF1, FGF1, FGF1A, FGF2, FGF2, FGF-9, FHL⁵, FMR1, FN1, FOXP1, FTH1, FUBP1, G3BP1, GABBR1, GALC, GART, GAS7, gastrin, GATA1, GATA4, GFM2, GHR, GJB2, GLIl, GLRA2, GMNN, GPAT3, GPATCH3, GPR137, GPR34, GPR55, GPR89A, GPRASP1, GRAP2, GSDMB, GSTO2, GTF2B, GTF2H4, GUCYlB2, HAX1, HCST, HIGD1A, HIGD1B, HIPK1, HISTIHIC, HIST1H3H, HK1, HLA-DRB4, HMBS, HMGA1, HNRNPC, HOPX, HOXA2, HOXA3, HPCAL¹, HR, HSP90AB1, HSPA1A, HSPA4L, HSPA5, HYPK, IFFO1, IFT74, IFT81, IGF1, IGF1R, IGF1R, IGF2, IL¹¹, IL¹⁷RE, IL¹RL¹, IL¹RN, IL³², IL⁶, ILF2, ILVBL, INSR, INTS13, IP6K1, ITGA4, ITGAE, KCNE4, KERA, KIAA0355, KIAA0895L, KIAA1324, KIAA1522, KIAA1683, KIF2C, KIZ, KLHL³¹, KLK7, KRR1, KRT14, KRT17, KRT33A, KRT6A, KRTAP10-2, KRTAP13-3, KRTAP13-4, KRTAP5-11, KRTCAP2, LACRT, LAMB1, LAMB3, LANCLI, LBX2, LCAT, LDHA, LDHAL⁶A, LEF1, LINC-PINT, LMO3, LRRC4C, LRRC7, LRTOMT, LSM5, LTB4R, LYRM1, LYRM2, MAGEA11, MAGEA8, MAGEB1, MAGEB16, MAGEB3, MAPT, MARS, MC1R, MCCC1, METTL¹², METTL⁷A, MGC16025, MGC16025, MIA2, MIA2, MITF, MKLN1, MNT, MORF4L², MPD6, MRFAP1, MRPL²¹, MRPS12, MSI2, MSLN, MSN, MT2A, MTFR1L, MTMR2, MTRR, MTUS1, MYB, MYC, MYCL, MYCN, MYL¹⁰, MYL³, MYLK, MYO1A, MYT2, MZB1, NAP1L¹, NAV1, NBAS, NCF2, NDRG1, NDST2, NDUFA7, NDUFB11, NDUFC1, NDUFS1, NEDD4L, NFAT5, NFE2L², NFE2L², NFIA, NHEJI, NHP2, NIT1, NKRF, NME1-NME2, NPAT, NR3C1, NRBF2, NRF1, NTRK2, NUDCD1, NXF2, NXT2, ODC1, ODF2, OPTN, OR10R2, OR11L1, OR2M2, OR2M3, OR2M5, OR2T10, OR4C15, OR4F17, OR4F5, OR5H1, OR5K1, OR6C3, OR6C75, OR6N1, OR7G2, p53, P2RY4, PAN2, PAQR6, PARP4, PARP9, PC, PCBP4, PCDHGC3, PCLAF, PDGFB, PDZRN4, PELO, PEMT, PEX2, PFKM, PGBD4, PGLYRP3, PHLDA2, PHTF1, PI4 KB, PIGC, PIMI, PKD2L¹, PKM, PLCB4, PLD3, PLEKHA1, PLEKHB1, PLS3, PML, PNMA5, PNN, POC1A, POC1B, POLD2, POLD4, POU5F1, PPIG, PQBP1, PRAME, PRPF4, PRR11, PRRT1, PRSS8, PSMA2, PSMA3, PSMA4, PSMD11, PSMD4, PSMD6, PSME3, PSMG3, PTBP3, PTCH1, PTHLH, PTPRD, PUS7L, PVRIG, QPRT, RAB27A, RAB7B, RABGGTB, RAET1E, RALGDS, RALYL, RARB, RCVRN, REG3G, RFC5, RGL⁴, RGS19, RGS3, RHD, RINL, RIPOR2, RITA1, RMDN2, RNASE1, RNASE4, RNF4, RPA2, RPL¹⁷, RPL²¹, RPL²⁶L¹, RPL²⁸, RPL²⁹, RPL⁴¹, RPL⁹, RPS11, RPS13, RPS14, RRBP1, RSU1, RTP2, RUNX1, RUNX1T1, RUNX1T1, RUNX2, RUSC1, RXRG, S100A13, S100A4, SAT1, SCHIPI, SCMH1, SEC14L¹, SEMA4A, SERPINA1, SERPINB4, SERTAD3, SFTPD, SH3D19, SHC1, SHMT1, SHPRH, SIMI, SIRT5, SLC11A2, SLC12A4, SLC16A1, SLC25A3, SLC26A9, SLC5A11, SLC6A12, SLC6A19, SLC7A1, SLFN11, SLIRP, SMAD5, SMARCADI, SMN1, SNCA, SNRNP200, SNRPB2, SNX12, SOD1, SOX13, SOX5, SP8, SPARCL¹, SPATA12, SPATA31C2, SPN, SPOP, SQSTM1, SRBD1, SRC, SREBF1, SRPK2, SSB, SSB, SSBP1, ST3GAL⁶, STAB1, STAMBP, STAU1, STAU1, STAU1, STAU1, STAU1, STK16, STK24, STK38, STMN1, STX7, SULT2B1, SYK, SYNPR, TAF1C, TAGLN, TANK, TAS2R40, TBC1D15, TBXAS1, TCF4, TDGF1, TDP2, TDRD3, TDRD5, TESK2, THAP6, THBD, THTPA, TIAM2, TKFC, TKTL¹, TLR10, TM9SF2, TMC6, TMCO2, TMED10, TMEM116, TMEM126A, TMEM159, TMEM208, TMEM230, TMEM67, TMPRSS13, TMUB2, TNFSF4, TNIP3, TP53, TP53, TP73, TRAF1, TRAK1, TRIM31, TRIM6, TRMT1, TRMT2B, TRPM7, TRPM8, TSPEAR, TTC39B, TTLL¹¹, TUBB6, TXLNB, TXNIP, TXNL¹, TXNRD1, TYROBP, U2AF1, UBA1, UBE2D3, UBE2I, UBE2L³, UBE2V1, UBE2V2, UMPS, UNG, UPP2, USMG5, USP18, UTP14A, UTRN, UTS2, VDR, VEGFA, VEGFA, VEPH1, VIPAS39, VPS29, VSIG10L, WDHD1, WDR12, WDR4, WDR45, WDYHV1, WRAP53, XIAP, XPNPEP3, YAP1, YWHAZ, YY1AP1, ZBTB32, ZNF146, ZNF250, ZNF385A, ZNF408, ZNF410, ZNF423, ZNF43, ZNF502, ZNF512, ZNF513, ZNF580, ZNF609, ZNF707, or ZNRD1.

### II. Synthetic Ties: Aptamer Complexes, Modified Nucleotides, IRES Variants & Other Engineered Ties

[0391] As contemplated herein, in certain embodiments, a translation initiation element (TIE) comprises a synthetic TIE. In some embodiments, a synthetic TIE comprises aptamer complexes, synthetic IRES or other engineered TIES capable of initiating translation of a linear RNA or circular RNA polynucleotide.

[0392] In some embodiments, one or more aptamer sequences is capable of binding to a component of a eukaryotic initiation factor to either enhance or initiate translation. In some embodiments, aptamer may be used to enhance translation in vivo and in vitro by promoting specific eukaryotic initiation factors (eIF) (e.g., aptamer in WO2019081383A1 is capable of binding to eukaryotic initiation factor 4F (eIF4F). In some embodiments, the aptamer or a complex of aptamers may be capable of binding to EIF4G, EIF4E, EIF4A, EIF4B, EIF3, EIF2, EIF5, EIF1, EIF1A, 40S ribosome, PCBP1 (polyC binding protein), PCBP2, PCBP3, PCBP4, PABP1 (polyA binding protein), PTB, Argonaute protein family, HNRNPK (heterogeneous nuclear ribonucleoprotein K), or La protein.

c. Termination Sequence

[0393] In certain embodiments, the core functional element comprises a termination sequence. In some embodiments, the termination sequence comprises a stop codon. In one embodiment, the termination sequence comprises a stop cassette. In some embodiments, the stop cassette comprises at least 2 stop codons. In some embodiments, the stop cassette comprises at least 2 frames of stop codons. In the same embodiment, the frames of the stop codons in a stop cassette each comprise 1, 2 or more stop codons. In some embodiments, the stop cassette comprises a LoxP or a RoxStopRox, or frt-flanked stop cassette. In the same embodiment, the stop cassette comprises a lox-stop-lox stop cassette.

### C. Variants

[0394] In certain embodiments, a circular RNA polynucleotide provided herein comprises modified RNA nucleotides and/or modified nucleosides. In some embodiments, the modified nucleoside is m⁵C (5-methylcytidine). In another embodiment, the modified nucleoside is m⁵U (5-methyluridine). In another embodiment, the modified nucleoside is m⁶A (N⁶-methyladenosine). In another embodiment, the modified nucleoside is s²U (2-thiouridine). In another embodiment, the modified nucleoside is Ψ (pseudouridine). In another embodiment, the modified nucleoside is Um (2′-O-methyluridine). In other embodiments, the modified nucleoside is m¹A (1-methyladenosine); m²A (2-methyladenosine); Am (2′-O-methyladenosine); ms² m⁶A (2-methylthio-N⁶-methyladenosine); i⁶A (N⁶-isopentenyladenosine); ms²i6A (2-methylthio-N⁶ isopentenyladenosine); io⁶A (N⁶-(cis-hydroxyisopentenyl)adenosine); ms²io⁶A (2-methylthio-N⁶-(cis-hydroxyisopentenyl)adenosine); g⁶A (N⁶-glycinylcarbamoyladenosine); t⁶A (N⁶-threonylcarbamoyladenosine); ms²t⁶A (2-methylthio-N⁶-threonyl carbamoyladenosine); m⁶t⁶A (N⁶-methyl-N⁶-threonylcarbamoyladenosine); hn⁶A(N⁶-hydroxynorvalylcarbamoyladenosine); ms²hn⁶A (2-methylthio-N⁶-hydroxynorvalyl carbamoyladenosine); Ar(p) (2′-O-ribosyladenosine (phosphate)); I (inosine); m¹I (1-methylinosine); m¹Im (1,2′-O-dimethylinosine); m³C (3-methylcytidine); Cm (2′-O-methylcytidine); s²C (2-thiocytidine); ac⁴C (N⁴-acetylcytidine); f⁵C (5-formylcytidine); m⁵Cm (5,2′-O-dimethylcytidine); ac⁴Cm (N⁴-acetyl-2′-O-methylcytidine); k²C (lysidine); m¹G (1-methylguanosine); m²G (N²-methylguanosine); m⁷G (7-methylguanosine); Gm (2′-O-methylguanosine); m²₂G (N²,N²-dimethylguanosine); m²Gm (N²,2′-O-dimethylguanosine); m²₂Gm (N²,N²,2′-O-trimethylguanosine); Gr(p) (2′-O-ribosylguanosine(phosphate)); yW (wybutosine); _{o2y}W (peroxywybutosine); OHyW (hydroxywybutosine); OHyW* (undermodified hydroxywybutosine); imG (wyosine); mimG (methylwyosine); Q (queuosine); oQ (epoxyqueuosine); galQ (galactosyl-queuosine); manQ (mannosyl-queuosine); preQ₀ (7-cyano-7-deazaguanosine); preQi (7-aminomethyl-7-deazaguanosine); G⁺(archaeosine); D (dihydrouridine); m⁵Um (5,2′-O-dimethyluridine); s⁴U (4-thiouridine); m⁵s²U (5-methyl-2-thiouridine); s²Um (2-thio-2′-O-methyluridine); acp³U (3-(3-amino-3-carboxypropyl)uridine); ho⁵U (5-hydroxyuridine); mo⁵U (5-methoxyuridine); cmo⁵U (uridine 5-oxyacetic acid); mcmo⁵U (uridine 5-oxyacetic acid methyl ester); chm⁵U (5-(carboxyhydroxymethyl)uridine)); mchm⁵U (5-(carboxyhydroxymethyl)uridine methyl ester); mcm⁵U (5-methoxycarbonylmethyluridine); mcm⁵Um (5-methoxycarbonylmethyl-2′-O-methyluridine); mcm⁵s²U (5-methoxycarbonylmethyl-2-thiouridine); nm⁵S2U (5-aminomethyl-2-thiouridine); mnm⁵U (5-methylaminomethyluridine); mnm⁵s²U (5-methylaminomethyl-2-thiouridine); mnm⁵se²U (5-methylaminomethyl-2-selenouridine); ncm⁵U (5-carbamoylmethyluridine); ncm⁵Um (5-carbamoylmethyl-2′-O-methyluridine); cmnm⁵U (5-carboxymethylaminomethyluridine); cmnm⁵Um (5-carboxymethylaminomethyl-2′-O-methyluridine); cmnm⁵s²U (5-carboxymethylaminomethyl-2-thiouridine); m⁶₂A (N⁶,N⁶-dimethyladenosine); Im (2′-O-methylinosine); m⁴C (N⁴-methylcytidine); m⁴Cm (N⁴,2′-O-dimethylcytidine); hm⁵C (5-hydroxymethylcytidine); m³U (3-methyluridine); cm⁵U (5-carboxymethyluridine); m⁶Am (N⁶,2′-O-dimethyladenosine); m⁶₂Am (N⁶,N⁶,0-2′-trimethyladenosine); m²′7G (N²,7-dimethylguanosine); m^{2,2,7}G (N²,N²,7-trimethylguanosine); m³Um (3,2′-O-dimethyluridine); m⁵D (5-methyldihydrouridine); f⁵Cm (5-formyl-2′-O-methylcytidine); m¹Gm (1,2′-O-dimethylguanosine); m¹Am (1,2′-O-dimethyladenosine); τm⁵U (5-taurinomethyluridine); τm⁵s²U (5-taurinomethyl-2-thiouridine)); imG-14 (4-demethylwyosine); imG2 (isowyosine); or ac⁶A (N⁶-acetyladenosine).

[0395] In some embodiments, the modified nucleoside may include a compound selected from the group of: pyridin-4-one ribonucleoside, 5-aza-uridine, 2-thio-5-aza-uridine, 2-thiouridine, 4-thio-pseudouridine, 2-thio-pseudouridine, 5-hydroxyuridine, 3-methyluridine, 5-carboxymethyl-uridine, 1-carboxymethyl-pseudouridine, 5-propynyl-uridine, 1-propynyl-pseudouridine, 5-taurinomethyluridine, 1-taurinomethyl-pseudouridine, 5-taurinomethyl-2-thio-uridine, 1-taurinomethyl-4-thio-uridine, 5-methyl-uridine, 1-methyl-pseudouridine, 4-thio-1-methyl-pseudouridine, 2-thio-1-methyl-pseudouridine, 1-methyl-1-deaza-pseudouridine, 2-thio-1-methyl-1-deaza-pseudouridine, dihydrouridine, dihydropseudouridine, 2-thio-dihydrouridine, 2-thio-dihydropseudouridine, 2-methoxyuridine, 2-methoxy-4-thio-uridine, 4-methoxy-pseudouridine, 4-m ethoxy-2-thio-pseudouridine, 5-aza-cytidine, pseudoisocytidine, 3-methyl-cytidine, N4-acetylcytidine, 5-formylcytidine, N4-methylcytidine, 5-hydroxymethylcytidine, 1-methyl-pseudoisocytidine, pyrrolo-cytidine, pyrrolo-pseudoisocytidine, 2-thio-cytidine, 2-thio-5-methyl-cytidine, 4-thio-pseudoisocytidine, 4-thio-1-methyl-pseudoisocytidine, 4-thio-1-methyl-1-deaza-pseudoisocytidine, 1-methyl-1-deaza-pseudoisocytidine, zebularine, 5-aza-zebularine, 5-methyl-zebularine, 5-aza-2-thio-zebularine, 2-thio-zebularine, 2-methoxy-cytidine, 2-methoxy-5-methyl-cytidine, 4-methoxy-pseudoisocytidine, 4-methoxy-1-methyl-pseudoisocytidine, 2-aminopurine, 2, 6-diaminopurine, 7-deaza-adenine, 7-deaza-8-aza-adenine, 7-deaza-2-aminopurine, 7-deaza-8-aza-2-aminopurine, 7-deaza-2,6-diaminopurine, 7-deaza-8-aza-2,6-diaminopurine, 1-methyladenosine, N6-methyladenosine, N6-isopentenyladenosine, N6-(cis-hydroxyisopentenyl)adenosine, 2-methylthio-N6-(cis-hydroxyisopentenyl) adenosine, N6-glycinylcarbamoyladenosine, N6-threonylcarbamoyladenosine, 2-methylthio-N6-threonyl carbamoyladenosine, N6,N6-dimethyladenosine, 7-methyladenine, 2-methylthio-adenine, 2-methoxy-adenine, inosine, 1-methyl-inosine, wyosine, wybutosine, 7-deaza-guanosine, 7-deaza-8-aza-guanosine, 6-thio-guanosine, 6-thio-7-deaza-guanosine, 6-thio-7-deaza-8-aza-guanosine, 7-methyl-guanosine, 6-thio-7-methyl-guanosine, 7-methylinosine, 6-methoxy-guanosine, 1-methylguanosine, N2-methylguanosine, N2,N2-dimethylguanosine, 8-oxo-guanosine, 7-methyl-8-oxo-guanosine, 1-methyl-6-thio-guanosine, N2-methyl-6-thio-guanosine, and N2,N2-dimethyl-6-thio-guanosine. In another embodiment, the modifications are independently selected from the group consisting of 5-methylcytosine, pseudouridine and 1-methylpseudouridine.

[0396] In some embodiments, the modified ribonucleosides include 5-methylcytidine, 5-methoxyuridine, 1-methyl-pseudouridine, N6-methyladenosine, and/or pseudouridine. In some embodiments, such modified nucleosides provide additional stability and resistance to immune activation.

[0397] In particular embodiments, polynucleotides may be codon-optimized. A codon optimized sequence may be one in which codons in a polynucleotide encoding a polypeptide have been substituted in order to increase the expression, stability and/or activity of the polypeptide. Factors that influence codon optimization include, but are not limited to one or more of: (i) variation of codon biases between two or more organisms or genes or synthetically constructed bias tables, (ii) variation in the degree of codon bias within an organism, gene, or set of genes, (iii) systematic variation of codons including context, (iv) variation of codons according to their decoding tRNAs, (v) variation of codons according to GC %, either overall or in one position of the triplet, (vi) variation in degree of similarity to a reference sequence for example a naturally occurring sequence, (vii) variation in the codon frequency cutoff, (viii) structural properties of mRNAs transcribed from the DNA sequence, (ix) prior knowledge about the function of the DNA sequences upon which design of the codon substitution set is to be based, and/or (x) systematic variation of codon sets for each amino acid. In some embodiments, a codon optimized polynucleotide may minimize ribozyme collisions and/or limit structural interference between the expression sequence and the core functional element.

### 3. Payloads

[0398] In some embodiments, the expression sequence encodes a therapeutic protein. In some embodiments, the therapeutic protein is selected from the proteins listed in the following table.

| | | | Target | |
|---|---|---|---|---|
| | | SEQ | cell/ | |
| Payload | Sequence | ID NO | organ | Preferred delivery formulation |
| CD19 CAR | Any of sequences 309-314 | | T cells | (50 mol %) DSPC (10 mol %) Beta-sitosterol (28.5% mol %) Cholesterol (10 mol %) PEG DMG (1.5 mol %) |
| BCMA CAR | MALPVTALLLPLALLL HAARPDIVLTQSPASLA VSLGERATINCRASESV SVIGAHLIHWYQQKPG QPPKLLIYLASNLETGV PARFSGSGSGTDFTLTIS SLQAEDAAIYYCLQSRI FPRTFGQGTKLEIKGST SGSGKPGSGEGSTKGQ VQLVQSGSELKKPGAS VKVSCKASGYTFTDYSI NWVRQAPGQGLEWMG WINTETREPAYAYDFR GRFVFSLDTSVSTAYLQ | 3668 | T cells | (50 mol %) DSPC (10 mol %) Beta-sitosterol (28.5% mol %) Cholesterol (10 mol %) PEG DMG (1.5 mol %) |
| | ISSLKAEDTAVYYCAR | | | |
| | DYSYAMDYWGQGTLV | | | |
| | TVSSAAATTTPAPRPPT | | | |
| | PAPTIASQPLSLRPEACR | | | |
| | PAAGGAVHTRGLDFAC | | | |
| | DIYIWAPLAGTCGVLLL | | | |
| | SLVITLYCKRGRKKLLY | | | |
| | IFKQPFMRPVQTTQEED | | | |
| | GCSCRFPEEEEGGCELR | | | |
| | VKFSRSADAPAYQQGQ | | | |
| | NQLYNELNLGRREEYD | | | |
| | VLDKRRGRDPEMGGKP | | | |
| | RRKNPQEGLYNELQKD | | | |
| | KMAEAYSEIGMKGERR | | | |
| | RGKGHDGLYQGLSTAT | | | |
| | KDTYDALHMQALPPR | | | |
| MAGE- A4 TCR | TCR alpha chain: KNQVEQSPQSLIILEGK NCTLQCNYTVSPFSNLR WYKQDTGRGPVSLTIM TFSENTKSNGRYTATLD ADTKQSSLHITASQLSD SASYICVVNHSGGSYIP TFGRGTSLIVHPYIQKP DPAVYQLRDSKSSDKS VCLFTDFDSQTNVSQSK DSDVYITDKTVLDMRS MDFKSNSAVAWSNKS DFACANAFNNSIIPEDT FFPSPESS | 3669 and 3670 | T cells | (50 mol %) DSPC (10 mol %) Beta-sitosterol (28.5% mol %) Cholesterol (10 mol %) PEG DMG (1.5 mol %) |
| | TCR beta chain: | | | |
| | DVKVTQSSRYLVKRTG | | | |
| | EKVFLECVQDMDHEN | | | |
| | MFWYRQDPGLGLRLIY | | | |
| | FSYDVKMKEKGDIPEG | | | |
| | YSVSREKKERFSLILES | | | |
| | ASTNQTSMYLCASSFL | | | |
| | MTSGDPYEQYFGPGTR | | | |
| | LTVTEDLKNVFPPEVA | | | |
| | VFEPSEAEISHTQKATL | | | |
| | VCLATGFYPDHVELSW | | | |
| | WVNGKEVHSGVSTDPQ | | | |
| | PLKEQPALNDSRYCLSS | | | |
| | RLRVSATFWQNPRNHF | | | |
| | RCQVQFYGLSENDEWT | | | |
| | QDRAKPVTQIVSAEAW | | | |
| | GRAD | | | |
| NY- ESO TCR | TCR alpha extracellular sequence MQEVTQIPAALSVPEGE NLVLNCSFTDSAIYNLQ WFRQDPGKGLTSLLLIQ SSQREQTSGRLNASLDK SSGRSTLYIAASQPGDS ATYLCAVRPTSGGSYIP TFGRGTSLIVHPY TCR beta extracellular sequence MGVTQTPKFQVLKTGQ | 3671 and 3672 | T cells | (50 mol %) DSPC (10 mol %) Beta-sitosterol (28.5% mol %) Cholesterol (10 mol %) PEG DMG (1.5 mol %) |
| | SMTLQCAQDMNHEYM | | | |
| | SWYRQDPGMGLRLIHY | | | |
| | SVGAGITDQGEVPNGY | | | |
| | NVSRSTTEDFPLRLLSA | | | |
| | APSQTSVYFCASSYVG | | | |
| | NTGELFFGEGSRLTVL | | | |
| EPO | APPRLICDSRVLERYLL | 3673 | Kidney | |
| | EAKEAENITTGCAEHCS | | or bone | |
| | LNENITVPDTKVNFYA | | marrow | |
| | WKRMEVGQQAVEVW | | | |
| | QGLALLSEAVLRGQAL | | | |
| | LVNSSQPWEPLQLHVD | | | |
| | KAVSGLRSLTTLLRALG | | | |
| | AQKEAISPPDAASAAPL | | | |
| | RTITADTFRKLFRVYSN | | | |
| | FLRGKLKLYTGEACRT | | | |
| | GDR | | | |
| PAH | MSTAVLENPGLGRKLS DFGQETSYIEDNCNQN GAISLIFSLKEEVGALA KVLRLFEENDVNLTHIE SRPSRLKKDEYEFFTHL DKRSLPALTNIIKILRHD IGATVHELSRDKKKDT VPWFPRTIQELDRFANQ ILSYGAELDADHPGFKD PVYRARRKQFADIAYN YRHGQPIPRVEYMEEE KKTWGTVFKTLKSLYK THACYEYNHIFPLLEKY CGFHEDNIPQLEDVSQF LQTCTGFRLRPVAGLLS SRDFLGGLAFRVFHCT QYIRHGSKPMYTPEPDI CHELLGHVPLFSDRSFA | 3674 | Hepatic cells | (50 mol %) DSPC (10 mol %) Cholesterol (38.5% mol %) PEG-DMG (1.5%) OR MC3 (50 mol %) DSPC (10 mol %) Cholesterol (38.5% mol %) PEG-DMG (1.5%) |
| | QFSQEIGLASLGAPDEY | | | |
| | IEKLATIYWFTVEFGLC | | | |
| | KQGDSIKAYGAGLLSSF | | | |
| | GELQYCLSEKPKLLPLE | | | |
| | LEKTAIQNYTVTEFQPL | | | |
| | YYVAESFNDAKEKVRN | | | |
| | FAATIPRPFSVRYDPYT | | | |
| | QRIEVLDNTQQLKILAD | | | |
| | SINSEIGILCSALQKIK | | | |
| CPS1 | LSVKAQTAHIVLEDGT KMKGYSFGHPSSVAGE VVFNTGLGGYPEAITDP AYKGQILTMANPIIGNG GAPDTTALDELGLSKY LESNGIKVSGLLVLDYS KDYNHWLATKSLGQW LQEEKVPAIYGVDTRM LTKIIRDKGTMLGKIEF EGQPVDFVDPNKQNLI AEVSTKDVKVYGKGNP TKVVAVDCGIKNNVIR LLVKRGAEVHLVPWN HDFTKMEYDGILIAGGP GNPALAEPLIQNVRKIL ESDRKEPLFGISTGNLIT GLAAGAKTYKMSMAN RGQNQPVLNITNKQAFI | 3675 | Hepatic cells | (50 mol %) DSPC (10 mol %) Cholesterol (38.5% mol %) PEG-DMG (1.5%) OR MC3 (50 mol %) DSPC (10 mol %) Cholesterol (38.5% mol %) PEG-DMG (1.5%) |
| | TAQNHGYALDNTLPAG | | | |
| | WKPLFVNVNDQTNEGI | | | |
| | MHESKPFFAVQFHPEV | | | |
| | TPGPIDTEYLFDSFFSLI | | | |
| | KKGKATTITSVLPKPAL | | | |
| | VASRVEVSKVLILGSGG | | | |
| | LSIGQAGEFDYSGSQAV | | | |
| | KAMKEENVKTVLMNP | | | |
| | NIASVQTNEVGLKQAD | | | |
| | TVYFLPITPQFVTEVIKA | | | |
| | EQPDGLILGMGGQTAL | | | |
| | NCGVELFKRGVLKEYG | | | |
| | VKVLGTSVESIMATED | | | |
| | ROLFSDKLNEINEKIAPS | | | |
| | FAVESIEDALKAADTIG | | | |
| | YPVMIRSAYALGGLGS | | | |
| | GICPNRETLMDLSTKAF | | | |
| | AMTNQILVEKSVTGWK | | | |
| | EIEYEVVRDADDNCVT | | | |
| | VCNMENVDAMGVHTG | | | |
| | DSVVVAPAQTLSNAEF | | | |
| | QMLRRTSINVVRHLGIV | | | |
| | GECNIQFALHPTSMEYC | | | |
| | IIEVNARLSRSSALASK | | | |
| | ATGYPLAFIAAKIALGIP | | | |
| | LPEIKNVVSGKTSACFE | | | |
| | PSLDYMVTKIPRWDLD | | | |
| | RFHGTSSRIGSSMKSVG | | | |
| | EVMAIGRTFEESFQKAL | | | |
| | RMCHPSIEGFTPRLPMN | | | |
| | KEWPSNLDLRKELSEPS | | | |
| | STRIYAIAKAIDDNMSL | | | |
| | DEIEKLTYIDKWFLYK | | | |
| | MRDILNMEKTLKGLNS | | | |
| | ESMTEETLKRAKEIGFS | | | |
| | DKQISKCLGLTEAQTRE | | | |
| | LRLKKNIHPWVKQIDTL | | | |
| | AAEYPSVTNYLYVTYN | | | |
| | GQEHDVNFDDHGMMV | | | |
| | LGCGPYHIGSSVEFDW | | | |
| | CAVSSIRTLRQLGKKTV | | | |
| | VVNCNPETVSTDFDEC | | | |
| | DKLYFEELSLERILDIYH | | | |
| | QEACGGCIISVGGQIPN | | | |
| | NLAVPLYKNGVKIMGT | | | |
| | SPLQIDRAEDRSIFSAVL | | | |
| | DELKVAQAPWKAVNT | | | |
| | LNEALEFAKSVDYPCLL | | | |
| | RPSYVLSGSAMNVVFS | | | |
| | EDEMKKFLEEATRVSQ | | | |
| | EHPVVLTKFVEGAREV | | | |
| | EMDAVGKDGRVISHAI | | | |
| | SEHVEDAGVHSGDATL | | | |
| | MLPTQTISQGAIEKVKD | | | |
| | ATRKIAKAFAISGPFNV | | | |
| | QFLVKGNDVLVIECNL | | | |
| | RASRSFPFVSKTLGVDF | | | |
| | IDVATKVMIGENVDEK | | | |
| | HLPTLDHPIIPADYVAIK | | | |
| | APMFSWPRLRDADPILR | | | |
| | CEMASTGEVACFGEGI | | | |
| | HTAFLKAMLSTGFKIPQ | | | |
| | KGILIGIQQSFRPRFLGV | | | |
| | AEQLHNEGFKLFATEA | | | |
| | TSDWLNANNVPATPVA | | | |
| | WPSQEGQNPSLSSIRKLI | | | |
| | RDGSIDLVINLPNNNTK | | | |
| | FVHDNYVIRRTAVDSGI | | | |
| | PLLTNFQVTKLFAEAV | | | |
| | QKSRKVDSKSLFHYRQ | | | |
| | YSAGKAA | | | |
| Cas9 | MKRNYILGLDIGITSVG YGIIDYETRDVIDAGVR LFKEANVENNEGRRSK RGARRLKRRRRHRIQR VKKLLFDYNLLTDHSE LSGINPYEARVKGLSQK LSEEEFSAALLHLAKRR GVHNVNEVEEDTGNEL STKEQISRNSKALEEKY VAELQLERLKKDGEVR GSINRFKTSDYVKEAK QLLKVQKAYHQLDQSF IDTYIDLLETRRTYYEG PGEGSPFGWKDIKEWY | 3676 | Immune cells | (50 mol %) DSPC (10 mol %) Beta-sitosterol (28.5% mol %) Cholesterol (10 mol %) PEG DMG (1.5 mol %) |
| | EMLMGHCTYFPEELRS | | | |
| | VKYAYNADLYNALND | | | |
| | LNNLVITRDENEKLEYY | | | |
| | EKFQIIENVFKQKKKPT | | | |
| | LKQIAKEILVNEEDIKG | | | |
| | YRVTSTGKPEFTNLKV | | | |
| | YHDIKDITARKEIIENAE | | | |
| | LLDQIAKILTIYQSSEDI | | | |
| | QEELTNLNSELTQEEIE | | | |
| | QISNLKGYTGTHNLSLK | | | |
| | AINLILDELWHTNDNQI | | | |
| | AIFNRLKLVPKKVDLSQ | | | |
| | QKEIPTTLVDDFILSPVV | | | |
| | KRSFIQSIKVINAIIKKY | | | |
| | GLPNDIIIELAREKNSKD | | | |
| | AQKMINEMQKRNRQT | | | |
| | NERIEEIIRTTGKENAKY | | | |
| | LIEKIKLHDMQEGKCLY | | | |
| | SLEAIPLEDLLNNPFNY | | | |
| | EVDHIIPRSVSFDNSFNN | | | |
| | KVLVKQEENSKKGNRT | | | |
| | PFQYLSSSDSKISYETFK | | | |
| | KHILNLAKGKGRISKTK | | | |
| | KEYLLEERDINRFSVQK | | | |
| | DFINRNLVDTRYATRG | | | |
| | LMNLLRSYFRVNNLDV | | | |
| | KVKSINGGFTSFLRRK | | | |
| | WKFKKERNKGYKHHA | | | |
| | EDALIIANADFIFKEWK | | | |
| | KLDKAKKVMENQMFE | | | |
| | EKQAESMPEIETEQEYK | | | |
| | EIFITPHQIKHIKDFKDY | | | |
| | KYSHRVDKKPNRELIN | | | |
| | DTLYSTRKDDKGNTLI | | | |
| | VNNLNGLYDKDNDKL | | | |
| | KKLINKSPEKLLMYHH | | | |
| | DPQTYQKLKLIMEQYG | | | |
| | DEKNPLYKYYEETGNY | | | |
| | LTKYSKKDNGPVIKKIK | | | |
| | YYGNKLNAHLDITDDY | | | |
| | PNSRNKVVKLSLKPYR | | | |
| | FDVYLDNGVYKFVTVK | | | |
| | NLDVIKKENYYEVNSK | | | |
| | CYEEAKKLKKISNQAEF | | | |
| | IASFYNNDLIKINGELY | | | |
| | RVIGVNNDLLNRIEVN | | | |
| | MIDITYREYLENMNDK | | | |
| | RPPRIIKTIASKTQSIKK | | | |
| | YSTDILGNLYEVKSKK | | | |
| | HPQIIKKG | | | |
| ADAM TS13 | AAGGILHLELLVAVGP DVFQAHQEDTERYVLT NLNIGAELLRDPSLGAQ FRVHLVKMVILTEPEG APNITANLTSSLLSVCG WSQTINPEDDTDPGHA DLVLYITRFDLELPDGN RQVRGVTQLGGACSPT WSCLITEDTGFDLGVTI AHEIGHSFGLEHDGAPG SGCGPSGHVMASDGAA SLLSAGRARCVWDPPR PRAGLAWSPCSRRQLL PQPGSAGHPPDAQPGL YYSANEQCRVAFGPKA PLLDGTECGVEKWCSK VACTFAREHLDMCQAL GRCRSLVELTPIAAVHG | 3677 | Hepatic cells | (50 mol %) DSPC (10 mol %) Cholesterol (38.5% mol %) PEG-DMG (1.5%) OR MC3 (50 mol %) DSPC (10 mol %) Cholesterol (38.5% mol %) PEG-DMG (1.5%) |
| | SCHTDPLDQSSCSRLLV | | | |
| | RWSSWGPRSPCSRSCG | | | |
| | GGVVTRRRQCNNPRPA | | | |
| | FGGRACVGADLQAEM | | | |
| | CNTQACEKTQLEFMSQ | | | |
| | QCARTDGQPLRSSPGG | | | |
| | ASFYHWGAAVPHSQG | | | |
| | DALCRHMCRAIGESFIM | | | |
| | KRGDSFLDGTRCMPSG | | | |
| | PREDGTLSLCVSGSCRT | | | |
| | FGCDGRMDSQQVWDR | | | |
| | CQVCGGDNSTCSPRKG | | | |
| | SFTAGRAREYVTFLTVT | | | |
| | PNLTSVYIANHRPLFTH | | | |
| | LAVRIGGRYVVAGKMS | | | |
| | ISPNTTYPSLLEDGRVE | | | |
| | YRVALTEDRLPRLEEIRI | | | |
| | WGPLQEDADIQVYRRY | | | |
| | GEEYGNLTRPDITFTYF | | | |
| | QPKPRQAWVWAAVRG | | | |
| | PCSVSCGAGLRWVNYS | | | |
| | CLDQARKELVETVQCQ | | | |
| | GSQQPPAWPEACVLEP | | | |
| | CPPYWAVGDFGPCSAS | | | |
| | CGGGLRERPVRCVEAQ | | | |
| | GSLLKTLPPARCRAGA | | | |
| | QQPAVALETCNPQPCP | | | |
| | ARWEVSEPSSCTSAGG | | | |
| | AGLALENETCVPGADG | | | |
| | LEAPVTEGPGSVDEKLP | | | |
| | APEPCVGMSCPPGWGH | | | |
| | LDATSAGEKAPSPWGSI | | | |
| | RTGAQAAHVWTPAAG | | | |
| | SCSVSCGRGLMELRFLC | | | |
| | MDSALRVPVQEELCGL | | | |
| | ASKPGSRREVCQAVPC | | | |
| | PARWQYKLAACSVSCG | | | |
| | RGVVRRILYCARAHGE | | | |
| | DDGEEILLDTQCQGLPR | | | |
| | PEPQEACSLEPCPPRWK | | | |
| | VMSLGPCSASCGLGTA | | | |
| | RRSVACVQLDQGQDVE | | | |
| | VDEAACAALVRPEASV | | | |
| | PCLIADCTYRWHVGTW | | | |
| | MECSVSCGDGIQRRRD | | | |
| | TCLGPQAQAPVPADFC | | | |
| | QHLPKPVTVRGCWAGP | | | |
| | CVGQGTPSLVPHEEAA | | | |
| | APGRTTATPAGASLEW | | | |
| | SQARGLLFSPAPQPRRL | | | |
| | LPGPQENSVQSSACGR | | | |
| | QHLEPTGTIDMRGPGQ | | | |
| | ADCAVAIGRPLGEVVT | | | |
| | LRVLESSLNCSAGDML | | | |
| | LLWGRLTWRKMCRKL | | | |
| | LDMTFSSKTNTLVVRQ | | | |
| | RCGRPGGGVLLRYGSQ | | | |
| | LAPETFYRECDMQLFG | | | |
| | PWGEIVSPSLSPATSNA | | | |
| | GGCRLFINVAPHARIAI | | | |
| | HALATNMGAGTEGAN | | | |
| | ASYILIRDTHSLRTTAFH | | | |
| | GQQVLYWESESSQAEM | | | |
| | EFSEGFLKAQASLRGQ | | | |
| | YWTLQSWVPEMQDPQ | | | |
| | SWKGKEGT | | | |
| FOXP3 | MPNPRPGKPSAPSLALG PSPGASPSWRAAPKAS DLLGARGPGGTFQGRD LRGGAHASSSSLNPMPP SQLQLPTLPLVMVAPSG ARLGPLPHLQALLQDR PHFMHQLSTVDAHART PVLQVHPLESPAMISLT PPTTATGVFSLKARPGL PPGINVASLEWVSREPA LLCTFPNPSAPRKDSTL SAVPQSSYPLLANGVC KWPGCEKVFEEPEDFL KHCQADHLLDEKGRA | 3678 | Immune cells | (50 mol %) DSPC (10 mol %) Beta-sitosterol (28.5% mol %) Cholesterol (10 mol %) PEG DMG (1.5 mol %) |
| | QCLLQREMVQSLEQQL | | | |
| | VLEKEKLSAMQAHLAG | | | |
| | KMALTKASSVASSDKG | | | |
| | SCCIVAAGSQGPVVPA | | | |
| | WSGPREAPDSLFAVRR | | | |
| | HLWGSHGNSTFPEFLH | | | |
| | NMDYFKFHNMRPPFTY | | | |
| | ATLIRWAILEAPEKQRT | | | |
| | LNEIYHWFTRMFAFFR | | | |
| | NHPATWKNAIRHNLSL | | | |
| | HKCFVRVESEKGAVWT | | | |
| | VDELEFRKKRSQRPSRC | | | |
| | SNPTPGP | | | |
| IL-10 | SPGQGTQSENSCTHFPG NLPNMLRDLRDAFSRV KTFFQMKDQLDNLLLK ESLLEDFKGYLGCQALS EMIQFYLEEVMPQAEN QDPDIKAHVNSLGENL KTLRLRLRRCHRFLPCE NKSKAVEQVKNAFNKL QEKGIYKAMSEFDIFIN YIEAYMTMKIRN | 3679 | Immune cells | (50 mol %) DSPC (10 mol %) Beta-sitosterol (28.5% mol %) Cholesterol (10 mol %) PEG DMG (1.5 mol %) |
| IL-2 | APTSSSTKKTQLQLEHL LLDLQMILNGINNYKNP KLTRMLTFKFYMPKKA TELKHLQCLEEELKPLE EVLNLAQSKNFHLRPR DLISNINVIVLELKGSET TFMCEYADETATIVEFL NRWITFCQSIISTLT | 3680 | Immune cells | (50 mol %) DSPC (10 mol %) Beta-sitosterol (28.5% mol %) Cholesterol (10 mol %) PEG DMG (1.5 mol %) |

[0399] In some embodiments, the expression sequence encodes a therapeutic protein. In some embodiments, the expression sequence encodes a cytokine, e.g., IL-12p70, IL-15, IL-2, IL-18, IL-21, IFN-α, IFN-β, IL-10, TGF-beta, IL-4, or IL-35, or a functional fragment thereof. In some embodiments, the expression sequence encodes an immune checkpoint inhibitor. In some embodiments, the expression sequence encodes an agonist (e.g., a TNFR family member such as CD137L, OX40L, ICOSL, LIGHT, or CD70). In some embodiments, the expression sequence encodes a chimeric antigen receptor. In some embodiments, the expression sequence encodes an inhibitory receptor agonist (e.g., PDL¹, PDL², Galectin-9, VISTA, B7H4, or MHCII) or inhibitory receptor (e.g., PD1, CTLA4, TIGIT, LAG3, or TIM3). In some embodiments, the expression sequence encodes an inhibitory receptor antagonist. In some embodiments, the expression sequence encodes one or more TCR chains (alpha and beta chains or gamma and delta chains). In some embodiments, the expression sequence encodes a secreted T cell or immune cell engager (e.g., a bispecific antibody such as BiTE, targeting, e.g., CD3, CD137, or CD28 and a tumor-expressed protein e.g., CD19, CD20, or BCIA etc.). In some embodiments, the expression sequence encodes a transcription factor (e.g., FOXP3, HELIOS, TOX1, or TOX2). In some embodiments, the expression sequence encodes an immunosuppressive enzyme (e.g., IDO or CD39/CD73). In some embodiments, the expression sequence encodes a GvHD (e.g., anti-HLA-A2 CAR-Tregs).

[0400] In some embodiments, a polynucleotide encodes a protein that is made up of subunits that are encoded by more than one gene. For example, the protein may be a heterodimer, wherein each chain or subunit of the protein is encoded by a separate gene. It is possible that more than one circRNA molecule is delivered in the transfer vehicle and each circRNA encodes a separate subunit of the protein. Alternatively, a single circRNA may be engineered to encode more than one subunit. In certain embodiments, separate circRNA molecules encoding the individual subunits may be administered in separate transfer vehicles.

### A. Antigen-Recognition Receptors

a. Chimeric Antigen Receptors (Cars)

[0401] Chimeric antigen receptors (CARs or CAR-Ts) are genetically-engineered receptors. These engineered receptors may be inserted into and expressed by immune cells, including T cells via circular RNA as described herein. With a CAR, a single receptor may be programmed to both recognize a specific antigen and, when bound to that antigen, activate the immune cell to attack and destroy the cell bearing that antigen. When these antigens exist on tumor cells, an immune cell that expresses the CAR may target and kill the tumor cell. In some embodiments, the CAR encoded by the polynucleotide comprises (i) an antigen-binding molecule that specifically binds to a target antigen, (ii) a hinge domain, a transmembrane domain, and an intracellular domain, and (iii) an activating domain.

[0402] In some embodiments, an orientation of the CARs in accordance with the disclosure comprises an antigen binding domain (such as an scFv) in tandem with a costimulatory domain and an activating domain. The costimulatory domain may comprise one or more of an extracellular portion, a transmembrane portion, and an intracellular portion. In other embodiments, multiple costimulatory domains may be utilized in tandem.

[0403] The present invention contemplates the use of such CARs as disclosed, for example, in International Application No. PCT/US2020/034418, in U.S. Provisional Application No. 62/851,548, filed May 22, 2019; U.S. Provisional Patent Application No. 62/857,121, filed Jun. 4, 2019; International Patent Application No. PCT/US2019/035531, filed Jun. 5, 2019, U.S. Provisional Patent Application No. 62/943,796, filed Dec. 4, 2019; U.S. Provisional Patent Application No. 62/943,779, filed Dec. 4, 2019; and U.S. Provisional Patent Application No. 62/972,194, filed Feb. 10, 2020, the teachings of which are incorporated herein by reference in their entirety.

i. Antigen Binding Domain

[0404] CARs may be engineered to bind to an antigen (such as a cell-surface antigen) by incorporating an antigen binding molecule that interacts with that targeted antigen. In some embodiments, the antigen binding molecule is an antibody fragment thereof, e.g., one or more single chain antibody fragment (scFv). An scFv is a single chain antibody fragment having the variable regions of the heavy and light chains of an antibody linked together. See U.S. Pat. Nos. 7,741,465, and 6,319,494 as well as Eshhar et al., Cancer Immunol Immunotherapy (1997) 45: 131-136. An scFv retains the parent antibody's ability to specifically interact with target antigen. scFvs are useful in chimeric antigen receptors because they may be engineered to be expressed as part of a single chain along with the other CAR components. Id. See also Krause et al., J. Exp. Med., Volume 188, No. 4, 1998 (619-626); Finney et al., Journal of Immunology, 1998, 161: 2791-2797. It will be appreciated that the antigen binding molecule is typically contained within the extracellular portion of the CAR such that it is capable of recognizing and binding to the antigen of interest. Bispecific and multispecific CARs are contemplated within the scope of the invention, with specificity to more than one target of interest.

[0405] In some embodiments, the antigen binding molecule comprises a single chain, wherein the heavy chain variable region and the light chain variable region are connected by a linker. In some embodiments, the VH is located at the N terminus of the linker and the VL is located at the C terminus of the linker. In other embodiments, the VL is located at the N terminus of the linker and the VH is located at the C terminus of the linker. In some embodiments, the linker comprises at least about 5, at least about 8, at least about 10, at least about 13, at least about 15, at least about 18, at least about 20, at least about 25, at least about 30, at least about 35, at least about 40, at least about 45, at least about 50, at least about 60, at least about 70, at least about 80, at least about 90, or at least about 100 amino acids.

[0406] In some embodiments, the antigen binding molecule comprises a nanobody. In some embodiments, the antigen binding molecule comprises a DARPin. In some embodiments, the antigen binding molecule comprises an anticalin or other synthetic protein capable of specific binding to target protein.

[0407] In some embodiments, the CAR comprises an antigen binding domain specific for an antigen selected from the group CD19, CD123, CD22, CD30, CD171, CS-1, C-type lectin-like molecule-1, CD33, epidermal growth factor receptor variant III (EGFRvIII), ganglioside G2 (GD2), ganglioside GD3, TNF receptor family member B cell maturation (BCMA), Tn antigen ((Tn Ag) or (GaINAca-Ser/Thr)), prostate-specific membrane antigen (PSMA), Receptor tyrosine kinase-like orphan receptor 1 (ROR1), Fms-Like Tyrosine Kinase 3 (FLT3), Tumor-associated glycoprotein 72 (TAG72), CD38, CD44v6, Carcinoembryonic antigen (CEA), Epithelial cell adhesion molecule (EPCAM), B7H3 (CD276), KIT (CD117), Interleukin-13 receptor subunit alpha-2, mesothelin, Interleukin 11 receptor alpha (IL-11Ra), prostate stem cell antigen (PSCA), Protease Serine 21, vascular endothelial growth factor receptor 2 (VEGFR2), Lewis(Y) antigen, CD24, Platelet-derived growth factor receptor beta (PDGFR-beta), Stage-specific embryonic antigen-4 (SSEA-4), CD20, Folate receptor alpha, HER2, HER3, Mucin 1, cell surface associated (MUC1), epidermal growth factor receptor (EGFR), neural cell adhesion molecule (NCAM), Prostase, prostatic acid phosphatase (PAP), elongation factor 2 mutated (ELF2M), Ephrin B2, fibroblast activation protein alpha (FAP), insulin-like growth factor 1 receptor (IGF-I receptor), carbonic anhydrase IX (CAIX), Proteasome (Prosome, Macropain) Subunit, Beta Type, 9 (LMP2), glycoprotein 100 (gp100), oncogene fusion protein consisting of breakpoint cluster region (BCR) and Abelson murine leukemia viral oncogene homolog 1 (Abl) (bcr-abl), tyrosinase, ephrin type-A receptor 2 (EphA2), Fucosyl GM1, sialyl Lewis adhesion molecule (sLe), ganglioside GM3, transglutaminase 5 (TGS5), high molecular weight-melanoma-associated antigen (HIVWMAA), o-acetyl-GD2 ganglioside (OAcGD2), Folate receptor beta, tumor endothelial marker 1 (TEM1/CD248), tumor endothelial marker 7-related (TEM7R), claudin 6 (CLDN6), thyroid stimulating hormone receptor (TSHR), G protein-coupled receptor class C group 5, member D (GPRC5D), chromosome X open reading frame 61 (CXORF61), CD97, CD179a, anaplastic lymphoma kinase (ALK), Polysialic acid, placenta-specific 1 (PLAC1), hexasaccharide portion of globoH glycoceramide (GloboH), mammary gland differentiation antigen (NY-BR-1), uroplakin 2 (UPK2), Hepatitis A virus cellular receptor 1 (HAVCR1), adrenoceptor beta 3 (ADRB3), pannexin 3 (PANX3), G protein-coupled receptor 20 (GPR20), lymphocyte antigen 6 complex, locus K 9 (LY6K), Olfactory receptor 51E2 (OR51E2), TCR Gamma Alternate Reading Frame Protein (TARP), Wilms tumor protein (WTi), Cancer/testis antigen 1 (NY-ESO-1), Cancer/testis antigen 2 (LAGE-1a), MAGE family members (including MAGE-A1, MAGE-A3 and MAGE-A4), ETS translocation-variant gene 6, located on chromosome 12p (ETV6-AML), sperm protein 17 (SPA17), X Antigen Family, Member 1A (XAGE1), angiopoietin-binding cell surface receptor 2 (Tie 2), melanoma cancer testis antigen-1 (MAD-CT-1), melanoma cancer testis antigen-2 (MAD-CT-2), Fos-related antigen 1, tumor protein p53 (p53), p53 mutant, prostein, surviving, telomerase, prostate carcinoma tumor antigen-1, melanoma antigen recognized by T cells 1, Rat sarcoma (Ras) mutant, human Telomerase reverse transcriptase (hTERT), sarcoma translocation breakpoints, melanoma inhibitor of apoptosis (ML-IAP), ERG (transmembrane protease, serine 2 (TMPRSS2) ETS fusion gene), N-Acetyl glucosaminyl-transferase V (NA17), paired box protein Pax-3 (PAX3), Androgen receptor, Cyclin B1, v-myc avian myelocytomatosis viral oncogene neuroblastoma derived homolog (MYCN), Ras Homolog Family Member C (RhoC), Tyrosinase-related protein 2 (TRP-2), Cytochrome P450 1B1 (CYP1B1), CCCTC-Binding Factor (Zinc Finger Protein)-Like, Squamous Cell Carcinoma Antigen Recognized By T Cells 3 (SART3), Paired box protein Pax-5 (PAX5), proacrosin binding protein sp32 (OY-TES1), lymphocyte-specific protein tyrosine kinase (LCK), A kinase anchor protein 4 (AKAP-4), synovial sarcoma, X breakpoint 2 (SSX2), Receptor for Advanced Glycation Endproducts (RAGE-1), renal ubiquitous 1 (RU1), renal ubiquitous 2 (RU2), legumain, human papilloma virus E6 (HPV E6), human papilloma virus E7 (HPV E7), intestinal carboxyl esterase, heat shock protein 70-2 mutated (mut hsp70-2), CD79a, CD79b, CD72, Leukocyte-associated immunoglobulin-like receptor 1 (LAIRI), Fc fragment of IgA receptor (FCAR or CD89), Leukocyte immunoglobulin-like receptor subfamily A member 2 (LILRA2), CD300 molecule-like family member f (CD300LF), C-type lectin domain family 12 member A (CLECi2A), bone marrow stromal cell antigen 2 (BST2), EGF-like module-containing mucin-like hormone receptor-like 2 (EMR2), lymphocyte antigen 75 (LY75), Glypican-3 (GPC3), Fc receptor-like 5 (FCRL⁵), MUC16, 5T4, 8H9, αvβθ integrin, αvβ6 integrin, alphafetoprotein (AFP), B7-H6, ca-125, CA9, CD44, CD44v7/8, CD52, E-cadherin, EMA (epithelial membrane antigen), epithelial glycoprotein-2 (EGP-2), epithelial glycoprotein-40 (EGP-40), ErbB4, epithelial tumor antigen (ETA), folate binding protein (FBP), kinase insert domain receptor (KDR), k-light chain, L¹ cell adhesion molecule, MUC18, NKG2D, oncofetal antigen (h5T4), tumor/testis-antigen 1B, GAGE, GAGE-1, BAGE, SCP-1, CTZ9, SAGE, CAGE, CT10, MART-1, immunoglobulin lambda-like polypeptide 1 (IGLL¹), Hepatitis B Surface Antigen Binding Protein (HBsAg), viral capsid antigen (VCA), early antigen (EA), EBV nuclear antigen (EBNA), HHV-6 p41 early antigen, HHV-6B U94 latent antigen, HHV-6B p98 late antigen, cytomegalovirus (CMV) antigen, large T antigen, small T antigen, adenovirus antigen, respiratory syncytial virus (RSV) antigen, haemagglutinin (HA), neuraminidase (NA), parainfluenza type I antigen, parainfluenza type 2 antigen, parainfluenza type 3 antigen, parainfluenza type 4 antigen, Human Metapneumovirus (HMPV) antigen, hepatitis C virus (HCV) core antigen, HIV p24 antigen, human T-cell lympotrophic virus (HTLV-1) antigen, Merkel cell polyoma virus small T antigen, Merkel cell polyoma virus large T antigen, Kaposi sarcoma-associated herpesvirus (KSHV) lytic nuclear antigen and KSHV latent nuclear antigen. In some embodiments, an antigen binding domain comprises SEQ ID NO: 3547 and/or 3548.

### BCMA

[0408] B cell mature antigen (BCMA), also known as CD269, is a member of the tumor necrosis factor receptor superfamily, namely TNFRSF17 (Thompson et al., J. Exp. Medicine, 192 (1): 129-135, 2000). Human BCMA is almost exclusively expressed in plasma cells and multiple myeloma cells (see e.g. Novak et al., Blood, 103 (2): 689-694, 2004; Neri et al., Clinical Cancer Research, 73 (19): 5903-5909; Felix et al., Mol. Oncology, 9 (7): 1348-58, 2015). BCMA can bind B-cell activating factor (BAFF) and a proliferation including ligand (APRIL) (e.g. Mackay et al., 2003 and Kalled et al., Immunological Review, 204: 43-54, 2005). BCMA can be a suitable tumor antigen target for immunotherapeutic agents against multiple myeloma. Antibodies of high affinity can block the binding between BCMA and its native ligands BAFF and APRIL.

TABLE 1
Protein sequences of human BCMA

| Position(s) | Description | Length | Amino acid sequence |
|---|---|---|---|
| 1-54 | Extracellular | 54 | MLQMAGQCSQNEYFDSLLH |
| | domain | | ACIPCQLRCSSNTPPLTCQ |
| | | | RYCNASVTNSVKGTNA |
| | | | (SEQ ID NO: 3681) |
| 55-77 | Transmembrane | 23 | ILWTCLGLSLIISLAVFVL |
| | domain | | MFLL |
| | | | (SEQ ID NO: 3682) |
| 78-184 | Cytoplasmic | 107 | RKINSEPLKDEFKNTGSGL |
| | domain | | LGMANIDLEKSRTGDEIIL |
| | | | PRGLEYTVEECTCEDCIKS |
| | | | KPKVDSDHCFPLPAMEEGA |
| | | | TILVTTKTNDYCKSLPAAL |
| | | | SATEIEKSISAR |
| | | | (SEQ ID NO: 3683) |

[0409] In some embodiments, an anti-BCMA binding moiety specifically binds to an epitope on BCMA derived from an amino acid sequence selected from SEQ ID NOs: 3684-3689.

TABLE 2
BCMA epitope peptide sequences

| Positions | Amino acid sequence | Length |
|---|---|---|
| 1-10 | MLQMAGQCSQ (SEQ ID NO: 3684) | 10 |
| 8-21 | CSQNEYFDSLLHAC (SEQ ID NO: 3685) | 14 |
| 11-23 | NEYFDSLLHACIP (SEQ ID NO: 3686) | 13 |
| 20-30 | ACIPCQLRCSS (SEQ ID NO: 3687) | 11 |
| 24-42 | CQLRCSSNTPPLTCQRYCN | 19 |
| | (SEQ ID NO: 3688) | |
| 36-43 | LTCQRYCNAS (SEQ ID NO: 3689) | 10 |

[0410] In some embodiments, the CAR comprises an antigen binding domain specific for TNF receptor family member B cell maturation (BCMA). In some embodiments, the BCMA antigen-binding domain selectively binds BCMA. In some embodiments, the BCMA antigen-binding domain binds to BCMA on a target cell.

[0411] In some embodiments, a BCMA CAR disclosed herein comprises an amino acid sequence having at least about 85%, 86%, 87%, 88%, 89%, 90%, 91%, 92%, 93%, 94%, 95%, 96%, 97%, 98%, 99%, or 100% sequence identity to an amino acid sequence selected from the group consisting of SEQ ID NO: 3690-3695. In some embodiments, the BCMA CAR comprises an amino acid sequence selected from the group consisting of SEQ ID NO: 3690-3695.

(SEQ ID NO: 3690)
MALPVTALLLPLALLLHAARPQVKLEESGGGLVQAGRSLRLSCAASEHTFSSHV
MGWFRQAPGKERESVAVIGWRDISTSYADSVKGRFTISRDNAKKTLYLQMNSLKPEDT
AVYYCAARRIDAADFDSWGQGTQVTVSSGGGGSEVQLVESGGGLVQAGGSLRLSCAA
SGRTFTMGWFRQAPGKEREFVAAISLSPTLAYYAESVKGRFTISRDNAKNTVVLQMNSL
KPEDTALYYCAADRKSVMSIRPDYWGQGTQVTVSSTSTTTPAPRPPTPAPTIASQPLSLR
PEACRPAAGGAVHTRGLDFACDIYIWAPLAGTCGVLLLSLVITLYCKRGRKKLLYIFKQP
FMRPVQTTQEEDGCSCRFPEEEEGGCELRVKFSRSADAPAYQQGQNQLYNELNLGRRE
EYDVLDKRRGRDPEMGGKPRRKNPQEGLYNELQKDKMAEAYSEIGMKGERRRGKGH
DGLYQGLSTATKDTYDALHMQALPPR
(SEQ ID NO: 3691)
MALPVTALLLPLALLLHAARPQVKLEESGGGLVQAGRSLRLSCAASEHTFSSHV
MGWFRQAPGKERESVAVIGWRDISTSYADSVKGRFTISRDNAKKTLYLQMNSLKPEDT
AVYYCAARRIDAADFDSWGQGTQVTVSSGGGGSGGGGSGGGGSEVQLVESGGGLVQA
GGSLRLSCAASGRTFTMGWFRQAPGKEREFVAAISLSPTLAYYAESVKGRFTISRDNAK
NTVVLQMNSLKPEDTALYYCAADRKSVMSIRPDYWGQGTQVTVSSTSTTTPAPRPPTPA
PTIASQPLSLRPEACRPAAGGAVHTRGLDFACDIYIWAPLAGTCGVLLLSLVITLYCKRG
RKKLLYIFKQPFMRPVQTTQEEDGCSCRFPEEEEGGCELRVKFSRSADAPAYQQGQNQL
YNELNLGRREEYDVLDKRRGRDPEMGGKPRRKNPQEGLYNELQKDKMAEAYSEIGMK
GERRRGKGHDGLYQGLSTATKDTYDALHMQALPPR
(SEQ ID NO: 3692)
MALPVTALLLPLALLLHAARPQVKLEESGGGLVQAGRSLRLSCAASEHTFSSH
VMGWFRQAPGKERESVAVIGWRDISTSYADSVKGRFTISRDNAKKTLYLQMNSLKPED
TAVYYCAARRIDAADFDSWGQGTQVTVSSGGGGSGGGGSGGGGSGGGGSGGGGSEVQ
LVESGGGLVQAGGSLRLSCAASGRTFTMGWFRQAPGKEREFVAAISLSPTLAYYAESVK
GRFTISRDNAKNTVVLQMNSLKPEDTALYYCAADRKSVMSIRPDYWGQGTQVTVSSTS
TTTPAPRPPTPAPTIASQPLSLRPEACRPAAGGAVHTRGLDFACDIYIWAPLAGTCGVLLL
SLVITLYCKRGRKKLLYIFKQPFMRPVQTTQEEDGCSCRFPEEEEGGCELRVKFSRSADA
PAYQQGQNQLYNELNLGRREEYDVLDKRRGRDPEMGGKPRRKNPQEGLYNELQKDK
[sequence omitted]
(SEQ ID NO: 3693)
MALPVTALLLPLALLLHAARPEVQLVESGGGLVQAGGSLRLSCAASGRTFTMG
WFRQAPGKEREFVAAISLSPTLAYYAESVKGRFTISRDNAKNTVVLQMNSLKPEDTALY
YCAADRKSVMSIRPDYWGQGTQVTVSSGGGGSGGGGSQVKLEESGGGLVQAGRSLRL
SCAASEHTFSSHVMGWFRQAPGKERESVAVIGWRDISTSYADSVKGRFTISRDNAKKTL
YLQMNSLKPEDTAVYYCAARRIDAADFDSWGQGTQVTVSSTSTTTPAPRPPTPAPTIAS
QPLSLRPEACRPAAGGAVHTRGLDFACDIYIWAPLAGTCGVLLLSLVITLYCKRGRKKL
LYIFKQPFMRPVQTTQEEDGCCRFPEEEEGGCELRVKFSRSADAPAYQQGQNQLYNEL
NLGRREEYDVLDKRRGRDPEMGGKPRRKNPQEGLYNELQKDKMAEAYSEIGMKGERR
RGKGHDGLYQGLSTATKDTYDALHMQALPPR
(SEQ ID NO: 3694)
MALPVTALLLPLALLLHAARPEVQLVESGGGLVQAGGSLRLSCAASGRTFTMG
WFRQAPGKEREFVAAISLSPTLAYYAESVKGRFTISRDNAKNTVVLQMNSLKPEDTALY
YCAADRKSVMSIRPDYWGQGTQVTVSSGGGGSGGGGSGGGGSQVKLEESGGGLVQAG
RSLRLSCAASEHTFSSHVMGWFRQAPGKERESVAVIGWRDISTSYADSVKGRFTISRDN
AKKTLYLQMNSLKPEDTAVYYCAARRIDAADFDSWGQGTQVTVSSTSTTTPAPRPPTPA
PTIASQPLSLRPEACRPAAGGAVHTRGLDFACDIYIWAPLAGTCGVLLLSLVITLYCKRG
RKKLLYIFKQPFMRPVQTTQEEDGCSCRFPEEEEGGCELRVKFSRSADAPAYQQGQNQL
YNELNLGRREEYDVLDKRRGRDPEMGGKPRRKNPQEGLYNELQKDKMAEAYSEIGMK
GERRRGKGHDGLYQGLSTATKDTYDALHMQALPPR
(SEQ ID NO: 3695)
MALPVTALLLPLALLLHAARPEVQLVESGGGLVQAGGSLRLSCAASGRTFTMG
WFRQAPGKEREFVAAISLSPTLAYYAESVKGRFTISRDNAKNTVVLQMNSLKPEDTALY
YCAADRKSVMSIRPDYWGQGTQVTVSSGGGGSGGGGSGGGGSGGGGSQVKLEESGGG
LVQAGRSLRLSCAASEHTFSSHVMGWFRQAPGKERESVAVIGWRDISTSYADSVKGRFT
ISRDNAKKTLYLQMNSLKPEDTAVYYCAARRIDAADFDSWGQGTQVTVSSTSTTTPAPR
PPTPAPTIASQPLSLRPEACRPAAGGAVHTRGLDFACDIYIWAPLAGTCGVLLLSLVITLY
CKRGRKKLLYIFKQPFMRPVQTTQEEDGCSCRFPEEEEGGCELRVKFSRSADAPAYQQG
QNQLYNELNLGRREEYDVLDKRRGRDPEMGGKPRRKNPQEGLYNELQKDKMAEAYSE
IGMKGERRRGKGHDGLYQGLSTATKDTYDALHMQALPPR

[0412] In some embodiments, a BCMA CAR disclosed herein comprises an amino acid sequence having at least about 85%, 86%, 87%, 88%, 89%, 90%, 91%, 92%, 93%, 94%, 95%, 9600, 9700, 98%, 9900 or 100% sequence identity to an amino acid sequence selected from the group consisting of SEQ ID NO: 338-417. In some embodiments, a BCMA CAR comprises an amino acid sequence selected from the group consisting of SEQ ID NOs: 3696-3775.

TABLE 3
Exemplary BCMA sequences

| SEQ ID NO: | Amino acid sequence |
|---|---|
| 3696 | QVQLVESGGGLVQPGGSLRLSCEASGFTLDYYAIGWFRQAPGKERE |
| | GVICISRSDGSTYYADSVKGRFTISRDNAKKTVYLQMISLKPEDTAAY |
| | YCAAGADCSGYLRDYEFRGQGTQVTVSS |
| 3697 | QVKLEESGGRLVQPRGSLRLSCAGSGRTFSTYGMAWFRQAPGKERE |
| | FVASKASMNYSGRTYYADSVKGRFTIARDNAKNMVFLQMNNLKPE |
| | DTAVYYCAAGTGCSTYGCFDAQIIDYWGKGTLVTVSS |
| 3698 | EVQLVESGGGLVQAGGSLRLSCAASGRTFTMGWFRQAPGKEREFVA |
| | AISLSPTLAYYAESVKGRFTISRDNAKNTVVLQMNSLKPEDTALYYC |
| | AADRKSVMSIRPDYWGQGTQVTVSS |
| 3699 | AVQLVDSGGGLVQPGGSLRLSCVASGGIFVINAMGWYRQAPGKQRE |
| | LVASIRGLGRTNYDDSVKGRFTISRDNANNTVYLQMNSLEPEDTAV |
| | YYCTVYVTLLGGVNRDYWGQGTQVTVSS |
| 3700 | EVQLVESGGGLVQAGGSLRLSCAASGRTFSSIVMGWFRQAPGKERE |
| | FVGAIMWNDGITYLQDSVKGRFTIFRDNAKNTVYLQMNSLKLEDTA |
| | VYYCAASKGRYSEYEYWGQGTQVTVSS |
| 3701 | EVQLVESGGGVVQAGGSLTVSCTASGFTFDRAVIVWFRQAPGKGRE |
| | GVSFIKPSDGTIYYIDSLKGRFTISSDIAKNTVYLQMKSLESEDSAVYY |
| | CAASPEDWYTDWIDWSIYRWQHWGQGTQVTVSS |
| 3702 | EVQLVESGGGMVQAGDSLRLSCVQSTYTVNSDVMGWFRQAPGKER |
| | EFVGAIMWNDGITYLQDSVKGRFTIFRDNAKNTVYLQMNSLKLEDT |
| | AVYYCAASKGRYSEYEYWGQGTQVTVSS |
| 3703 | AVQLVESGGGLVQAGDSLRLSCTASGATLINDHMAWFRQAPGKGR |
| | EFVAAIDWSGRTTNYADPVEGRFTISRNNAKNTVYLEMNSLKLEDT |
| | AVYYCAVLRAWISYDNDYWGQGTQVTVSS |
| 3704 | QVQLVESGGGLVQAGGSLRLSCAASGGTLSKNTVAWFRQAPGKER |
| | GFVASITWDGRTTYYADSVKGRFTISRDNAKNTVYLQMNSLKPEDT |
| | AVYVCADLGKWPAGPADYWGQGTQVTVSS |
| 3705 | QVKLEESGGGLVQAGRSLRLSCAASEHTFSSHVMGWFRQAPGKERE |
| | SVAVIGWRDISTSYADSVKGRFTISRDNAKKTLYLQMNSLKPEDTAV |
| | YYCAARRIDAADFDSWGQGTQVTVSS |
| 3706 | AVQLVESGGGLVQAGDSLRLTCTASGRAFSTYFMAWFRQAPGKERE |
| | FVAGIAWSGGSTAYADSVKGRFTISRDNAKNTVYLQMNSLKSEDTA |
| | VYYCASRGIEVEEFGAWGQGTQVTVSS |
| 3707 | QVQLVESGGGLVQPGGSLRLSCEASGFTLDYYAIGWFRQAPGKERE |
| | GVICISRSDGSTYYADSVKGRFTISRDNAKKTVYLQMISLKPEDTAAY |
| | YCAAGADCSGYLRDYEFRGQGTQVTVSS |
| 3708 | QVKLEESGGGLVQAGRSLRLSCAASEHTFSSHVMGWFRQAPGKERE |
| | SVAVIGWRDISTSYADSVKGRFTISRDNAKKTLYLQMNSLKPEDTAV |
| | YYCAARRIDAADFDSWGQGTQVTVSS |
| 3709 | EVQLVESGGGLVQAGGSLRLSCAASGRTFTMGWFRQAPGKEREFVA |
| | AISLSPTLAYYAESVKGRFTISRDNAKNTVVLQMNSLKPEDTALYYC |
| | AADRKSVMSIRPDYWGQGTQVTVSS |
| 3710 | EVQLVESGGGLVPPGGSLRLSCTASGSTVSINVMAWYRQVSGKQRE |
| | LVAAVTRDGRKSCGDSVKGRFTISRDGAKNAVYLQMNSLKPEDTAV |
| | YLCGADGWGATTLDYTYGMDYWGKGTQVTVSS |
| 3711 | AVQLVESGGGLVQAGGSLRLSCAASGRTFTMGWFRQAPGKERGFV |
| | ASITWDGRSAYYAESVKGRFTISRDNAKNTVVLQMNSLKPEDTALY |
| | YCAADRKSVMSIRPDYWGQGTQVTVSS |
| 3712 | QVQLVESGGGLVQPGGSLRLACEAPGSGNSINAMGWYRQTPGKRRE |
| | LVATITRGGSTNYGPSVKGRFTITRDNVKNTVHLQMNSLKPDDTAV |
| | YYCNAERLDGSGYGYEYDYWGQGTQVTVSS |
| 3713 | QVKLEESGGGLVQAGGSLRLSCAASGGTLSKNTVAWVRQAPGKER |
| | GFVTSITCDGRTTYYANSVNGRFPINRNNAENLVVLQMNSLKPDDTA |
| | LYYCAAYRKSIMSIQPDYWGQGTQVTVSS |
| 3714 | DVQLVESGGGLVQAGGSLRLSCAASGRTFSSIVMGWFRQAPGKERE |
| | FVGAIMWNDGLTYLQGSVKGRFTISRDNAKNTVVLQMNSLKPEDTA |
| | LYYCAADRKSVMSIRPDYWGQGTQVTVSS |
| 3715 | QVQLVESGGGLVQAGGSLRLSCAASGRTFTMGWFRQAPGKEREFV |
| | AAISLSPTLAYYAESVKGRFTISRDNAKNTVVLQMNSLKPEDTAVYY |
| | CAARRIDAADFDSWGQGTQVTVSS |
| 3716 | QVQLVESGGGLVQAGGSLRLSCAASGGTLSKNTVAWFRQAPGKER |
| | GFVASITWDGRTTYYADSVKGRFTISRDNAKNTVYLQMNSLKPEDT |
| | AVYVCADLGKWPAGPADYWGQGTQVTVSS |
| 3717 | QVQLVESGGGLVQPGGSLTLSCAASGSIDSINTMDWFRQAPGKEREF |
| | VAAISLSPTLAYYAESVKGRFTISRDNAKNTVVLQMNSLKPEDTALY |
| | YCAADRKSVMSIRPDYWGQGTQVTVSS |
| 3718 | DVQLVESGGGLVQAGGSLRLSCAASGGTLSKNTVAWVRQAPGKER |
| | GFVTSITCDGRTTYYANSVKGRFPISRDNAENTVYLQMNSLKPEDTA |
| | GYVCADLGKWPAGSADYWGQGTHVTVSS |
| 3719 | QVKLEESGGGLVQPGGSLRLSCTASEFTFSDYWMHWVRQAPGKGLE |
| | WVASIDTSGQTTYYADSLKGRFTISRDNAKSTLYLQMNSLKSEDTGV |
| | YFCAKRYRGGTWYGMANWGKGTQVTVSS |
| 3720 | QVQLVESGGGLVQAGGSLRLSCAASGRTLSSNTMAWFRQAPGKERE |
| | FVASTTWNGRSTYYADSVKGRFTISRDNAKNTMYLQMNSLKPEDTA |
| | VYVCADLGKWPAGPADYWGQGTQVTVSS |
| 3721 | QVQLVESGGGLVQAGGSLRLSCAASGRTFTMGWFRQAPGKQRELV |
| | ADISGGRTNYADSVKGRFTISRDNAKNTVYLQMNSLKPEDTAVYYC |
| | AADRKSVMSIRPDYWGQGTQVTVSS |
| 3722 | QVQLVESGGGLVQAGASLRLSCAASGRTFTVAAISLSPTLAYYAESV |
| | KGRFTISRDNAKNTVVLQMNSLKPEDTALYYCAADRKSVMSIRPDY |
| | WGQGTQVTVSS |
| 3723 | DVQLVESGGGLEQAGGSLRLSCAASGGTLSKNTVAWFRQAPGKERG |
| | FVASITWDGRTTYYADSVKGRFTISRDNAKNTVYLQMNSLKPEDTA |
| | VYYCASTASCHLFGLGSGAFVSWGRGTQVTVSS |
| 3724 | AVQLVESGGGLVQAGGSLRLSCAASGRTFTMGWFHQAPGKEREFV |
| | AAISLSPTLAYYAESVKGRFTISRDNAKNTVVLQMNSLKPEDTALYY |
| | CAASKDRYSEYEYWGQGTQVTVSS |
| 3725 | QVKLEESGGGLVQAGGSLRLSCAASGRTFTMGWFRQAPGKEREFVA |
| | AISLSPTLAYYAESVKGRFTISRDNAKNTVVLQMNSLKPEDTALYYC |
| | AKKNGGPVDYWGKGTQVTVSS |
| 3726 | DVQLVESGGGLVQPGGSLRLSCAASGRTFSSIVMGWFRQAPGKEREF |
| | VGAIMWNDGITYLQDSVKGRFTIFRDNAKNTVYLQMNSLKLEDTAV |
| | YYCAASKGRYSEYEYWGQGTQVTVSS |
| 3727 | QVKLEESGGRLVQAGGSLKLSWAASGRTFTMGWFRQAPGKEREFV |
| | TAINLSPTLTYYAESVKGRFPISRNNAQNTVVLQMNSLKPEDTALYY |
| | CAAERKSVMAIPPDYWGQGTQVTVSS |
| 3728 | QVKLEESGGRLVQAGGSLKLSWAASGRTFTMGWFRQAPGKEREFV |
| | TAINLSPTLTYYAESVKGRFPISRNNAQNTVVLQMNSLKPEDTALYY |
| | CAAERKSVMAIPPDYWGQGTQVTVSS |
| 3729 | EVQLVESGGGLVQAGGSLRLSCAASGRTFTMGGFRR VPRDEREFVA |
| | SITLIPTFPYYAYSVKGRFALFRDNPNNTVILLMISLKPEDPDLYYCAS |
| | YRKYLMSILPDYWGQGTQGTVSS |
| 3730 | QVKLEESGGGLVQAGGSLRLSCAASGRTFTMGWFRQAPGKEREFVA |
| | AISLSPTLAYYAESVKGRFTISRDNAKNTVDLQMNSLKPEDTAVYFC |
| | AANRNSQRVIAALSWIGMNYWGEWTQVTVSS |
| 3731 | QVQLVESGGGLVQAGGSLRLSCAASGRTFTMGWFRQAPGKEREFV |
| | AAISLSPTLAYYAESVKGRFTISRDNAKKTLYLRMNSLKPEDTAVYY |
| | CAARRIDAADFDSWGQGTQVTVSS |
| 3732 | QVKLEESGGGLVQAGGSLRLSCAASGRTFTMGWFRRAPGKERESVA |
| | VIGWRDINASYADSVKGRFAISRDNAKKTLYLQMNSLKPEDTAVYY |
| | CAARRIDATDFDSWGQGTQVTVSS |
| 3733 | QVKLEESGGGLVQTGGSLRLSCAASEHTFSNHVMGWFRQAPGKERE |
| | SVAVIGWRDISTSYADSVKGRFTISRDNAKKTLYLQMNSLKPEDTAV |
| | YYCAARRIDAADFDSRGQGTQVTVSS |
| 3734 | AVQLVDSGGGLVQAGGSLRISCAVSGRTSSNYILAWFRQAPGKERDF |
| | VAHISRSGGKSGYGDSVKGRFTISRDNAENTVRVYLQMNSLKPGDT |
| | AVYYCNRPLWYGSPTLIDYWGQGTQVTVSS |
| 3735 | QVQLVESGGGLVQAGGSLRLSCAASGRTFTMGWFRQAPGKEREFV |
| | AAISLSPTLAYYAESVKGRFTISRDNAKNTVVLQMNSLKPEDTALYY |
| | CAADRKSVMSIRPDYWGQGTQVTVSS |
| 3736 | AVQLVDSGGGLVQAGGSLRLSCAASGRTFTMGWFRQAPGKEREFV |
| | AAISLSPTLAYYAEPVKGRFTISRDNAKNTVVLQMNSLKPEDTALYY |
| | CAADRKSVMSIRPDYWGQGTQVTVSS |
| 3737 | DVQLVESGGGSVQTGGSLRLSCTASGRTLNNFVMGWFRQAPGKERE |
| | FVAAISLSPTLAYYVESVKGRFTISRDNAKNTVVLQMNSLKPEDTAL |
| | YYCAADRKSVMSIRPDYWGQGTQVTVSS |
| 3738 | APGKEREGVICISRSDGSTYYADSVKGRFTISRDNAKKTVYLQMISLK |
| | PEDTAAYYCAAGADCSGYLRDYEFRGQGTQVTVSSGGGGSQVQLV |
| | ESGGGLVQPGGSLRLSCEASGFTLDYYAIGWFRQAPGKEREGVICISR |
| | SDGSTYYADSVKGRFTISRDNAKKTVYLQMISLKPEDTAAYYCAAG |
| | ADCSGYLRDYEFRGQGTQVTVSS |
| 3739 | QVQLVESGGGLVQPGGSLRLSCEASGFTLDYYAIGWFRQAPGKERE |
| | GVICISRSDGSTYYADSVKGRFTISRDNAKKTVYLQMISLKPEDTAAY |
| | YCAAGADCSGYLRDYEFRGQGTQVTVSSGGGGSQVQLVESGGGLV |
| | QPGGSLRLSCEASGFTLDYYAIGWFRQAPGKEREGVICISRSDGSTYY |
| | ADSVKGRFTISRDNAKKTVYLQMISLKPEDTAAYYCAAGADCSGYL |
| | RDYEFRGQGTQVTVSSGGGGSQVQLVESGGGLVQPGGSLRLSCEAS |
| | GFTLDYYAIGWFRQAPGKEREGVICISRSDGSTYYADSVKGRFTISRD |
| | NAKKTVYLQMISLKPEDTAAYYCAAGADCSGYLRDYEFRGQGTQV |
| | TVSS |
| 3740 | QVKLEESGGGLVQAGRSLRLSCAASEHTFSSHVMGWFRQAPGKERE |
| | SVAVIGWRDISTSYADSVKGRFTISRDNAKKTLYLQMNSLKPEDTAV |
| | YYCAARRIDAADFDSWGQGTQVTVSSGGGGSEVQLVESGGGLVQA |
| | GGSLRLSCAASGRTFTMGWFRQAPGKEREFVAAISLSPTLAYYAESV |
| | KGRFTISRDNAKNTVVLQMNSLKPEDTALYYCAADRKSVMSIRPDY |
| | WGQGTQVTVSS |
| 3741 | QVKLEESGGGLVQAGRSLRLSCAASEHTFSSHVMGWFRQAPGKERE |
| | SVAVIGWRDISTSYADSVKGRFTISRDNAKKTLYLQMNSLKPEDTAV |
| | YYCAARRIDAADFDSWGQGTQVTVSSGGGGSGGGGSGGGGSEVQL |
| | VESGGGLVQAGGSLRLSCAASGRTFTMGWFRQAPGKEREFVAAISL |
| | SPTLAYYAESVKGRFTISRDNAKNTVVLQMNSLKPEDTALYYCAAD |
| | RKSVMSIRPDYWGQGTQVTVSS |
| 3742 | QVKLEESGGGLVQAGRSLRLSCAASEHTFSSHVMGWFRQAPGKERE |
| | SVAVIGWRDISTSYADSVKGRFTISRDNAKKTLYLQMNSLKPEDTAV |
| | YYCAARRIDAADFDSWGQGTQVTVSSGGGGSGGGGSGGGGSGGGG |
| | SGGGGSEVQLVESGGGLVQAGGSLRLSCAASGRTFTMGWFRQAPG |
| | KEREFVAAISLSPTLAYYAESVKGRFTISRDNAKNTVVLQMNSLKPE |
| | DTALYYCAADRKSVMSIRPDYWGQGTQVTVSS |
| 3743 | EVQLVESGGGLVQAGGSLRLSCAASGRTFTMGWFRQAPGKEREFVA |
| | AISLSPTLAYYAESVKGRFTISRDNAKNTVVLQMNSLKPEDTALYYC |
| | AADRKSVMSIRPDYWGQGTQVTVSSGGGGSGGGGSQVKLEESGGG |
| | LVQAGRSLRLSCAASEHTFSSHVMGWFRQAPGKERESVAVIGWRDI |
| | STSYADSVKGRFTISRDNAKKTLYLQMNSLKPEDTAVYYCAARRID |
| | AADFDSWGQGTQVTVSS |
| 3744 | EVQLVESGGGLVQAGGSLRLSCAASGRTFTMGWFRQAPGKEREFVA |
| | AISLSPTLAYYAESVKGRFTISRDNAKNTVVLQMNSLKPEDTALYYC |
| | AADRKSVMSIRPDYWGQGTQVTVSSGGGGSGGGGSGGGGSQVKLE |
| | ESGGGLVQAGRSLRLSCAASEHTFSSHVMGWFRQAPGKERESVAVI |
| | GWRDISTSYADSVKGRFTISRDNAKKTLYLQMNSLKPEDTAVYYCA |
| | ARRIDAADFDSWGQGTQVTVSS |
| 3745 | EVQLVESGGGLVQAGGSLRLSCAASGRTFTMGWFRQAPGKEREFVA |
| | AISLSPTLAYYAESVKGRFTISRDNAKNTVVLQMNSLKPEDTALYYC |
| | AADRKSVMSIRPDYWGQGTQVTVSSGGGGSGGGGSGGGGSGGGGS |
| | QVKLEESGGGLVQAGRSLRLSCAASEHTFSSHVMGWFRQAPGKERE |
| | SVAVIGWRDISTSYADSVKGRFTISRDNAKKTLYLQMNSLKPEDTAV |
| | YYCAARRIDAADFDSWGQGTQVTVSS |
| 3746 | QVKLEESGGGLVQAGRSLRLSCAASEHTFSSHVMGWFRQAPGKERE |
| | SVAVIGWRDISTSYADSVKGRFTISRDNAKKTLYLQMNSLKPEDTAV |
| | YYCAARRIDAADFDSWGQGTQVTVSSGGGGSAVQLVESGGGLVQA |
| | GDSLRLTCTASGRAFSTYFMAWFRQAPGKEREFVAGIAWSGGSTAY |
| | ADSVKGRFTISRDNAKNTVYLQMNSLKSEDTAVYYCASRGIEVEEFG |
| | AWGQGTQVTVSS |
| 3747 | QVKLEESGGGLVQAGRSLRLSCAASEHTFSSHVMGWFRQAPGKERE |
| | SVAVIGWRDISTSYADSVKGRFTISRDNAKKTLYLQMNSLKPEDTAV |
| | YYCAARRIDAADFDSWGQGTQVTVSSGGGGSGGGGSGGGGSAVQL |
| | VESGGGLVQAGDSLRLTCTASGRAFSTYFMAWFRQAPGKEREFVAG |
| | IAWSGGSTAYADSVKGRFTISRDNAKNTVYLQMNSLKSEDTAVYYC |
| | ASRGIEVEEFGAWGQGTQVTVSS |
| 3748 | QVKLEESGGGLVQAGRSLRLSCAASEHTFSSHVMGWFRQAPGKERE |
| | SVAVIGWRDISTSYADSVKGRFTISRDNAKKTLYLQMNSLKPEDTAV |
| | YYCAARRIDAADFDSWGQGTQVTVSSGGGGSGGGGSGGGGSGGGG |
| | SGGGGSAVQLVESGGGLVQAGDSLRLTCTASGRAFSTYFMAWFRQ |
| | APGKEREFVAGIAWSGGSTAYADSVKGRFTISRDNAKNTVYLQMNS |
| | LKSEDTAVYYCASRGIEVEEFGAWGQGTQVTVSS |
| 3749 | AVQLVESGGGLVQAGDSLRLTCTASGRAFSTYFMAWFRQAPGKERE |
| | FVAGIAWSGGSTAYADSVKGRFTISRDNAKNTVYLQMNSLKSEDTA |
| | VYYCASRGIEVEEFGAWGQGTQVTVSSGGGGSGGGGSQVKLEESGG |
| | GLVQAGRSLRLSCAASEHTFSSHVMGWFRQAPGKERESVAVIGWRD |
| | ISTSYADSVKGRFTISRDNAKKTLYLQMNSLKPEDTAVYYCAARRID |
| | AADFDSWGQGTQVTVSS |
| 3750 | AVQLVESGGGLVQAGDSLRLTCTASGRAFSTYFMAWFRQAPGKERE |
| | FVAGIAWSGGSTAYADSVKGRFTISRDNAKNTVYLQMNSLKSEDTA |
| | VYYCASRGIEVEEFGAWGQGTQVTVSSGGGGSGGGGSGGGGSQVK |
| | LEESGGGLVQAGRSLRLSCAASEHTFSSHVMGWFRQAPGKERESVA |
| | VIGWRDISTSYADSVKGRFTISRDNAKKTLYLQMNSLKPEDTAVYYC |
| | AARRIDAADFDSWGQGTQVTVSS |
| 3751 | APGKEREFVAGIAWSGGSTAYADSVKGRFTISRDNAKNTVYLQMNS |
| | LKSEDTAVYYCASRGIEVEEFGAWGQGTQVTVSSGGGGSGGGGSGG |
| | GGSGGGGSQVKLEESGGGLVQAGRSLRLSCAASEHTFSSHVMGWFR |
| | QAPGKERESVAVIGWRDISTSYADSVKGRFTISRDNAKKTLYLQMNS |
| | LKPEDTAVYYCAARRIDAADFDSWGQGTQVTVSS |
| 3752 | EVQLVESGGGMVQAGDSLRLSCVQSTYTVNSDVMGWFRQAPGKER |
| | EFVGAIMWNDGITYLQDSVKGRFTIFRDNAKNTVYLQMNSLKLEDT |
| | AVYYCAASKGRYSEYEYWGQGTQVTVSSGGGGSQVKLEESGGRLV |
| | QPRGSLRLSCAGSGRTFSTYGMAWFRQAPGKEREFVASKASMNYSG |
| | RTYYADSVKGRFTIARDNAKNMVFLQMNNLKPEDTAVYYCAAGTG |
| | CSTYGCFDAQIIDYWGKGTLVTVSS |
| 3753 | EVQLVESGGGMVQAGDSLRLSCVQSTYTVNSDVMGWFRQAPGKER |
| | EFVGAIMWNDGITYLQDSVKGRFTIFRDNAKNTVYLQMNSLKLEDT |
| | AVYYCAASKGRYSEYEYWGQGTQVTVSSGGGGSGGGGSGGGGSQ |
| | VKLEESGGRLVQPRGSLRLSCAGSGRTFSTYGMAWFRQAPGKEREF |
| | VASKASMNYSGRTYYADSVKGRFTIARDNAKNMVFLQMNNLKPED |
| | TAVYYCAAGTGCSTYGCFDAQIIDYWGKGTLVTVSS |
| 3754 | EVQLVESGGGMVQAGDSLRLSCVQSTYTVNSDVMGWFRQAPGKER |
| | EFVGAIMWNDGITYLQDSVKGRFTIFRDNAKNTVYLQMNSLKLEDT |
| | AVYYCAASKGRYSEYEYWGQGTQVTVSSGGGGSGGGGSGGGGSG |
| | GGGSGGGGSQVKLEESGGRLVQPRGSLRLSCAGSGRTFSTYGMAWF |
| | RQAPGKEREFVASKASMNYSGRTYYADSVKGRFTIARDNAKNMVF |
| | LQMNNLKPEDTAVYYCAAGTGCSTYGCFDAQIIDYWGKGTLVTVSS |
| 3755 | EVQLVESGGGMVQAGDSLRLSCVQSTYTVNSDVMGWFRQAPGKER |
| | EFVGAIMWNDGITYLQDSVKGRFTIFRDNAKNTVYLQMNSLKLEDT |
| | AVYYCAASKGRYSEYEYWGQGTQVTVSSGGGGSGGGGSQVKLEES |
| | GGRLVQPRGSLRLSCAGSGRTFSTYGMAWFRQAPGKEREFVASKAS |
| | MNYSGRTYYADSVKGRFTIARDNAKNMVFLQMNNLKPEDTAVYYC |
| | AAGTGCSTYGCFDAQIIDYWGKGTLVTVSS |
| 3756 | EVQLVESGGGMVQAGDSLRLSCVQSTYTVNSDVMGWFRQAPGKER |
| | EFVGAIMWNDGITYLQDSVKGRFTIFRDNAKNTVYLQMNSLKLEDT |
| | AVYYCAASKGRYSEYEYWGQGTQVTVSSGGGGSGGGGSGGGGSQ |
| | VKLEESGGRLVQPRGSLRLSCAGSGRTFSTYGMAWFRQAPGKEREF |
| | VASKASMNYSGRTYYADSVKGRFTIARDNAKNMVFLQMNNLKPED |
| | TAVYYCAAGTGCSTYGCFDAQIIDYWGKGTLVTVSS |
| 3757 | EVQLVESGGGMVQAGDSLRLSCVQSTYTVNSDVMGWFRQAPGKER |
| | EFVGAIMWNDGITYLQDSVKGRFTIFRDNAKNTVYLQMNSLKLEDT |
| | AVYYCAASKGRYSEYEYWGQGTQVTVSSGGGGSGGGGSGGGGSG |
| | GGGSQVKLEESGGRLVQPRGSLRLSCAGSGRTFSTYGMAWFRQAPG |
| | KEREFVASKASMNYSGRTYYADSVKGRFTIARDNAKNMVFLQMNN |
| | LKPEDTAVYYCAAGTGCSTYGCFDAQIIDYWGKGTLVTVSS |
| 3758 | QVKLEESGGRLVQPRGSLRLSCAGSGRTFSTYGMAWFRQAPGKERE |
| | FVASKASMNYSGRTYYADSVKGRFTIARDNAKNMVFLQMNNLKPE |
| | DTAVYYCAAGTGCSTYGCFDAQIIDYWGKGTLVTVSSGGGGSQVKL |
| | EESGGGLVQAGGSLRLSCAASGGTLSKNTVAWVRQAPGKERGFVTS |
| | ITCDGRTTYYANSVNGRFPINRNNAENLVVLQMNSLKPDDTALYYC |
| | AAYRKSIMSIQPDYWGQGTQVTVSS |
| 3759 | QVKLEESGGRLVQPRGSLRLSCAGSGRTFSTYGMAWFRQAPGKERE |
| | FVASKASMNYSGRTYYADSVKGRFTIARDNAKNMVFLQMNNLKPE |
| | DTAVYYCAAGTGCSTYGCFDAQIIDYWGKGTLVTVSSGGGGSGGG |
| | GSGGGGSQVKLEESGGGLVQAGGSLRLSCAASGGTLSKNTVAWVR |
| | QAPGKERGFVTSITCDGRTTYYANSVNGRFPINRNNAENLVVLQMN |
| | SLKPDDTALYYCAAYRKSIMSIQPDYWGQGTQVTVSS |
| 3760 | QVKLEESGGRLVQPRGSLRLSCAGSGRTFSTYGMAWFRQAPGKERE |
| | FVASKASMNYSGRTYYADSVKGRFTIARDNAKNMVFLQMNNLKPE |
| | DTAVYYCAAGTGCSTYGCFDAQIIDYWGKGTLVTVSSGGGGSGGG |
| | GSGGGGSGGGGSGGGGSQVKLEESGGGLVQAGGSLRLSCAASGGTL |
| | SKNTVAWVRQAPGKERGFVTSITCDGRTTYYANSVNGRFPINRNNA |
| | ENLVVLQMNSLKPDDTALYYCAAYRKSIMSIQPDYWGQGTQVTVSS |
| 3761 | QVKLEESGGRLVQPRGSLRLSCAGSGRTFSTYGMAWFRQAPGKERE |
| | FVASKASMNYSGRTYYADSVKGRFTIARDNAKNMVFLQMNNLKPE |
| | DTAVYYCAAGTGCSTYGCFDAQIIDYWGKGTLVTVSSGGGGSGGG |
| | GSQVKLEESGGGLVQAGGSLRLSCAASGGTLSKNTVAWVRQAPGK |
| | ERGFVTSITCDGRTTYYANSVNGRFPINRNNAENLVVLQMNSLKPDD |
| | TALYYCAAYRKSIMSIQPDYWGQGTQVTVSS |
| 3762 | QVKLEESGGRLVQPRGSLRLSCAGSGRTFSTYGMAWFRQAPGKERE |
| | FVASKASMNYSGRTYYADSVKGRFTIARDNAKNMVFLQMNNLKPE |
| | DTAVYYCAAGTGCSTYGCFDAQIIDYWGKGTLVTVSSGGGGSGGG |
| | GSGGGGSQVKLEESGGGLVQAGGSLRLSCAASGGTLSKNTVAWVR |
| | QAPGKERGFVTSITCDGRTTYYANSVNGRFPINRNNAENLVVLQMN |
| | SLKPDDTALYYCAAYRKSIMSIQPDYWGQGTQVTVSS |
| 3763 | QVKLEESGGRLVQPRGSLRLSCAGSGRTFSTYGMAWFRQAPGKERE |
| | FVASKASMNYSGRTYYADSVKGRFTIARDNAKNMVFLQMNNLKPE |
| | DTAVYYCAAGTGCSTYGCFDAQIIDYWGKGTLVTVSSGGGGSGGG |
| | GSGGGGGGGGSQVKLEESGGGLVQAGGSLRLSCAASGGTLSKNTV |
| | AWVRQAPGKERGFVTSITCDGRTTYYANSVNGRFPINRNNAENLVV |
| | LQMNSLKPDDTALYYCAAYRKSIMSIQPDYWGQGTQVTVSS |
| 3764 | QVKLEESGGGLVQAGGSLRLSCAASGGTLSKNTVAWVRQAPGKER |
| | GFVTSITCDGRTTYYANSVNGRFPINRNNAENLVVLQMNSLKPDDTA |
| | LYYCAAYRKSIMSIQPDYWGQGTQVTVSSGGGGSQVQLVESGGGLV |
| | QAGGSLRLSCAASGGTLSKNTVAWFRQAPGKERGFVASITWDGRTT |
| | YYADSVKGRFTISRDNAKNTVYLQMNSLKPEDTAVYVCADLGKWP |
| | AGPADYWGQGTQVTVSS |
| 3765 | QVKLEESGGGLVQAGGSLRLSCAASGGTLSKNTVAWVRQAPGKER |
| | GFVTSITCDGRTTYYANSVNGRFPINRNNAENLVVLQMNSLKPDDTA |
| | LYYCAAYRKSIMSIQPDYWGQGTQVTVSSGGGGSGGGGSGGGGSQ |
| | VQLVESGGGLVQAGGSLRLSCAASGGTLSKNTVAWFRQAPGKERGF |
| | VASITWDGRTTYYADSVKGRFTISRDNAKNTVYLQMNSLKPEDTAV |
| | YVCADLGKWPAGPADYWGQGTQVTVSS |
| 3766 | QVKLEESGGGLVQAGGSLRLSCAASGGTLSKNTVAWVRQAPGKER |
| | GFVTSITCDGRTTYYANSVNGRFPINRNNAENLVVLQMNSLKPDDTA |
| | LYYCAAYRKSIMSIQPDYWGQGTQVTVSSGGGGSGGGGSGGGGSG |
| | GGGSGGGGSQVQLVESGGGLVQAGGSLRLSCAASGGTLSKNTVAW |
| | FRQAPGKERGFVASITWDGRTTYYADSVKGRFTISRDNAKNTVYLQ |
| | MNSLKPEDTAVYVCADLGKWPAGPADYWGQGTQVTVSS |
| 3767 | QVKLEESGGGLVQAGGSLRLSCAASGGTLSKNTVAWVRQAPGKER |
| | GFVTSITCDGRTTYYANSVNGRFPINRNNAENLVVLQMNSLKPDDTA |
| | LYYCAAYRKSIMSIQPDYWGQGTQVTVSSGGGGSGGGGSQVQLVES |
| | GGGLVQAGGSLRLSCAASGGTLSKNTVAWFRQAPGKERGFVASITW |
| | DGRTTYYADSVKGRFTISRDNAKNTVYLQMNSLKPEDTAVYVCADL |
| | GKWPAGPADYWGQGTQVTVSS |
| 3768 | QVKLEESGGGLVQAGGSLRLSCAASGGTLSKNTVAWVRQAPGKER |
| | GFVTSITCDGRTTYYANSVNGRFPINRNNAENLVVLQMNSLKPDDTA |
| | LYYCAAYRKSIMSIQPDYWGQGTQVTVSSGGGGSGGGGSGGGGSQ |
| | VQLVESGGGLVQAGGSLRLSCAASGGTLSKNTVAWFRQAPGKERGF |
| | VASITWDGRTTYYADSVKGRFTISRDNAKNTVYLQMNSLKPEDTAV |
| | YVCADLGKWPAGPADYWGQGTQVTVSS |
| 3769 | QVKLEESGGGLVQAGGSLRLSCAASGGTLSKNTVAWVRQAPGKER |
| | GFVTSITCDGRTTYYANSVNGRFPINRNNAENLVVLQMNSLKPDDTA |
| | LYYCAAYRKSIMSIQPDYWGQGTQVTVSSGGGGSGGGGSGGGGSG |
| | GGGSQVQLVESGGGLVQAGGSLRLSCAASGGTLSKNTVAWFRQAP |
| | GKERGFVASITWDGRTTYYADSVKGRFTISRDNAKNTVYLQMNSLK |
| | PEDTAVYVCADLGKWPAGPADYWGQGTQVTVSS |
| 3770 | QVQLVESGGGLVQAGGSLRLSCAASGGTLSKNTVAWFRQAPGKER |
| | GFVASITWDGRTTYYADSVKGRFTISRDNAKNTVYLQMNSLKPEDT |
| | AVYVCADLGKWPAGPADYWGQGTQVTVSSGGGGSDVQLVESGGG |
| | LVQAGGSLRLSCAASGGTLSKNTVAWVRQAPGKERGFVTSITCDGR |
| | TTYYANSVKGRFPISRDNAENTVYLQMNSLKPEDTAGYVCADLGK |
| | WPAGSADYWGQGTHVTVSS |
| 3771 | QVQLVESGGGLVQAGGSLRLSCAASGGTLSKNTVAWFRQAPGKER |
| | GFVASITWDGRTTYYADSVKGRFTISRDNAKNTVYLQMNSLKPEDT |
| | AVYVCADLGKWPAGPADYWGQGTQVTVSSGGGGSGGGGSGGGGS |
| | DVQLVESGGGLVQAGGSLRLSCAASGGTLSKNTVAWVRQAPGKER |
| | GFVTSITCDGRTTYYANSVKGRFPISRDNAENTVYLQMNSLKPEDTA |
| | GYVCADLGKWPAGSADYWGQGTHVTVSS |
| 3772 | QVQLVESGGGLVQAGGSLRLSCAASGGTLSKNTVAWFRQAPGKER |
| | GFVASITWDGRTTYYADSVKGRFTISRDNAKNTVYLQMNSLKPEDT |
| | AVYVCADLGKWPAGPADYWGQGTQVTVSSGGGGSGGGGSGGGGS |
| | GGGGSGGGGSDVQLVESGGGLVQAGGSLRLSCAASGGTLSKNTVA |
| | WVRQAPGKERGFVTSITCDGRTTYYANSVKGRFPISRDNAENTVYL |
| | QMNSLKPEDTAGYVCADLGKWPAGSADYWGQGTHVTVSS |
| 3773 | QVQLVESGGGLVQAGGSLRLSCAASGGTLSKNTVAWFRQAPGKER |
| | GFVASITWDGRTTYYADSVKGRFTISRDNAKNTVYLQMNSLKPEDT |
| | AVYVCADLGKWPAGPADYWGQGTQVTVSSGGGGSGGGGSDVQLV |
| | ESGGGLVQAGGSLRLSCAASGGTLSKNTVAWVRQAPGKERGFVTSI |
| | TCDGRTTYYANSVKGRFPISRDNAENTVYLQMNSLKPEDTAGYVCA |
| | DLGKWPAGSADYWGQGTHVTVSS |
| 3774 | QVQLVESGGGLVQAGGSLRLSCAASGGTLSKNTVAWFRQAPGKER |
| | GFVASITWDGRTTYYADSVKGRFTISRDNAKNTVYLQMNSLKPEDT |
| | AVYVCADLGKWPAGPADYWGQGTQVTVSSGGGGSGGGGSGGGGS |
| | DVQLVESGGGLVQAGGSLRLSCAASGGTLSKNTVAWVRQAPGKER |
| | GFVTSITCDGRTTYYANSVKGRFPISRDNAENTVYLQMNSLKPEDTA |
| | GYVCADLGKWPAGSADYWGQGTHVTVSS |
| 3775 | QVQLVESGGGLVQAGGSLRLSCAASGGTLSKNTVAWFRQAPGKER |
| | GFVASITWDGRTTYYADSVKGRFTISRDNAKNTVYLQMNSLKPEDT |
| | AVYVCADLGKWPAGPADYWGQGTQVTVSSGGGGSGGGGSGGGGS |
| | GGGGSDVQLVESGGGLVQAGGSLRLSCAASGGTLSKNTVAWVRQA |
| | PGKERGFVTSITCDGRTTYYANSVKGRFPISRDNAENTVYLQMNSLK |
| | PEDTAGYVCADLGKWPAGSADYWGQGTHVTVSS |

[0413] In some embodiments, a HER2 CAR comprises an amino acid sequence having at least about 85%, 86%, 87%, 88%, 89%, 90%, 91%, 92%, 93%, 94%, 95%, 96%, 97%, 98%, 99%, or 100% sequence identity to an amino acid sequence from the HER2 CAR sequence of Construct L described herein. In some embodiments, a CD 19 CAR comprises an amino acid sequence having at least about 85%, 86%, 87%, 88%, 89%, 90%, 91%, 92%, 93%, 94%, 95%, 96%, 97%, 98%, 99%, or 100% sequence identity to an amino acid sequence from the CD19 CAR sequence of Construct M described herein.

[0414] In some embodiments, the circular RNA comprises an IRES sequence having at least 85%, 86%, 87%, 88%, 89%, 90%, 91%, 92%, 93%, 94%, 95%, 96%, 97%, 98%, 99%, or 100% sequence identity to an IRES sequence shown below for any of Constructs A-M, and a CAR sequence encoding a polypeptide having at least 85%, 86%, 87%, 88%, 89%, 90%, 91%, 92%, 93%, 94%, 95%, 96%, 97%, 98%, 99%, or 100% sequence identity to a CAR shown below for any of Constructs A-M. In some embodiments, said circular RNA further comprises a CD28 or 4-1BB costimulatory domain as described herein.

[0415] In some embodiments, the circular RNA comprises an IRES sequence having at least 85%, 86%, 87%, 88%, 89%, 90%, 91%, 92%, 93%, 94%, 95%, 96%, 97%, 98%, 99%, or 100% sequence identity to the IRES sequence of Construct A, and a CAR sequence encoding a polypeptide having at least 85%, 86%, 87%, 88%, 89%, 90%, 91%, 92%, 93%, 94%, 95%, 96%, 97%, 98%, 99%, or 100% sequence identity to a CAR of Construct A. In some embodiments, the circular RNA comprises an IRES sequence having at least 95%, 96%, 97%, 98%, 99%, or 100% sequence identity to the IRES sequence of Construct A, and a CAR sequence encoding a polypeptide having at least 95%, 96%, 97%, 98%, 99%, or 100% sequence identity to a CAR of Construct A. In some embodiments, said circular RNA exhibits increased expression and/or activity compared to a suitable control having an alternate IRES. In some embodiments, said circular RNA further comprises a CD28z costimulatory domain as described herein and optionally exhibits increased activity compared to a suitable control having an alternate costimulatory domain. In some embodiments, said circular RNA further comprises a 4-1BB costimulatory domain as described herein and optionally exhibits increased activity compared to a suitable control having an alternate costimulatory domain.

[0416] In some embodiments, the circular RNA comprises an IRES sequence having at least 85%, 86%, 87%, 88%, 89%, 90%, 91%, 92%, 93%, 94%, 95%, 96%, 97%, 98%, 99%, or 100% sequence identity to the IRES sequence of Construct B, and a CAR sequence encoding a polypeptide having at least 85%, 86%, 87%, 88%, 89%, 90%, 91%, 92%, 93%, 94%, 95%, 96%, 97%, 98%, 99%, or 100% sequence identity to a CAR of Construct B. In some embodiments, the circular RNA comprises an IRES sequence having at least 95%, 96%, 97%, 98%, 99%, or 100% sequence identity to the IRES sequence of Construct B, and a CAR sequence encoding a polypeptide having at least 95%, 96%, 97%, 98%, 99%, or 100% sequence identity to a CAR of Construct B. In some embodiments, said circular RNA exhibits increased expression and/or activity compared to a suitable control having an alternate IRES. In some embodiments, said circular RNA further comprises a CD28z costimulatory domain as described herein and optionally exhibits increased activity compared to a suitable control having an alternate costimulatory domain. In some embodiments, said circular RNA further comprises a 4-1BB costimulatory domain as described herein and optionally exhibits increased activity compared to a suitable control having an alternate costimulatory domain.

[0417] In some embodiments, the circular RNA comprises an IRES sequence having at least 85%, 86%, 87%, 88%, 89%, 90%, 91%, 92%, 93%, 94%, 95%, 96%, 97%, 98%, 99%, or 100% sequence identity to the IRES sequence of Construct C, and a CAR sequence encoding a polypeptide having at least 85%, 86%, 87%, 88%, 89%, 90%, 91%, 92%, 93%, 94%, 95%, 96%, 97%, 98%, 99%, or 100% sequence identity to a CAR of Construct C. In some embodiments, the circular RNA comprises an IRES sequence having at least 95%, 96%, 97%, 98%, 99%, or 100% sequence identity to the IRES sequence of Construct C, and a CAR sequence encoding a polypeptide having at least 95%, 96%, 97%, 98%, 99%, or 100% sequence identity to a CAR of Construct C. In some embodiments, said circular RNA exhibits increased expression and/or activity compared to a suitable control having an alternate IRES. In some embodiments, said circular RNA further comprises a CD28z costimulatory domain as described herein and optionally exhibits increased activity compared to a suitable control having an alternate costimulatory domain. In some embodiments, said circular RNA further comprises a 4-1BB costimulatory domain as described herein and optionally exhibits increased activity compared to a suitable control having an alternate costimulatory domain.

[0418] In some embodiments, the circular RNA comprises an IRES sequence having at least 85%, 86%, 87%, 88%, 89%, 90%, 91%, 92%, 93%, 94%, 95%, 96%, 97%, 98%, 99%, or 100% sequence identity to the IRES sequence of Construct D, and a CAR sequence encoding a polypeptide having at least 85%, 86%, 87%, 88%, 89%, 90%, 91%, 92%, 93%, 94%, 95%, 96%, 97%, 98%, 99%, or 100% sequence identity to a CAR of Construct D. In some embodiments, the circular RNA comprises an IRES sequence having at least 95%, 96%, 97%, 98%, 99%, or 100% sequence identity to the IRES sequence of Construct D, and a CAR sequence encoding a polypeptide having at least 95%, 96%, 97%, 98%, 99%, or 100% sequence identity to a CAR of Construct D. In some embodiments, said circular RNA exhibits increased expression and/or activity compared to a suitable control having an alternate IRES. In some embodiments, said circular RNA further comprises a CD28z costimulatory domain as described herein and optionally exhibits increased activity compared to a suitable control having an alternate costimulatory domain. In some embodiments, said circular RNA further comprises a 4-1BB costimulatory domain as described herein and optionally exhibits increased activity compared to a suitable control having an alternate costimulatory domain.

[0419] In some embodiments, the circular RNA comprises an IRES sequence having at least 85%, 86%, 87%, 88%, 89%, 90%, 91%, 92%, 93%, 94%, 95%, 96%, 97%, 98%, 99%, or 100% sequence identity to the IRES sequence of Construct E, and a CAR sequence encoding a polypeptide having at least 85%, 86%, 87%, 88%, 89%, 90%, 91%, 92%, 93%, 94%, 95%, 96%, 97%, 98%, 99%, or 100% sequence identity to a CAR of Construct E. In some embodiments, the circular RNA comprises an IRES sequence having at least 95%, 96%, 97%, 98%, 99%, or 100% sequence identity to the IRES sequence of Construct E, and a CAR sequence encoding a polypeptide having at least 95%, 96%, 97%, 98%, 99%, or 100% sequence identity to a CAR of Construct E. In some embodiments, said circular RNA exhibits increased expression and/or activity compared to a suitable control having an alternate IRES. In some embodiments, said circular RNA further comprises a CD28z costimulatory domain as described herein and optionally exhibits increased activity compared to a suitable control having an alternate costimulatory domain. In some embodiments, said circular RNA further comprises a 4-1BB costimulatory domain as described herein and optionally exhibits increased activity compared to a suitable control having an alternate costimulatory domain.

[0420] In some embodiments, the circular RNA comprises an IRES sequence having at least 85%, 86%, 87%, 88%, 89%, 90%, 91%, 92%, 93%, 94%, 95%, 96%, 97%, 98%, 99%, or 100% sequence identity to the IRES sequence of Construct F, and a CAR sequence encoding a polypeptide having at least 85%, 86%, 87%, 88%, 89%, 90%, 91%, 92%, 93%, 94%, 95%, 96%, 97%, 98%, 99%, or 100% sequence identity to a CAR of Construct F. In some embodiments, the circular RNA comprises an IRES sequence having at least 95%, 96%, 97%, 98%, 99%, or 100% sequence identity to the IRES sequence of Construct F, and a CAR sequence encoding a polypeptide having at least 95%, 96%, 97%, 98%, 99%, or 100% sequence identity to a CAR of Construct F. In some embodiments, said circular RNA exhibits increased expression and/or activity compared to a suitable control having an alternate IRES. In some embodiments, said circular RNA further comprises a CD28z costimulatory domain as described herein and optionally exhibits increased activity compared to a suitable control having an alternate costimulatory domain. In some embodiments, said circular RNA further comprises a 4-1BB costimulatory domain as described herein and optionally exhibits increased activity compared to a suitable control having an alternate costimulatory domain.

[0421] In some embodiments, the circular RNA comprises an IRES sequence having at least 85%, 86%, 87%, 88%, 89%, 90%, 91%, 92%, 93%, 94%, 95%, 96%, 97%, 98%, 99%, or 100% sequence identity to the IRES sequence of Construct G, and a CAR sequence encoding a polypeptide having at least 85%, 86%, 87%, 88%, 89%, 90%, 91%, 92%, 93%, 94%, 95%, 96%, 97%, 98%, 99%, or 100% sequence identity to a CAR of Construct G. In some embodiments, the circular RNA comprises an IRES sequence having at least 95%, 96%, 97%, 98%, 99%, or 100% sequence identity to the IRES sequence of Construct G, and a CAR sequence encoding a polypeptide having at least 95%, 96%, 97%, 98%, 99%, or 100% sequence identity to a CAR of Construct G. In some embodiments, said circular RNA exhibits increased expression and/or activity compared to a suitable control having an alternate IRES. In some embodiments, said circular RNA further comprises a CD28z costimulatory domain as described herein and optionally exhibits increased activity compared to a suitable control having an alternate costimulatory domain. In some embodiments, said circular RNA further comprises a 4-1BB costimulatory domain as described herein and optionally exhibits increased activity compared to a suitable control having an alternate costimulatory domain.

[0422] In some embodiments, the circular RNA comprises an IRES sequence having at least 85%, 86%, 87%, 88%, 89%, 90%, 91%, 92%, 93%, 94%, 95%, 96%, 97%, 98%, 99%, or 100% sequence identity to the IRES sequence of Construct H, and a CAR sequence encoding a polypeptide having at least 85%, 86%, 87%, 88%, 89%, 90%, 91%, 92%, 93%, 94%, 95%, 96%, 97%, 98%, 99%, or 100% sequence identity to a CAR of Construct H. In some embodiments, the circular RNA comprises an IRES sequence having at least 95%, 96%, 97%, 98%, 99%, or 100% sequence identity to the IRES sequence of Construct H, and a CAR sequence encoding a polypeptide having at least 95%, 96%, 97%, 98%, 99%, or 100% sequence identity to a CAR of Construct H. In some embodiments, said circular RNA exhibits increased expression and/or activity compared to a suitable control having an alternate IRES. In some embodiments, said circular RNA further comprises a CD28z costimulatory domain as described herein and optionally exhibits increased activity compared to a suitable control having an alternate costimulatory domain. In some embodiments, said circular RNA further comprises a 4-1BB costimulatory domain as described herein and optionally exhibits increased activity compared to a suitable control having an alternate costimulatory domain.

[0423] In some embodiments, the circular RNA comprises an IRES sequence having at least 85%, 86%, 87%, 88%, 89%, 90%, 91%, 92%, 93%, 94%, 95%, 96%, 97%, 98%, 99%, or 100% sequence identity to the IRES sequence of Construct I, and a CAR sequence encoding a polypeptide having at least 85%, 86%, 87%, 88%, 89%, 90%, 91%, 92%, 93%, 94%, 95%, 96%, 97%, 98%, 99%, or 100% sequence identity to a CAR of Construct I. In some embodiments, the circular RNA comprises an IRES sequence having at least 95%, 96%, 97%, 98%, 99%, or 100% sequence identity to the IRES sequence of Construct I, and a CAR sequence encoding a polypeptide having at least 95%, 96%, 97%, 98%, 99%, or 100% sequence identity to a CAR of Construct I. In some embodiments, said circular RNA exhibits increased expression and/or activity compared to a suitable control having an alternate IRES. In some embodiments, said circular RNA further comprises a CD28z costimulatory domain as described herein and optionally exhibits increased activity compared to a suitable control having an alternate costimulatory domain. In some embodiments, said circular RNA further comprises a 4-1BB costimulatory domain as described herein and optionally exhibits increased activity compared to a suitable control having an alternate costimulatory domain.

[0424] In some embodiments, the circular RNA comprises an IRES sequence having at least 85%, 86%, 87%, 88%, 89%, 90%, 91%, 92%, 93%, 94%, 95%, 96%, 97%, 98%, 99%, or 100% sequence identity to the IRES sequence of Construct J, and a CAR sequence encoding a polypeptide having at least 85%, 86%, 87%, 88%, 89%, 90%, 91%, 92%, 93%, 94%, 95%, 96%, 97%, 98%, 99%, or 100% sequence identity to a CAR of Construct J. In some embodiments, the circular RNA comprises an IRES sequence having at least 95%, 96%, 97%, 98%, 99%, or 100% sequence identity to the IRES sequence of Construct J, and a CAR sequence encoding a polypeptide having at least 95%, 96%, 97%, 98%, 99%, or 100% sequence identity to a CAR of Construct J. In some embodiments, said circular RNA exhibits increased expression and/or activity compared to a suitable control having an alternate IRES. In some embodiments, said circular RNA further comprises a CD28z costimulatory domain as described herein and optionally exhibits increased activity compared to a suitable control having an alternate costimulatory domain. In some embodiments, said circular RNA further comprises a 4-1BB costimulatory domain as described herein and optionally exhibits increased activity compared to a suitable control having an alternate costimulatory domain.

[0425] In some embodiments, the circular RNA comprises an IRES sequence having at least 85%, 86%, 87%, 88%, 89%, 90%, 91%, 92%, 93%, 94%, 95%, 96%, 97%, 98%, 99%, or 100% sequence identity to the IRES sequence of Construct K, and a CAR sequence encoding a polypeptide having at least 85%, 86%, 87%, 88%, 89%, 90%, 91%, 92%, 93%, 94%, 95%, 96%, 97%, 98%, 99%, or 100% sequence identity to a CAR of Construct K. In some embodiments, the circular RNA comprises an IRES sequence having at least 95%, 96%, 97%, 98%, 99%, or 100% sequence identity to the IRES sequence of Construct K, and a CAR sequence encoding a polypeptide having at least 95%, 96%, 97%, 98%, 99%, or 100% sequence identity to a CAR of Construct K. In some embodiments, said circular RNA exhibits increased expression and/or activity compared to a suitable control having an alternate IRES. In some embodiments, said circular RNA further comprises a CD28z costimulatory domain as described herein and optionally exhibits increased activity compared to a suitable control having an alternate costimulatory domain. In some embodiments, said circular RNA further comprises a 4-1BB costimulatory domain as described herein and optionally exhibits increased activity compared to a suitable control having an alternate costimulatory domain.

[0426] In some embodiments, the circular RNA comprises an IRES sequence having at least 85%, 86%, 87%, 88%, 89%, 90%, 91%, 92%, 93%, 94%, 95%, 96%, 97%, 98%, 99%, or 100% sequence identity to the IRES sequence of Construct L, and a CAR sequence encoding a polypeptide having at least 85%, 86%, 87%, 88%, 89%, 90%, 91%, 92%, 93%, 94%, 95%, 96%, 97%, 98%, 99%, or 100% sequence identity to a CAR of Construct L. In some embodiments, the circular RNA comprises an IRES sequence having at least 95%, 96%, 97%, 98%, 99%, or 100% sequence identity to the IRES sequence of Construct L, and a CAR sequence encoding a polypeptide having at least 95%, 96%, 97%, 98%, 99%, or 100% sequence identity to a CAR of Construct L. In some embodiments, said circular RNA exhibits increased expression and/or activity compared to a suitable control having an alternate IRES. In some embodiments, said circular RNA further comprises a CD28z costimulatory domain as described herein and optionally exhibits increased activity compared to a suitable control having an alternate costimulatory domain. In some embodiments, said circular RNA further comprises a 4-1BB costimulatory domain as described herein and optionally exhibits increased activity compared to a suitable control having an alternate costimulatory domain.

[0427] In some embodiments, the circular RNA comprises an IRES sequence having at least 85%, 86%, 87%, 88%, 89%, 90%, 91%, 92%, 93%, 94%, 95%, 96%, 97%, 98%, 99%, or 100% sequence identity to the IRES sequence of Construct M, and a CAR sequence encoding a polypeptide having at least 85%, 86%, 87%, 88%, 89%, 90%, 91%, 92%, 93%, 94%, 95%, 96%, 97%, 98%, 99%, or 100% sequence identity to a CAR of Construct M. In some embodiments, the circular RNA comprises an IRES sequence having at least 95%, 96%, 97%, 98%, 99%, or 100% sequence identity to the IRES sequence of Construct M, and a CAR sequence encoding a polypeptide having at least 95%, 96%, 97%, 98%, 99%, or 100% sequence identity to a CAR of Construct M. In some embodiments, said circular RNA exhibits increased expression and/or activity compared to a suitable control having an alternate IRES. In some embodiments, said circular RNA further comprises a CD28z costimulatory domain as described herein and optionally exhibits increased activity compared to a suitable control having an alternate costimulatory domain. In some embodiments, said circular RNA further comprises a 4-1BB costimulatory domain as described herein and optionally exhibits increased activity compared to a suitable control having an alternate costimulatory domain.

| ID | IRES Sequence | CAR Sequence | CAR Sequence |
|---|---|---|---|
| Construct | CCCCCCTCCCCCCCT | ATGGCTCTCCCCGTG | MALPVTALLLPLALLLH |
| A | TCCCTTCCCTTTGCA | ACCGCTCTGCTGCTC | AARPQVKLEESGGGLVQ |
| | ACGCAACAATTGTAA | CCTCTGGCCCTCCTT | AGRSLRLSCAASEHTFSS |
| | GTGCCCTCACCTGTC | CTGCACGCAGCCAG | HVMGWFRQAPGKERES |
| | AATTGGGACCACCAC | ACCACAGGTCAAGCT | VAVIGWRDISTSYADSVK |
| | TTTCAGTGACCCCAT | GGAGGAGTCTGGTG | GRFTISRDNAKKTLYLQ |
| | GCGAAGTGCTGAGA | GCGGTCTGGTGCAGG | MNSLKPEDTAVYYCAAR |
| | GAAAGGAAGCTTTCT | CAGGGAGGAGCCTG | RIDAADFDSWGQGTQV |
| | TACCCTTCATTTGTG | AGGCTGAGCTGTGCA | TVSSGGGGSGGGGSGG |
| | AACCCACTGGTCTAA | GCTTCCGAGCACACA | GGSEVQLVESGGGLVQA |
| | GCCGCTTGGAATACG | TTCTCAAGCCACGTC | GGSLRLSCAASGRTFTM |
| | ATGAGTGGAAAAGTT | ATGGGGTGGTTCAGA | GWFRQAPGKEREFVAAI |
| | CATTCTTAATGGAGT | CAGGCTCCCGGTAAA | SLSPTLAYYAESVKGRFT |
| | GAAACATGCTTAAAT | GAGAGGGAGTCCGT | ISRDNAKNTVVLQMNSL |
| | TTCCAGCTCGTGCTG | CGCCGTGATCGGATG | KPEDTALYYCAADRKSV |
| | GTCTTTCCAGTACGG | GCGGGACATCTCCAC | MSIRPDYWGQGTQVTV |
| | GGCGGCCCTGTCTGG | CTCCTACGCCGACTC | SSTSTTTPAPRPPTPAPTI |
| | CCGTAATTCTTCAGA | TGTGAAGGGCCGGTT | ASQPLSLRPEACRPAAG |
| | GTGTCACGCCACACT | CACAATCTCACGCGA | GAVHTRGLDFACDIYIW |
| | TGTGGATCTCACGTG | TAATGCCAAGAAGAC | APLAGTCGVLLLSLVITL |
| | CCACATGACAGCGCT | ACTGTATCTGCAGAT | YCKRGRKKLLYIFKQPF |
| | ACAGCTGGAACTGG | GAATTCCTTGAAGCC | MRPVQTTQEEDGCSCRF |
| | GTGCTTGGTGCCCAT | CGAAGACACCGCCG | PEEEEGGCELRVKFSRSA |
| | GGAGTAACAGCGAA | TCTATTACTGTGCTGC | DAPAYQQGQNQLYNEL |
| | AAGTGTTAGATCAAG | TAGACGGATCGACGC | NLGRREEYDVLDKRRG |
| | CCTTGCTTGGGCTAT | TGCCGACTTCGACAG | RDPEMGGKPRRKNPQE |
| | GAGCCTGCGGAACA | CTGGGGACAGGGTA | GLYNELQKDKMAEAYS |
| | ACAACTGGTAACAGT | CCCAAGTGACCGTTT | EIGMKGERRRGKGHDG |
| | TGCCTCAGGGGCCGA | CCTCCGGAGGCGGA | LYQGLSTATKDTYDALH |
| | AAGCCACGGTGTTAA | GGTTCTGGAGGAGGT | MQALPPR |
| | CAGCACCCTCATAGT | GGGTCAGGTGGAGG | |
| | TTGATCCACCTCAGG | TGGCTCCGAGGTGCA | |
| | GTGGTGATGTTTAGC | GCTGGTCGAGTCTGG | |
| | AGTTAGTAGTTGCCA | CGGTGGCTTGGTCCA | |
| | ATCTGTGTTCACTGA | GGCTGGAGGCAGTCT | |
| | AATCTCGGCATACCG | CAGACTCTCCTGCGC | |
| | TGTAGTGTACAGGGG | TGCTTCAGGGCGGAC | |
| | TGAAGGATGCCCAGA | CTTCACCATGGGCTG | |
| | AGGTACCCGTAGGTA | GTTCAGGCAGGCCCC | |
| | ACCTTAAGAGACTAT | AGGTAAGGAGAGGG | |
| | GGATCTGATCTGGGG | AGTTCGTGGCCGCCA | |
| | CCTTGTCCGGAGTGC | TCTCCCTCTCCCCTA | |
| | TTTACACACGGCTCA | CCCTGGCATACTACG | |
| | AGGTTAAAAAACGTC | CTGAGTCCGTGAAGG | |
| | TAGCCCCACAGAGCC | GACGGTTTACCATCT | |
| | CGAGGGATTCGGGTT | CCCGGGATAACGCAA | |
| | TTCCCTTTAAAAACC | AGAACACTGTGGTCC | |
| | CGACTAGAGCTTATG | TCCAAATGAACTCCC | |
| | GTGACAATTATTGCT | TCAAACCCGAGGAC | |
| | GTTCAGACGAACAGT | ACCGCTCTCTACTATT | |
| | GTAATTGTTGTCTATT | GTGCCGCAGATCGGA | |
| | CACAGCAGTTCTATC | AGAGCGTCATGTCCA | |
| | AGAGCTTTTCCCACA | TCCGGCCCGATTACT | |
| | ACGGATCTTCTTGGC | GGGGCCAAGGCACA | |
| | AAGCAAATACAGCA | CAGGTGACTGTGTCC | |
| | GGAGTCAAT | AGCACCTCCACCACC | |
| | | ACCCCAGCACCAAG | |
| | | GCCTCCAACCCCTGC | |
| | | ACCAACCATCGCCTC | |
| | | CCAGCCACTGTCTTT | |
| | | GCGGCCAGAAGCAT | |
| | | GCCGCCCAGCAGCA | |
| | | GGTGGAGCCGTGCAT | |
| | | ACAAGAGGCCTGGA | |
| | | CTTCGCCTGCGATAT | |
| | | CTACATCTGGGCTCC | |
| | | TCTGGCCGGAACATG | |
| | | CGGAGTCCTGCTCTT | |
| | | GTCCCTGGTGATCAC | |
| | | CCTGTACTGCAAGCG | |
| | | GGGTCGGAAGAAGC | |
| | | TCCTCTACATCTTCA | |
| | | AGCAGCCCTTCATGA | |
| | | GACCCGTCCAGACCA | |
| | | CCCAGGAGGAGGAC | |
| | | GGGTGCTCATGCAGG | |
| | | TTCCCCGAAGAGGA | |
| | | GGAGGGTGGCTGTG | |
| | | AGCTGCGGGTGAAG | |
| | | TTCAGCAGGTCAGCA | |
| | | GACGCCCCTGCCTAT | |
| | | CAGCAGGGCCAAAA | |
| | | CCAGTTGTACAACGA | |
| | | GCTGAATCTGGGGAG | |
| | | ACGGGAGGAGTACG | |
| | | ATGTCCTTGACAAGA | |
| | | GAAGGGGCCGGGAT | |
| | | CCAGAGATGGGCGG | |
| | | GAAGCCAAGACGGA | |
| | | AGAATCCTCAGGAGG | |
| | | GTCTGTATAACGAGC | |
| | | TGCAGAAGGACAAG | |
| | | ATGGCCGAGGCCTAC | |
| | | TCCGAGATCGGCATG | |
| | | AAAGGGGAGCGCCG | |
| | | CAGAGGAAAAGGTC | |
| | | ACGATGGTCTGTACC | |
| | | AGGGGTTGAGCACC | |
| | | GCTACCAAGGATACT | |
| | | TACGACGCTCTGCAC | |
| | | ATGCAAGCTCTGCCA | |
| | | CCCCGG | |
| Construct | GTGGCCACGCCCGG | ATGGCACTCCCGGTA | MALPVTALLLPLALLLH |
| B | GCCACCGATACTTCC | ACCGCCTTATTGCTT | AARPDIVLTQSPPSLAMS |
| | CTTCACTCCTTCGGG | CCCCTTGCCCTCTTG | LGKRATISCRASESVTIL |
| | ACTGTTGGGGAGGA | CTCCACGCAGCACGC | GSHLIHWYQQKPGQPPT |
| | ACACAACAGGGCTC | CCCGATATAGTCTTG | LLIQLASNVQTGVPARFS |
| | CCCTGTTTTCCCATTC | ACTCAATCCCCACCC | GSGSRTDFTLTIDPVEED |
| | CTTCCCCCTTTTCCC | AGTTTGGCAATGTCA | DVAVYYCLQSRTIPRTFG |
| | AACCCCAACCGCCGT | TTAGGCAAACGAGC | GGTKLEIKGSTSGSGKP |
| | ATCTGGTGGCGGCAA | AACAATTTCATGTAG | GSGEGSTKGQIQLVQSG |
| | GACACACGGGTCTTT | GGCATCCGAAAGTGT | PELKKPGETVKISCKASG |
| | CCCTCTAAAGCACAA | AACGATTTTGGGGAG | YTFTDYSINWVKRAPGK |
| | TTGTGTGTGTGTCCC | TCATTTAATTCATTGG | GLKWMGWINTETREPA |
| | AGGTCCTCCTGCGTA | TACCAACAAAAGCCT | YAYDFRGRFAFSLETSAS |
| | CGGTGCGGGAGTGCT | GGACAACCCCCGAC | TAYLQINNLKYEDTATYF |
| | CCCACCCAACTGTTG | GCTCTTGATCCAATT | CALDYSYAMDYWGQGT |
| | TAAGCCTGTCCAACG | AGCATCTAACGTCCA | SVTVSSAAATTTPAPRPP |
| | CGTCGTCCTGGCAAG | AACCGGAGTCCCCGC | TPAPTIASQPLSLRPEAC |
| | ACTATGACGTCGCAT | ACGATTCTCAGGATC | RPAAGGAVHTRGLDFAC |
| | GTTCCGCTGCGGATG | CGGTTCCCGGACTGA | DIYIWAPLAGTCGVLLLS |
| | CCGACCGGGTAACCG | TTTTACATTAACTATT | LVITLYCKRGRKKLLYIF |
| | GTTCCCCAGTGTGTG | GATCCGGTAGAGGAA | KQPFMRPVQTTQEEDGC |
| | TAGTGCGATCTTCCA | GATGACGTCGCTGTC | SCRFPEEEEGGCELRVKF |
| | GGTCCTCCTGGTTGG | TATTATTGTCTTCAAA | SRSADAPAYQQGQNQLY |
| | CGTTGTCCAGAAACT | GTAGGACGATTCCAC | NELNLGRREEYDVLDKR |
| | GCTTCAGGTAAGTGG | GGACATTCGGTGGCG | RGRDPEMGGKPRRKNP |
| | GGTGTGCCCAATCCC | GAACTAAATTGGAGA | QEGLYNELQKDKMAEA |
| | TACAAAGGTTGATTC | TTAAAGGTTCCACCT | YSEIGMKGERRRGKGH |
| | TTTCACCACCTTAGG | CTGGTAGTGGGAAAC | DGLYQGLSTATKDTYDA |
| | AATGCTCCGGAGGTA | CCGGGTCCGGTGAA | LHMQALPPR |
| | CCCCAGCAACAGCTG | GGGTCCACTAAAGGC | |
| | GGATCTGACCGGAGG | CAAATTCAACTCGTT | |
| | CTAATTGTCTACGGG | CAATCCGGACCAGAA | |
| | TGGTGTTTCCTTTTTC | CTGAAGAAGCCAGG | |
| | TTTTCACACAACTCT | AGAAACTGTCAAAAT | |
| | ACTGCTGACAACTCA | AAGCTGTAAAGCTTC | |
| | CTGACTATCCACTTG | CGGTTATACATTTACA | |
| | CTCTGTCACG | GATTATTCCATAAATT | |
| | | GGGTGAAAAGGGCG | |
| | | CCAGGAAAAGGGTT | |
| | | AAAGTGGATGGGTTG | |
| | | GATTAATACAGAGAC | |
| | | TCGGGAACCTGCATA | |
| | | TGCTTATGATTTTAGG | |
| | | GGAAGGTTTGCCTTT | |
| | | TCTCTGGAGACTTCC | |
| | | GCTTCAACTGCTTAT | |
| | | CTCCAAATTAATAATC | |
| | | TTAAATATGAGGACA | |
| | | CAGCAACATACTTCT | |
| | | GTGCTTTGGACTATA | |
| | | GTTATGCTATGGATTA | |
| | | CTGGGGACAAGGAA | |
| | | CCAGTGTCACTGTAA | |
| | | GTTCCGCTGCTGCGA | |
| | | CGACCACTCCTGCAC | |
| | | CGCGACCACCCACTC | |
| | | CTGCCCCTACTATTGC | |
| | | TAGTCAACCACTTAG | |
| | | CTTGCGACCTGAGGC | |
| | | ATGTCGGCCCGCGGC | |
| | | AGGTGGCGCAGTCC | |
| | | ACACCAGGGGTTTAG | |
| | | ACTTTGCTTGTGATAT | |
| | | TTATATTTGGGCACCA | |
| | | CTCGCCGGGACTTGC | |
| | | GGTGTTCTTCTCTTG | |
| | | TCCCTTGTTATAACTC | |
| | | TTTATTGTAAGCGCG | |
| | | GAAGGAAGAAATTG | |
| | | TTATATATTTTCAAAC | |
| | | AACCTTTTATGCGAC | |
| | | CCGTACAAACAACTC | |
| | | AGGAAGAGGACGGG | |
| | | TGTTCTTGTCGGTTT | |
| | | CCAGAAGAGGAAGA | |
| | | GGGTGGGTGTGAACT | |
| | | CCGGGTCAAATTTAG | |
| | | TAGGTCAGCAGATGC | |
| | | GCCGGCGTACCAACA | |
| | | AGGCCAAAACCAAC | |
| | | TGTATAATGAACTCA | |
| | | ATCTCGGTAGGCGTG | |
| | | AGGAATATGATGTCC | |
| | | TTGATAAAAGGCGCG | |
| | | GGAGAGATCCAGAA | |
| | | ATGGGCGGAAAACC | |
| | | ACGGCGAAAGAATC | |
| | | CGCAGGAAGGGTTAT | |
| | | ATAACGAACTTCAAA | |
| | | AGGATAAAATGGCTG | |
| | | AAGCTTATTCCGAAA | |
| | | TTGGCATGAAAGGAG | |
| | | AGCGACGTAGGGGC | |
| | | AAAGGGCATGATGGC | |
| | | CTTTACCAAGGGCTC | |
| | | TCAACCGCTACAAAA | |
| | | GATACTTACGACGCT | |
| | | TTACATATGCAAGCA | |
| | | CTTCCACCCAGG | |
| Construct | CCCCCCTCCCCCCCT | ATGGCACTCCCGGTA | MALPVTALLLPLALLLH |
| C | TCCCTTCCCTTTGCA | ACCGCCTTATTGCTT | AARPDIVLTQSPPSLAMS |
| | ACGCAACAATTGTAA | CCCCTTGCCCTCTTG | LGKRATISCRASESVTIL |
| | GTGCCCTCACCTGTC | CTCCACGCAGCACGC | GSHLIHWYQQKPGQPPT |
| | AATTGGGACCACCAC | CCCGATATAGTCTTG | LLIQLASNVQTGVPARFS |
| | TTTCAGTGACCCCAT | ACTCAATCCCCACCC | GSGSRTDFTLTIDPVEED |
| | GCGAAGTGCTGAGA | AGTTTGGCAATGTCA | DVAVYYCLQSRTIPRTFG |
| | GAAAGGAAGCTTTCT | TTAGGCAAACGAGC | GGTKLEIKGSTSGSGKP |
| | TACCCTTCATTTGTG | AACAATTTCATGTAG | GSGEGSTKGQIQLVQSG |
| | AACCCACTGGTCTAA | GGCATCCGAAAGTGT | PELKKPGETVKISCKASG |
| | GCCGCTTGGAATACG | AACGATTTTGGGGAG | YTFTDYSINWVKRAPGK |
| | ATGAGTGGAAAAGTT | TCATTTAATTCATTGG | GLKWMGWINTETREPA |
| | CATTCTTAATGGAGT | TACCAACAAAAGCCT | YAYDFRGRFAFSLETSAS |
| | GAAACATGCTTAAAT | GGACAACCCCCGAC | TAYLQINNLKYEDTATYF |
| | TTCCAGCTCGTGCTG | GCTCTTGATCCAATT | CALDYSYAMDYWGQGT |
| | GTCTTTCCAGTACGG | AGCATCTAACGTCCA | SVTVSSAAATTTPAPRPP |
| | GGCGGCCCTGTCTGG | AACCGGAGTCCCCGC | TPAPTIASQPLSLRPEAC |
| | CCGTAATTCTTCAGA | ACGATTCTCAGGATC | RPAAGGAVHTRGLDFAC |
| | GTGTCACGCCACACT | CGGTTCCCGGACTGA | DIYIWAPLAGTCGVLLLS |
| | TGTGGATCTCACGTG | TTTTACATTAACTATT | LVITLYCKRGRKKLLYIF |
| | CCACATGACAGCGCT | GATCCGGTAGAGGAA | KQPFMRPVQTTQEEDGC |
| | ACAGCTGGAACTGG | GATGACGTCGCTGTC | SCRFPEEEEGGCELRVKF |
| | GTGCTTGGTGCCCAT | TATTATTGTCTTCAAA | SRSADAPAYQQGQNQLY |
| | GGAGTAACAGCGAA | GTAGGACGATTCCAC | NELNLGRREEYDVLDKR |
| | AAGTGTTAGATCAAG | GGACATTCGGTGGCG | RGRDPEMGGKPRRKNP |
| | CCTTGCTTGGGCTAT | GAACTAAATTGGAGA | QEGLYNELQKDKMAEA |
| | GAGCCTGCGGAACA | TTAAAGGTTCCACCT | YSEIGMKGERRRGKGH |
| | ACAACTGGTAACAGT | CTGGTAGTGGGAAAC | DGLYQGLSTATKDTYDA |
| | TGCCTCAGGGGCCGA | CCGGGTCCGGTGAA | LHMQALPPR |
| | AAGCCACGGTGTTAA | GGGTCCACTAAAGGC | |
| | CAGCACCCTCATAGT | CAAATTCAACTCGTT | |
| | TTGATCCACCTCAGG | CAATCCGGACCAGAA | |
| | GTGGTGATGTTTAGC | CTGAAGAAGCCAGG | |
| | AGTTAGTAGTTGCCA | AGAAACTGTCAAAAT | |
| | ATCTGTGTTCACTGA | AAGCTGTAAAGCTTC | |
| | AATCTCGGCATACCG | CGGTTATACATTTACA | |
| | TGTAGTGTACAGGGG | GATTATTCCATAAATT | |
| | TGAAGGATGCCCAGA | GGGTGAAAAGGGCG | |
| | AGGTACCCGTAGGTA | CCAGGAAAAGGGTT | |
| | ACCTTAAGAGACTAT | AAAGTGGATGGGTTG | |
| | GGATCTGATCTGGGG | GATTAATACAGAGAC | |
| | CCTTGTCCGGAGTGC | TCGGGAACCTGCATA | |
| | TTTACACACGGCTCA | TGCTTATGATTTTAGG | |
| | AGGTTAAAAAACGTC | GGAAGGTTTGCCTTT | |
| | TAGCCCCACAGAGCC | TCTCTGGAGACTTCC | |
| | CGAGGGATTCGGGTT | GCTTCAACTGCTTAT | |
| | TTCCCTTTAAAAACC | CTCCAAATTAATAATC | |
| | CGACTAGAGCTTATG | TTAAATATGAGGACA | |
| | GTGACAATTATTGCT | CAGCAACATACTTCT | |
| | GTTCAGACGAACAGT | GTGCTTTGGACTATA | |
| | GTAATTGTTGTCTATT | GTTATGCTATGGATTA | |
| | CACAGCAGTTCTATC | CTGGGGACAAGGAA | |
| | AGAGCTTTTCCCACA | CCAGTGTCACTGTAA | |
| | ACGGATCTTCTTGGC | GTTCCGCTGCTGCGA | |
| | AAGCAAATACAGCA | CGACCACTCCTGCAC | |
| | GGAGTCAAT | CGCGACCACCCACTC | |
| | | CTGCCCCTACTATTGC | |
| | | TAGTCAACCACTTAG | |
| | | CTTGCGACCTGAGGC | |
| | | ATGTCGGCCCGCGGC | |
| | | AGGTGGCGCAGTCC | |
| | | ACACCAGGGGTTTAG | |
| | | ACTTTGCTTGTGATAT | |
| | | TTATATTTGGGCACCA | |
| | | CTCGCCGGGACTTGC | |
| | | GGTGTTCTTCTCTTG | |
| | | TCCCTTGTTATAACTC | |
| | | TTTATTGTAAGCGCG | |
| | | GAAGGAAGAAATTG | |
| | | TTATATATTTTCAAAC | |
| | | AACCTTTTATGCGAC | |
| | | CCGTACAAACAACTC | |
| | | AGGAAGAGGACGGG | |
| | | TGTTCTTGTCGGTTT | |
| | | CCAGAAGAGGAAGA | |
| | | GGGTGGGTGTGAACT | |
| | | CCGGGTCAAATTTAG | |
| | | TAGGTCAGCAGATGC | |
| | | GCCGGCGTACCAACA | |
| | | AGGCCAAAACCAAC | |
| | | TGTATAATGAACTCA | |
| | | ATCTCGGTAGGCGTG | |
| | | AGGAATATGATGTCC | |
| | | TTGATAAAAGGCGCG | |
| | | GGAGAGATCCAGAA | |
| | | ATGGGCGGAAAACC | |
| | | ACGGCGAAAGAATC | |
| | | CGCAGGAAGGGTTAT | |
| | | ATAACGAACTTCAAA | |
| | | AGGATAAAATGGCTG | |
| | | AAGCTTATTCCGAAA | |
| | | TTGGCATGAAAGGAG | |
| | | AGCGACGTAGGGGC | |
| | | AAAGGGCATGATGGC | |
| | | CTTTACCAAGGGCTC | |
| | | TCAACCGCTACAAAA | |
| | | GATACTTACGACGCT | |
| | | TTACATATGCAAGCA | |
| | | CTTCCACCCAGG | |
| Construct | TTTGCTCAGCGTAAC | ATGGCACTCCCGGTA | MALPVTALLLPLALLLH |
| D | TTCTCCGGGTTACGT | ACCGCCTTATTGCTT | AARPDIVLTQSPPSLAMS |
| | GGAGACCAAAAGGC | CCCCTTGCCCTCTTG | LGKRATISCRASESVTIL |
| | TACGGAGACTCGGGC | CTCCACGCAGCACGC | GSHLIHWYQQKPGQPPT |
| | TACGGCCCTGGAGCA | CCCGATATAGTCTTG | LLIQLASNVQTGVPARFS |
| | CCTAGGTGCTCCTAA | ACTCAATCCCCACCC | GSGSRTDFTLTIDPVEED |
| | AGACGTTAGAAGTTG | AGTTTGGCAATGTCA | DVAVYYCLQSRTIPRTFG |
| | TACAAACTCGCCCAA | TTAGGCAAACGAGC | GGTKLEIKGSTSGSGKP |
| | TAGGGCCCCCCAACC | AACAATTTCATGTAG | GSGEGSTKGQIQLVQSG |
| | AGGGGGGTAGCGGG | GGCATCCGAAAGTGT | PELKKPGETVKISCKASG |
| | CAAGCACTTCTGTTT | AACGATTTTGGGGAG | YTFTDYSINWVKRAPGK |
| | CCCCGGTATGATCTC | TCATTTAATTCATTGG | GLKWMGWINTETREPA |
| | ATAGGCTGTACCCAC | TACCAACAAAAGCCT | YAYDFRGRFAFSLETSAS |
| | GGCTGAAAGAGAGA | GGACAACCCCCGAC | TAYLQINNLKYEDTATYF |
| | TTATCGTTACCCGCCT | GCTCTTGATCCAATT | CALDYSYAMDYWGQGT |
| | CACTACTTCGAGAAG | AGCATCTAACGTCCA | SVTVSSAAATTTPAPRPP |
| | CCCAGTAATGGTTCA | AACCGGAGTCCCCGC | TPAPTIASQPLSLRPEAC |
| | TGAAGTTGATCTCGT | ACGATTCTCAGGATC | RPAAGGAVHTRGLDFAC |
| | TGACCCGGTGTTTCC | CGGTTCCCGGACTGA | DIYIWAPLAGTCGVLLLS |
| | CCCACACCAGAAAC | TTTTACATTAACTATT | LVITLYCKRGRKKLLYIF |
| | CTGTGATGGGGGTGG | GATCCGGTAGAGGAA | KQPFMRPVQTTQEEDGC |
| | TCATCCCGGTCATGG | GATGACGTCGCTGTC | SCRFPEEEEGGCELRVKF |
| | CGACATGACGGACCT | TATTATTGTCTTCAAA | SRSADAPAYQQGQNQLY |
| | CCCCGCGCCGGCACA | GTAGGACGATTCCAC | NELNLGRREEYDVLDKR |
| | GGGCCTCTTCGGAGG | GGACATTCGGTGGCG | RGRDPEMGGKPRRKNP |
| | ACGAGTGACATGGAT | GAACTAAATTGGAGA | QEGLYNELQKDKMAEA |
| | TCAACCGTGAAGAG | TTAAAGGTTCCACCT | YSEIGMKGERRRGKGH |
| | CCTATTGAGCTAGTG | CTGGTAGTGGGAAAC | DGLYQGLSTATKDTYDA |
| | TTGATTCCTCCGCCC | CCGGGTCCGGTGAA | LHMQALPPR |
| | CCGTGAATGCGGCTA | GGGTCCACTAAAGGC | |
| | ATCCCAACTCCGGAG | CAAATTCAACTCGTT | |
| | CAGGCGGGCCCAAA | CAATCCGGACCAGAA | |
| | CCAGGGTCTGGCCTG | CTGAAGAAGCCAGG | |
| | TCGTAACGCGAAAGT | AGAAACTGTCAAAAT | |
| | CTGGAGCGGAACCG | AAGCTGTAAAGCTTC | |
| | ACTACTTTCGGGAAG | CGGTTATACATTTACA | |
| | GCGTGTTTCCTTTTG | GATTATTCCATAAATT | |
| | TTCCTTTTATCAAGTT | GGGTGAAAAGGGCG | |
| | TTATGGTGACAACTC | CCAGGAAAAGGGTT | |
| | CTGGTAGACGTTTTA | AAAGTGGATGGGTTG | |
| | TTGCGTTTATTGAGA | GATTAATACAGAGAC | |
| | GATTTCCAACAATTG | TCGGGAACCTGCATA | |
| | AACAGACTAGAACC | TGCTTATGATTTTAGG | |
| | ACTTGTTTTATCAAA | GGAAGGTTTGCCTTT | |
| | CCCTCACAGAATAAG | TCTCTGGAGACTTCC | |
| | ATAACA | GCTTCAACTGCTTAT | |
| | | CTCCAAATTAATAATC | |
| | | TTAAATATGAGGACA | |
| | | CAGCAACATACTTCT | |
| | | GTGCTTTGGACTATA | |
| | | GTTATGCTATGGATTA | |
| | | CTGGGGACAAGGAA | |
| | | CCAGTGTCACTGTAA | |
| | | GTTCCGCTGCTGCGA | |
| | | CGACCACTCCTGCAC | |
| | | CGCGACCACCCACTC | |
| | | CTGCCCCTACTATTGC | |
| | | TAGTCAACCACTTAG | |
| | | CTTGCGACCTGAGGC | |
| | | ATGTCGGCCCGCGGC | |
| | | AGGTGGCGCAGTCC | |
| | | ACACCAGGGGTTTAG | |
| | | ACTTTGCTTGTGATAT | |
| | | TTATATTTGGGCACCA | |
| | | CTCGCCGGGACTTGC | |
| | | GGTGTTCTTCTCTTG | |
| | | TCCCTTGTTATAACTC | |
| | | TTTATTGTAAGCGCG | |
| | | GAAGGAAGAAATTG | |
| | | TTATATATTTTCAAAC | |
| | | AACCTTTTATGCGAC | |
| | | CCGTACAAACAACTC | |
| | | AGGAAGAGGACGGG | |
| | | TGTTCTTGTCGGTTT | |
| | | CCAGAAGAGGAAGA | |
| | | GGGTGGGTGTGAACT | |
| | | CCGGGTCAAATTTAG | |
| | | TAGGTCAGCAGATGC | |
| | | GCCGGCGTACCAACA | |
| | | AGGCCAAAACCAAC | |
| | | TGTATAATGAACTCA | |
| | | ATCTCGGTAGGCGTG | |
| | | AGGAATATGATGTCC | |
| | | TTGATAAAAGGCGCG | |
| | | GGAGAGATCCAGAA | |
| | | ATGGGCGGAAAACC | |
| | | ACGGCGAAAGAATC | |
| | | CGCAGGAAGGGTTAT | |
| | | ATAACGAACTTCAAA | |
| | | AGGATAAAATGGCTG | |
| | | AAGCTTATTCCGAAA | |
| | | TTGGCATGAAAGGAG | |
| | | AGCGACGTAGGGGC | |
| | | AAAGGGCATGATGGC | |
| | | CTTTACCAAGGGCTC | |
| | | TCAACCGCTACAAAA | |
| | | GATACTTACGACGCT | |
| | | TTACATATGCAAGCA | |
| | | CTTCCACCCAGG | |
| Construct | ATTCTCGGGCTACGG | ATGGCACTCCCGGTA | MALPVTALLLPLALLLH |
| E | CCCTGGAGCCACTCC | ACCGCCTTATTGCTT | AARPDIVLTQSPPSLAMS |
| | GGCTCCTAAAGATTT | CCCCTTGCCCTCTTG | LGKRATISCRASESVTIL |
| | AGAAGTTTGAGCAC | CTCCACGCAGCACGC | GSHLIHWYQQKPGQPPT |
| | ACCCGCCCACTAGGG | CCCGATATAGTCTTG | LLIQLASNVQTGVPARFS |
| | CCCCCCATCCAGGGG | ACTCAATCCCCACCC | GSGSRTDFTLTIDPVEED |
| | GGCAACGGGCAAGC | AGTTTGGCAATGTCA | DVAVYYCLQSRTIPRTFG |
| | ACTTCTGTTTCCCCG | TTAGGCAAACGAGC | GGTKLEIKGSTSGSGKP |
| | GTATGATCTGATAGG | AACAATTTCATGTAG | GSGEGSTKGQIQLVQSG |
| | CTGTAACCACGGCTG | GGCATCCGAAAGTGT | PELKKPGETVKISCKASG |
| | AAACAGAGATTATCG | AACGATTTTGGGGAG | YTFTDYSINWVKRAPGK |
| | TTATCCGCTTCACTAC | TCATTTAATTCATTGG | GLKWMGWINTETREPA |
| | TTCGAGAAGCCTAGT | TACCAACAAAAGCCT | YAYDFRGRFAFSLETSAS |
| | AATGATGGGTGAAAT | GGACAACCCCCGAC | TAYLQINNLKYEDTATYF |
| | TGAATCCGTTGATCC | GCTCTTGATCCAATT | CALDYSYAMDYWGQGT |
| | GGTGTCTCCCCCACA | AGCATCTAACGTCCA | SVTVSSAAATTTPAPRPP |
| | CCAGAAACTCATGAT | AACCGGAGTCCCCGC | TPAPTIASQPLSLRPEAC |
| | GAGGGTTGCCATCCC | ACGATTCTCAGGATC | RPAAGGAVHTRGLDFAC |
| | GGCTACGGCGACGTA | CGGTTCCCGGACTGA | DIYIWAPLAGTCGVLLLS |
| | GCGGGCATCCCTGCG | TTTTACATTAACTATT | LVITLYCKRGRKKLLYIF |
| | CTGGCATGAGGCCTC | GATCCGGTAGAGGAA | KQPFMRPVQTTQEEDGC |
| | TTAGGAGGACGGATG | GATGACGTCGCTGTC | SCRFPEEEEGGCELRVKF |
| | ATATGGATCTTGTCGT | TATTATTGTCTTCAAA | SRSADAPAYQQGQNQLY |
| | GAAGAGCCTATTGAG | GTAGGACGATTCCAC | NELNLGRREEYDVLDKR |
| | CTAGTGTCGACTCCT | GGACATTCGGTGGCG | RGRDPEMGGKPRRKNP |
| | CCGCCCCCGTGAATG | GAACTAAATTGGAGA | QEGLYNELQKDKMAEA |
| | CGGCTAATCCTAACC | TTAAAGGTTCCACCT | YSEIGMKGERRRGKGH |
| | CCGGAGCAGGTGGG | CTGGTAGTGGGAAAC | DGLYQGLSTATKDTYDA |
| | TCCAATCCAGGGCCT | CCGGGTCCGGTGAA | LHMQALPPR |
| | GGCCTGTCGTAATGC | GGGTCCACTAAAGGC | |
| | GTAAGTCTGGGACGG | CAAATTCAACTCGTT | |
| | AACCGACTACTTTCG | CAATCCGGACCAGAA | |
| | GGAAGGCGTGTTTCC | CTGAAGAAGCCAGG | |
| | ATTTGTTCATTATTTG | AGAAACTGTCAAAAT | |
| | TGTGTTTATGGTGAC | AAGCTGTAAAGCTTC | |
| | AACTCTGGGTAAACG | CGGTTATACATTTACA | |
| | TTCTATTGCGTTTATT | GATTATTCCATAAATT | |
| | GAGAGATTCCCAACA | GGGTGAAAAGGGCG | |
| | ATTGAACAAACGAG | CCAGGAAAAGGGTT | |
| | AACTACCTGTTTTATT | AAAGTGGATGGGTTG | |
| | AAATTTACACAGAGA | GATTAATACAGAGAC | |
| | AGAATTACA | TCGGGAACCTGCATA | |
| | | TGCTTATGATTTTAGG | |
| | | GGAAGGTTTGCCTTT | |
| | | TCTCTGGAGACTTCC | |
| | | GCTTCAACTGCTTAT | |
| | | CTCCAAATTAATAATC | |
| | | TTAAATATGAGGACA | |
| | | CAGCAACATACTTCT | |
| | | GTGCTTTGGACTATA | |
| | | GTTATGCTATGGATTA | |
| | | CTGGGGACAAGGAA | |
| | | CCAGTGTCACTGTAA | |
| | | GTTCCGCTGCTGCGA | |
| | | CGACCACTCCTGCAC | |
| | | CGCGACCACCCACTC | |
| | | CTGCCCCTACTATTGC | |
| | | TAGTCAACCACTTAG | |
| | | CTTGCGACCTGAGGC | |
| | | ATGTCGGCCCGCGGC | |
| | | AGGTGGCGCAGTCC | |
| | | ACACCAGGGGTTTAG | |
| | | ACTTTGCTTGTGATAT | |
| | | TTATATTTGGGCACCA | |
| | | CTCGCCGGGACTTGC | |
| | | GGTGTTCTTCTCTTG | |
| | | TCCCTTGTTATAACTC | |
| | | TTTATTGTAAGCGCG | |
| | | GAAGGAAGAAATTG | |
| | | TTATATATTTTCAAAC | |
| | | AACCTTTTATGCGAC | |
| | | CCGTACAAACAACTC | |
| | | AGGAAGAGGACGGG | |
| | | TGTTCTTGTCGGTTT | |
| | | CCAGAAGAGGAAGA | |
| | | GGGTGGGTGTGAACT | |
| | | CCGGGTCAAATTTAG | |
| | | TAGGTCAGCAGATGC | |
| | | GCCGGCGTACCAACA | |
| | | AGGCCAAAACCAAC | |
| | | TGTATAATGAACTCA | |
| | | ATCTCGGTAGGCGTG | |
| | | AGGAATATGATGTCC | |
| | | TTGATAAAAGGCGCG | |
| | | GGAGAGATCCAGAA | |
| | | ATGGGCGGAAAACC | |
| | | ACGGCGAAAGAATC | |
| | | CGCAGGAAGGGTTAT | |
| | | ATAACGAACTTCAAA | |
| | | AGGATAAAATGGCTG | |
| | | AAGCTTATTCCGAAA | |
| | | TTGGCATGAAAGGAG | |
| | | AGCGACGTAGGGGC | |
| | | AAAGGGCATGATGGC | |
| | | CTTTACCAAGGGCTC | |
| | | TCAACCGCTACAAAA | |
| | | GATACTTACGACGCT | |
| | | TTACATATGCAAGCA | |
| | | CTTCCACCCAGG | |
| Construct | GTGGCCACGCCCGG | ATGGCTCTGCCTGTG | MALPVTALLLPLALLLH |
| F | GCCACCGATACTTCC | ACAGCTCTGCTGCTG | AARPDIQMTQTTSSLSAS |
| | CTTCACTCCTTCGGG | CCTCTGGCTCTGCTT | LGDRVTISCRASQDISKY |
| | ACTGTTGGGGAGGA | CTGCATGCCGCCAGA | LNWYQQKPDGTVKLLI |
| | ACACAACAGGGCTC | CCTGACATCCAGATG | YHTSRLHSGVPSRFSGS |
| | CCCTGTTTTCCCATTC | ACCCAGACAACCAG | GSGTDYSLTISNLEQEDI |
| | CTTCCCCCTTTTCCC | CAGCCTGTCTGCCAG | ATYFCQQGNTLPYTFGG |
| | AACCCCAACCGCCGT | CCTGGGCGATAGAGT | GTKLEITGGGGSGGGGS |
| | ATCTGGTGGCGGCAA | GACCATCAGCTGTAG | GGGGSEVKLQESGPGLV |
| | GACACACGGGTCTTT | AGCCAGCCAGGACAT | APSQSLSVTCTVSGVSLP |
| | CCCTCTAAAGCACAA | CAGCAAGTACCTGAA | DYGVSWIRQPPRKGLE |
| | TTGTGTGTGTGTCCC | CTGGTATCAGCAGAA | WLGVIWGSETTYYNSAL |
| | AGGTCCTCCTGCGTA | ACCCGACGGCACCGT | KSRLTIIKDNSKSQVFLK |
| | CGGTGCGGGAGTGCT | GAAGCTGCTGATCTA | MNSLQTDDTAIYYCAKH |
| | CCCACCCAACTGTTG | CCACACCAGCAGACT | YYYGGSYAMDYWGQG |
| | TAAGCCTGTCCAACG | GCACAGCGGCGTGC | TSVTVSSIEVMYPPPYLD |
| | CGTCGTCCTGGCAAG | CAAGCAGATTTTCTG | NEKSNGTIIHVKGKHLC |
| | ACTATGACGTCGCAT | GCAGCGGCTCTGGCA | PSPLFPGPSKPFWVLVVV |
| | GTTCCGCTGCGGATG | CCGACTACAGCCTGA | GGVLACYSLLVTVAFIIF |
| | CCGACCGGGTAACCG | CAATCAGCAACCTGG | WVRSKRSRLLHSDYMN |
| | GTTCCCCAGTGTGTG | AACAAGAGGATATCG | MTPRRPGPTRKHYQPYA |
| | TAGTGCGATCTTCCA | CTACCTACTTCTGCC | PPRDFAAYRSRVKFSRSA |
| | GGTCCTCCTGGTTGG | AGCAAGGCAACACC | DAPAYQQGQNQLYNEL |
| | CGTTGTCCAGAAACT | CTGCCTTACACCTTT | NLGRREEYDVLDKRRG |
| | GCTTCAGGTAAGTGG | GGCGGAGGCACCAA | RDPEMGGKPRRKNPQE |
| | GGTGTGCCCAATCCC | GCTGGAAATCACAGG | GLYNELQKDKMAEAYS |
| | TACAAAGGTTGATTC | CGGCGGAGGAAGCG | EIGMKGERRRGKGHDG |
| | TTTCACCACCTTAGG | GAGGCGGAGGATCT | LYQGLSTATKDTYDALH |
| | AATGCTCCGGAGGTA | GGTGGTGGTGGATCT | MQALPPR |
| | CCCCAGCAACAGCTG | GAAGTGAAACTGCA | |
| | GGATCTGACCGGAGG | AGAGTCTGGCCCTGG | |
| | CTAATTGTCTACGGG | CCTGGTGGCCCCATC | |
| | TGGTGTTTCCTTTTTC | TCAATCTCTGAGCGT | |
| | TTTTCACACAACTCT | GACCTGTACCGTCAG | |
| | ACTGCTGACAACTCA | CGGAGTGTCCCTGCC | |
| | CTGACTATCCACTTG | TGATTATGGCGTGTC | |
| | CTCTGTCACG | CTGGATCCGGCAGCC | |
| | | TCCTAGAAAAGGCCT | |
| | | GGAATGGCTGGGCGT | |
| | | GATCTGGGGCAGCGA | |
| | | GACAACCTACTACAA | |
| | | CAGCGCCCTGAAGTC | |
| | | CCGGCTGACCATCAT | |
| | | CAAGGACAACTCCA | |
| | | AGAGCCAGGTGTTCC | |
| | | TGAAGATGAACAGCC | |
| | | TGCAGACCGACGAC | |
| | | ACCGCCATCTACTATT | |
| | | GCGCCAAGCACTACT | |
| | | ACTACGGCGGCAGCT | |
| | | ACGCCATGGATTATT | |
| | | GGGGCCAGGGCACC | |
| | | AGCGTGACCGTGTCT | |
| | | AGCATCGAAGTGATG | |
| | | TACCCTCCACCTTAC | |
| | | CTGGACAACGAGAA | |
| | | GTCCAACGGCACCAT | |
| | | CATCCACGTGAAGGG | |
| | | CAAGCACCTGTGTCC | |
| | | TTCTCCACTGTTCCC | |
| | | CGGACCTAGCAAGCC | |
| | | TTTCTGGGTGCTCGT | |
| | | TGTTGTTGGCGGCGT | |
| | | GCTGGCCTGTTACTC | |
| | | TCTGCTGGTTACCGT | |
| | | GGCCTTCATCATCTTT | |
| | | TGGGTCCGAAGCAA | |
| | | GCGGAGCCGGCTGCT | |
| | | GCACTCCGACTACAT | |
| | | GAACATGACCCCTAG | |
| | | ACGGCCCGGACCAA | |
| | | CCAGAAAGCACTACC | |
| | | AGCCTTACGCTCCTC | |
| | | CTAGAGACTTCGCCG | |
| | | CCTACCGGTCCAGAG | |
| | | TGAAGTTCAGCAGAT | |
| | | CCGCCGATGCTCCCG | |
| | | CCTATCAGCAGGGCC | |
| | | AAAACCAGCTGTACA | |
| | | ACGAGCTGAACCTG | |
| | | GGGAGAAGAGAAGA | |
| | | GTACGACGTGCTGGA | |
| | | CAAGCGGAGAGGCA | |
| | | GAGATCCTGAAATGG | |
| | | GCGGCAAGCCCAGA | |
| | | CGGAAGAATCCTCAA | |
| | | GAGGGCCTGTATAAT | |
| | | GAGCTGCAGAAAGA | |
| | | CAAGATGGCCGAGG | |
| | | CCTACAGCGAGATCG | |
| | | GAATGAAGGGCGAG | |
| | | CGCAGAAGAGGCAA | |
| | | GGGACACGATGGACT | |
| | | GTACCAGGGCCTGAG | |
| | | CACCGCCACCAAGG | |
| | | ATACCTATGATGCCCT | |
| | | GCACATGCAGGCCCT | |
| | | GCCTCCAAGA | |
| Construct | CCCCCCTCCCCCCCT | ATGGCCCTCCCCGTC | MALPVTALLLPLALLLH |
| G | TCCCTTCCCTTTGCA | ACAGCTCTCCTGCTC | AARPDIVLTQSPPSLAMS |
| | ACGCAACAATTGTAA | CCACTGGCCCTTCTT | LGKRATISCRASESVTIL |
| | GTGCCCTCACCTGTC | TTGCACGCTGCTCGC | GSHLIHWYQQKPGQPPT |
| | AATTGGGACCACCAC | CCCGATATCGTGCTC | LLIQLASNVQTGVPARFS |
| | TTTCAGTGACCCCAT | ACCCAGTCACCTCCA | GSGSRTDFTLTIDPVEED |
| | GCGAAGTGCTGAGA | AGCCTTGCCATGAGC | DVAVYYCLQSRTIPRTFG |
| | GAAAGGAAGCTTTCT | CTCGGGAAACGGGC | GGTKLEIKGSTSGSGKP |
| | TACCCTTCATTTGTG | TACCATCTCCTGCCG | GSGEGSTKGQIQLVQSG |
| | AACCCACTGGTCTAA | GGCTTCAGAGTCCGT | PELKKPGETVKISCKASG |
| | GCCGCTTGGAATACG | CACCATCCTCGGGTC | YTFTDYSINWVKRAPGK |
| | ATGAGTGGAAAAGTT | ACACCTCATCCACTG | GLKWMGWINTETREPA |
| | CATTCTTAATGGAGT | GTACCAACAGAAAC | YAYDFRGRFAFSLETSAS |
| | GAAACATGCTTAAAT | CAGGGCAGCCTCCTA | TAYLQINNLKYEDTATYF |
| | TTCCAGCTCGTGCTG | CCCTCTTGATCCAGT | CALDYSYAMDYWGQGT |
| | GTCTTTCCAGTACGG | TGGCCTCCAACGTGC | SVTVSSAAATTTPAPRPP |
| | GGCGGCCCTGTCTGG | AAACTGGGGTTCCCG | TPAPTIASQPLSLRPEAC |
| | CCGTAATTCTTCAGA | CCAGGTTCAGTGGCT | RPAAGGAVHTRGLDFAC |
| | GTGTCACGCCACACT | CCGGATCCCGGACAG | DIYIWAPLAGTCGVLLLS |
| | TGTGGATCTCACGTG | ATTTCACACTTACCAT | LVITLYCRSKRSRLLHSD |
| | CCACATGACAGCGCT | CGATCCTGTGGAGGA | YMNMTPRRPGPTRKHY |
| | ACAGCTGGAACTGG | GGACGATGTGGCCGT | QPYAPPRDFAAYRSRVK |
| | GTGCTTGGTGCCCAT | CTATTACTGCCTGCA | FSRSADAPAYQQGQNQL |
| | GGAGTAACAGCGAA | GTCTCGCACCATCCC | YNELNLGRREEYDVLD |
| | AAGTGTTAGATCAAG | TCGGACCTTCGGTGG | KRRGRDPEMGGKPRRK |
| | CCTTGCTTGGGCTAT | AGGCACCAAGCTCG | NPQEGLYNELQKDKMA |
| | GAGCCTGCGGAACA | AGATCAAGGGTAGCA | EAYSEIGMKGERRRGKG |
| | ACAACTGGTAACAGT | CCTCCGGCTCTGGAA | HDGLYQGLSTATKDTYD |
| | TGCCTCAGGGGCCGA | AGCCAGGCTCTGGTG | ALHMQALPPR |
| | AAGCCACGGTGTTAA | AGGGTTCTACCAAGG | |
| | CAGCACCCTCATAGT | GCCAAATCCAGCTGG | |
| | TTGATCCACCTCAGG | TCCAGTCTGGGCCCG | |
| | GTGGTGATGTTTAGC | AGCTGAAGAAACCC | |
| | AGTTAGTAGTTGCCA | GGGGAGACCGTGAA | |
| | ATCTGTGTTCACTGA | GATCTCCTGCAAGGC | |
| | AATCTCGGCATACCG | CTCCGGTTATACCTTC | |
| | TGTAGTGTACAGGGG | ACCGACTACTCCATC | |
| | TGAAGGATGCCCAGA | AACTGGGTCAAGCG | |
| | AGGTACCCGTAGGTA | CGCTCCTGGAAAGG | |
| | ACCTTAAGAGACTAT | GCCTCAAGTGGATGG | |
| | GGATCTGATCTGGGG | GCTGGATCAACACCG | |
| | CCTTGTCCGGAGTGC | AAACCCGCGAGCCT | |
| | TTTACACACGGCTCA | GCCTATGCTTACGAC | |
| | AGGTTAAAAAACGTC | TTCAGGGGCCGGTTC | |
| | TAGCCCCACAGAGCC | GCTTTCTCACTGGAG | |
| | CGAGGGATTCGGGTT | ACCTCCGCTTCCACA | |
| | TTCCCTTTAAAAACC | GCCTACCTCCAGATC | |
| | CGACTAGAGCTTATG | AACAACCTCAAGTAC | |
| | GTGACAATTATTGCT | GAAGACACCGCCAC | |
| | GTTCAGACGAACAGT | CTATTTCTGCGCTCTC | |
| | GTAATTGTTGTCTATT | GACTATTCCTACGCT | |
| | CACAGCAGTTCTATC | ATGGACTACTGGGGT | |
| | AGAGCTTTTCCCACA | CAGGGCACCTCTGTG | |
| | ACGGATCTTCTTGGC | ACCGTCTCTAGCGCA | |
| | AAGCAAATACAGCA | GCCGCCACCACAAC | |
| | GGAGTCAAT | ACCAGCCCCACGGCC | |
| | | ACCTACTCCCGCACC | |
| | | CACCATCGCATCCCA | |
| | | ACCACTCAGTCTGAG | |
| | | GCCCGAGGCCTGTAG | |
| | | ACCTGCTGCTGGAGG | |
| | | CGCAGTGCATACCCG | |
| | | CGGTCTCGACTTCGC | |
| | | CTGCGACATCTATATC | |
| | | TGGGCCCCATTGGCA | |
| | | GGTACCTGTGGCGTG | |
| | | CTGCTGCTGTCACTC | |
| | | GTCATCACCCTGTAC | |
| | | TGCCGGAGTAAGCGC | |
| | | TCTAGGCTGTTGCAC | |
| | | AGCGACTACATGAAC | |
| | | ATGACCCCAAGAAG | |
| | | ACCAGGGCCTACCCG | |
| | | GAAGCACTACCAGCC | |
| | | ATACGCACCTCCCCG | |
| | | GGACTTTGCCGCCTA | |
| | | TCGGTCTCGGGTGAA | |
| | | GTTCTCACGCTCCGC | |
| | | TGATGCCCCAGCATA | |
| | | CCAGCAGGGGCAGA | |
| | | ACCAGCTGTACAATG | |
| | | AGCTCAACCTCGGTC | |
| | | GCCGCGAAGAGTAC | |
| | | GACGTGCTCGACAA | |
| | | GAGAAGGGGCAGGG | |
| | | ACCCTGAGATGGGAG | |
| | | GCAAGCCCCGCAGA | |
| | | AAGAATCCCCAGGA | |
| | | AGGTCTGTACAACGA | |
| | | GCTGCAAAAGGATAA | |
| | | GATGGCTGAGGCCTA | |
| | | CAGCGAGATCGGCAT | |
| | | GAAGGGCGAAAGGA | |
| | | GACGGGGAAAGGGC | |
| | | CACGACGGGCTCTAC | |
| | | CAGGGACTCTCCACC | |
| | | GCCACCAAGGACAC | |
| | | CTACGACGCCCTCCA | |
| | | CATGCAGGCTCTGCC | |
| | | ACCCAGG | |
| Construct | CCCCCCTCCCCCCCT | ATGGCACTTCCCGTC | MALPVTALLLPLALLLH |
| H | TCCCTTCCCTTTGCA | ACCGCTCTCCTGCTG | AARPDIVLTQSPPSLAMS |
| | ACGCAACAATTGTAA | CCCCTCGCACTGCTG | LGKRATISCRASESVTIL |
| | GTGCCCTCACCTGTC | CTCCATGCAGCCCGC | GSHLIHWYQQKPGQPPT |
| | AATTGGGACCACCAC | CCAGACATCGTCCTG | LLIQLASNVQTGVPARFS |
| | TTTCAGTGACCCCAT | ACCCAGTCCCCTCCC | GSGSRTDFTLTIDPVEED |
| | GCGAAGTGCTGAGA | TCCCTCGCAATGTCC | DVAVYYCLQSRTIPRTFG |
| | GAAAGGAAGCTTTCT | CTCGGGAAACGGGC | GGTKLEIKGSTSGSGKP |
| | TACCCTTCATTTGTG | CACCATCAGCTGCCG | GSGEGSTKGQIQLVQSG |
| | AACCCACTGGTCTAA | GGCCTCTGAGTCAGT | PELKKPGETVKISCKASG |
| | GCCGCTTGGAATACG | GACAATCCTCGGAAG | YTFTDYSINWVKRAPGK |
| | ATGAGTGGAAAAGTT | CCATCTGATCCATTG | GLKWMGWINTETREPA |
| | CATTCTTAATGGAGT | GTACCAGCAGAAAC | YAYDFRGRFAFSLETSAS |
| | GAAACATGCTTAAAT | CCGGTCAGCCTCCAA | TAYLQINNLKYEDTATYF |
| | TTCCAGCTCGTGCTG | CCCTCCTCATCCAGC | CALDYSYAMDYWGQGT |
| | GTCTTTCCAGTACGG | TGGCCTCCAACGTGC | SVTVSSIEVMYPPPYLDN |
| | GGCGGCCCTGTCTGG | AGACAGGAGTCCCC | EKSNGTIIHVKGKHLCPS |
| | CCGTAATTCTTCAGA | GCTCGGTTCTCAGGC | PLFPGPSKPFWVLVVVG |
| | GTGTCACGCCACACT | AGCGGTTCCAGGACC | GVLACYSLLVTVAFIIFW |
| | TGTGGATCTCACGTG | GACTTCACCCTGACC | VRSKRSRLLHSDYMNM |
| | CCACATGACAGCGCT | ATCGACCCCGTGGAA | TPRRPGPTRKHYQPYAP |
| | ACAGCTGGAACTGG | GAGGACGATGTGGCT | PRDFAAYRSRVKFSRSA |
| | GTGCTTGGTGCCCAT | GTGTACTACTGCCTC | DAPAYQQGQNQLYNEL |
| | GGAGTAACAGCGAA | CAGTCCCGGACCATC | NLGRREEYDVLDKRRG |
| | AAGTGTTAGATCAAG | CCACGGACCTTCGGA | RDPEMGGKPRRKNPQE |
| | CCTTGCTTGGGCTAT | GGTGGGACAAAGCT | GLYNELQKDKMAEAYS |
| | GAGCCTGCGGAACA | GGAGATCAAAGGCA | EIGMKGERRRGKGHDG |
| | ACAACTGGTAACAGT | GCACCAGCGGTTCTG | LYQGLSTATKDTYDALH |
| | TGCCTCAGGGGCCGA | GCAAGCCAGGGTCA | MQALPPR |
| | AAGCCACGGTGTTAA | GGTGAGGGGAGCAC | |
| | CAGCACCCTCATAGT | AAAGGGTCAGATCCA | |
| | TTGATCCACCTCAGG | GCTGGTGCAGAGCG | |
| | GTGGTGATGTTTAGC | GTCCCGAGCTGAAG | |
| | AGTTAGTAGTTGCCA | AAGCCCGGGGAGAC | |
| | ATCTGTGTTCACTGA | CGTTAAGATCTCCTG | |
| | AATCTCGGCATACCG | CAAGGCTAGCGGGTA | |
| | TGTAGTGTACAGGGG | CACCTTCACCGACTA | |
| | TGAAGGATGCCCAGA | TAGTATCAACTGGGT | |
| | AGGTACCCGTAGGTA | CAAGCGCGCTCCTGG | |
| | ACCTTAAGAGACTAT | CAAGGGGCTCAAGT | |
| | GGATCTGATCTGGGG | GGATGGGGTGGATCA | |
| | CCTTGTCCGGAGTGC | ACACCGAAACCAGG | |
| | TTTACACACGGCTCA | GAGCCCGCATACGCT | |
| | AGGTTAAAAAACGTC | TATGACTTTCGGGGC | |
| | TAGCCCCACAGAGCC | CGGTTCGCCTTTTCC | |
| | CGAGGGATTCGGGTT | CTGGAGACCAGCGC | |
| | TTCCCTTTAAAAACC | CTCTACCGCCTACCT | |
| | CGACTAGAGCTTATG | CCAGATCAACAACCT | |
| | GTGACAATTATTGCT | GAAGTACGAGGACA | |
| | GTTCAGACGAACAGT | CCGCCACCTACTTCT | |
| | GTAATTGTTGTCTATT | GCGCACTCGACTACT | |
| | CACAGCAGTTCTATC | CCTACGCTATGGACT | |
| | AGAGCTTTTCCCACA | ACTGGGGTCAGGGTA | |
| | ACGGATCTTCTTGGC | CCTCCGTCACCGTCT | |
| | AAGCAAATACAGCA | CCAGCATCGAGGTCA | |
| | GGAGTCAAT | TGTACCCTCCTCCCT | |
| | | ACCTGGACAACGAG | |
| | | AAGTCCAACGGCAC | |
| | | CATCATCCATGTGAA | |
| | | GGGCAAGCATCTCTG | |
| | | CCCCAGCCCACTGTT | |
| | | CCCCGGACCCTCTAA | |
| | | GCCCTTCTGGGTCCT | |
| | | GGTCGTCGTCGGCGG | |
| | | TGTTCTGGCTTGCTA | |
| | | CAGCTTGCTGGTCAC | |
| | | CGTCGCCTTCATCAT | |
| | | CTTCTGGGTGCGCTC | |
| | | CAAGAGGAGCCGGC | |
| | | TGCTGCATAGCGACT | |
| | | ACATGAACATGACCC | |
| | | CTAGAAGGCCTGGTC | |
| | | CAACCCGCAAGCACT | |
| | | ACCAGCCTTACGCCC | |
| | | CTCCACGGGACTTCG | |
| | | CAGCCTACCGGTCAC | |
| | | GGGTGAAGTTCTCTC | |
| | | GGAGCGCAGATGCCC | |
| | | CAGCATACCAGCAGG | |
| | | GCCAGAACCAGCTGT | |
| | | ACAACGAACTTAACC | |
| | | TTGGTCGGCGGGAG | |
| | | GAATACGATGTGCTG | |
| | | GACAAGCGCAGGGG | |
| | | TCGGGATCCTGAAAT | |
| | | GGGCGGGAAACCAC | |
| | | GCCGGAAGAACCCA | |
| | | CAGGAGGGGCTCTAT | |
| | | AACGAGCTCCAAAA | |
| | | GGATAAGATGGCTGA | |
| | | GGCTTACAGCGAGAT | |
| | | TGGAATGAAGGGAG | |
| | | AAAGAAGACGGGGC | |
| | | AAGGGTCACGACGG | |
| | | GTTGTACCAGGGTCT | |
| | | GAGCACCGCCACCA | |
| | | AGGACACCTACGAC | |
| | | GCCCTCCACATGCAA | |
| | | GCCCTTCCACCCCGC | |
| Construct | CCCCCCTCCCCCCCT | ATGGCACTCCCCGTT | MALPVTALLLPLALLLH |
| I | TCCCTTCCCTTTGCA | ACCGCCCTTCTGCTG | AARPQVKLEESGGGLVQ |
| | ACGCAACAATTGTAA | CCTCTCGCCTTGCTG | AGRSLRLSCAASEHTFSS |
| | GTGCCCTCACCTGTC | CTGCACGCAGCCAG | HVMGWFRQAPGKERES |
| | AATTGGGACCACCAC | ACCACAGGTCAAGCT | VAVIGWRDISTSYADSVK |
| | TTTCAGTGACCCCAT | GGAGGAGTCTGGTG | GRFTISRDNAKKTLYLQ |
| | GCGAAGTGCTGAGA | GCGGGCTCGTTCAAG | MNSLKPEDTAVYYCAAR |
| | GAAAGGAAGCTTTCT | CAGGTCGGAGTCTCC | RIDAADFDSWGQGTQV |
| | TACCCTTCATTTGTG | GCCTGTCTTGCGCAG | TVSSGGGGSGGGGSGG |
| | AACCCACTGGTCTAA | CATCAGAGCATACCT | GGSEVQLVESGGGLVQA |
| | GCCGCTTGGAATACG | TCTCCTCACACGTGA | GGSLRLSCAASGRTFTM |
| | ATGAGTGGAAAAGTT | TGGGGTGGTTCAGGC | GWFRQAPGKEREFVAAI |
| | CATTCTTAATGGAGT | AAGCTCCCGGTAAGG | SLSPTLAYYAESVKGRFT |
| | GAAACATGCTTAAAT | AGAGGGAGTCCGTG | ISRDNAKNTVVLQMNSL |
| | TTCCAGCTCGTGCTG | GCCGTTATCGGCTGG | KPEDTALYYCAADRKSV |
| | GTCTTTCCAGTACGG | CGCGATATCAGCACC | MSIRPDYWGQGTQVTV |
| | GGCGGCCCTGTCTGG | TCCTACGCAGACAGC | SSTSTTTPAPRPPTPAPTI |
| | CCGTAATTCTTCAGA | GTTAAGGGCCGGTTC | ASQPLSLRPEACRPAAG |
| | GTGTCACGCCACACT | ACTATCTCCAGGGAC | GAVHTRGLDFACDIYIW |
| | TGTGGATCTCACGTG | AACGCTAAGAAGAC | APLAGTCGVLLLSLVITL |
| | CCACATGACAGCGCT | ACTCTACCTCCAGAT | YCRSKRSRLLHSDYMN |
| | ACAGCTGGAACTGG | GAACAGTCTGAAGC | MTPRRPGPTRKHYQPYA |
| | GTGCTTGGTGCCCAT | CCGAGGACACCGCA | PPRDFAAYRSRVKFSRSA |
| | GGAGTAACAGCGAA | GTGTACTATTGCGCT | DAPAYQQGQNQLYNEL |
| | AAGTGTTAGATCAAG | GCTCGGCGGATCGAT | NLGRREEYDVLDKRRG |
| | CCTTGCTTGGGCTAT | GCTGCCGACTTCGAC | RDPEMGGKPRRKNPQE |
| | GAGCCTGCGGAACA | AGCTGGGGTCAAGG | GLYNELQKDKMAEAYS |
| | ACAACTGGTAACAGT | GACCCAGGTCACCGT | EIGMKGERRRGKGHDG |
| | TGCCTCAGGGGCCGA | TTCCAGCGGAGGTGG | LYQGLSTATKDTYDALH |
| | AAGCCACGGTGTTAA | CGGAAGTGGTGGCG | MQALPPR |
| | CAGCACCCTCATAGT | GAGGATCAGGTGGTG | |
| | TTGATCCACCTCAGG | GAGGCTCCGAGGTCC | |
| | GTGGTGATGTTTAGC | AGCTGGTGGAATCAG | |
| | AGTTAGTAGTTGCCA | GAGGCGGCTTGGTGC | |
| | ATCTGTGTTCACTGA | AGGCTGGTGGGTCTT | |
| | AATCTCGGCATACCG | TGCGGTTGTCCTGCG | |
| | TGTAGTGTACAGGGG | CAGCTTCCGGCAGGA | |
| | TGAAGGATGCCCAGA | CCTTCACCATGGGAT | |
| | AGGTACCCGTAGGTA | GGTTCAGACAAGCCC | |
| | ACCTTAAGAGACTAT | CAGGTAAGGAGCGG | |
| | GGATCTGATCTGGGG | GAGTTTGTGGCCGCA | |
| | CCTTGTCCGGAGTGC | ATCTCACTGTCTCCC | |
| | TTTACACACGGCTCA | ACCCTCGCTTACTAC | |
| | AGGTTAAAAAACGTC | GCCGAGAGTGTGAA | |
| | TAGCCCCACAGAGCC | GGGGCGCTTCACAAT | |
| | CGAGGGATTCGGGTT | CAGTCGCGACAACG | |
| | TTCCCTTTAAAAACC | CAAAGAACACCGTC | |
| | CGACTAGAGCTTATG | GTCCTGCAAATGAAC | |
| | GTGACAATTATTGCT | TCCCTGAAGCCTGAG | |
| | GTTCAGACGAACAGT | GATACCGCACTCTATT | |
| | GTAATTGTTGTCTATT | ACTGCGCCGCCGATC | |
| | CACAGCAGTTCTATC | GGAAGAGCGTCATGT | |
| | AGAGCTTTTCCCACA | CCATCCGGCCCGACT | |
| | ACGGATCTTCTTGGC | ATTGGGGCCAAGGCA | |
| | AAGCAAATACAGCA | CCCAAGTGACCGTCA | |
| | GGAGTCAAT | GCTCCACCTCCACAA | |
| | | CCACTCCCGCCCCAA | |
| | | GACCACCTACCCCAG | |
| | | CCCCAACAATCGCAT | |
| | | CCCAGCCTCTGTCCC | |
| | | TTCGGCCCGAAGCTT | |
| | | GTCGCCCTGCAGCAG | |
| | | GTGGAGCAGTGCAC | |
| | | ACCCGGGGACTGGA | |
| | | CTTCGCCTGCGACAT | |
| | | CTACATCTGGGCACC | |
| | | CCTGGCTGGAACCTG | |
| | | CGGCGTGTTGCTGCT | |
| | | GAGCCTGGTGATCAC | |
| | | CCTCTACTGCCGCTC | |
| | | TAAGAGAAGCCGGC | |
| | | TGCTGCATAGCGACT | |
| | | ACATGAACATGACCC | |
| | | CTAGGAGACCAGGA | |
| | | CCCACCCGGAAGCA | |
| | | CTACCAGCCTTACGC | |
| | | TCCTCCACGGGATTT | |
| | | CGCTGCTTACCGCAG | |
| | | CCGGGTGAAGTTTTC | |
| | | CAGGTCAGCTGACGC | |
| | | CCCTGCCTACCAGCA | |
| | | GGGCCAGAACCAATT | |
| | | GTACAACGAACTGA | |
| | | ATCTGGGACGGCGCG | |
| | | AGGAATACGACGTCC | |
| | | TGGACAAGAGGCGG | |
| | | GGTAGAGATCCCGAG | |
| | | ATGGGGGGAAACCT | |
| | | CGGCGGAAGAACCC | |
| | | TCAGGAGGGGCTCTA | |
| | | CAACGAGCTGCAGA | |
| | | AGGATAAGATGGCCG | |
| | | AAGCCTACTCCGAGA | |
| | | TCGGGATGAAGGGTG | |
| | | AACGGAGGAGGGGC | |
| | | AAGGGACACGACGG | |
| | | CCTGTATCAGGGCCT | |
| | | CAGCACCGCTACCAA | |
| | | GGACACCTACGACGC | |
| | | CCTGCACATGCAGGC | |
| | | TCTCCCACCACGG | |
| Construct | CCCCCCTCCCCCCCT | ATGGCTCTTCCCGTC | MALPVTALLLPLALLLH |
| J | TCCCTTCCCTTTGCA | ACCGCTTTGCTGCTG | AARPQVKLEESGGGLVQ |
| | ACGCAACAATTGTAA | CCCCTGGCACTCCTC | AGRSLRLSCAASEHTFSS |
| | GTGCCCTCACCTGTC | CTCCATGCTGCTCGG | HVMGWFRQAPGKERES |
| | AATTGGGACCACCAC | CCTCAGGTGAAGCTG | VAVIGWRDISTSYADSVK |
| | TTTCAGTGACCCCAT | GAGGAGAGTGGTGG | GRFTISRDNAKKTLYLQ |
| | GCGAAGTGCTGAGA | CGGTCTGGTGCAAGC | MNSLKPEDTAVYYCAAR |
| | GAAAGGAAGCTTTCT | TGGCAGATCTCTGCG | RIDAADFDSWGQGTQV |
| | TACCCTTCATTTGTG | CCTGTCTTGCGCAGC | TVSSGGGGSGGGGSGG |
| | AACCCACTGGTCTAA | CAGCGAACACACCTT | GGSEVQLVESGGGLVQA |
| | GCCGCTTGGAATACG | CTCCTCCCACGTGAT | GGSLRLSCAASGRTFTM |
| | ATGAGTGGAAAAGTT | GGGGTGGTTTCGGCA | GWFRQAPGKEREFVAAI |
| | CATTCTTAATGGAGT | GGCACCCGGGAAAG | SLSPTLAYYAESVKGRFT |
| | GAAACATGCTTAAAT | AGCGCGAGTCCGTCG | ISRDNAKNTVVLQMNSL |
| | TTCCAGCTCGTGCTG | CAGTCATCGGGTGGC | KPEDTALYYCAADRKSV |
| | GTCTTTCCAGTACGG | GGGACATCTCTACCA | MSIRPDYWGQGTQVTV |
| | GGCGGCCCTGTCTGG | GCTACGCAGATTCCG | SSIEVMYPPPYLDNEKSN |
| | CCGTAATTCTTCAGA | TCAAGGGCCGGTTCA | GTIIHVKGKHLCPSPLFP |
| | GTGTCACGCCACACT | CCATTTCCCGGGATA | GPSKPFWVLVVVGGVL |
| | TGTGGATCTCACGTG | ACGCTAAGAAGACC | ACYSLLVTVAFIIFWVRS |
| | CCACATGACAGCGCT | CTCTACCTGCAAATG | KRSRLLHSDYMNMTPR |
| | ACAGCTGGAACTGG | AACTCTCTGAAGCCC | RPGPTRKHYQPYAPPRD |
| | GTGCTTGGTGCCCAT | GAAGACACCGCCGT | FAAYRSRVKFSRSADAP |
| | GGAGTAACAGCGAA | CTACTATTGCGCAGC | AYQQGQNQLYNELNLG |
| | AAGTGTTAGATCAAG | AAGGCGCATCGACGC | RREEYDVLDKRRGRDPE |
| | CCTTGCTTGGGCTAT | TGCCGACTTCGACTC | MGGKPRRKNPQEGLYN |
| | GAGCCTGCGGAACA | TTGGGGCCAAGGAA | ELQKDKMAEAYSEIGM |
| | ACAACTGGTAACAGT | CCCAGGTCACCGTGT | KGERRRGKGHDGLYQG |
| | TGCCTCAGGGGCCGA | CTTCCGGAGGAGGA | LSTATKDTYDALHMQAL |
| | AAGCCACGGTGTTAA | GGCTCCGGTGGTGGA | PPR |
| | CAGCACCCTCATAGT | GGTTCTGGAGGTGGC | |
| | TTGATCCACCTCAGG | GGCTCAGAGGTGCA | |
| | GTGGTGATGTTTAGC | GCTCGTGGAGAGCG | |
| | AGTTAGTAGTTGCCA | GTGGTGGACTCGTTC | |
| | ATCTGTGTTCACTGA | AGGCAGGCGGCAGT | |
| | AATCTCGGCATACCG | TTGCGGCTGTCCTGT | |
| | TGTAGTGTACAGGGG | GCAGCCTCCGGTCGC | |
| | TGAAGGATGCCCAGA | ACTTTCACTATGGGA | |
| | AGGTACCCGTAGGTA | TGGTTCCGCCAGGCT | |
| | ACCTTAAGAGACTAT | CCTGGTAAAGAAAG | |
| | GGATCTGATCTGGGG | GGAGTTCGTGGCCGC | |
| | CCTTGTCCGGAGTGC | CATCAGTCTGAGCCC | |
| | TTTACACACGGCTCA | CACCCTCGCATACTA | |
| | AGGTTAAAAAACGTC | CGCCGAGAGCGTGA | |
| | TAGCCCCACAGAGCC | AGGGTAGGTTCACTA | |
| | CGAGGGATTCGGGTT | TCAGCCGGGACAAC | |
| | TTCCCTTTAAAAACC | GCCAAGAACACCGT | |
| | CGACTAGAGCTTATG | GGTGCTCCAGATGAA | |
| | GTGACAATTATTGCT | TTCCCTGAAGCCTGA | |
| | GTTCAGACGAACAGT | GGATACCGCCCTCTA | |
| | GTAATTGTTGTCTATT | CTACTGCGCTGCCGA | |
| | CACAGCAGTTCTATC | CCGCAAGAGCGTGAT | |
| | AGAGCTTTTCCCACA | GAGCATCCGGCCTGA | |
| | ACGGATCTTCTTGGC | CTATTGGGGTCAGGG | |
| | AAGCAAATACAGCA | GACACAGGTGACCG | |
| | GGAGTCAAT | TCAGCAGCATCGAGG | |
| | | TGATGTATCCACCAC | |
| | | CCTACCTCGACAACG | |
| | | AGAAGTCCAACGGC | |
| | | ACCATCATCCACGTC | |
| | | AAGGGGAAGCACCT | |
| | | CTGCCCTTCCCCTCT | |
| | | GTTCCCTGGCCCCTC | |
| | | AAAGCCCTTCTGGGT | |
| | | CCTGGTGGTGGTTGG | |
| | | TGGGGTGCTGGCTTG | |
| | | CTACTCCCTGCTCGT | |
| | | GACCGTGGCTTTCAT | |
| | | CATCTTCTGGGTTCG | |
| | | GAGCAAACGGTCCA | |
| | | GACTGCTGCACTCCG | |
| | | ACTACATGAACATGA | |
| | | CCCCAAGAAGACCT | |
| | | GGGCCCACACGGAA | |
| | | GCATTACCAACCCTA | |
| | | TGCACCACCTCGGGA | |
| | | TTTCGCCGCCTACAG | |
| | | ATCCCGGGTCAAGTT | |
| | | CTCCAGGTCCGCCGA | |
| | | TGCACCAGCCTATCA | |
| | | GCAGGGGCAAAACC | |
| | | AGCTGTATAATGAGC | |
| | | TGAACCTTGGACGGC | |
| | | GCGAGGAGTACGAC | |
| | | GTGCTCGACAAAAG | |
| | | ACGCGGTCGCGACCC | |
| | | AGAGATGGGCGGCA | |
| | | AGCCTAGACGCAAG | |
| | | AATCCCCAGGAGGG | |
| | | GCTCTATAACGAGTT | |
| | | GCAGAAGGATAAGAT | |
| | | GGCCGAGGCCTACA | |
| | | GCGAGATCGGGATGA | |
| | | AAGGCGAAAGACGG | |
| | | CGCGGAAAGGGTCA | |
| | | CGACGGACTCTACCA | |
| | | GGGCCTGAGCACAG | |
| | | CCACCAAAGACACCT | |
| | | ACGACGCTCTGCATA | |
| | | TGCAAGCACTGCCTC | |
| | | CCCGG | |
| Construct | GTGGCCACGCCCGG | ATGGCTCTGCCTGTG | MALPVTALLLPLALLLH |
| K | GCCACCGATACTTCC | ACAGCTCTGCTGCTG | AARPDIQMTQSPSSLSAS |
| | CTTCACTCCTTCGGG | CCTCTGGCTCTGCTT | VGDRVTITCRASQDVNT |
| | ACTGTTGGGGAGGA | CTGCATGCCGCCAGA | AVAWYQQKPGKAPKLLI |
| | ACACAACAGGGCTC | CCTGACATCCAGATG | YSASFLYSGVPSRFSGSR |
| | CCCTGTTTTCCCATTC | ACTCAGAGCCCCAGC | SGTDFTLTISSLQPEDFAT |
| | CTTCCCCCTTTTCCC | AGCCTGTCTGCCTCT | YYCQQHYTTPPTFGQGT |
| | AACCCCAACCGCCGT | GTGGGAGACAGAGT | KVEIKRTGSTSGSGKPGS |
| | ATCTGGTGGCGGCAA | GACAATTACCTGCCG | GEGSEVQLVESGGGLVQ |
| | GACACACGGGTCTTT | GGCCAGCCAGGATGT | PGGSLRLSCAASGFNIKD |
| | CCCTCTAAAGCACAA | GAATACTGCTGTCGC | TYIHWVRQAPGKGLEW |
| | TTGTGTGTGTGTCCC | CTGGTATCAACAAAA | VARIYPTNGYTRYADSV |
| | AGGTCCTCCTGCGTA | GCCTGGCAAGGCCCC | KGRFTISADTSKNTAYLQ |
| | CGGTGCGGGAGTGCT | TAAGCTCCTGATCTA | MNSLRAEDTAVYYCSR |
| | CCCACCCAACTGTTG | CAGCGCCAGCTTTCT | WGGDGFYAMDVWGQG |
| | TAAGCCTGTCCAACG | GTACAGCGGCGTGCC | TLVTVSSIEVMYPPPYLD |
| | CGTCGTCCTGGCAAG | CAGCAGATTCTCCGG | NEKSNGTIIHVKGKHLC |
| | ACTATGACGTCGCAT | AAGCAGAAGCGGCA | PSPLFPGPSKPFWVLVVV |
| | GTTCCGCTGCGGATG | CAGATTTCACACTGA | GGVLACYSLLVTVAFIIF |
| | CCGACCGGGTAACCG | CCATAAGCAGCCTGC | WVRSKRSRLLHSDYMN |
| | GTTCCCCAGTGTGTG | AGCCAGAGGATTTCG | MTPRRPGPTRKHYQPYA |
| | TAGTGCGATCTTCCA | CCACCTACTATTGCC | PPRDFAAYRSRVKFSRSA |
| | GGTCCTCCTGGTTGG | AGCAGCACTACACCA | DAPAYQQGQNQLYNEL |
| | CGTTGTCCAGAAACT | CACCTCCAACCTTTG | NLGRREEYDVLDKRRG |
| | GCTTCAGGTAAGTGG | GCCAGGGCACCAAG | RDPEMGGKPRRKNPQE |
| | GGTGTGCCCAATCCC | GTCGAGATTAAGAGA | GLYNELQKDKMAEAYS |
| | TACAAAGGTTGATTC | ACAGGCAGCACATCT | EIGMKGERRRGKGHDG |
| | TTTCACCACCTTAGG | GGCTCTGGCAAACCT | LYQGLSTATKDTYDALH |
| | AATGCTCCGGAGGTA | GGATCTGGCGAGGGC | MQALPPR |
| | CCCCAGCAACAGCTG | TCTGAAGTCCAGCTG | |
| | GGATCTGACCGGAGG | GTGGAATCTGGCGGA | |
| | CTAATTGTCTACGGG | GGACTGGTTCAACCT | |
| | TGGTGTTTCCTTTTTC | GGCGGCTCTCTGAGA | |
| | TTTTCACACAACTCT | CTGTCTTGTGCCGCC | |
| | ACTGCTGACAACTCA | TCCGGCTTCAACATC | |
| | CTGACTATCCACTTG | AAGGACACCTACATC | |
| | CTCTGTCACG | CACTGGGTCCGACAA | |
| | | GCCCCAGGCAAAGG | |
| | | ACTTGAGTGGGTCGC | |
| | | CAGGATCTACCCCAC | |
| | | CAACGGCTACACCAG | |
| | | ATACGCCGACTCTGT | |
| | | GAAGGGCAGATTCAC | |
| | | CATCTCTGCCGACAC | |
| | | CAGCAAGAATACCGC | |
| | | CTACCTGCAGATGAA | |
| | | CTCCCTGAGAGCCGA | |
| | | AGATACCGCTGTGTA | |
| | | TTACTGTTCCAGATG | |
| | | GGGAGGCGACGGCT | |
| | | TCTACGCCATGGATG | |
| | | TTTGGGGCCAAGGCA | |
| | | CCCTCGTGACCGTTT | |
| | | CTTCTATCGAAGTGA | |
| | | TGTACCCTCCACCTT | |
| | | ACCTGGACAACGAG | |
| | | AAGTCCAACGGCAC | |
| | | CATCATCCACGTGAA | |
| | | GGGCAAGCACCTGT | |
| | | GTCCTTCTCCACTGT | |
| | | TCCCCGGACCTAGCA | |
| | | AGCCTTTCTGGGTGC | |
| | | TCGTTGTTGTTGGCG | |
| | | GCGTGCTGGCCTGTT | |
| | | ACTCTCTGCTGGTTA | |
| | | CCGTGGCCTTCATCA | |
| | | TCTTTTGGGTCCGAA | |
| | | GCAAGCGGAGCCGG | |
| | | CTGCTGCACTCCGAC | |
| | | TACATGAACATGACC | |
| | | CCTAGACGGCCCGGA | |
| | | CCAACCAGAAAGCA | |
| | | CTACCAGCCTTACGC | |
| | | TCCTCCTAGAGACTT | |
| | | CGCCGCCTACCGGTC | |
| | | CAGAGTGAAGTTCA | |
| | | GCAGATCCGCCGATG | |
| | | CTCCCGCCTATCAGC | |
| | | AGGGCCAAAACCAG | |
| | | CTGTACAACGAGCTG | |
| | | AACCTGGGGAGAAG | |
| | | AGAAGAGTACGACG | |
| | | TGCTGGACAAGCGG | |
| | | AGAGGCAGAGATCCT | |
| | | GAAATGGGCGGCAA | |
| | | GCCCAGACGGAAGA | |
| | | ATCCTCAAGAGGGCC | |
| | | TGTATAATGAGCTGC | |
| | | AGAAAGACAAGATG | |
| | | GCCGAGGCCTACAGC | |
| | | GAGATCGGAATGAAG | |
| | | GGCGAGCGCAGAAG | |
| | | AGGCAAGGGACACG | |
| | | ATGGACTGTACCAGG | |
| | | GCCTGAGCACCGCCA | |
| | | CCAAGGATACCTATG | |
| | | ATGCCCTGCACATGC | |
| | | AGGCCCTGCCTCCAA | |
| | | GA | |
| Construct | GTGGCCACGCCCGG | ATGGCTCTGCCTGTG | MALPVTALLLPLALLLH |
| L | GCCACCGATACTTCC | ACAGCTCTGCTGCTG | AARPDIQMTQSPSSLSAS |
| | CTTCACTCCTTCGGG | CCTCTGGCTCTGCTT | VGDRVTITCRASQDVNT |
| | ACTGTTGGGGAGGA | CTGCATGCCGCCAGA | AVAWYQQKPGKAPKLLI |
| | ACACAACAGGGCTC | CCTGACATCCAGATG | YSASFLYSGVPSRFSGSR |
| | CCCTGTTTTCCCATTC | ACTCAGAGCCCCAGC | SGTDFTLTISSLQPEDFAT |
| | CTTCCCCCTTTTCCC | AGCCTGTCTGCCTCT | YYCQQHYTTPPTFGQGT |
| | AACCCCAACCGCCGT | GTGGGAGACAGAGT | KVEIKRTGSTSGSGKPGS |
| | ATCTGGTGGCGGCAA | GACAATTACCTGCCG | GEGSEVQLVESGGGLVQ |
| | GACACACGGGTCTTT | GGCCAGCCAGGATGT | PGGSLRLSCAASGFNIKD |
| | CCCTCTAAAGCACAA | GAATACTGCTGTCGC | TYIHWVRQAPGKGLEW |
| | TTGTGTGTGTGTCCC | CTGGTATCAACAAAA | VARIYPTNGYTRYADSV |
| | AGGTCCTCCTGCGTA | GCCTGGCAAGGCCCC | KGRFTISADTSKNTAYLQ |
| | CGGTGCGGGAGTGCT | TAAGCTCCTGATCTA | MNSLRAEDTAVYYCSR |
| | CCCACCCAACTGTTG | CAGCGCCAGCTTTCT | WGGDGFYAMDVWGQG |
| | TAAGCCTGTCCAACG | GTACAGCGGCGTGCC | TLVTVSSTTTPAPRPPTPA |
| | CGTCGTCCTGGCAAG | CAGCAGATTCTCCGG | PTIASQPLSLRPEACRPA |
| | ACTATGACGTCGCAT | AAGCAGAAGCGGCA | AGGAVHTRGLDFACDIY |
| | GTTCCGCTGCGGATG | CAGATTTCACACTGA | IWAPLAGTCGVLLLSLVI |
| | CCGACCGGGTAACCG | CCATAAGCAGCCTGC | TLYCKRGRKKLLYIFKQP |
| | GTTCCCCAGTGTGTG | AGCCAGAGGATTTCG | FMRPVQTTQEEDGCSCR |
| | TAGTGCGATCTTCCA | CCACCTACTATTGCC | FPEEEEGGCELRVKFSRS |
| | GGTCCTCCTGGTTGG | AGCAGCACTACACCA | ADAPAYQQGQNQLYNE |
| | CGTTGTCCAGAAACT | CACCTCCAACCTTTG | LNLGRREEYDVLDKRR |
| | GCTTCAGGTAAGTGG | GCCAGGGCACCAAG | GRDPEMGGKPRRKNPQ |
| | GGTGTGCCCAATCCC | GTCGAGATTAAGAGA | EGLYNELQKDKMAEAY |
| | TACAAAGGTTGATTC | ACAGGCAGCACATCT | SEIGMKGERRRGKGHD |
| | TTTCACCACCTTAGG | GGCTCTGGCAAACCT | GLYQGLSTATKDTYDAL |
| | AATGCTCCGGAGGTA | GGATCTGGCGAGGGC | HMQALPPR |
| | CCCCAGCAACAGCTG | TCTGAAGTCCAGCTG | |
| | GGATCTGACCGGAGG | GTGGAATCTGGCGGA | |
| | CTAATTGTCTACGGG | GGACTGGTTCAACCT | |
| | TGGTGTTTCCTTTTTC | GGCGGCTCTCTGAGA | |
| | TTTTCACACAACTCT | CTGTCTTGTGCCGCC | |
| | ACTGCTGACAACTCA | TCCGGCTTCAACATC | |
| | CTGACTATCCACTTG | AAGGACACCTACATC | |
| | CTCTGTCACG | CACTGGGTCCGACAA | |
| | | GCCCCAGGCAAAGG | |
| | | ACTTGAGTGGGTCGC | |
| | | CAGGATCTACCCCAC | |
| | | CAACGGCTACACCAG | |
| | | ATACGCCGACTCTGT | |
| | | GAAGGGCAGATTCAC | |
| | | CATCTCTGCCGACAC | |
| | | CAGCAAGAATACCGC | |
| | | CTACCTGCAGATGAA | |
| | | CTCCCTGAGAGCCGA | |
| | | AGATACCGCTGTGTA | |
| | | TTACTGTTCCAGATG | |
| | | GGGAGGCGACGGCT | |
| | | TCTACGCCATGGATG | |
| | | TTTGGGGCCAAGGCA | |
| | | CCCTCGTGACCGTTT | |
| | | CTTCTACCACCACAC | |
| | | CAGCTCCTCGGCCTC | |
| | | CAACTCCTGCTCCTA | |
| | | CAATTGCCAGCCAGC | |
| | | CTCTGTCTCTGAGGC | |
| | | CCGAAGCTTGTAGAC | |
| | | CTGCTGCTGGCGGAG | |
| | | CCGTGCATACAAGAG | |
| | | GACTGGATTTCGCCT | |
| | | GCGACATCTACATCT | |
| | | GGGCTCCTCTGGCCG | |
| | | GAACATGTGGCGTTC | |
| | | TGCTGCTGAGCCTGG | |
| | | TCATCACCCTGTACT | |
| | | GTAAGCGGGGCAGA | |
| | | AAGAAGCTGCTGTAC | |
| | | ATCTTCAAGCAGCCC | |
| | | TTCATGCGGCCCGTG | |
| | | CAGACCACACAAGA | |
| | | GGAAGATGGCTGCTC | |
| | | CTGCAGATTCCCCGA | |
| | | GGAAGAAGAAGGCG | |
| | | GCTGCGAGCTGAGA | |
| | | GTGAAGTTCAGCAG | |
| | | ATCCGCCGATGCTCC | |
| | | CGCCTATCAGCAGGG | |
| | | CCAAAACCAGCTGTA | |
| | | CAACGAGCTGAACCT | |
| | | GGGGAGAAGAGAAG | |
| | | AGTACGACGTGCTGG | |
| | | ACAAGCGGAGAGGC | |
| | | AGAGATCCTGAAATG | |
| | | GGCGGCAAGCCCAG | |
| | | ACGGAAGAATCCTCA | |
| | | AGAGGGCCTGTATAA | |
| | | TGAGCTGCAGAAAG | |
| | | ACAAGATGGCCGAG | |
| | | GCCTACAGCGAGATC | |
| | | GGAATGAAGGGCGA | |
| | | GCGCAGAAGAGGCA | |
| | | AGGGACACGATGGA | |
| | | CTGTACCAGGGCCTG | |
| | | AGCACCGCCACCAA | |
| | | GGATACCTATGATGC | |
| | | CCTGCACATGCAGGC | |
| | | CCTGCCTCCAAGA | |
| Construct | CCCCCCTCCCCCCCT | ATGGCACTGCCCGTC | MALPVTALLLPLALLLH |
| M | TCCCTTCCCTTTGCA | ACCGCACTCCTGCTC | AARPDIQMTQTTSSLSAS |
| | ACGCAACAATTGTAA | CCACTGGCACTGCTG | LGDRVTISCRASQDISKY |
| | GTGCCCTCACCTGTC | CTCCATGCAGCTCGC | LNWYQQKPDGTVKLLI |
| | AATTGGGACCACCAC | CCCGATATCCAGATG | YHTSRLHSGVPSRFSGS |
| | TTTCAGTGACCCCAT | ACCCAGACCACCTCT | GSGTDYSLTISNLEQEDI |
| | GCGAAGTGCTGAGA | AGCCTCAGCGCCTCT | ATYFCQQGNTLPYTFGG |
| | GAAAGGAAGCTTTCT | CTGGGTGACCGCGTC | GTKLEITGGGGSGGGGS |
| | TACCCTTCATTTGTG | ACCATCTCTTGCCGG | GGGGSEVKLQESGPGLV |
| | AACCCACTGGTCTAA | GCCAGCCAAGACATC | APSQSLSVTCTVSGVSLP |
| | GCCGCTTGGAATACG | TCTAAGTACCTGAAC | DYGVSWIRQPPRKGLE |
| | ATGAGTGGAAAAGTT | TGGTACCAGCAGAA | WLGVIWGSETTYYNSAL |
| | CATTCTTAATGGAGT | ACCTGACGGAACCGT | KSRLTIIKDNSKSQVFLK |
| | GAAACATGCTTAAAT | GAAGCTGCTGATCTA | MNSLQTDDTAIYYCAKH |
| | TTCCAGCTCGTGCTG | CCACACCAGTCGGCT | YYYGGSYAMDYWGQG |
| | GTCTTTCCAGTACGG | GCATTCCGGGGTGCC | TSVTVSSIEVMYPPPYLD |
| | GGCGGCCCTGTCTGG | TTCCAGGTTCAGCGG | NEKSNGTIIHVKGKHLC |
| | CCGTAATTCTTCAGA | TTCCGGCTCTGGGAC | PSPLFPGPSKPFWVLVVV |
| | GTGTCACGCCACACT | CGATTATAGTCTCACC | GGVLACYSLLVTVAFIIF |
| | TGTGGATCTCACGTG | ATCTCCAACCTCGAG | WVRSKRSRLLHSDYMN |
| | CCACATGACAGCGCT | CAGGAGGACATCGC | MTPRRPGPTRKHYQPYA |
| | ACAGCTGGAACTGG | AACCTACTTCTGCCA | PPRDFAAYRSRVKFSRSA |
| | GTGCTTGGTGCCCAT | GCAGGGGAACACCC | DAPAYQQGQNQLYNEL |
| | GGAGTAACAGCGAA | TGCCCTACACCTTCG | NLGRREEYDVLDKRRG |
| | AAGTGTTAGATCAAG | GTGGCGGGACCAAG | RDPEMGGKPRRKNPQE |
| | CCTTGCTTGGGCTAT | CTGGAGATCACTGGA | GLYNELQKDKMAEAYS |
| | GAGCCTGCGGAACA | GGTGGTGGCAGCGG | EIGMKGERRRGKGHDG |
| | ACAACTGGTAACAGT | AGGTGGAGGATCAG | LYQGLSTATKDTYDALH |
| | TGCCTCAGGGGCCGA | GTGGAGGCGGTAGC | MQALPPR |
| | AAGCCACGGTGTTAA | GAGGTGAAGCTGCA | |
| | CAGCACCCTCATAGT | GGAGTCCGGACCTG | |
| | TTGATCCACCTCAGG | GTCTGGTGGCCCCAA | |
| | GTGGTGATGTTTAGC | GCCAGTCCCTCAGCG | |
| | AGTTAGTAGTTGCCA | TCACCTGCACAGTGT | |
| | ATCTGTGTTCACTGA | CCGGGGTGTCCCTGC | |
| | AATCTCGGCATACCG | CTGACTACGGTGTCT | |
| | TGTAGTGTACAGGGG | CCTGGATCAGGCAAC | |
| | TGAAGGATGCCCAGA | CACCCCGGAAGGGT | |
| | AGGTACCCGTAGGTA | CTCGAGTGGCTGGGC | |
| | ACCTTAAGAGACTAT | GTCATCTGGGGCTCC | |
| | GGATCTGATCTGGGG | GAGACCACCTACTAC | |
| | CCTTGTCCGGAGTGC | AACAGCGCTCTGAA | |
| | TTTACACACGGCTCA | GTCCCGGCTGACCAT | |
| | AGGTTAAAAAACGTC | CATCAAAGACAACTC | |
| | TAGCCCCACAGAGCC | CAAGAGCCAGGTGTT | |
| | CGAGGGATTCGGGTT | CTTGAAGATGAACTC | |
| | TTCCCTTTAAAAACC | CCTGCAAACCGATGA | |
| | CGACTAGAGCTTATG | CACCGCCATCTACTA | |
| | GTGACAATTATTGCT | CTGCGCCAAGCACTA | |
| | GTTCAGACGAACAGT | CTACTATGGCGGTAG | |
| | GTAATTGTTGTCTATT | CTACGCCATGGATTAT | |
| | CACAGCAGTTCTATC | TGGGGTCAGGGCAC | |
| | AGAGCTTTTCCCACA | CAGTGTCACCGTCTC | |
| | ACGGATCTTCTTGGC | CTCCATCGAGGTGAT | |
| | AAGCAAATACAGCA | GTACCCTCCACCCTA | |
| | GGAGTCAAT | TCTGGACAACGAGA | |
| | | AGTCCAACGGCACC | |
| | | ATCATCCACGTGAAG | |
| | | GGCAAGCACCTGTGC | |
| | | CCTAGCCCTCTGTTC | |
| | | CCAGGACCCTCCAAG | |
| | | CCCTTCTGGGTGCTG | |
| | | GTCGTGGTGGGAGG | |
| | | AGTCCTGGCCTGCTA | |
| | | TTCCCTCCTCGTCAC | |
| | | CGTGGCATTTATCATC | |
| | | TTCTGGGTCCGGAGC | |
| | | AAGCGGTCACGCCTG | |
| | | CTCCACTCCGACTAC | |
| | | ATGAACATGACTCCT | |
| | | CGCAGACCTGGACCC | |
| | | ACCCGGAAGCACTAC | |
| | | CAGCCTTATGCCCCA | |
| | | CCCCGCGACTTTGCC | |
| | | GCTTACCGCTCTCGG | |
| | | GTCAAGTTCTCTCGG | |
| | | TCAGCAGACGCCCCT | |
| | | GCATACCAGCAGGGC | |
| | | CAGAACCAGCTGTAT | |
| | | AACGAGCTGAACCTC | |
| | | GGCAGACGGGAGGA | |
| | | GTACGATGTGCTGGA | |
| | | CAAGAGGAGAGGCA | |
| | | GAGACCCCGAGATG | |
| | | GGTGGTAAGCCACG | |
| | | GCGCAAGAACCCAC | |
| | | AGGAGGGCTTGTACA | |
| | | ACGAACTGCAGAAG | |
| | | GACAAGATGGCCGA | |
| | | GGCCTACAGCGAGAT | |
| | | CGGCATGAAGGGAG | |
| | | AGAGGCGCAGGGGC | |
| | | AAGGGTCACGACGG | |
| | | CCTGTACCAAGGGCT | |
| | | GTCCACCGCAACCAA | |
| | | GGACACCTACGATGC | |
| | | CCTGCACATGCAGGC | |
| | | CCTCCCACCAAGG | |

ii. Hinge/Spacer Domain

[0428] In some embodiments, a CAR of the instant disclosure comprises a hinge or spacer domain. In some embodiments, the hinge/spacer domain may comprise a truncated hinge/spacer domain (THD) the THD domain is a truncated version of a complete hinge/spacer domain (“CHD”). In some embodiments, an extracellular domain is from or derived from (e.g., comprises all or a fragment of) ErbB2, glycophorin A (GpA), CD2, CD3 delta, CD3 epsilon, CD3 gamma, CD4, CD7, CD8a, CD8[T CD11a (IT GAL), CD11b (IT GAM), CD11e (ITGAX), CD11d (IT GAD), CD18 (ITGB2), CD19 (B4), CD27 (TNFRSF7), CD28, CD28T, CD29 (ITGB1), CD30 (TNFRSF8), CD40 (TNFRSF5), CD48 (SLAMF2), CD49a (ITGA1), CD49d (ITGA4), CD49f (ITGA6), CD66a (CEACAM1), CD66b (CEACAM8), CD66c (CEACAM6), CD66d (CEACAM3), CD66e (CEACAM5), CD69 (CLEC2), CD79A (B-cell antigen receptor complex-associated alpha chain), CD79B (B-cell antigen receptor complex-associated beta chain), CD84 (SLAMF5), CD96 (Tactile), CD100 (SEMA4D), CD103 (ITGAE), CD134 (0X40), CD137 (4-1BB), CD150 (SLAMF1), CD158A (KIR2DL¹), CD158B1 (KIR2DL²), CD158B2 (KIR2DL³), CD158C (KIR3DP1), CD158D (KIRDL⁴), CD158F1 (KIR2DL⁵A), CD158F2 (KIR2DL⁵B), CD158K (KIR3DL²), CD160 (BY55), CD162 (SELPLG), CD226 (DNAM1), CD229 (SLAMF3), CD244 (SLAMF4), CD247 (CD3-zeta), CD258 (LIGHT), CD268 (BAFFR), CD270 (TNFSF14), CD272 (BTLA), CD276 (B7-H3), CD279 (PD-1), CD314 (NKG2D), CD319 (SLAMF7), CD335 (NK-p46), CD336 (NK-p44), CD337 (NK-p30), CD352 (SLAMF6), CD353 (SLAMF8), CD355 (CRT AM), CD357 (TNFRSF18), inducible T cell co-stimulator (ICOS), LFA-1 (CD11a/CD18), NKG2C, DAP-10, ICAM-1, NKp80 (KLRF1), IL-2R beta, IL-2R gamma, IL-7R alpha, LFA-1, SLAMF9, LAT, GADS (GrpL), SLP-76 (LCP2), PAG1/CBP, a CD83 ligand, Fc gamma receptor, MHC class 1 molecule, MHC class 2 molecule, a TNF receptor protein, an immunoglobulin protein, a cytokine receptor, an integrin, activating NK cell receptors, a Toll ligand receptor, and fragments or combinations thereof. A hinge or spacer domain may be derived either from a natural or from a synthetic source.

[0429] In some embodiments, a hinge or spacer domain is positioned between an antigen binding molecule (e.g., an scFv) and a transmembrane domain. In this orientation, the hinge/spacer domain provides distance between the antigen binding molecule and the surface of a cell membrane on which the CAR is expressed. In some embodiments, a hinge or spacer domain is from or derived from an immunoglobulin. In some embodiments, a hinge or spacer domain is selected from the hinge/spacer regions of IgG1, IgG2, IgG3, IgG4, IgA, IgD, IgE, IgM, or a fragment thereof. In some embodiments, a hinge or spacer domain comprises, is from, or is derived from the hinge/spacer region of CD8 alpha. In some embodiments, a hinge or spacer domain comprises, is from, or is derived from the hinge/spacer region of CD28. In some embodiments, a hinge or spacer domain comprises a fragment of the hinge/spacer region of CD8 alpha or a fragment of the hinge/spacer region of CD28, wherein the fragment is anything less than the whole hinge/spacer region. In some embodiments, the fragment of the CD8 alpha hinge/spacer region or the fragment of the CD28 hinge/spacer region comprises an amino acid sequence that excludes at least 1, at least 2, at least 3, at least 4, at least 5, at least 6, at least 7, at least 8, at least 9, at least 10, at least 11, at least 12, at least 13, at least 14, at least 15, at least 16, at least 17, at least 18, at least 19, or at least 20 amino acids at the N-terminus or C-Terminus, or both, of the CD8 alpha hinge/spacer region, or of the CD28 hinge/spacer region.

iii. Transmembrane Domain

[0430] The CAR of the present disclosure may further comprise a transmembrane domain and/or an intracellular signaling domain. The transmembrane domain may be designed to be fused to the extracellular domain of the CAR. It may similarly be fused to the intracellular domain of the CAR. In some embodiments, the transmembrane domain that naturally is associated with one of the domains in a CAR is used. In some instances, the transmembrane domain may be selected or modified (e.g., by an amino acid substitution) to avoid binding of such domains to the transmembrane domains of the same or different surface membrane proteins to minimize interactions with other members of the receptor complex. The transmembrane domain may be derived either from a natural or from a synthetic source. Where the source is natural, the domain may be derived from any membrane-bound or transmembrane protein.

[0431] Transmembrane regions may be derived from (i.e. comprise) a receptor tyrosine kinase (e.g., ErbB2), glycophorin A (GpA), 4-1BB/CD137, activating NK cell receptors, an immunoglobulin protein, B7-H3, BAFFR, BFAME (SEAMF8), BTEA, CD100 (SEMA4D), CD103, CD160 (BY55), CD18, CD19, CD19a, CD2, CD247, CD27, CD276 (B7-H3), CD28, CD29, CD3 delta, CD3 epsilon, CD3 gamma, CD30, CD4, CD40, CD49a, CD49D, CD49f, CD69, CD7, CD84, CD8alpha, CD8beta, CD96 (Tactile), CD11a, CD11b, CD11c, CD11d, CDS, CEACAM1, CRT AM, cytokine receptor, DAP-10, DNAM1 (CD226), Fc gamma receptor, GADS, GITR, HVEM (EIGHTR), IA4, ICAM-1, ICAM-1, Ig alpha (CD79a), IE-2R beta, IE-2R gamma, IE-7R alpha, inducible T cell costimulator (ICOS), integrins, ITGA4, ITGA4, ITGA6, IT GAD, ITGAE, ITGAE, IT GAM, ITGAX, ITGB2, ITGB7, ITGB1, KIRDS2, EAT, LFA-1, LFA-1, a ligand that specifically binds with CD83, LIGHT, LIGHT, LTBR, Ly9 (CD229), lymphocyte function-associated antigen-1 (LFA-1; CD1-1a/CD18), MHC class 1 molecule, NKG2C, NKG2D, NKp30, NKp44, NKp46, NKp80 (KLRF1), OX-40, PAG/Cbp, programmed death-1 (PD-1), PSGL¹, SELPLG (CD162), Signaling Lymphocytic Activation Molecules (SLAM proteins), SLAM (SLAMF1; CD150; IPO-3), SLAMF4 (CD244; 2B4), SLAMF6 (NTB-A; Lyl08), SLAMF7, SLP-76, TNF receptor proteins, TNFR2, TNFSF14, a Toll ligand receptor, TRANCE/RANKL, VLA1, or VLA-6, or a fragment, truncation, or a combination thereof.

[0432] In some embodiments, suitable intracellular signaling domain include, but are not limited to, activating Macrophage/Myeloid cell receptors CSFR1, MYD88, CD14, TIE2, TLR4, CR3, CD64, TREM2, DAP10, DAP12, CD169, DECTINI, CD206, CD47, CD163, CD36, MARCO, TIM4, MERTK, F4/80, CD91, C1QR, LOX-1, CD68, SRA, BAI-1, ABCA7, CD36, CD31, Lactoferrin, or a fragment, truncation, or combination thereof.

[0433] In some embodiments, a receptor tyrosine kinase may be derived from (e.g., comprise) Insulin receptor (InsR), Insulin-like growth factor I receptor (IGF1R), Insulin receptor-related receptor (IRR), platelet derived growth factor receptor alpha (PDGFRa), platelet derived growth factor receptor beta (PDGFRfi). KIT proto-oncogene receptor tyrosine kinase (Kit), colony stimulating factor 1 receptor (CSFR), fms related tyrosine kinase 3 (FLT3), fms related tyrosine kinase 1 (VEGFR-1), kinase insert domain receptor (VEGFR-2), fms related tyrosine kinase 4 (VEGFR-3), fibroblast growth factor receptor 1 (FGFR1), fibroblast growth factor receptor 2 (FGFR2), fibroblast growth factor receptor 3 (FGFR3), fibroblast growth factor receptor 4 (FGFR4), protein tyrosine kinase 7 (CCK4), neurotrophic receptor tyrosine kinase 1 (trkA), neurotrophic receptor tyrosine kinase 2 (trkB), neurotrophic receptor tyrosine kinase 3 (trkC), receptor tyrosine kinase like orphan receptor 1 (ROR1), receptor tyrosine kinase like orphan receptor 2 (ROR2), muscle associated receptor tyrosine kinase (MuSK), MET proto-oncogene, receptor tyrosine kinase (MET), macrophage stimulating 1 receptor (Ron), AXL receptor tyrosine kinase (Axl), TYRO3 protein tyrosine kinase (Tyro3), MER proto-oncogene, tyrosine kinase (Mer), tyrosine kinase with immunoglobulin like and EGF like domains 1 (TIE1), TEK receptor tyrosine kinase (TIE2), EPH receptor A1 (EphA1), EPH receptor A2 (EphA2), (EPH receptor A3) EphA3, EPH receptor A4 (EphA4), EPH receptor A5 (EphA5), EPH receptor A6 (EphA6), EPH receptor A7 (EphA7), EPH receptor A8 (EphA8), EPH receptor A10 (EphAlO), EPH receptor B1 (EphB1), EPH receptor B2 (EphB2), EPH receptor B3 (EphB3), EPH receptor B4 (EphB4), EPH receptor B6 (EphB6), ret proto oncogene (Ret), receptor-like tyrosine kinase (RYK), discoidin domain receptor tyrosine kinase 1 (DDR1), discoidin domain receptor tyrosine kinase 2 (DDR2), c-ros oncogene 1, receptor tyrosine kinase (ROS), apoptosis associated tyrosine kinase (Lmrl), lemur tyrosine kinase 2 (Lmr2), lemur tyrosine kinase 3 (Lmr3), leukocyte receptor tyrosine kinase (LTK), ALK receptor tyrosine kinase (ALK), or serine/threonine/tyrosine kinase 1 (STYK1).

iv. Costimulatory Domain

[0434] In certain embodiments, the CAR comprises a costimulatory domain. In some embodiments, the costimulatory domain comprises 4-1BB (CD137), CD28, or both, and/or an intracellular T cell signaling domain. In a preferred embodiment, the costimulatory domain is human CD28, human 4-1BB, or both, and the intracellular T cell signaling domain is human CD3 zeta (ζ). 4-1BB, CD28, CD3 zeta may comprise less than the whole 4-1BB, CD28 or CD3 zeta, respectively. Chimeric antigen receptors may incorporate costimulatory (signaling) domains to increase their potency. See U.S. Pat. Nos. 7,741,465, and 6,319,494, as well as Krause et al. and Finney et al. (supra), Song et al., Blood 119:696-706 (2012); Kalos et al., Sci Transl. Med. 3:95 (2011); Porter et al., N. Engl. J. Med. 365:725-33 (2011), and Gross et al., Amur. Rev. Pharmacol. Toxicol. 56:59-83 (2016).

[0435] In some embodiments, a costimulatory domain comprises the amino acid sequence of SEQ ID NO: 3544 or 3546.

v. Intracellular Signalling Domain

[0436] The intracellular (signaling) domain of the engineered T cells disclosed herein may provide signaling to an activating domain, which then activates at least one of the normal effector functions of the immune cell. Effector function of a T cell, for example, may be cytolytic activity or helper activity including the secretion of cytokines.

[0437] In some embodiments, suitable intracellular signaling domain include (e.g., comprise), but are not limited to 4-1BB/CD137, activating NK cell receptors, an Immunoglobulin protein, B7-H3, BAFFR, BLAME (SLAMF8), BTLA, CD100 (SEMA4D), CD103, CD160 (BY55), CD18, CD19, CD 19a, CD2, CD247, CD27, CD276 (B7-H3), CD28, CD29, CD3 delta, CD3 epsilon, CD3 gamma, CD30, CD4, CD40, CD49a, CD49D, CD49f, CD69, CD7, CD84, CD8alpha, CD8beta, CD96 (Tactile), CD11a, CD11b, CD11c, CD11d, CDS, CEACAM1, CRT AM, cytokine receptor, DAP-10, DNAM1 (CD226), Fc gamma receptor, GADS, GITR, HVEM (LIGHTR), IA4, ICAM-1, Ig alpha (CD79a), IL-2R beta, IL-2R gamma, IL-7R alpha, inducible T cell costimulator (ICOS), integrins, ITGA4, ITGA6, ITGAD, ITGAE, ITGAL, ITGAM, ITGAX, ITGB2, ITGB7, ITGB1, KIRDS2, LAT, LFA-1, ligand that specifically binds with CD83, LIGHT, LTBR, Ly9 (CD229), Lyl08, lymphocyte function-associated antigen-1 (LFA-1; CD1-1a/CD18), MHC class 1 molecule, NKG2C, NKG2D, NKp30, NKp44, NKp46, NKp80 (KLRF1), OX-40, PAG/Cbp, programmed death-1 (PD-1), PSGL¹, SELPLG (CD162), Signaling Lymphocytic Activation Molecules (SLAM proteins), SLAM (SLAMF1; CD150; IPO-3), SLAMF4 (CD244; 2B4), SLAMF6 (NTB-A), SLAMF7, SLP-76, TNF receptor proteins, TNFR2, TNFSF14, a Toll ligand receptor, TRANCE/RANKL, VLA1, or VLA-6, or a fragment, truncation, or a combination thereof.

[0438] CD3 is an element of the T cell receptor on native T cells, and has been shown to be an important intracellular activating element in CARs. In some embodiments, the CD3 is CD3 zeta. In some embodiments, the activating domain comprises an amino acid sequence at least about 60%, at least about 65%, at least about 70%, at least about 75%, at least about 80%, at least about 85%, at least about 90%, at least about 95%, at least about 96%, at least about 97%, at least about 98%, at least about 99%, or about 100% identical to the polypeptide sequence of SEQ ID NO: 3545.

b. T-Cell Receptors (TCR)

[0439] TCRs are described using the International Immunogenetics (IMGT) TCR nomenclature, and links to the IMGT public database of TCR sequences. Native alpha-beta heterodimeric TCRs have an alpha chain and a beta chain. Broadly, each chain may comprise variable, joining and constant regions, and the beta chain also usually contains a short diversity region between the variable and joining regions, but this diversity region is often considered as part of the joining region. Each variable region may comprise three CDRs (Complementarity Determining Regions) embedded in a framework sequence, one being the hypervariable region named CDR3. There are several types of alpha chain variable (Vα) regions and several types of beta chain variable (Vβ) regions distinguished by their framework, CDR1 and CDR2 sequences, and by a partly defined CDR3 sequence. The Vu types are referred to in IMGT nomenclature by a unique TRAV number. Thus “TRAV21” defines a TCR Vu region having unique framework and CDR1 and CDR2 sequences, and a CDR3 sequence which is partly defined by an amino acid sequence which is preserved from TCR to TCR but which also includes an amino acid sequence which varies from TCR to TCR. In the same way, “TRBV5-1” defines a TCR Vβ region having unique framework and CDR1 and CDR2 sequences, but with only a partly defined CDR3 sequence.

[0440] The joining regions of the TCR are similarly defined by the unique IMGT TRAJ and TRBJ nomenclature, and the constant regions by the IMGT TRAC and TRBC nomenclature.

[0441] The beta chain diversity region is referred to in IMGT nomenclature by the abbreviation TRBD, and, as mentioned, the concatenated TRBD/TRBJ regions are often considered together as the joining region.

[0442] The unique sequences defined by the IMGT nomenclature are widely known and accessible to those working in the TCR field. For example, they can be found in the IMGT public database. The “T cell Receptor Factsbook”, (2001) LeFranc and LeFranc, Academic Press, ISBN 0-12-441352-8 also discloses sequences defined by the IMGT nomenclature, but because of its publication date and consequent time-lag, the information therein sometimes needs to be confirmed by reference to the IMGT database.

[0443] Native TCRs exist in heterodimeric αβ or γδ forms. However, recombinant TCRs consisting of ac or RR homodimers have previously been shown to bind to peptide MHC molecules. Therefore, the TCR of the invention may be a heterodimeric αβ TCR or may be an as or RR homodimeric TCR.

[0444] For use in adoptive therapy, an ap heterodimeric TCR may, for example, be transfected as full length chains having both cytoplasmic and transmembrane domains. In certain embodiments TCRs of the invention may have an introduced disulfide bond between residues of the respective constant domains, as described, for example, in WO 2006/000830.

[0445] TCRs of the invention, particularly alpha-beta heterodimeric TCRs, may comprise an alpha chain TRAC constant domain sequence and/or a beta chain TRBC1 or TRBC2 constant domain sequence. The alpha and beta chain constant domain sequences may be modified by truncation or substitution to delete the native disulfide bond between Cys4 of exon 2 of TRAC and Cys2 of exon 2 of TRBC1 or TRBC2. The alpha and/or beta chain constant domain sequence(s) may also be modified by substitution of cysteine residues for Thr 48 of TRAC and Ser 57 of TRBC1 or TRBC2, the said cysteines forming a disulfide bond between the alpha and beta constant domains of the TCR.

[0446] Binding affinity (inversely proportional to the equilibrium constant K_{D}) and binding half-life (expressed as T½) can be determined by any appropriate method. It will be appreciated that doubling the affinity of a TCR results in halving the K_{D}. T½ is calculated as ln 2 divided by the off-rate (koff). So doubling of T½ results in a halving in koff. K_{D} and koff values for TCRs are usually measured for soluble forms of the TCR, i.e. those forms which are truncated to remove cytoplasmic and transmembrane domain residues. Therefore it is to be understood that a given TCR has an improved binding affinity for, and/or a binding half-life for the parental TCR if a soluble form of that TCR has the said characteristics. Preferably the binding affinity or binding half-life of a given TCR is measured several times, for example 3 or more times, using the same assay protocol, and an average of the results is taken.

[0447] Since the TCRs of the invention have utility in adoptive therapy, the invention includes a non-naturally occurring and/or purified and/or or engineered cell, especially a T-cell, presenting a TCR of the invention. There are a number of methods suitable for the transfection of T cells with nucleic acid (such as DNA, cDNA or RNA) encoding the TCRs of the invention (see for example Robbins et al., (2008) J Immunol. 180: 6116-6131). T cells expressing the TCRs of the invention will be suitable for use in adoptive therapy-based treatment of cancers such as those of the pancreas and liver. As will be known to those skilled in the art, there are a number of suitable methods by which adoptive therapy can be carried out (see for example Rosenberg et al., (2008) Nat Rev Cancer 8(4): 299-308).

[0448] As is well-known in the art TCRs of the invention may be subject to post-translational modifications when expressed by transfected cells. Glycosylation is one such modification, which may comprise the covalent attachment of oligosaccharide moieties to defined amino acids in the TCR chain. For example, asparagine residues, or serine/threonine residues are well-known locations for oligosaccharide attachment. The glycosylation status of a particular protein depends on a number of factors, including protein sequence, protein conformation and the availability of certain enzymes. Furthermore, glycosylation status (i.e oligosaccharide type, covalent linkage and total number of attachments) can influence protein function. Therefore, when producing recombinant proteins, controlling glycosylation is often desirable. Glycosylation of transfected TCRs may be controlled by mutations of the transfected gene (Kuball J et al. (2009), J Exp Med 206(2):463-475). Such mutations are also encompassed in this invention.

[0449] A TCR may be specific for an antigen in the group MAGE-A1, MAGE-A2, MAGE-A3, MAGE-A4, MAGE-A5, MAGE-A6, MAGE-A7, MAGE-A8, MAGE-A9, MAGE-A10, MAGE-All, MAGE-A12, MAGE-A13, GAGE-1, GAGE-2, GAGE-3, GAGE-4, GAGE-5, GAGE-6, GAGE-7, GAGE-8, BAGE-1, RAGE-1, LB33/MUM-1, PRAME, NAG, MAGE-Xp2 (MAGE-B2), MAGE-Xp3 (MAGE-B3), MAGE-Xp4 (AGE-B4), tyrosinase, brain glycogen phosphorylase, Melan-A, MAGE-C1, MAGE-C2, NY-ESO-1, LAGE-1, SSX-1, SSX-2(HOM-MEL-40), SSX-1, SSX-4, SSX-5, SCP-1, CT-7, alpha-actinin-4, Bcr-Abl fusion protein, Casp-8, beta-catenin, cdc27, cdk4, cdkn2a, coa-1, dek-can fusion protein, EF2, ETV6-AML¹ fusion protein, LDLR-fucosyltransferaseAS fusion protein, HLA-A2, HLA-A11, hsp70-2, KIAAO205, Mart2, Mum-2, and 3, neo-PAP, myosin class I, OS-9, pml-RARa fusion protein, PTPRK, K-ras, N-ras, Triosephosphate isomeras, GnTV, Herv-K-mel, Lage-1, Mage-C2, NA-88, Lage-2, SP17, and TRP2-Int2, (MART-I), gp100 (Pmel 17), TRP-1, TRP-2, MAGE-1, MAGE-3, p15(58), CEA, NY-ESO (LAGE), SCP-1, Hom/Mel-40, p53, H-Ras, HER-2/neu, BCR-ABL, E2A-PRL, H4-RET, IGH-IGK, MYL-RAR, Epstein Barr virus antigens, EBNA, human papillomavirus (HPV) antigens E6 and E7, TSP-180, MAGE-4, MAGE-5, MAGE-6, p185erbB2, p180erbB-3, c-met, nm-23H1, PSA, TAG-72-4, CA 19-9, CA 72-4, CAM 17.1, NuMa, K-ras, beta-catenin, CDK4, Mum-1, p16, TAGE, PSMA, PSCA, CT7, telomerase, 43-9F, 5T4, 791Tgp72, α-fetoprotein, 13HCG, BCA225, BTAA, CA 125, CA 15-3 (CA 27.29\BCAA), CA 195, CA 242, CA-50, CAM43, CD68\KP1, CO-029, FGF-5, G250, Ga733 (EpCAM), HTgp-175, M344, MA-50, MG7-Ag, MOV18, NB\170K, NY-CO-1, RCAS1, SDCCAG16, TA-90 (Mac-2 binding protein\cyclophilin C-associated protein), TAAL⁶, TAG72, TLP, and TPS.

c. B-Cell Receptors (BCR)

[0450] B-cell receptors (BCRs) or B-cell antigen receptors are immunoglobulin molecules that form a type I transmembrane protein on the surface of a B cell. A BCR is capable of transmitting activatory signal into a B cell following recognition of a specific antigen. Prior to binding of a B cell to an antigen, the BCR will remain in an unstimulated or “resting” stage. Binding of an antigen to a BCR leads to signaling that initiates a humoral immune response.

[0451] A BCR is expressed by mature B cells. These B cells work with immunoglobulins (Igs) in recognizing and tagging pathogens. The typical BCR comprises a membrane-bound immunoglobulin (e.g., mIgA, mIgD, mIgE, mIgG, and mIgM), along with associated and Iga/Igp (CD79a/CD79b) heterodimers (u/p). These membrane-bound immunoglobulins are tetramers consisting of two identical heavy and two light chains. Within the BCR, the membrane bound immunoglobulins is capable of responding to antigen binding by signal transmission across the plasma membrane leading to B cell activation and consequently clonal expansion and specific antibody production (Friess M et al. (2018), Front. Immunol. 2947(9)). The Iga/Igp heterodimers is responsible for transducing signals to the cell interior.

[0452] A Igα/Igβ heterodimer signaling relies on the presence of immunoreceptor tyrosine-based activation motifs (ITAMs) located on each of the cytosolic tails of the heterodimers. ITAMs comprise two tyrosine residues separated by 9-12 amino acids (e.g., tyrosine, leucine, and/or valine). Upon binding of an antigen, the tyrosine of the BCR's ITAMs become phosphorylated by Src-family tyrosine kinases Blk, Fyn, or Lyn (Janeway C et al., Immunobiology: The Immune System in Health and Disease (Garland Science, 5th ed. 2001)).

d. Other Chimeric Proteins

[0453] In addition to the chimeric proteins provided above, the circular RNA polynucleotide may encode for a various number of other chimeric proteins available in the art. The chimeric proteins may include recombinant fusion proteins, chimeric mutant protein, or other fusion proteins.

### B. Immune Modulatory Ligands

[0454] In some embodiments, the circular RNA polynucleotide encodes for an immune modulatory ligand. In certain embodiments, the immune modulatory ligand may be immunostimulatory; while in other embodiments, the immune modulatory ligand may be immunosuppressive.

a. Cytokines: Interferon, Chemokines, Interleukins, Growth Factor & Others

[0455] In some embodiments, the circular RNA polynucleotide encodes for a cytokine. In some embodiments, the cytokine comprises a chemokine, interferon, interleukin, lymphokine, and tumor necrosis factor. Chemokines are chemotactic cytokine produced by a variety of cell types in acute and chronic inflammation that mobilizes and activates white blood cells. An interferon comprises a family of secreted α-helical cytokines induced in response to specific extracellular molecules through stimulation of TLRs (Borden, Molecular Basis of Cancer (Fourth Edition) 2015). Interleukins are cytokines expressed by leukocytes.

[0456] Descriptions and/or amino acid sequences of IL-2, IL-7, IL-10, IL-12, IL-15, IL-18, IL-27β, IFNγ, and/or TGFβ1 are provided herein and at the www.uniprot.org database at accession numbers: P60568 (IL-2), P29459 (IL-12A), P29460 (IL-12B), P13232 (IL-7), P22301 (IL-10), P40933 (IL-15), Q14116 (IL-18), Q14213 (IL-270), P01579 (IFNγ), and/or P01137 (TGFβ1).

### C. Transcription Factors

[0457] Regulatory T cells (Treg) are important in maintaining homeostasis, controlling the magnitude and duration of the inflammatory response, and in preventing autoimmune and allergic responses.

[0458] In general, Tregs are thought to be mainly involved in suppressing immune responses, functioning in part as a “self-check” for the immune system to prevent excessive reactions. In particular, Tregs are involved in maintaining tolerance to self-antigens, harmless agents such as pollen or food, and abrogating autoimmune disease.

[0459] Tregs are found throughout the body including, without limitation, the gut, skin, lung, and liver. Additionally, Treg cells may also be found in certain compartments of the body that are not directly exposed to the external environment such as the spleen, lymph nodes, and even adipose tissue. Each of these Treg cell populations is known or suspected to have one or more unique features and additional information may be found in Lehtimaki and Lahesmaa, Regulatory T cells control immune responses through their non-redundant tissue specific features, 2013, FRONTIERS IN IMMUNOL., 4(294): 1-10, the disclosure of which is hereby incorporated in its entirety.

[0460] Typically, Tregs are known to require TGF-β and IL-2 for proper activation and development. Tregs, expressing abundant amounts of the IL-2 receptor (IL-2R), are reliant on IL-2 produced by activated T cells. Tregs are known to produce both IL-10 and TGF-β, both potent immune suppressive cytokines. Additionally, Tregs are known to inhibit the ability of antigen presenting cells (APCs) to stimulate T cells. One proposed mechanism for APC inhibition is via CTLA-4, which is expressed by Foxp3+ Tregs. It is thought that CTLA-4 may bind to B7 molecules on APCs and either block these molecules or remove them by causing internalization resulting in reduced availability of B7 and an inability to provide adequate co-stimulation for immune responses. Additional discussion regarding the origin, differentiation and function of Tregs may be found in Dhamne et al., Peripheral and thymic Foxp3+ regulatory T cells in search of origin, distinction, and function, 2013, Frontiers in Immunol., 4 (253): 1-11, the disclosure of which is hereby incorporated in its entirety.

### D. Checkpoint Inhibitors & Agonists

[0461] As provided herein, in certain embodiments, the coding element of the circular RNA encodes for one or more checkpoint inhibitors or agonists.

[0462] In some embodiments, the immune checkpoint inhibitor is an inhibitor of Programmed Death-Ligand 1 (PD-L¹, also known as B7-H1, CD274), Programmed Death 1 (PD-1), CTLA-4, PD-L² (B7-DC, CD273), LAG3, TIM3, 2B4, A2aR, B7H1, B7H3, B7H4, BTLA, CD2, CD27, CD28, CD30, CD40, CD70, CD80, CD86, CD137, CD160, CD226, CD276, DR3, GAL⁹, GITR, HAVCR2, HVEM, IDO1, ID02, ICOS (inducible T cell costimulator), KIR, LAIRI, LIGHT, MARCO (macrophage receptor with collageneous structure), PS (phosphatidylserine), OX-40, SLAM, TIGHT, VISTA, VTCN1, or any combinations thereof. In some embodiments, the immune checkpoint inhibitor is an inhibitor of IDO1, CTLA4, PD-1, LAG3, PD-L¹, TIM3, or combinations thereof. In some embodiments, the immune checkpoint inhibitor is an inhibitor of PD-L¹. In some embodiments, the immune checkpoint inhibitor is an inhibitor of PD-1. In some embodiments, the immune checkpoint inhibitor is an inhibitor of CTLA-4. In some embodiments, the immune checkpoint inhibitor is an inhibitor of LAG3. In some embodiments, the immune checkpoint inhibitor is an inhibitor of TIM3. In some embodiments, the immune checkpoint inhibitor is an inhibitor of IDO1.

[0463] As described herein, at least in one aspect, the invention encompasses the use of immune checkpoint antagonists. Such immune checkpoint antagonists include antagonists of immune checkpoint molecules such as Cytotoxic T-Lymphocyte Antigen 4 (CTLA-4), Programmed Cell Death Protein 1 (PD-1), Programmed Death-Ligand 1 (PDL-1), Lymphocyte-activation gene 3 (LAG-3), and T-cell immunoglobulin and mucin domain 3 (TIM-3). An antagonist of CTLA-4, PD-1, PDL-1, LAG-3, or TIM-3 interferes with CTLA-4, PD-1, PDL-1, LAG-3, or TIM-3 function, respectively. Such antagonists of CTLA-4, PD-1, PDL-1, LAG-3, and TIM-3 can include antibodies which specifically bind to CTLA-4, PD-1, PDL-1, LAG-3, and TIM-3, respectively and inhibit and/or block biological activity and function.

### E. Others

[0464] In some embodiments, the payload encoded within one or more of the coding elements is a hormone, FC fusion protein, anticoagulant, blood clotting factor, protein associated with deficiencies and genetic disease, a chaperone protein, an antimicrobial protein, an enzyme (e.g., metabolic enzyme), a structural protein (e.g., a channel or nuclear pore protein), protein variant, small molecule, antibody, nanobody, an engineered non-body antibody, or a combination thereof.

### 4. Additional Accessory Elements (Sequence Elements)

[0465] As described in this invention, the circular RNA polynucleotide, linear RNA polynucleotide, and/or DNA template may further comprise of accessory elements. In certain embodiments, these accessory elements may be included within the sequences of the circular RNA, linear RNA polynucleotide and/or DNA template for enhancing circularization, translation or both. Accessory elements are sequences, in certain embodiments that are located with specificity between or within the enhanced intron elements, enhanced exon elements, or core functional element of the respective polynucleotide. As an example, but not intended to be limiting, an accessory element includes, a IRES transacting factor region, a miRNA binding site, a restriction site, an RNA editing region, a structural or sequence element, a granule site, a zip code element, an RNA trafficking element or another specialized sequence as found in the art that enhances promotes circularization and/or translation of the protein encoded within the circular RNA polynucleotide.

a. IRES Transacting Factors

[0466] In certain embodiments, the accessory element comprises an IRES transacting factor (ITAF) region. In some embodiments, the IRES transacting factor region modulates the initiation of translation through binding to PCBP1-PCBP4 (polyC binding protein), PABP1 (polyA binding protein), PTB (polyprimidine tract binding), Argonaute protein family, HNRNPK (Heterogeneous nuclear ribonucleoprotein K protein), or La protein. In some embodiments, the IRES transacting factor region comprises a polyA, polyC, polyAC, or polyprimidine track.

[0467] In some embodiments, the ITAF region is located within the core functional element. In some embodiments, the ITAF region is located within the TIE.

B. miRNA Binding Sites

[0468] In certain embodiments, the accessory element comprises a miRNA binding site. In some embodiments the miRNA binding site is located within the 5′ enhanced intron element, 5′ enhanced exon element, core functional element, 3′ enhanced exon element, and/or 3′ enhanced intron element.

[0469] In some embodiments, wherein the miRNA binding site is located within the spacer within the enhanced intron element or enhanced exon element. In certain embodiments, the miRNA binding site comprises the entire spacer regions.

[0470] In some embodiments, the 5′ enhanced intron element and 3′ enhanced intron elements each comprise identical miRNA binding sites. In another embodiment, the miRNA binding site of the 5′ enhanced intron element comprises a different, in length or nucleotides, miRNA binding site than the 3′ enhanced intron element. In one embodiment, the 5′ enhanced exon element and 3′ enhanced exon element comprise identical miRNA binding sites. In other embodiments, the 5′ enhanced exon element and 3′ enhanced exon element comprises different, in length or nucleotides, miRNA binding sites.

[0471] In some embodiments, the miRNA binding sites are located adjacent to each other within the circular RNA polynucleotide, linear RNA polynucleotide precursor, and/or DNA template. In certain embodiments, the first nucleotide of one of the miRNA binding sites follows the first nucleotide last nucleotide of the second miRNA binding site.

[0472] In some embodiments, the miRNA binding site is located within a translation initiation element (TIE) of a core functional element. In one embodiment, the miRNA binding site is located before, trailing or within an internal ribosome entry site (IRES). In another embodiment, the miRNA binding site is located before, trailing, or within an aptamer complex.

[0473] Incorporation of miRNA sequences within a circular RNA molecule can permit tissue-specific expression of a coding sequence within a core functional element. For example, in a circular RNA intended to express a protein in immune cells, miRNA binding sequences resulting in expression suppression in tissues such as the liver or kidney may be desired. Such miRNA binding sequences may be selected based on the cell or tissue expression of miRNAs.

[0474] The unique sequences defined by the miRNA nomenclature are widely known and accessible to those working in the microRNA field. For example, they can be found in the miRDB public database.

### 5. Production of Polynucleotides

[0475] The DNA templates provided herein can be made using standard techniques of molecular biology. For example, the various elements of the vectors provided herein can be obtained using recombinant methods, such as by screening cDNA and genomic libraries from cells, or by deriving the polynucleotides from a DNA template known to include the same.

[0476] The various elements of the DNA template provided herein can also be produced synthetically, rather than cloned, based on the known sequences. The complete sequence can be assembled from overlapping oligonucleotides prepared by standard methods and assembled into the complete sequence. See, e.g., Edge, Nature (1981) 292:756; Nambair et al., Science (1984)223: 1299; and Jay et al., J. Biol. Chem. (1984) 259:631 1.

[0477] Thus, particular nucleotide sequences can be obtained from DNA template harboring the desired sequences or synthesized completely, or in part, using various oligonucleotide synthesis techniques known in the art, such as site-directed mutagenesis and polymerase chain reaction (PCR) techniques where appropriate. One method of obtaining nucleotide sequences encoding the desired DNA template elements is by annealing complementary sets of overlapping synthetic oligonucleotides produced in a conventional, automated polynucleotide synthesizer, followed by ligation with an appropriate DNA ligase and amplification of the ligated nucleotide sequence via PCR. See, e.g., Jayaraman et al., Proc. Natl. Acad. Sci. USA (1991) 88:4084-4088. Additionally, oligonucleotide-directed synthesis (Jones et al., Nature (1986) 54:75-82), oligonucleotide directed mutagenesis of preexisting nucleotide regions (Riechmann et al., Nature (1988) 332:323-327 and Verhoeyen et al., Science (1988) 239: 1534-1536), and enzymatic filling-in of gapped oligonucleotides using T4 DNA polymerase (Queen et al., Proc. Natl. Acad. Sci. USA (1989) 86: 10029-10033) can be used.

[0478] The precursor RNA provided herein can be generated by incubating a DNA template provided herein under conditions permissive of transcription of the precursor RNA encoded by the DNA template. For example, in some embodiments a precursor RNA is synthesized by incubating a DNA template provided herein that comprises an RNA polymerase promoter upstream of its 5′ duplex sequence and/or expression sequences with a compatible RNA polymerase enzyme under conditions permissive of in vitro transcription. In some embodiments, the DNA template is incubated inside of a cell by a bacteriophage RNA polymerase or in the nucleus of a cell by host RNA polymerase II.

[0479] In certain embodiments, provided herein is a method of generating precursor RNA by performing in vitro transcription using a DNA template provided herein as a template (e.g., a vector provided herein with an RNA polymerase promoter positioned upstream of the 5′ duplex region).

[0480] In certain embodiments, the resulting precursor RNA can be used to generate circular RNA (e.g., a circular RNA polynucleotide provided herein) by incubating it in the presence of magnesium ions and guanosine nucleotide or nucleoside at a temperature at which RNA circularization occurs (e.g., between 20° C. and 60° C.).

[0481] Thus, in certain embodiments provided herein is a method of making circular RNA. In certain embodiments, the method comprises synthesizing precursor RNA by transcription (e.g., run-off transcription) using a vector provided herein (e.g., a 5′ enhanced intron element, a 5′ enhanced exon element, a core functional element, a 3′ enhanced exon element, and a 3′ enhanced intron element) as a template, and incubating the resulting precursor RNA in the presence of divalent cations (e.g., magnesium ions) and GTP such that it circularizes to form circular RNA. In some embodiments, the precursor RNA disclosed herein is capable of circularizing in the absence of magnesium ions and GTP and/or without the step of incubation with magnesium ions and GTP. It has been discovered that circular RNA has reduced immunogenicity relative to a corresponding mRNA, at least partially because the mRNA contains an immunogenic 5′ cap. When transcribing a DNA vector from certain promoters (e.g., a T7 promoter) to produce a precursor RNA, it is understood that the 5′ end of the precursor RNA is G. To reduce the immunogenicity of a circular RNA composition that contains a low level of contaminant linear mRNA, an excess of GMP relative to GTP can be provided during transcription such that most transcripts contain a 5′ GMP, which cannot be capped. Therefore, in some embodiments, transcription is carried out in the presence of an excess of GP. In some embodiments, transcription is carried out where the ratio of GMP concentration to GTP concentration is within the range of about 3:1 to about 15:1, for example, about 3:1 to about 10:1, about 3:1 to about 5:1, about 3:1, about 4:1, or about 5:1.

[0482] In some embodiments, a composition comprising circular RNA has been purified. Circular RNA may be purified by any known method commonly used in the art, such as column chromatography, gel filtration chromatography, and size exclusion chromatography. In some embodiments, purification comprises one or more of the following steps: phosphatase treatment, HPLC size exclusion purification, and RNase R digestion. In some embodiments, purification comprises the following steps in order: RNase R digestion, phosphatase treatment, and HPLC size exclusion purification. In some embodiments, purification comprises reverse phase HPLC. In some embodiments, a purified composition contains less double stranded RNA, DNA splints, triphosphorylated RNA, phosphatase proteins, protein ligases, capping enzymes and/or nicked RNA than unpurified RNA. In some embodiments, purification of circular RNA comprises an affinity-purification or negative selection method described herein. In some embodiments, purification of circular RNA comprises separation of linear RNA from circular RNA using oligonucleotides that are complementary to a sequence in the linear RNA but are not complementary to a sequence in the circular RNA. In some embodiments, a purified composition is less immunogenic than an unpurified composition. In some embodiments, immune cells exposed to a purified composition produce less TNFα, RIG-I, IL-2, IL-6, IFNγ, and/or a type 1 interferon, e.g., IFN-β1, than immune cells exposed to an unpurified composition.

### 6. Overview of Transfer Vehicle & Other Delivery Mechanisms

### A. Ionizable Lipids

[0483] In certain embodiments disclosed herein are ionizable lipids that may be used as a component of a transfer vehicle to facilitate or enhance the delivery and release of circular RNA to one or more target cells (e.g., by permeating or fusing with the lipid membranes of such target cells). In certain embodiments, an ionizable lipid comprises one or more cleavable functional groups (e.g., a disulfide) that allow, for example, a hydrophilic functional head-group to dissociate from a lipophilic functional tail-group of the compound (e.g., upon exposure to oxidative, reducing or acidic conditions), thereby facilitating a phase transition in the lipid bilayer of the one or more target cells.

[0484] In some embodiments, an ionizable lipid is a lipid as described in international patent application PCT/US2018/058555.

[0485] In some of embodiments, a cationic lipid has the following formula:

wherein:
[0486] R₁ and R₂ are either the same or different and independently optionally substituted C₁₀-C₂₄ alkyl, optionally substituted C₁₀-C₂₄ alkenyl, optionally substituted C₁₀-C₂₄ alkynyl, or optionally substituted C₁₀-C₂₄ acyl;
[0487] R₃ and R₄ are either the same or different and independently optionally substituted C₁-C₆ alkyl, optionally substituted C₂-C₆ alkenyl, or optionally substituted C₂-C₆ alkynyl or R₃ and R₄ may join to form an optionally substituted heterocyclic ring of 4 to 6 carbon atoms and 1 or 2 heteroatoms chosen from nitrogen and oxygen;
[0488] R₅ is either absent or present and when present is hydrogen or C₁-C₆ alkyl; m, n, and p are either the same or different and independently either 0 or 1 with the proviso that m, n, and p are not simultaneously 0; q is 0, 1, 2, 3, or 4; and
[0489] Y and Z are either the same or different and independently O, S, or NH.

[0490] In one embodiment, R₁ and R₂ are each linoleyl, and the amino lipid is a dilinoleyl amino lipid.

[0491] In one embodiment, the amino lipid is a dilinoleyl amino lipid.

[0492] In various other embodiments, a cationic lipid has the following structure:

or a pharmaceutically acceptable salt, tautomer, prodrug or stereoisomer thereof, wherein:
[0493] R₁ and R₂ are each independently selected from the group consisting of H and C₁-C₃ alkyls; and
[0494] R₃ and R₄ are each independently an alkyl group having from about 10 to about 20 carbon atoms, wherein at least one of R₃ and R₄ comprises at least two sites of unsaturation.

[0495] In some embodiments, R₃ and R₄ are each independently selected from dodecadienyl, tetradecadienyl, hexadecadienyl, linoleyl, and icosadienyl. In an embodiment, R₃ and R₄ and are both linoleyl. In some embodiments, R₃ and/or R₄ may comprise at least three sites of unsaturation (e.g., R₃ and/or R₄ may be, for example, dodecatrienyl, tetradectrienyl, hexadecatrienyl, linolenyl, and icosatrienyl).

[0496] In some embodiments, a cationic lipid has the following structure:

or a pharmaceutically acceptable salt, tautomer, prodrug or stereoisomer thereof, wherein:
[0497] R₁ and R₂ are each independently selected from H and C₁-C₃ alkyls;
[0498] R₃ and R₄ are each independently an alkyl group having from about 10 to about 20 carbon atoms, wherein at least one of R₃ and R₄ comprises at least two sites of unsaturation.

[0499] In one embodiment, R₃ and R₄ are the same, for example, in some embodiments R₃ and R₄ are both linoleyl (C₁₈-alkyl). In another embodiment, R₃ and R₄ are different, for example, in some embodiments, R₃ is tetradectrienyl (C₁₄-alkyl) and R₄ is linoleyl (Cis-alkyl). In a preferred embodiment, the cationic lipid(s) of the present invention are symmetrical, i.e., R₃ and R₄ are the same. In another preferred embodiment, both R₃ and R₄ comprise at least two sites of unsaturation. In some embodiments, R₃ and R₄ are each independently selected from dodecadienyl, tetradecadienyl, hexadecadienyl, linoleyl, and icosadienyl. In an embodiment, R₃ and R₄ are both linoleyl. In some embodiments, R₃ and/or R₄ comprise at least three sites of unsaturation and are each independently selected from dodecatrienyl, tetradectrienyl, hexadecatrienyl, linolenyl, and icosatrienyl.

[0500] In various embodiments, a cationic lipid has the formula:

or a pharmaceutically acceptable salt, tautomer, prodrug or stereoisomer thereof, wherein:
[0501] Xₐₐ is a D- or L-amino acid residue having the formula —NR^{N}—CR¹R²—C(C═O)—, or a peptide or a peptide of amino acid residues having the formula —{NR^{N}CR¹R²—C(C═O)}ₙ—, wherein n is an integer from 2 to 20;
[0502] R¹ is independently, for each occurrence, a non-hydrogen or a substituted or unsubstituted side chain of an amino acid;
[0503] R² and R^{N} are independently, for each occurrence, hydrogen, an organic group consisting of carbon, oxygen, nitrogen, sulfur, and hydrogen atoms, or any combination of the foregoing, and having from 1 to 20 carbon atoms, C₍₁₋₅₎alkyl, cycloalkyl, cycloalkylalkyl, C₍₁₋₅₎alkenyl, C₍₁₋₅₎alkynyl, C₍₁₋₅₎alkanoyl, C₍₁₋₅₎alkanoyloxy, C₍₁₋₅₎alkoxy, C₍₁₋₅₎alkoxy-C₍₁₋₅₎alkyl, C₍₁₋₅₎alkoxy-C₍₁₋₅₎alkoxy, C₍₁₋₅₎alkyl-amino-C₍₁₋₅₎alkyl-, C₍₁₋₅₎dialkyl-amino-C₍₁₋₅₎alkyl-, nitro-C₍₁₋₅₎alkyl, cyano-C₍₁₋₅₎alkyl, aryl-C₍₁₋₅₎alkyl, 4-biphenyl-C₍₁₋₅₎alkyl, carboxyl, or hydroxyl;
[0504] Z is —NH—, —O—, —S—, —CH₂S—, —CH₂S(O)—, or an organic linker consisting of 1-40 atoms selected from hydrogen, carbon, oxygen, nitrogen, and sulfur atoms (preferably, Z is —NH— or —O—);
[0505] R^{x} and R^{y} are, independently, (i) a lipophilic tail derived from a lipid (which can be naturally occurring or synthetic), e.g., a phospholipid, a glycolipid, a triacylglycerol, a glycerophospholipid, a sphingolipid, a ceramide, a sphingomyelin, a cerebroside, or a ganglioside, wherein the tail optionally includes a steroid; (ii) an amino acid terminal group selected from hydrogen, hydroxyl, amino, and an organic protecting group; or (iii) a substituted or unsubstituted C₍₃₋₂₂₎alkyl, C₍₆₋₁₂₎cycloalkyl, C₍₆₋₁₂₎cycloalkyl-C₍₃₋₂₂₎alkyl, C₍₃₋₂₂₎alkenyl, C₍₃₋₂₂₎alkynyl, C₍₃₋₂₂₎alkoxy, or C₍₆₋₁₂₎-alkoxy C₍₃₋₂₂₎alkyl;
[0506] In some embodiments, one of R^{x} and R^{y} is a lipophilic tail as defined above and the other is an amino acid terminal group. In some embodiments, both R^{x} and R^{y} are lipophilic tails.

[0507] In some embodiments, at least one of R^{x} and R^{y} is interrupted by one or more biodegradable groups (e.g., —OC(O)—, —C(O)O—, —SC(O)—, —C(O)S—, —OC(S)—, —C(S)O—, —S—S—, —C(O)(NR⁵)—, —N(R⁵)C(O)—, —C(S)(NR⁵)—, —N(R⁵)C(O)—, —N(R⁵)C(O)N(R⁵)—, —OC(O)O—, —OSi(R⁵)₂O—, —C(O)(CR³R⁴)C(O)O—, —OC(O)(CR³R⁴)C(O)—, or

[0508] In some embodiments, R¹¹ is a C₂-C₈alkyl or alkenyl.

[0509] In some embodiments, each occurrence of R⁵ is, independently, H or alkyl.

[0510] In some embodiments, each occurrence of R³ and R⁴ are, independently H, halogen, OH, alkyl, alkoxy, —NH₂, alkylamino, or dialkylamino; or R₃ and R₄, together with the carbon atom to which they are directly attached, form a cycloalkyl group. In some particular embodiments, each occurrence of R³ and R⁴ are, independently H or C₁-C₄alkyl.

[0511] In some embodiments, R^{x} and R^{y} each, independently, have one or more carbon-carbon double bonds.

[0512] In some embodiments, the cationic lipid is one of the following:

or a pharmaceutically acceptable salt, tautomer, prodrug or stereoisomer thereof, wherein:
[0513] R₁ and R₂ are each independently alkyl, alkenyl, or alkynyl, each of which can optionally substituted;
[0514] R₃ and R₄ are each independently a C₁-C₆ alkyl, or R₃ and R₄ are taken together to form an optionally substituted heterocyclic ring.

[0515] A representative useful dilinoleyl amino lipid has the formula:

wherein n is 0, 1, 2, 3, or 4.

[0516] In one embodiment, a cationic lipid is DLin-K-DMA. In one embodiment, a cationic lipid is DLin-KC2-DMA (DLin-K-DMA above, wherein n is 2).

[0517] In one embodiment, a cationic lipid has the following structure:

or a pharmaceutically acceptable salt, tautomer, prodrug or stereoisomer thereof, wherein:
[0518] R₁ and R₂ are each independently for each occurrence optionally substituted C₁₀-C₃₀ alkyl, optionally substituted C₁₀-C₃₀ alkenyl, optionally substituted C₁₀-C₃₀ alkynyl or optionally substituted C₁₀-C₃₀ acyl;
[0519] R₃ is H, optionally substituted C₂-C₁₀ alkyl, optionally substituted C₂-C₁₀ alkenyl, optionally substituted C₂-C₁₀ alkylyl, alkylhetrocycle, alkylpbosphate, alkylphosphorothioate, alkylphosphorodithioate, alkylphosphonate, alkylamine, hydroxyalkyl, ω-aminoalkyl, ω-(substituted)aminoalkyl, ω-phosphoalkyl, ω-thiophosphoalkyl, optionally substituted polyethylene glycol (PEG, mw 100-40K), optionally substituted mPEG (mw 120-40K), heteroaryl, or heterocycle, or a linker ligand, for example, in some embodiments, R₃ is (CH₃)₂N(CH₂)ₙ—, wherein n is 1, 2, 3 or 4;
   [0520] E is O, S, N(Q), C(O), OC(O), C(O)O, N(Q)C(O), C(O)N(Q), (Q)N(CO)O, O(CO)N(Q), S(O), NS(O)₂N(Q), S(O)₂, N(Q)S(O)₂, SS, O═N, aryl, heteroaryl, cyclic or heterocycle, for example —C(O)O, wherein — is a point of connection to R₃; and
   [0521] Q is H, alkyl, ω-aminoalkyl, ω-(substituted)aminoalkyl, ω-phosphoalkyl or ω-thiophosphoalkyl.

[0522] In one specific embodiment, the cationic lipid of Embodiments 1, 2, 3, 4 or 5 has the following structure:

or a pharmaceutically acceptable salt, tautomer, prodrug or stereoisomer thereof, wherein:
[0523] E is O, S, N(Q), C(O), N(Q)C(O), C(O)N(Q), (Q)N(CO)O, O(CO)N(Q), S(O), NS(O)₂N(Q), S(O)₂, N(Q)S(O)₂, SS, O═N, aryl, heteroaryl, cyclic or heterocycle;
[0524] Q is H, alkyl, ω-amninoalkyl, ω-(substituted)amninoalky, ω-phosphoalkyl or co-thiophosphoalkyl;
[0525] R₁ and R₂ and Rₓ are each independently for each occurrence H, optionally substituted C₁-C₁₀ alkyl, optionally substituted C₁₀-C₃₀ alkyl, optionally substituted C₁₀-C₃₀ alkenyl, optionally substituted C₁₀-C₃₀, alkynyl, optionally substituted C₁₀-C₃₀ acyl, or linker-ligand, provided that at least one of R₁, R₂ and Rₓ is not H;
[0526] R₃ is H, optionally substituted C₁-C₁₀alkyl, optionally substituted C₂-C₁₀ alkenyl, optionally substituted C₂-C₁₀ alkynyl, alkylhetrocycle, alkylphosphate, alkylphosphorothioate, alkylphosphorodithioate, alkylphosphonate, alkylamine, hydroxyalkyl, ω-aminoalkyl, ω-(substituted)aminoalkyl, ω-phosphoalkyl, ω-thiophosphoalkyl, optionally substituted polyethylene glycol (PEG, mw 100-40K), optionally substituted mPEG (mw 120-40K), heteroaryl, or heterocycle, or linker-ligand; and
[0527] n is 0, 1, 2, or 3.

[0528] In one embodiment, the cationic lipid of Embodiments 1, 2, 3, 4 or 5 has the structure of Formula I:

or a pharmaceutically acceptable salt, tautomer, prodrug or stereoisomer thereof, wherein:
[0529] one of L¹ or L² is —O(C═O)—, —(C═O)O—, —C(═O)—, —O—, —S(O)X—, —S—S—, —C(═O)S—, SC(═O)—, —NRₐC(═O)—, —C(═O)NRₐ—, NRₐC(═O)NRₐ—, —OC(═O)NRₐ— or —NRₐC(═O)O—, and the other of L¹ or L² is —O(C═O)—, —(C═O)O—, —C(═O)—, —O—, —S(O)ₓ—, —S—S—, —C(═O)S—, SC(═O)—, —NRₐC(═O)—, —C(═O)NRₐ—, NRₐC(═O)NRₐ—, —OC(═O)NRₐ- or
   —NRₐC(═O)O— or a direct bond;
[0530] Rₐ is H or C₁-C₁₂ alkyl;
[0531] R^{1a} and R^{1b} are, at each occurrence, independently either (a) H or C₁-C₁₂ alkyl, or (b) R^{1a} is H or C₁-C₁₂ alkyl, and Rib together with the carbon atom to which it is bound is taken together with an adjacent R^{1b} and the carbon atom to which it is bound to form a carbon-carbon double bond;
[0532] R^{2a} and R^{2b} are, at each occurrence, independently either (a) H or C₁-C₁₂ alkyl, or (b) R^{2a} is H or C₁-C₁₂ alkyl, and R^{2b} together with the carbon atom to which it is bound is taken together with an adjacent R^{2b} and the carbon atom to which it is bound to form a carbon-carbon double bond;
[0533] R^{3a} and R^{3b} are, at each occurrence, independently either (a) H or C₁-C₁₂ alkyl, or (b) R^{3a} is H or C₁-C₁₂ alkyl, and R^{3b} together with the carbon atom to which it is bound is taken together with an adjacent R^{3b} and the carbon atom to which it is bound to form a carbon-carbon double bond;
[0534] R^{4a} and R^{4b} are, at each occurrence, independently either (a) H or C₁-C₁₂ alkyl, or (b) R^{4a} is H or C₁-C₁₂ alkyl, and R^{4b} together with the carbon atom to which it is bound is taken together with an adjacent R^{4b} and the carbon atom to which it is bound to form a carbon-carbon double bond;
[0535] R⁵ and R⁶ are each independently methyl or cycloalkyl;
[0536] R⁷ is, at each occurrence, independently H or C₁-C₁₂ alkyl;
[0537] R⁸ and R⁹ are each independently unsubstituted C₁-C₁₂ alkyl; or R⁸ and R⁹, together with the nitrogen atom to which they are attached, form a 5, 6 or 7-membered heterocyclic ring comprising one nitrogen atom;
[0538] a and d are each independently an integer from 0 to 24;
[0539] b and c are each independently an integer from 1 to 24;
[0540] e is 1 or 2; and
[0541] x is 0, 1 or 2.

[0542] In some embodiments of Formula I, L¹ and L² are independently —O(C═O)— or —(C═O)O—.

[0543] In certain embodiments of Formula I, at least one of R¹, R², R^{3a} or R^{4a} is C₁-C₁₂ alkyl, or at least one of L¹ or L² is —O(C═O)— or —(C═O)O—. In other embodiments, R^{1a} and R^{1b} are not isopropyl when a is 6 or n-butyl when a is 8.

[0544] In still further embodiments of Formula I, at least one of R^{1a}, R^{2a}, R^{3a} or R^{4a} is C₁-C₁₂ alkyl, or at least one of L¹ or L² is —O(C═O)— or —(C═O)O—; and
[0545] R^{1a} and R^{1b} are not isopropyl when a is 6 or n-butyl when a is 8.

[0546] In other embodiments of Formula I, R⁸ and R⁹ are each independently unsubstituted C₁-C₁₂ alkyl; or R⁸ and R⁹, together with the nitrogen atom to which they are attached, form a 5, 6 or 7-membered heterocyclic ring comprising one nitrogen atom;

[0547] In certain embodiments of Formula I, any one of L¹ or L² may be —O(C═O)— or a carbon-carbon double bond. L¹ and L² may each be —O(C═O)— or may each be a carbon-carbon double bond.

[0548] In some embodiments of Formula I, one of L¹ or L² is —O(C═O)—. In other embodiments, both L¹ and L² are —O(C═O)—.

[0549] In some embodiments of Formula I, one of L¹ or L² is —(C═O)O—. In other embodiments, both L¹ and L² are —(C═O)O—.

[0550] In some other embodiments of Formula I, one of L¹ or L² is a carbon-carbon double bond. In other embodiments, both L¹ and L² are a carbon-carbon double bond.

[0551] In still other embodiments of Formula I, one of L¹ or L² is —O(C═O)— and the other of L¹ or L² is —(C═O)O—. In more embodiments, one of L¹ or L² is —O(C═O)— and the other of L¹ or L² is a carbon-carbon double bond. In yet more embodiments, one of L¹ or L² is —(C═O)O— and the other of L¹ or L² is a carbon-carbon double bond.

[0552] It is understood that “carbon-carbon” double bond, as used throughout the specification, refers to one of the following structures:

wherein R^{a} and R^{b} are, at each occurrence, independently H or a substituent. For example, in some embodiments R^{a} and R^{b} are, at each occurrence, independently H, C₁-C₁₂ alkyl or cycloalkyl, for example H or C₁-C₁₂ alkyl.

[0553] In other embodiments, the lipid compounds of Formula I have the following Formula (Ia):

[0554] In other embodiments, the lipid compounds of Formula I have the following Formula (Ib):

[0555] In yet other embodiments, the lipid compounds of Formula I have the following Formula (Ic):

[0556] In certain embodiments of the lipid compound of Formula I, a, b, c and d are each independently an integer from 2 to 12 or an integer from 4 to 12. In other embodiments, a, b, c and d are each independently an integer from 8 to 12 or 5 to 9. In some certain embodiments, a is 0. In some embodiments, a is 1. In other embodiments, a is 2. In more embodiments, a is 3. In yet other embodiments, a is 4. In some embodiments, a is 5. In other embodiments, a is 6. In more embodiments, a is 7. In yet other embodiments, a is S. In some embodiments, a is 9. In other embodiments, a is 10. In more embodiments, a is 11. In yet other embodiments, a is 12. In some embodiments, a is 13. In other embodiments, a is 14. In more embodiments, a is 15. In yet other embodiments, a is 16.

[0557] In some other embodiments of Formula I, b is 1. In other embodiments, b is 2. In more embodiments, b is 3. In yet other embodiments, b is 4. In some embodiments, b is 5. In other embodiments, b is 6. In more embodiments, b is 7. In yet other embodiments, b is 8. In some embodiments, b is 9. In other embodiments, b is 10. In more embodiments, b is 11. In yet other embodiments, b is 12. In some embodiments, b is 13. In other embodiments, b is 14. In more embodiments, b is 15. In yet other embodiments, b is 16.

[0558] In some more embodiments of Formula I, c is 1. In other embodiments, c is 2. In more embodiments, c is 3. In yet other embodiments, c is 4. In some embodiments, c is 5. In other embodiments, c is 6. In more embodiments, c is 7. In yet other embodiments, c is 8. In some embodiments, c is 9. In other embodiments, c is 10. In more embodiments, c is 11. In yet other embodiments, c is 12. In some embodiments, c is 13. In other embodiments, c is 14. In more embodiments, c is 15. In yet other embodiments, c is 16.

[0559] In some certain other embodiments of Formula I, d is 0. In some embodiments, d is 1. In other embodiments, d is 2. In more embodiments, d is 3. In yet other embodiments, d is 4. In some embodiments, d is 5. In other embodiments, d is 6. In more embodiments, d is 7. In yet other embodiments, d is 8. In some embodiments, d is 9. In other embodiments, d is 10. In more embodiments, d is 11. In yet other embodiments, d is 12. In some embodiments, d is 13. In other embodiments, d is 14. In more embodiments, d is 15. In yet other embodiments, d is 16.

[0560] In some other various embodiments of Formula I, a and d are the same. In some other embodiments, b and c are the same. In some other specific embodiments, a and d are the same and b and c are the same.

[0561] The sum of a and b and the sum of c and d in Formula I are factors which may be varied to obtain a lipid of formula I having the desired properties. In one embodiment, a and b are chosen such that their sum is an integer ranging from 14 to 24. In other embodiments, c and d are chosen such that their sum is an integer ranging from 14 to 24. In further embodiment, the sum of a and b and the sum of c and d are the same. For example, in some embodiments the sum of a and b and the sum of c and d are both the same integer which may range from 14 to 24. In still more embodiments, a. b, c and d are selected such the sum of a and b and the sum of c and d is 12 or greater.

[0562] In some embodiments of Formula I, e is 1. In other embodiments, e is 2.

[0563] The substituents at R^{1a}, R^{2a}, R^{3a} and R^{4a} of Formula I are not particularly limited. In certain embodiments R^{1a}, R^{2a}, R^{3a} and R^{4a} are H at each occurrence. In certain other embodiments at least one of R^{1a}, R^{2a}, R^{3a} and R^{4a} is C₁-C₁₂ alkyl. In certain other embodiments at least one of R^{1a}, R^{2a}, R^{3a} and R^{4a} is C₁-C₈ alkyl. In certain other embodiments at least one of R^{1a}, R^{2a}, R^{3a} and R^{4a} is C₁-C₆ alkyl. In some of the foregoing embodiments, the C₁-C₅ alkyl is methyl, ethyl, n-propyl, iso-propyl, n-butyl, iso-butyl, tert-butyl, n-hexyl or n-octyl.

[0564] In certain embodiments of Formula t, R^{1a}, R^{1b}, R^{4a} and R^{4b} are C₁-C₁₂ alkyl at each occurrence.

[0565] In further embodiments of Formula I, at least one of R^{1b}, R^{2b}, R^{3b} and R^{4b} is H or R^{1b}, R^{2b}, R^{3b} and R^{4b} are H at each occurrence.

[0566] In certain embodiments of Formula I, R^{1b} together with the carbon atom to which it is bound is taken together with an adjacent R^{1b} and the carbon atom to which it is bound to form a carbon-carbon double bond. In other embodiments of the foregoing R^{4b} together with the carbon atom to which it is bound is taken together with an adjacent R^{4b} and the carbon atom to which it is bound to form a carbon-carbon double bond.

[0567] The substituents at R⁵ and R⁶ of Formula I are not particularly limited in the foregoing embodiments. In certain embodiments one or both of R⁵ or R⁶ is methyl. In certain other embodiments one or both of R⁵ or R⁶ is cycloalkyl for example cyclohexyl. In these embodiments the cycloalkyl may be substituted or not substituted. In certain other embodiments the cycloalkyl is substituted with C₁-C₁₂ alkyl, for example tert-butyl.

[0568] The substituents at R⁷ are not particularly limited in the foregoing embodiments of Formula I. In certain embodiments at least one R⁷ is H. In some other embodiments, R⁷ is H at each occurrence. In certain other embodiments R⁷ is C₁-C₁₂ alkyl.

[0569] In certain other of the foregoing embodiments of Formula I, one of R⁸ or R⁹ is methyl. In other embodiments, both R⁸ and R9 are methyl.

[0570] In some different embodiments of Formula I, R⁸ and R⁹, together with the nitrogen atom to which they are attached, form a 5, 6 or 7-membered heterocyclic ring. In some embodiments of the foregoing, R⁸ and R⁹, together with the nitrogen atom to which they are attached, form a 5-membered heterocyclic ring, for example a pyrrolidinyl ring.

[0571] In some embodiments of Embodiment 3, the first and second cationic lipids are each, independently selected from a lipid of Formula I.

[0572] In various different embodiments, the lipid of Formula I has one of the structures set forth in Table 1 below.

TABLE 1
Representative Lipids of Formula I

| No. | Structure | pKa |
|---|---|---|
| I-1 | | — |
| I-2 | | 5.64 |
| I-3 | | 7.15 |
| I-4 | | 6.43 |
| I-5 | | 6.28 |
| I-6 | | 6.12 |
| I-7 | | — |
| I-8 | | — |
| I-9 | | — |
| I-10 | | — |
| I-11 | | 6.36 |
| I-12 | | — |
| I-13 | | 6.51 |
| I-14 | | — |
| I-15 | | 6.30 |
| I-16 | | 6.63 |
| I-17 | | — |
| I-18 | | — |
| I-19 | | 6.72 |
| I-20 | | 6.44 |
| I-21 | | 6.28 |
| I-22 | | 6.53 |
| I-23 | | 6.24 |
| I-24 | | 6.28 |
| I-25 | | 6.20 |
| I-33 | | 6.27 |
| I-34 | | — |
| I-35 | | 6.21 |
| I-36 | | — |
| I-37 | | — |
| I-38 | | 6.24 |
| I-39 | | 5.82 |
| I-40 | | 6.38 |
| I-41 | | 5.91 |

[0573] In some embodiments, the cationic lipid of Embodiments 1, 2, 3, 4 or 5 has a structure of Formula II:

or a pharmaceutically acceptable salt, tautomer, prodrug or stereoisomer thereof, wherein:
[0574] one of L¹ or L² is —O(C═O)—, —(C═O)O—, —C(═O)—, —O—, —S(O)ₓ—, —S—S—, —C(═O)S—, SC(═O)—, —NR^{a}C(═O)—, —C(═O)NR^{a}—, NR^{a}C(═O)NR^{a}—, —OC(═O)NR^{a}— or —NR^{a}C(═O)O—, and the other of L¹ or L² is O(C═O)—, —(C═O)O—, —C(═O)—, —O—, —S(O)ₓ—, —S—S—, —C(═O)S—, SC(═O)—, —NR^{a}C(═O)—, —C(═O)NR^{a}—, —NR^{a}C(═O)NR^{a}—, —OC(═O)NR^{a}—
   or
   —NR^{a}C(═O)O— or a direct bond;
[0575] G¹ is C₁-C₂ alkylene, —(C═O)—, —O(C═O)—, —SC(═O)—, —NRₐC(═O)— or a direct bond;
[0576] G² is C(═O)—, —(C═O)O—, —C(═O)S—, —C(═O)NRₐ— or a direct bond;
[0577] G³ is C₁-C₆ alkylene;
[0578] R^{a} is H or C₁-C₁ alkyl;
[0579] R^{1a} and R^{1b} are, at each occurrence, independently either: (a) H or C₁-C₁₂ alkyl; or (b) R^{1a} is H or C₁-C₁₂ alkyl, and R^{1b} together with the carbon atom to which it is bound is taken together with an adjacent R^{1b} and the carbon atom to which it is bound to form a carbon-carbon double bond;
[0580] R^{2a} and R^{2b} are, at each occurrence, independently either: (a) H or C₁-C₁₂ alkyl; or (b) R^{2a} is H or C₁-C₁₂ alkyl, and R^{2b} together with the carbon atom to which it is bound is taken together with an adjacent R^{2b} and the carbon atom to which it is bound to form a carbon-carbon double bond;
[0581] R^{3a} and R^{3b} are, at each occurrence, independently either (a): H or C₁-C₁₂ alkyl; or (b) R^{3a} is H or C₁-C₁₂ alkyl, and R^{3b} together with the carbon atom to which it is bound is taken together with an adjacent R^{3b} and the carbon atom to which it is bound to form a carbon-carbon double bond;
[0582] R^{4a} and R^{4b} are, at each occurrence, independently either: (a) H or C₁-C₁₂ alkyl; or (b) R^{4a} is H or C₁-C₁₂ alkyl, and R^{4b} together with the carbon atom to which it is bound is taken together with an adjacent R^{4b} and the carbon atom to which it is bound to form a carbon-carbon double bond;
[0583] R⁵ and R⁶ are each independently H or methyl;
[0584] R⁷ is C₄-C₂₀ alkyl;
[0585] R⁸ and R⁹ are each independently C₁-C₁₂ alkyl; or R⁸ and R⁹, together with the nitrogen atom to which they are attached, form a 5, 6 or 7-membered heterocyclic ring;
[0586] a, b, c and d are each independently an integer from 1 to 24; and
[0587] x is 0, 1 or 2.

[0588] In some embodiments of Formula (II), L¹ and L² are each independently —O(C═O)—, —(C═O)O— or a direct bond. In other embodiments, G¹ and G² are each independently —(C═O)— or a direct bond. In some different embodiments, L¹ and L² are each independently —O(C═O)—, —(C═O)O— or a direct bond; and G¹ and G² are each independently —(C═O)— or a direct bond.

[0589] In some different embodiments of Formula (II), L¹ and L² are each independently —C(═O)—, —O—, —S(O)X—, —S—S—, —C(═O)S—, —SC(═O)—, —NR^{a}—, —NR^{a}C(═O)—, —C(═O)NR^{a}—, —NR^{a}C(═O)NR^{a}, —OC(═O)NR^{a}—, —NR^{a}C(═O)O—, —NR^{a}S(O)ₓNR^{a}—, —NR^{a}S (O)ₓ— or —S(O)ₓNR^{a}—.

[0590] In other of the foregoing embodiments of Formula (II), the lipid compound has one of the following Formulae (IIA) or (IIB):

[0591] In some embodiments of Formula (II), the lipid compound has Formula (IIA). In other embodiments, the lipid compound has Formula (IIB).

[0592] In any of the foregoing embodiments of Formula (II), one of L¹ or L² is —O(C═O)—. For example, in some embodiments each of L¹ and L² are —O(C═O)—.

[0593] In some different embodiments of Formula (II), one of L¹ or L² is —(C═O)O—. For example, in some embodiments each of L¹ and L² is —(C═O)O—.

[0594] In different embodiments of Formula (II), one of L¹ or L² is a direct bond. As used herein, a “direct bond” means the group (e.g., L¹ or L²) is absent. For example, in some embodiments each of L¹ and L² is a direct bond.

[0595] In other different embodiments of Formula (II), for at least one occurrence of R^{1a} and R^{1b}, R^{1a} is H or C₁-C₁₂ alkyl, and R^{1b} together with the carbon atom to which it is bound is taken together with an adjacent R^{1b} and the carbon atom to which it is bound to form a carbon-carbon double bond.

[0596] In still other different embodiments of Formula (II), for at least one occurrence of R^{4a} and R^{4b}, R^{4a} is H or C₁-C₁₂ alkyl, and R^{4b} together with the carbon atom to which it is bound is taken together with an adjacent R^{4b} and the carbon atom to which it is bound to form a carbon-carbon double bond.

[0597] In more embodiments of Formula (II), for at least one occurrence of R^{2a} and R^{2b}, R^{2a} is H or C₁-C₁₂ alkyl, and R^{2b} together with the carbon atom to which it is bound is taken together with an adjacent R^{2b} and the carbon atom to which it is bound to form a carbon-carbon double bond.

[0598] In other different embodiments of Formula (II), for at least one occurrence of R^{3a} and R^{3b}, R^{3a} is H or C₁-C₁₂ alkyl, and R^{3b} together with the carbon atom to which it is bound is taken together with an adjacent R^{3b} and the carbon atom to which it is bound to form a carbon-carbon double bond.

[0599] In various other embodiments of Formula (II), the lipid compound has one of the following Formulae (IIC) or (IID):

wherein e, f, g and h are each independently an integer from 1 to 12.

[0600] In some embodiments of Formula (II), the lipid compound has Formula (IIC). In other embodiments, the lipid compound has Formula (IID).

[0601] In various embodiments of Formulae (IIC) or (IID), e, f, g and h are each independently an integer from 4 to 10.

[0602] In certain embodiments of Formula (II), a, b, c and d are each independently an integer from 2 to 12 or an integer from 4 to 12. In other embodiments, a, b, c and d are each independently an integer from 8 to 12 or 5 to 9. In some certain embodiments, a is 0. In some embodiments, a is 1. In other embodiments, a is 2. In more embodiments, a is 3. In yet other embodiments, a is 4. In some embodiments, a is 5. In other embodiments, a is 6. In more embodiments, a is 7. In yet other embodiments, a is 8. In some embodiments, a is 9. In other embodiments, a is 10. In more embodiments, a is 11. In yet other embodiments, a is 12. In some embodiments, a is 13. In other embodiments, a is 14. In more embodiments, a is 15. In yet other embodiments, a is 16.

[0603] In some embodiments of Formula (II), b is 1. In other embodiments, b is 2. In more embodiments, b is 3. In yet other embodiments, b is 4. In some embodiments, b is 5. In other embodiments, b is 6. In more embodiments, b is 7. In yet other embodiments, b is 8. In some embodiments, b is 9. In other embodiments, b is 10. In more embodiments, b is 11. In yet other embodiments, b is 12. In some embodiments, b is 13. In other embodiments, b is 14. In more embodiments, b is 15. In yet other embodiments, b is 16.

[0604] In some embodiments of Formula (II), c is 1. In other embodiments, c is 2. In more embodiments, c is 3. In yet other embodiments, c is 4. In some embodiments, c is 5. In other embodiments, c is 6. In more embodiments, c is 7. In yet other embodiments, c is 8. In some embodiments, c is 9. In other embodiments, c is 10. In more embodiments, c is 11. In yet other embodiments, c is 12. In some embodiments, c is 13. In other embodiments, c is 14. In more embodiments, c is 15. In yet other embodiments, c is 16.

[0605] In some certain embodiments of Formula (II), d is 0. In some embodiments, d is 1. In other embodiments, d is 2. In more embodiments, d is 3. In yet other embodiments, d is 4. In some embodiments, d is 5. In other embodiments, d is 6. In more embodiments, d is 7. In yet other embodiments, d is 8. In some embodiments, d is 9. In other embodiments, d is 10. In more embodiments, d is 11. In yet other embodiments, d is 12. In some embodiments, d is 13. In other embodiments, d is 14. In more embodiments, d is 15. In yet other embodiments, d is 16.

[0606] In some embodiments of Formula (II), e is 1. In other embodiments, e is 2. In more embodiments, e is 3. In yet other embodiments, e is 4. In some embodiments, e is 5. In other embodiments, e is 6. In more embodiments, e is 7. In yet other embodiments, e is 8. In some embodiments, e is 9. In other embodiments, e is 10. In more embodiments, e is 11. In yet other embodiments, e is 12.

[0607] In some embodiments of Formula (II), f is 1. In other embodiments, f is 2. In more embodiments, f is 3. In yet other embodiments, f is 4. In some embodiments, f is 5. In other embodiments, f is 6. In more embodiments, f is 7. In yet other embodiments, f is 8. In some embodiments, f is 9. In other embodiments, f is 10. In more embodiments, f is 11. In yet other embodiments, f is 12.

[0608] In some embodiments of Formula (II), g is 1. In other embodiments, g is 2. In more embodiments, g is 3. In yet other embodiments, g is 4. In some embodiments, g is 5. In other embodiments, g is 6. In more embodiments, g is 7. In yet other embodiments, g is 8. In some embodiments, g is 9. In other embodiments, g is 10. In more embodiments, g is 11. In yet other embodiments, g is 12.

[0609] In some embodiments of Formula (II), h is 1. In other embodiments, e is 2. In more embodiments, h is 3. In yet other embodiments, h is 4. In some embodiments, e is 5. In other embodiments, h is 6. In more embodiments, h is 7. In yet other embodiments, h is 8. In some embodiments, h is 9. In other embodiments, h is 10. In more embodiments, h is 11. In yet other embodiments, h is 12.

[0610] In some other various embodiments of Formula (II), a and d are the same. In some other embodiments, b and c are the same. In some other specific embodiments and a and d are the same and b and c are the same.

[0611] The sum of a and b and the sum of c and d of Formula (II) are factors which may be varied to obtain a lipid having the desired properties. In one embodiment, a and b are chosen such that their sum is an integer ranging from 14 to 24. In other embodiments, c and d are chosen such that their sum is an integer ranging from 14 to 24. In further embodiment, the sum of a and b and the sum of c and d are the same. For example, in some embodiments the sum of a and b and the sum of c and d are both the same integer which may range from 14 to 24. In still more embodiments, a. b, c and d are selected such that the sum of a and b and the sum of c and d is 12 or greater.

[0612] The substituents at R^{1a}, R^{2a}, R^{3a} and R^{4a} of Formula (II) are not particularly limited. In some embodiments, at least one of R^{1a}, R^{2a}, R^{3a} and R^{4a} is H. In certain embodiments R^{1a}, R^{2a}, R^{3a} and R^{4a} are H at each occurrence. In certain other embodiments at least one of R^{1a}, R^{2a}, R^{3a} and R^{4a} is C₁-C₁₂ alkyl. In certain other embodiments at least one of R^{1a}, R^{2a}, R^{3a} and R^{4a} is C₁-C₈ alkyl. In certain other embodiments at least one of R^{1a}, R^{2a}, R^{3a} and R^{4a} is C₁-C₆ alkyl. In some of the foregoing embodiments, the C₁-C₅ alkyl is methyl, ethyl, n-propyl, iso-propyl, n-butyl, iso-butyl, tert-butyl, n-hexyl or n-octyl.

[0613] In certain embodiments of Formula (II), R^{1a}, R^{1b}, R^{4a} and R^{4b} are C₁-C₁₂ alkyl at each occurrence.

[0614] In further embodiments of Formula (II), at least one of R^{1b}, R^{2b}, R^{3b} and R^{4b} is H or R^{1b}, R^{2b}, R^{3b} and R^{4b} are H at each occurrence.

[0615] In certain embodiments of Formula (II), R^{1b} together with the carbon atom to which it is bound is taken together with an adjacent R^{1b} and the carbon atom to which it is bound to form a carbon-carbon double bond. In other embodiments of the foregoing R^{4b} together with the carbon atom to which it is bound is taken together with an adjacent R^{4b} and the carbon atom to which it is bound to form a carbon-carbon double bond.

[0616] The substituents at R⁵ and R⁶ of Formula (II) are not particularly limited in the foregoing embodiments. In certain embodiments one of R⁵ or R⁶ is methyl. In other embodiments each of R⁵ or R⁶ is methyl.

[0617] The substituents at R⁷ of Formula (II) are not particularly limited in the foregoing embodiments. In certain embodiments R⁷ is C₆-C₁₆ alkyl. In some other embodiments, R⁷ is C₆-C₉ alkyl. In some of these embodiments, R⁷ is substituted with —(C═)OR^{b}, —O(C═O)R^{b}, —C(═O)R^{b}, —OR^{b}, —S(O),R^{b}, —S—SR^{b}, —C(═O)SR^{b}, —SC(═O)R^{b}, —NR^{a}R^{b}, —R^{a}C(═O)R^{b}, —C(═O)NR^{a}R^{b}, —NRₐC(═O)NR^{a}R^{b}, —OC(═O)NR^{a}R^{b}, —NR^{a}C(═O)OR^{a}, —N^{a}S(O)ₓNR^{a}R^{b}, —NR^{a}S(O)ₓR^{b} or —S(O)ₓNR^{a}R^{b}, wherein: R^{a} is H or C₁-C₁₂ alkyl; R^{b} is C₁-C₁₅ alkyl; and x is 0, 1 or 2. For example, in some embodiments R⁷ is substituted with —(C═O)OR^{b} or —O(C═O)R^{b}.

[0618] In some of the foregoing embodiments of Formula (II), R^{b} is branched C₁-C₁₆ alkyl. For example, in some embodiments R^{b} has one of the following structures:

[0619] In certain other of the foregoing embodiments of Formula (II), one of R⁸ or R⁹ is methyl. In other embodiments, both R⁸ and R⁹ are methyl.

[0620] In some different embodiments of Formula (II), R⁸ and R⁹, together with the nitrogen atom to which they are attached, form a 5, 6 or 7-membered heterocyclic ring. In some embodiments of the foregoing, R⁸ and R⁹, together with the nitrogen atom to which they are attached, form a 5-membered heterocyclic ring, for example a pyrrolidinyl ring. In some different embodiments of the foregoing, R⁸ and R⁹, together with the nitrogen atom to which they are attached, form a 6-membered heterocyclic ring, for example a piperazinyl ring.

[0621] In certain embodiments of Embodiment 3, the first and second cationic lipids are each, independently selected from a lipid of Formula II.

[0622] In still other embodiments of the foregoing lipids of Formula (II), G³ is C₂-C₄ alkylene, for example C₃ alkylene. In various different embodiments, the lipid compound has one of the structures set forth in Table 2 below

TABLE 2
Representative Lipids of Formula (II)

| No. | Structure | pKa |
|---|---|---|
| II-1 | | 5.64 |
| II-2 | | — |
| II-3 | | — |
| II-4 | | — |
| II-5 | | 6.27 |
| II-6 | | 6.14 |
| II-7 | | 5.93 |
| II-8 | | 5.35 |
| II-9 | | 6.27 |
| II-10 | | 6.16 |
| II-11 | | 6.13 |
| II-12 | | 6.21 |
| II-13 | | 6.22 |
| II-14 | | 6.33 |
| II-15 | | 6.32 |
| II-16 | | 6.37 |
| II-17 | | 6.27 |
| II-18 | | — |
| II-19 | | — |
| II-20 | | — |
| II-21 | | — |
| II-22 | | — |
| II-23 | | — |
| II-24 | | 6.14 |
| II-25 | | — |
| II-26 | | — |
| II-27 | | — |
| II-28 | | — |
| II-29 | | — |
| II-30 | | — |
| II-31 | | — |
| II-32 | | — |
| II-33 | | — |
| II-34 | | — |
| II-35 | | 5.97 |
| II-36 | | 6.13 |
| II-37 | | 5.61 |
| II-38 | | 6.45 |
| II-39 | | 6.45 |
| II-40 | | 6.57 |
| II-41 | | — |
| II-42 | | — |
| II-43 | | — |
| II-44 | | — |
| II-45 | | — |
| II-46 | | — |

[0623] In some other embodiments, the cationic lipid of Embodiments 1, 2, 3, 4 or 5 has a structure of Formula III:

or a pharmaceutically acceptable salt, prodrug or stereoisomer thereof, wherein: one of L¹ or L² is —O(C═O)—, —(C═O)O—, —C(═O)—, —O—, —S(O)ₓ—, —S—S—, —C(═O)S—, SC(═O)—, —NR^{a}C(═O)—, —C(═O)NR^{a}—, NR^{a}C(═O)NR^{a}—, —OC(═O)NR^{a}— or —NR^{a}C(═O)O—, and the other of L¹ or L² is —O(C═O)—, —(C═O)O—, —C(═O)—, —O—, —S(O)ₓ—, —S—S—, —C(═O)S—, SC(═O)—, —NR^{a}C(═O)—, —C(═O)NR^{a}—, NR^{a}C(═O)NR^{a}—, —OC(═O)NR^{a}—
or
—NR^{a}C(═O)O— or a direct bond;
[0624] G¹ and G² are each independently unsubstituted C₁-C₁₂ alkylene or C₁-C₁₂ alkenylene;
[0625] G³ is C₁-C₂₄ alkylene, C₁-C₂₄ alkenylene, C₃-C₅ cycloalkylene, C₃-C₈ cycloalkenylene;
[0626] R^{a} is H or C₁-C₁₂ alkyl;
[0627] R¹ and R² are each independently C₆-C₂₄ alkyl or C₆-C₂₄ alkenyl;
[0628] R³ is H, OR⁵, CN, —C(═O)OR⁴, —OC(═O)R⁴ or —NR⁵C(═O)R⁴;
[0629] R⁴ is C₁-C₁₂ alkyl;
[0630] R⁵ is H or C₁-C₆ alkyl; and
[0631] x is 0, 1 or 2.

[0632] In some of the foregoing embodiments of Formula (III), the lipid has one of the following Formulae (IIIA) or (IIIB):

wherein:
[0633] A is a 3 to 8-membered cycloalkyl or cycloalkylene ring;
[0634] R⁶ is, at each occurrence, independently H, OH or C₁-C₂₄ alkyl;
[0635] n is an integer ranging from 1 to 15.

[0636] In some of the foregoing embodiments of Formula (III), the lipid has Formula (IIA), and in other embodiments, the lipid has Formula (HIB).

[0637] In other embodiments of Formula (III), the lipid has one of the following Formulae (HIC or (IID):

wherein y and z are each independently integers ranging from 1 to 12.

[0638] In any of the foregoing embodiments of Formula (III), one of L¹ or L² is —O(C═O)—. For example, in some embodiments each of L and L² are —O(C═O)—. In some different embodiments of any of the foregoing, L¹ and L² are each independently —(C═O)O— or —O(C═O)—. For example, in some embodiments each of L¹ and L² is —(C═O)O—.

[0639] In some different embodiments of Formula (III), the lipid has one of the following Formulae (IIIE) or (IIIF):

[0640] In some of the foregoing embodiments of Formula (III), the lipid has one of the following Formulae (IIIG), (IIIH), (IIII), or (IIIJ):

[0641] In some of the foregoing embodiments of Formula (III), n is an integer ranging from 2 to 12, for example from 2 to 8 or from 2 to 4. For example, in some embodiments, n is 3, 4, 5 or 6. In some embodiments, n is 3. In some embodiments, n is 4. In some embodiments, n is 5. In some embodiments, n is 6.

[0642] In some other of the foregoing embodiments of Formula (III), y and z are each independently an integer ranging from 2 to 10. For example, in some embodiments, y and z are each independently an integer ranging from 4 to 9 or from 4 to 6.

[0643] In some of the foregoing embodiments of Formula (III), R⁶ is H. In other of the foregoing embodiments, R⁶ is C₁-C₂₄ alkyl. In other embodiments, R⁶ is OH.

[0644] In some embodiments of Formula (III), G³ is unsubstituted. In other embodiments, G3 is substituted. In various different embodiments, G³ is linear C₁-C₂₄ alkylene or linear C₁-C₂₄ alkenylene.

[0645] In some other foregoing embodiments of Formula (III), R¹ or R², or both, is C₆-C₂₄ alkenyl. For example, in some embodiments, R¹ and R² each, independently have the following structure:

wherein:
[0646] R^{7a} and R^{7b} are, at each occurrence, independently H or C₁-C₁₂ alkyl; and
[0647] a is an integer from 2 to 12,
[0648] wherein R^{7a}, R^{7b} and a are each selected such that R¹ and R² each independently comprise from 6 to 20 carbon atoms. For example, in some embodiments a is an integer ranging from 5 to 9 or from 8 to 12.

[0649] In some of the foregoing embodiments of Formula (III), at least one occurrence of R^{7a} is H. For example, in some embodiments, R^{7a} is H at each occurrence. In other different embodiments of the foregoing, at least one occurrence of R^{7b} is C₁-C₈ alkyl. For example, in some embodiments, C₁-C₈ alkyl is methyl, ethyl, n-propyl, iso-propyl, n-butyl, iso-butyl, tert-butyl, n-hexyl or n-octyl.

[0650] In different embodiments of Formula (III), R¹ or R², or both, has one of the following structures:

[0651] In some of the foregoing embodiments of Formula (III), R³ is OH, CN, —C(═O)OR⁴, —OC(═O)R⁴ or —NHC(═O)R⁴. In some embodiments, R⁴ is methyl or ethyl.

[0652] In some specific embodiments of Embodiment 3, the first and second cationic lipids are each, independently selected from a lipid of Formula III.

[0653] In various different embodiments, a cationic lipid of any one of the disclosed embodiments (e.g., the cationic lipid, the first cationic lipid, the second cationic lipid) of Formula (III) has one of the structures set forth in Table 3 below.

TABLE 3
Representative Compounds of Formula (III)

| No. | Structure | pKa |
|---|---|---|
| III-1 | | 5.89 |
| III-2 | | 6.05 |
| III-3 | | 6.09 |
| III-4 | | 5.60 |
| III-5 | | 5.59 |
| III-6 | | 5.42 |
| III-7 | | 6.11 |
| III-8 | | 5.84 |
| III-9 | | — |
| III-10 | | — |
| III-11 | | — |
| III-12 | | — |
| III-13 | | — |
| III-14 | | — |
| III-15 | | 6.14 |
| III-16 | | 6.31 |
| III-17 | | 6.28 |
| III-18 | | — |
| III-19 | | — |
| III-20 | | 6.36 |
| III-21 | | — |
| III-22 | | 6.10 |
| III-23 | | 5.98 |
| III-24 | | — |
| III-25 | | 6.22 |
| III-26 | | 5.84 |
| III-27 | | 5.77 |
| III-28 | | — |
| III-29 | | — |
| III-30 | | 6.09 |
| III-31 | | — |
| III-32 | | — |
| III-33 | | — |
| III-34 | | — |
| III-35 | | — |
| III-36 | | — |
| III-37 | | — |
| III-38 | | — |
| III-39 | | — |
| III-40 | | — |
| III-41 | | — |
| III-42 | | — |
| III-43 | | — |
| III-44 | | — |
| III-45 | | — |
| III-46 | | — |
| III-47 | | — |
| III-48 | | — |
| III-49 | | — |

[0654] In one embodiment, the cationic lipid of any one of Embodiments 1, 2, 3, 4 or 5 has a structure of Formula (IV):

or a pharmaceutically acceptable salt, prodrug or stereoisomer thereof, wherein:
[0655] one of G¹ or G² is, at each occurrence, —O(C═O)—, —(C═O)O—, —C(═O)—, —O—, —S(O)_{y}—, —S—S—, —C(═O)S—, SC(═O)—, —N(R^{a})C(═O)—, —C(═O)N(R^{a})—, —N(R^{a})C(═O)N(R^{a})—, —OC(═O)N(R^{a})— or —N(R^{a})C(═O)O—, and the other of G¹ or G² is, at each occurrence, —O(C═O)—, —(C═O)O—, —C(═O)—, —O—, —S(O)ₓ—, —S—S—, —C(═O)S—, —SC(═O)—, —N(R^{a})C(═O)—, —C(═O)N(R^{a})—, —N(R^{a})C(═O)N(R^{a})—, —OC(═O)N(R^{a})— or —N(R^{a})C(═O)O— or a direct bond;
[0656] L is, at each occurrence, ˜O(C═O)—, wherein ˜ represents a covalent bond to X;
[0657] X is CR^{a};
[0658] Z is alkyl, cycloalkyl or a monovalent moiety comprising at least one polar functional group when n is 1; or Z is alkylene, cycloalkylene or a polyvalent moiety comprising at least one polar functional group when n is greater than 1;
[0659] R^{a} is, at each occurrence, independently H, C₁-C₁₂ alkyl, C₁-C₁₂ hydroxylalkyl, C₁-C₁₂ aminoalkyl, C₁-C₁₂ alkylaminylalkyl, C₁-C₁₂ alkoxyalkyl, C₁-C₁₂ alkoxycarbonyl, C₁-C₁₂ alkylcarbonyloxy, C₁-C₁₂ alkylcarbonyloxyalkyl or C₁-C₁₂ alkylcarbonyl;
[0660] R is, at each occurrence, independently either: (a) H or C₁-C₁₂ alkyl; or (b) R together with the carbon atom to which it is bound is taken together with an adjacent R and the carbon atom to which it is bound to form a carbon-carbon double bond;
[0661] R¹ and R² have, at each occurrence, the following structure, respectively:

[0662] a¹ and a² are, at each occurrence, independently an integer from 3 to 12;
[0663] b¹ and b² are, at each occurrence, independently 0 or 1;
[0664] c¹ and c² are, at each occurrence, independently an integer from 5 to 10;
[0665] d¹ and d² are, at each occurrence, independently an integer from 5 to 10;
[0666] y is, at each occurrence, independently an integer from 0 to 2; and
[0667] n is an integer from 1 to 6,
[0668] wherein each alkyl, alkylene, hydroxylalkyl, aminoalkyl, alkylaminylalkyl, alkoxyalkyl, alkoxycarbonyl, alkylcarbonyloxy, alkylcarbonyloxyalkyl and alkylcarbonyl is optionally substituted with one or more substituent.

[0669] In some embodiments of Formula (IV), G¹ and C² are each independently

### —O(C═O)— or —(C═O)O—.

[0670] In other embodiments of Formula (IV), X is CH.

[0671] In different embodiments of Formula (IV), the sum of a¹+b¹+c¹ or the sum of a²+b²+c² is an integer from 12 to 26.

[0672] In still other embodiments of Formula (IV), a¹ and a² are independently an integer from 3 to 10. For example, in some embodiments a¹ and a² are independently an integer from 4 to 9.

[0673] In various embodiments of Formula (IV), b¹ and b² are 0. In different embodiments, b¹ and b² are 1.

[0674] In more embodiments of Formula (IV), c¹, c², d¹ and d² are independently an integer from 6 to 8.

[0675] In other embodiments of Formula (IV), c¹ and c² are, at each occurrence, independently an integer from 6 to 10, and d¹ and d² are, at each occurrence, independently an integer from 6 to 10.

[0676] In other embodiments of Formula (IV), c¹ and c² are, at each occurrence, independently an integer from 5 to 9, and d¹ and d² are, at each occurrence, independently an integer from 5 to 9.

[0677] In more embodiments of Formula (IV), Z is alkyl, cycloalkyl or a monovalent moiety comprising at least one polar functional group when n is 1. In other embodiments, Z is alkyl.

[0678] In various embodiments of the foregoing Formula (IV), R is, at each occurrence, independently either: (a) H or methyl; or (b) R together with the carbon atom to which it is bound is taken together with an adjacent R and the carbon atom to which it is bound to form a carbon-carbon double bond. In certain embodiments, each R is H. In other embodiments at least one R together with the carbon atom to which it is bound is taken together with an adjacent R and the carbon atom to which it is bound to form a carbon-carbon double bond.

[0679] In other embodiments of the compound of Formula (IV), R¹ and R² independently have one of the following structures:

[0680] In certain embodiments of Formula (IV), the compound has one of the following structures:

[0681] In still different embodiments the cationic lipid of Embodiments 1, 2, 3, 4 or 5 has the structure of Formula (V):

or a pharmaceutically acceptable salt, prodrug or stereoisomer thereof, wherein:
[0682] one of G¹ or G² is, at each occurrence, —O(C═O)—, —(C═O)O—, —C(═O)—, —O—, —S(O)ₓ—, —S—S—, —C(═O)S—, SC(═O)—, —N(R^{a})C(═O)—, —C(═O)N(R^{a})—, —N(R^{a})C(═O)N(R^{a})—, —OC(═O)N(R^{a})— or —N(R^{a})C(═O)O—, and the other of G¹ or G² is, at each occurrence, —O(C═O)—, —(C═O)O—, —C(═O)—, —O—, —S(O)ₓ—, —S—S—, —C(═O)S—, —SC(═O)—, —N(R^{a})C(═O)—, —C(═O)N(R^{a})—, —N(R^{a})C(═O)N(R^{a})—, —OC(═O)N(R^{a})— or —N(R^{a})C(═O)O— or a direct bond;
[0683] L is, at each occurrence, ˜O(C═O)—, wherein ˜ represents a covalent bond to X;
[0684] X is CR^{a};
[0685] Z is alkyl, cycloalkyl or a monovalent moiety comprising at least one polar functional group when n is 1; or Z is alkylene, cycloalkylene or a polyvalent moiety comprising at least one polar functional group when n is greater than 1;
[0686] R^{a} is, at each occurrence, independently H, C₁-C₁₂ alkyl, C₁-C₂ hydroxylalkyl, C₁-C₁₂ aminoalkyl, C₁-C₁₂ alkylaminylalkyl, C₁-C₁₂ alkoxyalkyl, C₁-C₁₂ alkoxycarbonyl, C₁-C₁₂ alkylcarbonyloxy, C₁-C₁₂ alkylcarbonyloxyalkyl or C₁-C₁₂ alkylcarbonyl;
[0687] R is, at each occurrence, independently either: (a) H or C₁-C₁₂ alkyl; or (b) R together with the carbon atom to which it is bound is taken together with an adjacent R and the carbon atom to which it is bound to form a carbon-carbon double bond;
[0688] R¹ and R² have, at each occurrence, the following structure, respectively:

[0689] R′ is, at each occurrence, independently H or C₁-C₁₂ alkyl;
[0690] a¹ and a² are, at each occurrence, independently an integer from 3 to 12;
[0691] b¹ and b² are, at each occurrence, independently 0 or 1;
[0692] c¹ and c² are, at each occurrence, independently an integer from 2 to 12;
[0693] d¹ and d² are, at each occurrence, independently an integer from 2 to 12;
[0694] y is, at each occurrence, independently an integer from 0 to 2; and
[0695] n is an integer from 1 to 6,
[0696] wherein a¹, a², c¹, c², d¹ and d² are selected such that the sum of a¹+c¹+d¹ is an integer from 18 to 30, and the sum of a²+c²+d² is an integer from 18 to 30, and wherein each alkyl, alkylene, hydroxylalkyl, aminoalkyl, alkylaminylalkyl, alkoxyalkyl, alkoxycarbonyl, alkylcarbonyloxy, alkylcarbonyloxyalkyl and alkylcarbonyl is optionally substituted with one or more substituent.

[0697] In certain embodiments of Formula (V), G¹ and G² are each independently

### —O(C═O)— or —(C═O)O—.

[0698] In other embodiments of Formula (V), X is CH.

[0699] In some embodiments of Formula (V), the sum of a¹+c¹+d¹ is an integer from 20 to 30, and the sum of a²+c²+d² is an integer from 18 to 30. In other embodiments, the sum of a¹+c¹+d¹ is an integer from 20 to 30, and the sum of a²+c²+d² is an integer from 20 to 30. In more embodiments of Formula (V), the sum of a¹+b¹+c¹ or the sum of a²+b²+c² is an integer from 12 to 26. In other embodiments, a¹, a², c¹, c², d¹ and d² are selected such that the sum of a¹+c¹+d¹ is an integer from 18 to 28, and the sum of a²+c²+d² is an integer from 18 to 28, In still other embodiments of Formula (V), a¹ and a² are independently an integer from 3 to 10, for example an integer from 4 to 9.

[0700] In yet other embodiments of Formula (V), b¹ and b² are 0. In different embodiments b¹ and b² are 1.

[0701] In certain other embodiments of Formula (V), c¹, c², d¹ and d² are independently an integer from 6 to 8.

[0702] In different other embodiments of Formula (V), Z is alkyl or a monovalent moiety comprising at least one polar functional group when n is 1; or Z is alkylene or a polyvalent moiety comprising at least one polar functional group when n is greater than 1.

[0703] In more embodiments of Formula (V), Z is alkyl, cycloalkyl or a monovalent moiety comprising at least one polar functional group when n is 1. In other embodiments, Z is alkyl.

[0704] In other different embodiments of Formula (V), R is, at each occurrence, independently either: (a) H or methyl; or (b) R together with the carbon atom to which it is bound is taken together with an adjacent R and the carbon atom to which it is bound to form a carbon-carbon double bond. For example in some embodiments each R is H. In other embodiments at least one R together with the carbon atom to which it is bound is taken together with an adjacent R and the carbon atom to which it is bound to form a carbon-carbon double bond.

[0705] In more embodiments, each R′ is H.

[0706] In certain embodiments of Formula (V), the sum of a¹+c¹+d¹ is an integer from 20 to 25, and the sum of a²+c²+d² is an integer from 20 to 25. In other embodiments of Formula (V), R¹ and R² independently have one of the following structures:

[0707] In more embodiments of Formula (V), the compound has one of the following structures:

[0708] In any of the foregoing embodiments of Formula (IV) or (V), n is 1. In other of the foregoing embodiments of Formula (IV) or (V), n is greater than 1.

[0709] In more of any of the foregoing embodiments of Formula (IV) or (V), Z is a mono- or polyvalent moiety comprising at least one polar functional group. In some embodiments, Z is a monovalent moiety comprising at least one polar functional group. In other embodiments, Z is a polyvalent moiety comprising at least one polar functional group.

[0710] In more of any of the foregoing embodiments of Formula (IV) or (V), the polar functional group is a hydroxyl, alkoxy, ester, cyano, amide, amino, alkylaminyl, heterocyclyl or heteroaryl functional group.

[0711] In any of the foregoing embodiments of Formula (IV) or (V), Z is hydroxyl, hydroxylalkyl, alkoxyalkyl, amino, aminoalkyl, alkylaminyl, alkylaminylalkyl, heterocyclyl or heterocyclylalkyl.

[0712] In some other embodiments of Formula (IV) or (V), Z has the following structure:

wherein:
[0713] R⁵ and R⁶ are independently H or C₁-C₆ alkyl;
[0714] R⁷ and R⁸ are independently H or C₁-C₆ alkyl or R⁷ and R⁸, together with the nitrogen atom to which they are attached, join to form a 3-7 membered heterocyclic ring; and
[0715] x is an integer from 0 to 6.

[0716] In still different embodiments of Formula (IV) or (V), Z has the following structure:

wherein:
[0717] R⁵ and R⁶ are independently H or C₁-C₆ alkyl;
[0718] R⁷ and R⁸ are independently H or C₁-C₆ alkyl or R⁷ and R⁸, together with the nitrogen atom to which they are attached, join to form a 3-7 membered heterocyclic ring; and
[0719] x is an integer from 0 to 6.

[0720] In still different embodiments of formula (IV) or (V), Z has the following structure:

wherein:
[0721] R⁵ and R⁶ are independently H or C₁-C₆ alkyl;
[0722] R⁷ and R⁸ are independently H or C₁-C₆ alkyl or R⁷ and R⁸, together with the nitrogen atom to which they are attached, join to form a 3-7 membered heterocyclic ring; and
[0723] x is an integer from 0 to 6.

[0724] In some other embodiments of Formula (IV) or (V), Z is hydroxylalkyl, cyanoalkyl or an alkyl substituted with one or more ester or amide groups.

[0725] For example, in any of the foregoing embodiments of Formula (IV) or (V), Z has one of the following structures:

[0726] In other embodiments of Formula (IV) or (V), Z-L has one of the following structures:

[0727] In other embodiments, Z-L has one of the following structures:

[0728] In still other embodiments, X is CH and Z-L has one of the following structures:

[0729] In various different embodiments, a cationic lipid of any one Embodiments 1, 2, 3, 4 or 5 has one of the structures set forth in Table 4 below.

TABLE 4
Representative Compounds of Formula (IV) or (V)

| No. | Structure |
|---|---|
| IV-1 | |
| IV-2 | |
| IV-3 | |

[0730] In one embodiment, the cationic lipid is a compound having the following structure (VI):

[0731] or a pharmaceutically acceptable salt, tautomer, prodrug or stereoisomer thereof, wherein:
[0732] L¹ and L² are each independently —O(C═O)—, —(C═O)O—, —C(═O)—, —O—, —S(O)ₓ—, —S—S—, —C(═O)S—, —SC(═O)—, —NR^{a}C(═O)—, —C(═O)NR^{a}—, —NR^{a}C(═O)NR^{a}—, —OC(═O)NR^{a}—, —NR^{a}C(═O)O— or a direct bond;
[0733] G¹ is C₁-C₂ alkylene, —(C═O)—, —O(C═O)—, —SC(═O)—, —NRₐC(═O)— or a direct bond;
[0734] G is —C(═O)—, —(C═O)O—, —C(═O)S—, —C(═O)NR^{a}— or a direct bond;
[0735] G³ is C₁-C₆ alkylene;
[0736] R^{a} is H or C₁-C₁₂ alkyl;
[0737] R^{1a} and R^{1b} are, at each occurrence, independently either: (a) H or C₁-C₁₂ alkyl; or (b) R^{1a} is H or C₁-C₁₂ alkyl, and R^{1b} together with the carbon atom to which it is bound is taken together with an adjacent R^{1b} and the carbon atom to which it is bound to form a carbon-carbon double bond;
[0738] R^{2a} and R^{2b} are, at each occurrence, independently either: (a) H or C₁-C₁₂ alkyl; or (b) R^{2a} is H or C₁-C₁₂ alkyl, and R^{2b} together with the carbon atom to which it is bound is taken together with an adjacent R^{2b} and the carbon atom to which it is bound to form a carbon-carbon double bond;
[0739] R^{3a} and R^{3b} are, at each occurrence, independently either (a): H or C₁-C₁₂ alkyl; or (b) R^{3a} is H or C₁-C₁₂ alkyl, and R^{3b} together with the carbon atom to which it is bound is taken together with an adjacent R^{3b} and the carbon atom to which it is bound to form a carbon-carbon double bond;
[0740] R^{4a} and R^{4b} are, at each occurrence, independently either: (a) H or C₁-C₁₂ alkyl; or (b) R^{4a} is H or C₁-C₁₂ alkyl, and R^{4b} together with the carbon atom to which it is bound is taken together with an adjacent R^{4b} and the carbon atom to which it is bound to form a carbon-carbon double bond;
[0741] R¹ and R⁶ are each independently H or methyl;
[0742] R⁷ is H or C₁-C₂₀ alkyl;
[0743] R⁸ is OH, —N(R⁹)(C═O)R¹⁰, —(C═O)NR⁹R¹⁰, —NR⁹R¹⁰, —(C═O)OR¹¹ or —O(C═O)R¹¹, provided that G³ is C₄-C₆ alkylene when R⁸ is —NR⁹R¹⁰,
[0744] R⁹ and R¹⁰ are each independently H or C₁-C₁₂ alkyl;
[0745] R¹¹ is aralkyl;
[0746] a, b, c and d are each independently an integer from 1 to 24; and
[0747] x is 0, 1 or 2,
   wherein each alkyl, alkylene and aralkyl is optionally substituted.

[0748] In some embodiments of structure (VI), L¹ and L² are each independently —O(C═O)—, —(C═O)O— or a direct bond. In other embodiments, G¹ and G² are each independently —(C═O)— or a direct bond. In some different embodiments, L¹ and L² are each independently —O(C═O)—, —(C═O)O— or a direct bond; and G¹ and G² are each independently —(C═O)— or a direct bond.

[0749] In some different embodiments of structure (VI), L¹ and L² are each independently —C(═O)—, —O—, —S(O)ₓ—, —S—S—, —C(═O)S—, —SC(═O)—, —NR^{a}—, —NR^{a}C(═O)—, —C(═O)NR^{a}—, —NR^{a}C(═)NR^{a}, —OC(═O)NR^{a}—, —NR^{a}C(═O)O—, —NR^{a}S(O)ₓNR^{a}—, —NR^{a}S(O)ₓ or —S(O)ₓNR^{a}—.

[0750] In other of the foregoing embodiments of structure (VI), the compound has one of the following structures (VIA) or (VIB):

[0751] In some embodiments, the compound has structure (VIA). In other embodiments, the compound has structure (VIB).

[0752] In any of the foregoing embodiments of structure (VI), one of L¹ or L² is —O(C═O)—. For example, in some embodiments each of L¹ and L² are —O(C═O)—.

[0753] In some different embodiments of any of the foregoing, one of L¹ or L² is —(C═O)O—. For example, in some embodiments each of L¹ and L² is —(C═O)O—.

[0754] In different embodiments of structure (VI), one of L¹ or L² is a direct bond. As used herein, a “direct bond” means the group (e.g., L¹ or L²) is absent. For example, in some embodiments each of L¹ and L² is a direct bond.

[0755] In other different embodiments of the foregoing, for at least one occurrence of R^{1a} and R^{1b}, R^{1a} is H or C₁-C₁₂ alkyl, and R^{1b} together with the carbon atom to which it is bound is taken together with an adjacent Rib and the carbon atom to which it is bound to form a carbon-carbon double bond.

[0756] In still other different embodiments of structure (VI), for at least one occurrence of R^{4a} and R^{4b}, R^{4a} is H or C₁-C₁₂ alkyl, and R^{4b} together with the carbon atom to which it is bound is taken together with an adjacent R^{4b} and the carbon atom to which it is bound to form a carbon-carbon double bond.

[0757] In more embodiments of structure (VI), for at least one occurrence of R^{2a} and R^{2b}, R^{2a} is H or C₁-C₁₂ alkyl, and R^{2b} together with the carbon atom to which it is bound is taken together with an adjacent R^{2b} and the carbon atom to which it is bound to form a carbon-carbon double bond.

[0758] In other different embodiments of any of the foregoing, for at least one occurrence of R^{3a} and R^{3b}, R^{3a} is H or C₁-C₁₂ alkyl, and R^{3b} together with the carbon atom to which it is bound is taken together with an adjacent R^{3b} and the carbon atom to which it is bound to form a carbon-carbon double bond.

[0759] It is understood that “carbon-carbon” double bond refers to one of the following structures:

wherein R^{c} and R^{d} are, at each occurrence, independently H or a substituent. For example, in some embodiments R^{c} and R^{d} are, at each occurrence, independently H, C₁-C₁₂ alkyl or cycloalkyl, for example H or C₁-C₂ alkyl.

[0760] In various other embodiments, the compound has one of the following structures (VIC) or (VID):

wherein e, f, g and h are each independently an integer from 1 to 12.

[0761] In some embodiments, the compound has structure (VIC). In other embodiments, the compound has structure (VID).

[0762] In various embodiments of the compounds of structures (VIC) or (VID), e, f, g and h are each independently an integer from 4 to 10.

[0763] In other different embodiments,

or both, independently has one of the following structures:

[0764] In certain embodiments of the foregoing, a, b, c and d are each independently an integer from 2 to 12 or an integer from 4 to 12. In other embodiments, a, b, c and d are each independently an integer from 8 to 12 or 5 to 9. In some certain embodiments, a is 0. In some embodiments, a is 1. In other embodiments, a is 2. In more embodiments, a is 3. In yet other embodiments, a is 4. In some embodiments, a is 5. In other embodiments, a is 6. In more embodiments, a is 7. In yet other embodiments, a is 8. In some embodiments, a is 9. In other embodiments, a is 10. In more embodiments, a is 11. In yet other embodiments, a is 12. In some embodiments, a is 13. In other embodiments, a is 14. In more embodiments, a is 15. In yet other embodiments, a is 16.

[0765] In some embodiments of structure (VI), b is 1. In other embodiments, b is 2. In more embodiments, b is 3. In yet other embodiments, b is 4. In some embodiments, b is 5. In other embodiments, b is 6. In more embodiments, b is 7. In yet other embodiments, b is 8. In some embodiments, b is 9. In other embodiments, b is 10. In more embodiments, b is 11. In yet other embodiments, b is 12. In some embodiments, b is 13. In other embodiments, b is 14. In more embodiments, b is 15. In yet other embodiments, b is 16.

[0766] In some embodiments of structure (VI), c is 1. In other embodiments, c is 2. In more embodiments, c is 3. In yet other embodiments, c is 4. In some embodiments, c is 5. In other embodiments, c is 6. In more embodiments, c is 7. In yet other embodiments, c is 8. In some embodiments, c is 9. In other embodiments, c is 10. In more embodiments, c is 11. In yet other embodiments, c is 12. In some embodiments, c is 13. In other embodiments, c is 14. In more embodiments, c is 15. In yet other embodiments, c is 16.

[0767] In some certain embodiments of structure (VI), d is 0. In some embodiments, d is 1. In other embodiments, d is 2. In more embodiments, d is 3. In yet other embodiments, d is 4. In some embodiments, d is 5. In other embodiments, d is 6. In more embodiments, d is 7. In yet other embodiments, d is 8. In some embodiments, d is 9. In other embodiments, d is 10. In more embodiments, d is 11. In yet other embodiments, d is 12. In some embodiments, d is 13. In other embodiments, d is 14. In more embodiments, d is 15. In yet other embodiments, d is 16. In some embodiments of structure (VI), e is 1. In other embodiments, e is 2. In more embodiments, e is 3. In yet other embodiments, e is 4. In some embodiments, e is 5. In other embodiments, e is 6. In more embodiments, e is 7. In yet other embodiments, e is 8. In some embodiments, e is 9. In other embodiments, e is 10. In more embodiments, e is 11. In yet other embodiments, e is 12.

[0768] In some embodiments of structure (VI), f is 1. In other embodiments, f is 2. In more embodiments, f is 3. In yet other embodiments, f is 4. In some embodiments, f is 5. In other embodiments, f is 6. In more embodiments, f is 7. In yet other embodiments, f is 8. In some embodiments, f is 9. In other embodiments, f is 10. In more embodiments, f is 11. In yet other embodiments, f is 12.

[0769] In some embodiments of structure (VI), g is 1. In other embodiments, g is 2. In more embodiments, g is 3. In yet other embodiments, g is 4. In some embodiments, g is 5. In other embodiments, g is 6. In more embodiments, g is 7. In yet other embodiments, g is 8. In some embodiments, g is 9. In other embodiments, g is 10. In more embodiments, g is 11. In yet other embodiments, g is 12.

[0770] In some embodiments of structure (VI), h is 1. In other embodiments, e is 2. In more embodiments, h is 3. In yet other embodiments, h is 4. In some embodiments, e is 5. In other embodiments, h is 6. In more embodiments, h is 7. In yet other embodiments, h is 8. In some embodiments, h is 9. In other embodiments, h is 10. In more embodiments, h is 11. In yet other embodiments, h is 12.

[0771] In some other various embodiments of structure (VI), a and d are the same. In some other embodiments, b and c are the same. In some other specific embodiments a and d are the same and b and c are the same.

[0772] The sum of a and b and the sum of c and d are factors which may be varied to obtain a lipid having the desired properties. In one embodiment, a and b are chosen such that their sum is an integer ranging from 14 to 24. In other embodiments, c and d are chosen such that their sum is an integer ranging from 14 to 24. In further embodiment, the sum of a and b and the sum of c and d are the same. For example, in some embodiments the sum of a and b and the sum of c and d are both the same integer which may range from 14 to 24. In still more embodiments, a. b, c and d are selected such that the sum of a and b and the sum of c and d is 12 or greater.

[0773] The substituents at R^{1a}, R^{2a}, R^{3a} and R^{4a} are not particularly limited. In some embodiments, at least one of R^{1a}, R^{2a}, R^{3a} and R^{4a} is H. In certain embodiments R^{1a}, R^{2a}, R^{3a} and R^{4a} are H at each occurrence. In certain other embodiments at least one of R^{1a}, R^{2a}, R^{3a} and R^{4a} is C₁-C₁₂ alkyl. In certain other embodiments at least one of R^{1a}, R^{2a}, R^{3a} and R^{4a} is C₁-C₅ alkyl. In certain other embodiments at least one of R^{1a}, R^{2a}, R^{3a} and R^{4a} is C₁-C₆ alkyl. In some of the foregoing embodiments, the C₁-C₈ alkyl is methyl, ethyl, n-propyl, iso-propyl, n-butyl, iso-butyl, tert-butyl, n-hexyl or n-octyl.

[0774] In certain embodiments of the foregoing, R^{a}, R¹, R^{4a} and R^{4b} are C₁-C₁₂ alkyl at each occurrence.

[0775] In further embodiments of the foregoing, at least one of R^{1b}, R^{2b}, R^{3b} and R^{4b} is H or R^{1b}, R^{2b}, R^{3b} and R^{4b} are H at each occurrence.

[0776] In certain embodiments of the foregoing, R^{1b} together with the carbon atom to which it is bound is taken together with an adjacent R^{1b} and the carbon atom to which it is bound to form a carbon-carbon double bond. In other embodiments of the foregoing R^{4b} together with the carbon atom to which it is bound is taken together with an adjacent R^{4b} and the carbon atom to which it is bound to form a carbon-carbon double bond.

[0777] The substituents at R⁵ and R⁶ are not particularly limited in the foregoing embodiments. In certain embodiments one of R⁵ or R⁶ is methyl. In other embodiments each of R⁵ or R⁶ is methyl.

[0778] The substituents at R⁷ are not particularly limited in the foregoing embodiments. In certain embodiments R^{T} is C₆-C₁₆ alkyl. In some other embodiments, R⁷ is C₆-C₉ alkyl. In some of these embodiments, R⁷ is substituted with —(C═O)OR^{b}, —O(C═O)R^{b}, —C(═O)R^{b}, —OR^{b}, —S(O),R^{b}, —S—SR^{b}, —C(═O)SR^{b}, —SC(═O)R^{b}, —NR^{a}R^{b}, —NR^{a}C(═O)R^{b}, —C(═O)NR^{a}R^{b}, —N^{a}C(═O)NR^{a}R^{b}, —OC(═O)NR^{a}R^{b}, —NR^{a}C(═O)OR^{b}, —NR^{a}S(O)ₓNR^{a}R^{b}, —N^{a}S(O)ₓR^{b} or —S(O)ₓNR^{a}R^{b}, wherein: R^{a} is H or C₁-C₁₂ alkyl; R⁷ is C₁-C₁₅ alkyl; and x is 0, 1 or 2. For example, in some embodiments R′ is substituted with —(C═O)OR or —O(C═O)R^{b}.

[0779] In various of the foregoing embodiments of structure (VI), R^{b} is branched C₃-C₁₅ alkyl. For example, in some embodiments R^{b} has one of the following structures:

[0780] In certain embodiments, R⁸ is OH.

[0781] In other embodiments of structure (VI), R⁸ is —N(R⁹)(C═O)R¹⁰. In some other embodiments, R⁹ is —(C═O)NR⁹R¹⁰. In still more embodiments, R⁹ is —NR⁹R¹⁰. In some of the foregoing embodiments, R⁹ and R¹⁰ are each independently H or C₁-C₈ alkyl, for example H or C₁-C₃ alkyl. In more specific of these embodiments, the C₁-C₈ alkyl or C₁-C₃ alkyl is unsubstituted or substituted with hydroxyl. In other of these embodiments, R⁹ and R¹⁰ are each methyl.

[0782] In yet more embodiments of structure (VI), R⁸ is —(C═O)OR¹¹. In some of these embodiments R¹¹ is benzyl.

[0783] In yet more specific embodiments of structure (VI), R⁸ has one of the following structures:

[0784] In still other embodiments of the foregoing compounds, G³ is C₂-C₅ alkylene, for example C₂-C₄ alkylene, C₃ alkylene or C₄ alkylene. In some of these embodiments, R⁸ is OH. In other embodiments, G² is absent and R is C₁-C₂ alkylene, such as methyl.

[0785] In various different embodiments, the compound has one of the structures set forth in Table 5 below.

TABLE 5
Representative cationic lipids of structure (VI)

| No. | Structure |
|---|---|
| VI-1 | |
| VI-2 | |
| VI-3 | |
| VI-4 | |
| VI-5 | |
| VI-6 | |
| VI-7 | |
| VI-8 | |
| VI-9 | |
| VI-10 | |
| VI-11 | |
| VI-12 | |
| VI-13 | |
| VI-14 | |
| VI-15 | |
| VI-16 | |
| VI-17 | |
| VI-18 | |
| VI-19 | |
| VI-20 | |
| VI-21 | |
| VI-22 | |
| VI-23 | |
| VI-24 | |
| VI-25 | |
| VI-26 | |
| VI-27 | |
| VI-28 | |
| VI-29 | |
| VI-30 | |
| VI-31 | |
| VI-32 | |
| VI-33 | |
| VI-34 | |
| VI-35 | |
| VI-36 | |
| VI-37 | |

[0786] In one embodiment, the cationic lipid is a compound having the following structure (VII):

or a pharmaceutically acceptable salt, prodrug or stereoisomer thereof, wherein:
[0787] X and X′ are each independently N or CR;
[0788] Y and Y′ are each independently absent, —O(C═O)—, —(C═O)O— or NR, provided that:
   [0789] a) Y is absent when X is N;
   [0790] b) Y′ is absent when X is N;
   [0791] c) Y is —O(C═O)—, —(C═O)O— or NR when X is CR; and
   [0792] d) Y′ is —O(C═O)—, —(C═O)O— or NR when X′ is CR,
[0793] L¹ and L^{1′} are each independently —O(C═O)R¹, —(C═O)OR¹, —C(═O)R¹, —OR¹, —S(O)_{z}R¹, —S—SR¹, —C(═O)SR¹, —SC(═O)R¹, —NR^{a}C(═O)R¹, —C(═O)NR^{b}R^{c}, —NR^{a}C(═O)NR^{b}R^{c}, —OC(═O)NR^{b}R^{c} or —NR^{a}C(═O)OR¹;
[0794] L² and L^{2′} are each independently —O(C═O)R², —(C═O)OR², —C(═O)R², —OR², —S(O)zR², —S—SR², —C(═O)SR², —SC(═O)R², —NR^{d}C(═O)R², —C(═O)NR^{e}R^{f}, —NR^{d}C(═O)NR^{e}R^{f}, —OC(═O)NR^{e}R^{f}; —NR^{d}C(═O)OR² or a direct bond to R²;
[0795] G¹, G^{1′}, G² and G^{2′} are each independently C₂-C₁₂ alkylene or C₂-C₁₂ alkenylene;
[0796] G³ is C₂-C₂₄ heteroalkylene or C₂-C₂₄ heteroalkenylene;
[0797] R^{a}, R^{b}, R^{d} and R^{e} are, at each occurrence, independently H, C₁-C₁₂ alkyl or C₂-C₁₂ alkenyl;
[0798] R^{c} and R^{f} are, at each occurrence, independently C₁-C₁₂ alkyl or C₂-C₁₂ alkenyl;
[0799] R is, at each occurrence, independently H or C₁-C₁₂ alkyl;
[0800] R¹ and R² are, at each occurrence, independently branched C₆-C₂₄ alkyl or branched C₆-C₂₄ alkenyl;
[0801] z is 0, 1 or 2, and
   wherein each alkyl, alkenyl, alkylene, alkenylene, heteroalkylene and heteroalkenylene is independently substituted or unsubstituted unless otherwise specified.

[0802] In other different embodiments of structure (VII):
[0803] X and X′ are each independently N or CR;
[0804] Y and Y′ are each independently absent or NR, provided that:
   [0805] a)Y is absent when X is N;
   [0806] b) Y′ is absent when X′ is N;
   [0807] c) Y is NR when X is CR; and
   [0808] d) Y′ is NR when X′ is CR,
[0809] L¹ and L^{1′} are each independently —O(C═O)R¹, —(C═O)OR¹, —C(═O)R¹, —OR¹, —S(O)_{z}R¹, —S—SR¹, —C(═O)SR¹, —SC(═O)R¹, —NR^{a}C(═O)R¹, —C(═O)NR^{b}R^{c}, —NR^{a}C(═O)NR^{b}R^{c}, —OC(═O)NR^{b}R^{c} or —NR^{a}C(═O)OR¹;
[0810] L² and L² are each independently —O(C═O)R², —(C═O)OR², —C(═O)R², —OR², —S(O)_{z}R², —S—SR², —C(═O)SR², —SC(═O)R², —NR^{d}C(═O)R², —C(═O)NR^{e}R^{f}, —NR^{d}C(═O)NR^{e}R^{f}, —OC(═O)NR^{e}R^{f}; —NR^{d}C(═O)OR² or a direct bond to R²
[0811] G¹, G^{1′}, G² and G^{2′} are each independently C₂-C₁₂ alkylene or C₂-C₂ alkenylene;
[0812] G³ is C₂-C₂₄ alkyleneoxide or C₂-C₂₄ alkenyleneoxide;
[0813] R^{a}, R^{b}, R^{d} and R^{e} are, at each occurrence, independently H, C₁-C₁₂ alkyl or C₂-C₁₂ alkenyl;
[0814] R^{c} and R^{f} are, at each occurrence, independently C₁-C₁₂ alkyl or C₂-C₁₂ alkenyl;
[0815] R is, at each occurrence, independently H or C₁-C₂ alkyl;
[0816] R¹ and R² are, at each occurrence, independently branched C₆-C₂₄ alkyl or branched C₆-C₂₄ alkenyl;
[0817] z is 0, 1 or 2, and
   wherein each alkyl, alkenyl, alkylene, alkenylene, alkyleneoxide and alkenyleneoxide is independently substituted or unsubstituted unless otherwise specified.

[0818] In some embodiments of structure (VII), G³ is C₂-C₂₄ alkyleneoxide or C₂-C₂₄ alkenyleneoxide. In certain embodiments, G³ is unsubstituted. In other embodiments, G³ is substituted, for example substituted with hydroxyl. In more specific embodiments G³ is C₂-C₁₂ alkyleneoxide, for example, in some embodiments G³ is C₃-C₇ alkyleneoxide or in other embodiments G³ is C₃-C₁₂ alkyleneoxide.

[0819] In other embodiments of structure (VII), G³ is C₂-C₂₄ alkyleneaminyl or C₂-C₂₄ alkenyleneaminyl, for example C₆-C₁₂ alkyleneaminyl. In some of these embodiments, G³ is unsubstituted. In other of these embodiments, G³ is substituted with C₁-C₆ alkyl.

[0820] In some embodiments of structure (VII), X and X′ are each N, and Y and Y are each absent. In other embodiments, X and X′ are each CR, and Y and Y are each NR. In some of these embodiments, R is H.

[0821] In certain embodiments of structure (VII), X and X′ are each CR, and Y and Y′ are each independently —O(C═O)— or —(C═O)O—.

[0822] In some of the foregoing embodiments of structure (VII), the compound has one of the following structures (VIIA), (VIIB), (VIIC), (VIID), (VIIE), (VIIF), (VIIG) or (VIIH):

wherein R^{d} is, at each occurrence, independently H or optionally substituted C₁-C₆ alkyl. For example, in some embodiments Rd is H. In other embodiments, Rd is C₁-C₆ alkyl, such as methyl. In other embodiments, Rd is substituted C₁-C₆ alkyl, such as C₁-C₆ alkyl substituted with —O(C═O)R, —(C═O)OR, —NRC(═O)R or —C(═O)N(R)₂, wherein R is, at each occurrence, independently H or C₁-C₁₂ alkyl.

[0823] In some of the foregoing embodiments of structure (VII), L¹ and L^{1′} are each independently —O(C═O)R¹, —(C═O)OR¹ or —C(═O)NR^{b}R^{c}, and L² and L^{2′} are each independently —O(C═O)R², —(C═O)OR² or —C(═O)NR^{e}R^{f}. For example, in some embodiments L¹ and L^{1′} are each —(C═O)OR¹, and L² and L^{2′} are each —(C═O)OR². In other embodiments L¹ and L^{1′} are each —(C═O)OR¹, and L² and L² are each —C(═O)NR^{e}R^{f}. In other embodiments L¹ and L^{1′} are each —C(═O)NR^{b}R^{c}, and L² and L^{2′} are each —C(═O)NR^{e}R^{f}.

[0824] In some embodiments of the foregoing, G¹, G^{1′}, G² and G^{2′} are each independently C₂-C₅ alkylene, for example C₄-C₅ alkylene.

[0825] In some of the foregoing embodiments of structure (VII), R¹ or R², are each, at each occurrence, independently branched C₆-C₂₄ alkyl. For example, in some embodiments, R¹ and R² at each occurrence, independently have the following structure:

wherein:
[0826] R^{7a} and R^{7b} are, at each occurrence, independently H or C₁-C₁₂ alkyl; and
[0827] a is an integer from 2 to 12,
   wherein R^{7a}, R^{7b} and a are each selected such that R¹ and R² each independently comprise from 6 to 20 carbon atoms. For example, in some embodiments a is an integer ranging from 5 to 9 or from 8 to 12.

[0828] In some of the foregoing embodiments of structure (VII), at least one occurrence of R^{7a} is H. For example, in some embodiments, R^{7a} is H at each occurrence. In other different embodiments of the foregoing, at least one occurrence of R^{7b} is C₁-C₈ alkyl. For example, in some embodiments, C₁-C₈ alkyl is methyl, ethyl, n-propyl, iso-propyl, n-butyl, iso-butyl, tert-butyl, n-hexyl or n-octyl.

[0829] In different embodiments of structure (VII), R¹ or R², or both, at each occurrence independently has one of the following structures:

[0830] In some of the foregoing embodiments of structure (VII), R^{b}, R^{c}, R^{e} and R^{f}, when present, are each independently C₃-C₁₂ alkyl. For example, in some embodiments R^{b}, R^{c}, R^{e} and R^{f}, when present, are n-hexyl and in other embodiments R^{b}, R^{c}, R^{e} and R^{f}, when present, are n-octyl.

[0831] In various different embodiments of structure (VII), the cationic lipid has one of the structures set forth in Table 6 below.

TABLE 6
Representative cationic lipids of structure (VII)

| No. | Structure |
|---|---|
| VII-1 | |
| VII-2 | |
| VII-3 | |
| VII-4 | |
| VII-5 | |
| VII-6 | |
| VII-7 | |
| VII-8 | |
| VII-9 | |
| VII-10 | |
| VII-11 | |

[0832] In one embodiment, the cationic lipid is a compound having the following structure (VIII):

or a pharmaceutically acceptable salt, prodrug or stereoisomer thereof, wherein:
[0833] X is N, and Y is absent; or X is CR, and Y is NR;
[0834] L¹ is —O(C═O)R¹, —(C═O)OR¹, —C(═O)R¹, —OR¹, —S(O)XR¹, —S—SR¹, —C(═O)SR¹, —SC(═O)R¹, —NR^{a}C(═O)R¹, —C(═O)NR^{b}R^{c}, —NR^{a}C(═O)NR^{b}R^{c}, —OC(═O)NR^{b}R^{c} or —NR^{a}C(═O)OR¹;
[0835] L² is —O(C═O)R², —(C═O)OR², —C(═O)R², —OR², —S(O)ₓR², —S—SR², —C(═O)SR², —SC(═O)R², —NR^{d}C(═O)R², —C(═O)NR^{e}R^{f}, —NR^{d}C(═O)NR^{e}R^{f}, —OC(═O)NR^{e}R^{f}; —NR^{d}C(═O)OR² or a direct bond to R;
[0836] L³ is —O(C═O)R³ or —(C═O)OR³;
[0837] G¹ and G² are each independently C₂-C₁₂ alkylene or C₂-C₁₂ alkenylene;
[0838] G³ is C₁-C₂₄ alkylene, C₂-C₂₄ alkenylene, C₁-C₂₄ heteroalkylene or C₂-C₂₄ heteroalkenylene;
[0839] R^{a}, R^{b}, R^{d} and R^{e} are each independently H or C₁-C₁₂ alkyl or C₁-C₁₂ alkenyl;
[0840] R^{e} and R^{f} are each independently C₁-C₁₂ alkyl or C₂-C₁₂ alkenyl;
[0841] each R is independently H or C₁-C₁₂ alkyl;
[0842] R¹, R² and R³ are each independently C₁-C₂₄ alkyl or C₂-C₂₄ alkenyl; and
[0843] x is 0, 1 or 2, and
[0844] wherein each alkyl, alkenyl, alkylene, alkenylene, heteroalkylene and heteroalkenylene is independently substituted or unsubstituted unless otherwise specified.

[0845] In more embodiments of structure (I):
[0846] X is N, and Y is absent; or X is CR, and Y is NR;
[0847] L¹ is —O(C═O)R¹, —(C═O)OR¹, —C(═O)R¹, —OR¹, —S(O)ₓR¹, —S—SR¹, —C(═O)SR¹, —SC(═O)R¹, —NR^{a}C(═O)R¹, —C(═O)NR^{b}R^{c}, —NR^{a}C(═O)NR^{b}R^{c}, —OC(═O)NR^{b}R^{c} or —NR^{a}C(═O)OR¹;
[0848] L² is —O(C═O)R², —(C═O)OR², —C(═O)R², —OR², —S(O)ₓR², —S—SR², —C(═O)SR², —SC(═O)R², —NR^{d}C(═O)R², —C(═O)NR^{e}R^{f}, —NR^{d}C(═O)NR^{e}R^{f}, —OC(═O)NR^{e}R^{f}; —NR^{d}C(═O)OR² or a direct bond to R²;
[0849] L³ is —O(C═O)R³ or —(C═O)OR³;
[0850] G¹ and G² are each independently C₂-C₁₂ alkylene or C₂-C₁₂ alkenylene;
[0851] G³ is C₁-C₂₄ alkylene, C₂-C₂₄ alkenylene, C₁-C₂₄ heteroalkylene or C₂-C₂₄ heteroalkenylene when X is CR, and Y is NR; and G³ is C₁-C₂₄ heteroalkylene or C₂-C₂₄ heteroalkenylene when X is N, and Y is absent; R^{a}, R^{b}, Rd and Re are each independently H or C₁-C₁₂ alkyl or C₁-C₁₂ alkenyl;
[0852] R^{c} and R^{f} are each independently C₁-C₁₂ alkyl or C₂-C₁₂ alkenyl;
[0853] each R is independently H or C₁-C₁₂ alkyl;
[0854] R¹, R² and R³ are each independently C₁-C₂₄ alkyl or C₂-C₂₄ alkenyl; and
[0855] x is 0, 1 or 2, and
[0856] wherein each alkyl, alkenyl, alkylene, alkenylene, heteroalkylene and heteroalkenylene is independently substituted or unsubstituted unless otherwise specified.

[0857] In other embodiments of structure (I):
[0858] X is N and Y is absent, or X is CR and Y is NR;
[0859] L¹ is —O(C═O)R¹, —(C═O)OR¹, —C(═O)R¹, —OR¹, —S(O)ₓR¹, —S—SR¹, —C(═O)SR¹, —SC(═O)R¹, —NR^{a}C(═O)R¹, —C(═O)NR^{b}R^{c}, —NR^{a}C(═O)NR^{e}R^{f}, —OC(═O)NR^{b}R^{c} or —NR^{a}C(═O)OR¹;
[0860] L² is —O(C═O)R², —(C═O)OR², —C(═O)R², —OR², —S(O)ₓR², —S—SR², —C(═O)SR², —SC(═O)R², —NR^{d}C(═O)R², —C(═O)NR^{e}R^{f}, —NR^{d}C(═O)NR^{e}R^{f}, —OC(═O)NR^{e}R^{f}; —NR^{d}C(═O)OR² or a direct bond to R²;
[0861] L³ is —O(C═O)R³ or —(C═O)OR³;
[0862] G¹ and G² are each independently C₂-C₂ alkylene or C₂-C₁₂ alkenylene;
[0863] G³ is C₁-C₂₄ alkylene, C₂-C₂₄ alkenylene, C₁-C₂₄ heteroalkylene or C₂-C₂₄ heteroalkenylene;
[0864] R^{a}, R^{b}, R^{d} and R^{e} are each independently H or C₁-C₁₂ alkyl or C₁-C₂ alkenyl;
[0865] R^{c} and R^{f} are each independently C₁-C₁₂ alkyl or C₂-C₁₂ alkenyl;
[0866] each R is independently H or C₁-C₁₂ alkyl;
[0867] R¹, R² and R³ are each independently branched C₆-C₂₄ alkyl or branched C₆-C₂₄ alkenyl; and
[0868] x is 0, 1 or 2, and
   wherein each alkyl, alkenyl, alkylene, alkenylene, heteroalkylene and heteroalkenylene is independently substituted or unsubstituted unless otherwise specified.

[0869] In certain embodiments of structure (VIII), G³ is unsubstituted. In more specific embodiments G³ is C₂-C₂ alkylene, for example, in some embodiments G³ is C₃-C₇ alkylene or in other embodiments G³ is C₃-C₁₂ alkylene. In some embodiments, G³ is C₂ or C₃ alkylene.

[0870] In other embodiments of structure (VIII), G³ is C₁-C₁₂ heteroalkylene, for example C₁-C₁₂ aminylalkylene.

[0871] In certain embodiments of structure (VIII), X is N and Y is absent. In other embodiments, X is CR and Y is NR, for example in some of these embodiments R is H.

[0872] In some of the foregoing embodiments of structure (VIII), the compound has one of the following structures (VIIIA), (VIIIB), (VIIIC) or (VIIID):

[0873] In some of the foregoing embodiments of structure (VIII), L¹ is —O(C═O)R¹, —(C═O)OR′ or —C(═O)NR^{b}R^{c}, and L² is —O(C═O)R², —(C═O)OR² or —C(═O)NR^{e}R^{f}. In other specific embodiments, L¹ is —(C═O)OR′ and L² is —(C═O)OR². In any of the foregoing embodiments, L³ is —(C═O)OR³.

[0874] In some of the foregoing embodiments of structure (VIII), G¹ and G² are each independently C₂-C₁₂ alkylene, for example C₄-C₁₀ alkylene.

[0875] In some of the foregoing embodiments of structure (VIII), R¹, R² and R³ are each, independently branched C₆-C₂₄ alkyl. For example, in some embodiments, R¹, R² and R³ each, independently have the following structure:

wherein:
[0876] R^{7a} and R^{7b} are, at each occurrence, independently H or C₁-C₁₂ alkyl;
   and
[0877] a is an integer from 2 to 12,
   wherein R^{7a}, R^{7b} and a are each selected such that R¹ and R² each independently comprise from 6 to 20 carbon atoms. For example, in some embodiments a is an integer ranging from 5 to 9 or from 8 to 12.

[0878] In some of the foregoing embodiments of structure (VIII), at least one occurrence of R^{7a} is H. For example, in some embodiments, R^{7a} is H at each occurrence. In other different embodiments of the foregoing, at least one occurrence of R^{7b} is C₁-C₈ alkyl. For example, in some embodiments, C₁-C₈ alkyl is methyl, ethyl, n-propyl, iso-propyl, n-butyl, iso-butyl, tert-butyl, n-hexyl or n-octyl.

[0879] In some of the foregoing embodiments of structure (VIII), X is CR, Y is NR and R³ is C₁-C₁₂ alkyl, such as ethyl, propyl or butyl. In some of these embodiments, R¹ and R² are each independently branched C₆-C₂₄ alkyl.

[0880] In different embodiments of structure (VIII), R¹, R² and R³ each, independently have one of the following structures:

[0881] In certain embodiments of structure (VIII), R¹ and R² and R³ are each, independently, branched C₆-C₂₄ alkyl and R³ is C₁-C₂₄ alkyl or C₂-C₂₄ alkenyl. In some of the foregoing embodiments of structure (VIII), R^{b}, R^{c}, R^{e} and R^{f} are each independently C₃-C₁₂ alkyl. For example, in some embodiments R^{b}, R^{c}, R^{e} and R^{f} are n-hexyl and in other embodiments R^{b}, R^{c}, R^{e} and R^{f} are n-octyl.

[0882] In various different embodiments of structure (VIII), the compound has one of the structures set forth in Table 7 below.

TABLE 7
Representative cationic lipids of structure (VIII)

| No. | Structure |
|---|---|
| VIII-1 | |
| VIII-2 | |
| VIII-3 | |
| VIII-4 | |
| VIII-5 | |
| VIII-6 | |
| VIII-7 | |
| VIII-8 | |
| VIII-9 | |
| VIII-10 | |
| VIII-11 | |
| VIII-12 | |

[0883] In one embodiment, the cationic lipid is a compound having the

or a pharmaceutically acceptable salt, prodrug or stereoisomer thereof, wherein: L¹ is —O(C═O)R¹, —(C═O)OR¹, —C(═O)R¹, —OR¹, —S(O)ₓR¹, —S—SR¹, —C(═O)SR¹, —SC(═O)R¹, —NR^{a}C(═O)R¹, —C(═O)NR^{b}R^{c}, —NR^{a}C(═O)NR^{b}R^{c}, —OC(═O)NR^{b}R^{c} or —NR^{a}C(═O)OR¹;
[0884] L² is —O(C═O)R², —(C═O)OR², —C(═O)R², —OR², —S(O)xR², —S—SR², —C(═O)SR², —SC(═O)R², —NR^{d}C(═O)R², —C(═O)NR^{e}R^{f}, —NR^{d}C(═O)NR^{e}R^{f}, —OC(═O)NR^{e}R^{f}, —NR^{d}C(═O)OR² or a direct bond to R²
[0885] G¹ and G² are each independently C₂-C₁₂ alkylene or C₂-C₁₂ alkenylene;
[0886] G³ is C₁-C₂₄ alkylene, C₂-C₂₄ alkenylene, C₃-C₅ cycloalkylene or C₃-C₈ cycloalkenylene;
[0887] R^{a}, R^{b}, R^{d} and R^{e} are each independently H or C₁-C₁₂ alkyl or C₁-C₂ alkenyl;
[0888] R^{c} and R^{f} are each independently C₁-C₁₂ alkyl or C₂-C₁₂ alkenyl;
[0889] R¹ and R² are each independently branched C₆-C₂₄ alkyl or branched C₆-C₂₄ alkenyl;
[0890] R³ is —N(R⁴)R⁵;
[0891] R⁴ is C₁-C₁₂ alkyl;
[0892] R⁵ is substituted C₁-C₁ alkyl; and
[0893] x is 0, 1 or 2, and
   wherein each alkyl, alkenyl, alkylene, alkenylene, cycloalkylene, cycloalkenylene, aryl and aralkyl is independently substituted or unsubstituted unless otherwise specified.

[0894] In certain embodiments of structure (XI), G³ is unsubstituted. In more specific embodiments G³ is C₂-C₂ alkylene, for example, in some embodiments G³ is C₃-C₇ alkylene or in other embodiments G³ is C₃-C₁₂ alkylene. In some embodiments, G³ is C₂ or C₃ alkylene.

[0895] In some of the foregoing embodiments of structure (IX), the compound has the following structure (IX A):

wherein y and z are each independently integers ranging from 2 to 12, for example an integer from 2 to 6, from 4 to 10, or for example 4 or 5. In certain embodiments, y and z are each the same and selected from 4, 5, 6, 7, 8 and 9.

[0896] In some of the foregoing embodiments of structure (IX), L¹ is —O(C═O)R¹, —(C═O)OR′ or —C(═O)NR^{b}R^{c}, and L² is —O(C═O)R², —(C═O)OR² or —C(═O)NR^{e}R^{f}. For example, in some embodiments L¹ and L² are —(C═O)OR′ and —(C═O)OR², respectively. In other embodiments L¹ is —(C═O)OR′ and L² is —C(═O)NR^{e}R^{f}. In other embodiments L¹ is —C(═O)NR^{b}R^{c} and L² is —C(═O)NR^{e}R^{f}.

[0897] In other embodiments of the foregoing, the compound has one of the following structures (IXB), (IXC), (IXD) or (IXE):

[0898] In some of the foregoing embodiments, the compound has structure (IXB), in other embodiments, the compound has structure (IXC) and in still other embodiments the compound has the structure (IXD). In other embodiments, the compound has structure (IXE).

[0899] In some different embodiments of the foregoing, the compound has one of the following structures (IXF), (IXG), (IXH) or (IXJ):

wherein y and z are each independently integers ranging from 2 to 12, for example an integer from 2 to 6, for example 4.

[0900] In some of the foregoing embodiments of structure (IX), y and z are each independently an integer ranging from 2 to 10, 2 to 8, from 4 to 10 or from 4 to 7. For example, in some embodiments, y is 4, 5, 6, 7, 8, 9, 10, 11 or 12. In some embodiments, z is 4, 5, 6, 7, 8, 9, 10, 11 or 12. In some embodiments, y and z are the same, while in other embodiments y and z are different.

[0901] In some of the foregoing embodiments of structure (IX), R¹ or R², or both is branched C₆-C₂₄ alkyl. For example, in some embodiments, R¹ and R² each, independently have the following structure:

wherein:
[0902] R^{7a} and R^{7b} are, at each occurrence, independently H or C₁-C₁₂ alkyl; and
[0903] a is an integer from 2 to 12,
   wherein R^{7a}, R^{7b} and a are each selected such that R¹ and R² each independently comprise from 6 to 20 carbon atoms. For example, in some embodiments a is an integer ranging from 5 to 9 or from 8 to 12.

[0904] In some of the foregoing embodiments of structure (IX), at least one occurrence of R^{7a} is H. For example, in some embodiments, R^{7a} is H at each occurrence. In other different embodiments of the foregoing, at least one occurrence of R^{7b} is C₁-C₁₂ alkyl. For example, in some embodiments, C₁-C₈ alkyl is methyl, ethyl, n-propyl, iso-propyl, n-butyl, iso-butyl, tert-butyl, n-hexyl or n-octyl.

[0905] In different embodiments of structure (IX), R¹ or R², or both, has one of the following structures:

[0906] In some of the foregoing embodiments of structure (IX), R^{b}, R^{c}, R^{e} and R^{f} are each independently C₃-C₁₂ alkyl. For example, in some embodiments R^{b}, R, Re and R^{f} are n-hexyl and in other embodiments R^{b}, R^{c}, R^{e} and R^{f} are n-octyl.

[0907] In any of the foregoing embodiments of structure (IX), R⁴ is substituted or unsubstituted: methyl, ethyl, propyl, n-butyl, n-hexyl, n-octyl or n-nonyl. For example, in some embodiments R⁴ is unsubstituted. In other R⁴ is substituted with one or more substituents selected from the group consisting of —OR^{g}, —NR^{g}C(═O)R^{h}, —C(═O)NR^{g}R^{h}, —C(═O)R^{h}, —OC(═O)R^{h}, —C(═O)OR^{h} and —ORⁱOH, wherein:
[0908] R^{g} is, at each occurrence independently H or C₁-C₆ alkyl;
[0909] R^{h} is at each occurrence independently C₁-C₆ alkyl; and
[0910] Rⁱ is, at each occurrence independently C₁-C₆ alkylene.

[0911] In other of the foregoing embodiments of structure (IX), R⁵ is substituted: methyl, ethyl, propyl, n-butyl, n-hexyl, n-octyl or n-nonyl. In some embodiments, R⁵ is substituted ethyl or substituted propyl. In other different embodiments, R⁵ is substituted with hydroxyl. In still more embodiments, R⁵ is substituted with one or more substituents selected from the group consisting of —OR⁹, —NR^{g}C(═O)R^{h}, —C(═O)NR^{g}R^{h}, —C(═O)R^{h}, —OC(═O)R^{h}, —C(═O)OR^{h} and —ORⁱOH, wherein:
[0912] R^{g} is, at each occurrence independently H or C₁-C₆ alkyl;
[0913] R^{h} is at each occurrence independently C₁-C₆ alkyl; and
[0914] Rⁱ is, at each occurrence independently C₁-C₆ alkylene.

[0915] In other embodiments of structure (IX), R⁴ is unsubstituted methyl, and R⁵ is substituted: methyl, ethyl, propyl, n-butyl, n-hexyl, n-octyl or n-nonyl. In some of these embodiments, R⁵ is substituted with hydroxyl.

[0916] In some other specific embodiments of structure (IX), R³ has one of the following structures:

[0917] In various different embodiments of structure (IX), the cationic lipid has one of the structures set forth in Table 8 below.

TABLE 8
Representative cationic lipids of structure (IX)

| No. | Structure |
|---|---|
| IX-1 | |
| IX-2 | |
| IX-3 | |
| IX-4 | |
| IX-5 | |
| IX-6 | |
| IX-7 | |
| IX-8 | |
| IX-9 | |
| IX-10 | |
| IX-11 | |
| IX-12 | |
| IX-13 | |
| IX-14 | |
| IX-15 | |
| IX-16 | |
| IX-17 | |
| IX-18 | |

[0918] In one embodiment, the cationic lipid is a compound having the following structure (X):

or a pharmaceutically acceptable salt, tautomer, prodrug or stereoisomer thereof, wherein:
[0919] G¹ is —OH, —NR³R⁴, —(C═O)NR⁵ or —NR³(C═O)R⁵;
[0920] G² is —CH₂— or —(C═O)—;
[0921] R is, at each occurrence, independently H or OH;
[0922] R¹ and R² are each independently branched, saturated or unsaturated C₁₂-C₃₆ alkyl;
[0923] R³ and R⁴ are each independently H or straight or branched, saturated or unsaturated C₁-C₆ alkyl;
[0924] R⁵ is straight or branched, saturated or unsaturated C₁-C₆ alkyl; and
[0925] n is an integer from 2 to 6.

[0926] In some embodiments, R¹ and R² are each independently branched, saturated or unsaturated C₁₂-C₃₀ alkyl, C₁₂-C₂₀ alkyl, or C₁₅-C₂₀ alkyl. In some specific embodiments, R¹ and R² are each saturated. In certain embodiments, at least one of R¹ and R² is unsaturated.

[0927] In some of the foregoing embodiments of structure (X), R¹ and R² have the following structure:

[0928] In some of the foregoing embodiments of structure (X), the compound has the following structure (XA):

wherein:
[0929] R⁶ and R⁷ are, at each occurrence, independently H or straight or branched, saturated or unsaturated C₁-C₁₄ alkyl;
[0930] a and b are each independently an integer ranging from 1 to 15,
[0931] provided that R⁶ and a, and R⁷ and b, are each independently selected such that R¹ and R², respectively, are each independently branched, saturated or unsaturated C₁₂-C₃₆ alkyl.

[0932] In some of the foregoing embodiments, the compound has the following structure (XB):

wherein:
[0933] R⁸, R⁹, R¹⁰ and R¹¹ are each independently straight or branched, saturated or unsaturated C₄-C₁₂ alkyl, provided that R⁸ and R⁹, and R¹⁰ and R¹¹, are each independently selected such that R¹ and R², respectively, are each independently branched, saturated or unsaturated C₁₂-C₃₆ alkyl. In some embodiments of (XB), R⁸, R⁹, R¹⁰ and R¹¹ are each independently straight or branched, saturated or unsaturated C₆-C₁₀ alkyl. In certain embodiments of (XB), at least one of R⁸, R⁹, R¹⁰ and R¹¹ is unsaturated. In other certain specific embodiments of (XB), each of R⁸, R⁹, R¹⁰ and R¹¹ is saturated.

[0934] In some of the foregoing embodiments, the compound has structure (XA), and in other embodiments, the compound has structure (XB).

[0935] In some of the foregoing embodiments, G¹ is —OH, and in some embodiments G¹ is —NR³R⁴. For example, in some embodiments, G¹ is —NH₂, —NHCH₃ or —N(CH₃)₂. In certain embodiments, G¹ is —(C═O)NR⁵. In certain other embodiments, G¹ is —NR³(C═O)R⁵. For example, in some embodiments G¹ is —NH(C═O)CH₃ or —NH(C═O)CH₂CH₂CH₃.

[0936] In some of the foregoing embodiments of structure (X), G² is —CH₂—. In some different embodiments, G² is —(C═O)—.

[0937] In some of the foregoing embodiments of structure (X), n is an integer ranging from 2 to 6, for example, in some embodiments n is 2, 3, 4, 5 or 6. In some embodiments, n is 2. In some embodiments, n is 3. In some embodiments, n is 4.

[0938] In certain of the foregoing embodiments of structure (X), at least one of R¹, R², R³, R⁴ and R⁵ is unsubstituted. For example, in some embodiments, R¹, R², R³, R⁴ and R⁵ are each unsubstituted. In some embodiments, R³ is substituted. In other embodiments R⁴ is substituted. In still more embodiments, R⁵ is substituted. In certain specific embodiments, each of R³ and R⁴ are substituted. In some embodiments, a substituent on R³, R⁴ or R⁵ is hydroxyl. In certain embodiments, R³ and R⁴ are each substituted with hydroxyl.

[0939] In some of the foregoing embodiments of structure (X), at least one R is OH. In other embodiments, each R is H.

[0940] In various different embodiments of structure (X), the compound has one of the structures set forth in Table 9 below.

TABLE 9
Representative cationic lipids of structure (X)

| No. | Structure |
|---|---|
| X-1 | |
| X-2 | |
| X-3 | |
| X-4 | |
| X-5 | |
| X-6 | |
| X-7 | |
| X-8 | |
| X-9 | |
| X-10 | |
| X-11 | |
| X-12 | |
| X-13 | |
| X-14 | |
| X-15 | |
| X-16 | |
| X-17 | |

[0941] In any of Embodiments 1, 2, 3, 4 or 5, the LNPs further comprise a neutral lipid. In various embodiments, the molar ratio of the cationic lipid to the neutral lipid ranges from about 2:1 to about 8:1. In certain embodiments, the neutral lipid is present in any of the foregoing LNPs in a concentration ranging from 5 to 10 mol percent, from 5 to 15 mol percent, 7 to 13 mol percent, or 9 to 11 mol percent. In certain specific embodiments, the neutral lipid is present in a concentration of about 9.5, or 10.5 mol percent. In some embodiments, the molar ratio of cationic lipid to the neutral lipid ranges from about 4.1:1.0 to about 4.9:1.0, from about 4.5:1.0 to about 4.8:1.0, or from about 4.7:1.0 to 4.8:1.0. In some embodiments, the molar ratio of total cationic lipid to the neutral lipid ranges from about 4.1:1.0 to about 4.9:1.0, from about 4.5:1.0 to about 4.8:1.0, or from about 4.7:1.0 to 4.8:1.0.

[0942] Exemplary neutral lipids for use in any of Embodiments 1, 2, 3, 4 or 5 include, for example, distearoylphosphatidylcholine (DSPC), dioleoylphosphatidylcholine (DOPC), dipalmitoylphosphatidylcholine (DPPC), dioleoylphosphatidylglycerol (DOPG), dipalmitoylphosphatidylglycerol (DPPG), dioleoyl-phosphatidylethanolamine (DOPE), palmitoyloleoylphosphatidylcholine (POPC), palmitoyloleoyl-phosphatidylethanolamine (POPE) and dioleoyl-phosphatidylethanolamine 4-(N-maleimidomethyl)-cyclohexane-lcarboxylate (DOPE-mal), dipalmitoyl phosphatidyl ethanolamine (DPPE), dimyristoylphosphoethanolamine (DMPE), distearoyl-phosphatidylethanolamine (DSPE), 16-O-monomethyl PE, 16-O-dimethyl PE, 18-1-trans PE, 1-stearioyl-2-oleoylphosphatidyethanol amine (SOPE), and 1,2-dielaidoyl-sn-glycero-3-phophoethanolamine (transDOPE). In one embodiment, the neutral lipid is 1,2-distearoyl-sn-glycero-3phosphocholine (DSPC). In some embodiments, the neutral lipid is selected from DSPC, DPPC, DMPC, DOPC, POPC, DOPE and SM. In some embodiments, the neutral lipid is DSPC.

[0943] In various embodiments of Embodiments 1, 2, 3, 4 or 5, any of the disclosed lipid nanoparticles comprise a steroid or steroid analogue. In certain embodiments, the steroid or steroid analogue is cholesterol. In some embodiments, the steroid is present in a concentration ranging from 39 to 49 molar percent, 40 to 46 molar percent, from 40 to 44 molar percent, from 40 to 42 molar percent, from 42 to 44 molar percent, or from 44 to 46 molar percent. In certain specific embodiments, the steroid is present in a concentration of 40, 41, 42, 43, 44, 45, or 46 molar percent.

[0944] In certain embodiments, the molar ratio of cationic lipid to the steroid ranges from 1.0:0.9 to 1.0:1.2, or from 1.0:1.0 to 1.0:1.2. In some of these embodiments, the molar ratio of cationic lipid to cholesterol ranges from about 5:1 to 1:1. In certain embodiments, the steroid is present in a concentration ranging from 32 to 40 mol percent of the steroid.

[0945] In certain embodiments, the molar ratio of total cationic to the steroid ranges from 1.0:0.9 to 1.0:1.2, or from 1.0:1.0 to 1.0:1.2. In some of these embodiments, the molar ratio of total cationic lipid to cholesterol ranges from about 5:1 to 1:1. In certain embodiments, the steroid is present in a concentration ranging from 32 to 40 mol percent of the steroid.

[0946] In some embodiments of Embodiments 1, 2, 3 4 or 5, the LNPs further comprise a polymer conjugated lipid. In various other embodiments of Embodiments 1, 2, 3 4 or 5, the polymer conjugated lipid is a pegylated lipid. For example, some embodiments include a pegylated diacylglycerol (PEG-DAG) such as 1-(monomethoxy-polyethyleneglycol)-2,3-dimyristoylglycerol (PEG-DMG), a pegylated phosphatidylethanoloamine (PEG-PE), a PEG succinate diacylglycerol (PEG-S-DAG) such as 4-O-(2′,3′-di(tetradecanoyloxy)propyl-1-O—(ω-methoxy(polyethoxy)ethyl)butanedioate (PEG-S-DMG), a pegylated ceramide (PEG-cer), or a PEG dialkoxypropylcarbamate such as ω-methoxy(polyethoxy)ethyl-N-(2,3-di(tetradecanoxy)propyl)carbamate or 2,3-di(tetradecanoxy)propyl-N—(ω-methoxy(polyethoxy)ethyl)carbamate.

[0947] In various embodiments, the polymer conjugated lipid is present in a concentration ranging from 1.0 to 2.5 molar percent. In certain specific embodiments, the polymer conjugated lipid is present in a concentration of about 1.7 molar percent. In some embodiments, the polymer conjugated lipid is present in a concentration of about 1.5 molar percent.

[0948] In certain embodiments, the molar ratio of cationic lipid to the polymer conjugated lipid ranges from about 35:1 to about 25:1. In some embodiments, the molar ratio of cationic lipid to polymer conjugated lipid ranges from about 100:1 to about 20:1.

[0949] In certain embodiments, the molar ratio of total cationic lipid (i.e., the sum of the first and second cationic lipid) to the polymer conjugated lipid ranges from about 35:1 to about 25:1. In some embodiments, the molar ratio of total cationic lipid to polymer conjugated lipid ranges from about 100:1 to about 20:1.

[0950] In some embodiments of Embodiments 1, 2, 3 4 or 5, the pegylated lipid, when present, has the following Formula (XI):

[0951] or a pharmaceutically acceptable salt, tautomer or stereoisomer thereof, wherein:
[0952] R¹² and R¹³ are each independently a straight or branched, saturated or unsaturated alkyl chain containing from 10 to 30 carbon atoms, wherein the alkyl chain is optionally interrupted by one or more ester bonds; and
[0953] w has a mean value ranging from 30 to 60.

[0954] In some embodiments, R¹² and R¹³ are each independently straight, saturated alkyl chains containing from 12 to 16 carbon atoms. In other embodiments, the average w ranges from 42 to 55, for example, the average w is 42, 43, 44, 45, 46, 47, 48, 49, 50, 51, 52, 53, 54 or 55. In some specific embodiments, the average w is about 49.

[0955] In some embodiments, the pegylated lipid has the following Formula (XIa):

wherein the average w is about 49.

[0956] In some embodiments of Embodiments 1, 2, 3 4 or 5, the nucleic acid is selected from antisense and messenger RNA. For example, messenger RNA may be used to induce an immune response (e.g., as a vaccine), for example by translation of immunogenic proteins.

[0957] In other embodiments of Embodiments 1, 2, 3 4 or 5, the nucleic acid is mRNA, and the mRNA to lipid ratio in the LNP (i.e., N/P, were N represents the moles of cationic lipid and P represents the moles of phosphate present as part of the nucleic

[0958] In an embodiment, the transfer vehicle comprises a lipid or an ionizable lipid described in US patent publication number 20190314524.

[0959] Some embodiments of the present invention provide nucleic acid-lipid nanoparticle compositions comprising one or more of the novel cationic lipids described herein as structures listed in Table 10, that provide increased activity of the nucleic acid and improved tolerability of the compositions in vivo.

[0960] In one embodiment, an ionizable lipid has the following structure (XII):

or a pharmaceutically acceptable salt, tautomer, prodrug or stereoisomer thereof, wherein:
[0961] one of L¹ or L² is —O(C═O)—, —(C═O)O—, —C(═O)—, —O—, —S(O)ₓ—, —S—S—, —C(═O)S—, —SC(═O)—, —NR^{a}C(═O)—, —C(═O)NR^{a}—, —N^{a}C(═)NR^{a}—, —OC(═O)NR^{a}—, or —NR^{a}C(═O)O—, and the other of L¹ or L² is —O(C═O)—, —(C═O)O—, —C(═O)—, —O—, —S(O)—, —S—S—, —C(═O)S—, —SC(═O)—, —NR^{a}C(═O)—, —C(═O)NR^{a}—, —NR^{a}C(═O)NR^{a}—, —OC(═O)NR^{a}— or —NR^{a}C(═O)O— or a direct bond;
[0962] G¹ and G² are each independently unsubstituted C₁-C₁₂ alkylene or C₁-C₁₂ alkenylene;
[0963] G³ is C₁-C₂₄ alkylene, C₁-C₂₄ alkenylene, C₃-C₈ cycloalkylene, C₃-C₈ cycloalkenylene;
[0964] R^{a} is H or C₁-C₁₂ alkyl;
[0965] R¹ and R² are each independently C₆-C₂₄ alkyl or C₆-C₂₄ alkenyl;
[0966] R³ is H, OR⁵, CN, C(═O)OR⁴, OC(═O)R⁴ or NR⁵C(═O)R⁴;
[0967] R⁴ is C₁-C₁₂ alkyl;
[0968] R⁵ is H or C₁-C₆ alkyl; and
[0969] x is 0, 1 or 2.

[0970] In some embodiments, an ionizable lipid has one of the following structures (XIIA) or (XIIB):

wherein:
[0971] A is a 3 to 8-membered cycloalkyl or cycloalkylene ring;
[0972] R⁶ is, at each occurrence, independently H, OH or C₁-C₂₄ alkyl; and
[0973] n is an integer ranging from 1 to 15.

[0974] In some embodiments, the ionizable lipid has structure (XIIA), and in other embodiments, the ionizable lipid has structure (XIIB).

[0975] In other embodiments, an ionizable lipid has one of the following structures (XIIC) or (XIID):

wherein y and z are each independently integers ranging from 1 to 12.

[0976] In some embodiments, one of L¹ or L² is O(C═O). For example, in some embodiments each of L¹ and L² are O(C═O). In some different embodiments of any of the foregoing, L¹ and L² are each independently (C═O)O or O(C═O). For example, in some embodiments each of L¹ and L² is —(C═O)O—.

[0977] In some embodiments, an ionizable lipid has one of the following structures (XIIE) or (XIIF):

[0978] In some embodiments, an ionizable lipid has one of the following structures (XIIG), (XIIH), (XIII), or (XIIJ).

[0979] In some embodiments, n is an integer ranging from 2 to 12, for example from 2 to 8 or from 2 to 4. For example, in some embodiments, n is 3, 4, 5 or 6. In some embodiments, n is 3. In some embodiments, n is 4. In some embodiments, n is 5. In some embodiments, n is 6.

[0980] In some embodiments, y and z are each independently an integer ranging from 2 to 10. For example, in some embodiments, y and z are each independently an integer ranging from 4 to 9 or from 4 to 6.

[0981] In some embodiments, R⁶ is H. In other embodiments, R⁶ is C₁-C₂₄ alkyl. In other embodiments, R⁶ is OH.

[0982] In some embodiments, G³ is unsubstituted. In other embodiments, G3 is substituted. In various different embodiments, G³ is linear C₁-C₂₄ alkylene or linear C₁-C₂₄ alkenylene.

[0983] In some embodiments, R¹ or R², or both, is C₆-C₂₄ alkenyl. For example, in some embodiments, R¹ and R² each, independently have the following structure:

wherein:
[0984] R^{7a} and R^{7b} are, at each occurrence, independently H or C₁-C₁₂ alkyl; and
[0985] a is an integer from 2 to 12,
[0986] wherein R^{7a}, R^{7b} and a are each selected such that R¹ and R² each independently comprise from 6 to 20 carbon atoms.

[0987] In some embodiments, a is an integer ranging from 5 to 9 or from 8 to 12.

[0988] In some embodiments, at least one occurrence of R^{7a} is H. For example, in some embodiments, R^{7a} is H at each occurrence. In other different embodiments, at least one occurrence of R^{7b} is C₁-C₈ alkyl. For example, in some embodiments, C₁-C₈ alkyl is methyl, ethyl, n-propyl, iso-propyl, n-butyl, iso-butyl, tert-butyl, n-hexyl or n-octyl.

[0989] In different embodiments, R¹ or R², or both, has one of the following structures:

[0990] In some embodiments, R³ is OH, CN, C(═O)OR⁴, OC(═O)R⁴ or NHC(═O)R⁴. In some embodiments, R⁴ is methyl or ethyl.

[0991] In some embodiments, an ionizable lipid is a compound of Formula (1):

wherein:
[0992] each n is independently 1, 2, 3, 4, 5, 6, 7, 8, 9, 10, 11, 12, 13, 14, or 15; and
[0993] L₁ and L₃ are each independently —OC(O)—* or —C(O)O—*, wherein “*” indicates the attachment point to R₁ or R₃;
[0994] R₁ and R₃ are each independently a linear or branched C₉-C₂₀ alkyl or C₉-C₂₀ alkenyl, optionally substituted by one or more substituents selected from oxo, halo, hydroxy, cyano, alkyl, alkenyl, aldehyde, heterocyclylalkyl, hydroxyalkyl, dihydroxyalkyl, hydroxyalkylaminoalkyl, aminoalkyl, alkylaminoalkyl, dialkylaminoalkyl, (heterocyclyl)(alkyl)aminoalkyl, heterocyclyl, heteroaryl, alkylheteroaryl, alkynyl, alkoxy, amino, dialkylamino, aminoalkylcarbonylamino, aminocarbonylalkylamino, (aminocarbonylalkyl)(alkyl)amino, alkenylcarbonylamino, hydroxycarbonyl, alkyloxycarbonyl, aminocarbonyl, aminoalkylaminocarbonyl, alkylaminoalkylaminocarbonyl, dialkylaminoalkylaminocarbonyl, heterocyclylalkylaminocarbonyl, (alkylaminoalkyl)(alkyl)aminocarbonyl, alkylaminoalkylcarbonyl, dialkylaminoalkylcarbonyl, heterocyclylcarbonyl, alkenylcarbonyl, alkynylcarbonyl, alkylsulfoxide, alkylsulfoxidealkyl, alkylsulfonyl, and alkylsulfonealkyl.

[0995] In some embodiments, R₁ and R₃ are the same. In some embodiments, R₁ and R₃ are different.

[0996] In some embodiments, R¹ and R₃ are each independently a branched saturated C₉-C₂₀ alkyl. In some embodiments, one of R¹ and R₃ is a branched saturated C₉-C₂₀ alkyl, and the other is an unbranched saturated C₉-C₂₀ alkyl. In some embodiments, R¹ and R₃ are each independently selected from a group consisting of:

[0997] In various embodiments, R₂ is selected from a group consisting of:

[0998] In some embodiments, R₂ may be as described in International Pat. Pub. No. WO2019/152848 A1, which is incorporated herein by reference in its entirety.

[0999] In some embodiments, an ionizable lipid is a compound of Formula (1-1) or Formula (1-2):

wherein n, R₁, R₂, and R₃ are as defined in Formula (1).

[1000] In some embodiments, the one or more of the cationic or ionizable lipids are represented by Formula (I):

wherein:
[1001] n is an integer between 1 and 4;
[1002] Rₐ is hydrogen or hydroxyl; and
[1003] R₁ and R₂ are each independently a linear or branched C₆-C₃₀ alkyl, C₆-C₃₀ alkenyl, or C₆-C₃₀ heteroalkyl, optionally substituted by one or more substituents selected from a group consisting of oxo, halo, hydroxy, cyano, alkyl, alkenyl, aldehyde, heterocyclylalkyl, hydroxyalkyl, dihydroxyalkyl, hydroxyalkylaminoalkyl, aminoalkyl, alkylaminoalkyl, dialkylaminoalkyl, (heterocyclyl)(alkyl)aminoalkyl, heterocyclyl, heteroaryl, alkylheteroaryl, alkynyl, alkoxy, amino, dialkylamino, aminoalkylcarbonylamino, aminocarbonylalkylamino, (aminocarbonylalkyl)(alkyl)amino, alkenylcarbonylamino, hydroxycarbonyl, alkyloxycarbonyl, aminocarbonyl, aminoalkylaminocarbonyl, alkylaminoalkylaminocarbonyl, dialkylaminoalkylaminocarbonyl, heterocyclylalkylaminocarbonyl, (alkylaminoalkyl)(alkyl)aminocarbonyl, alkylaminoalkylcarbonyl, dialkylaminoalkylcarbonyl, heterocyclylcarbonyl, alkenylcarbonyl, alkynylcarbonyl, alkylsulfoxide, alkylsulfoxidealkyl, alkylsulfonyl, and alkylsulfonealkyl.

[1004] In some embodiments, Rₐ is hydrogen. In some embodiments, Rₐ is hydroxyl.

[1005] In some embodiments, the ionizable lipid is represented by Formula (Ia-1), Formula (Ia-2), or Formula (Ia-3):

[1006] In some embodiments, the ionizable lipid is represented by Formula (Ib-1), Formula (Ib-2), or Formula (Ib-3):

[1007] In some embodiments, the ionizable lipid is represented by Formula (Ib-4), Formula (Ib-5), Formula (Ib-6), Formula (Ib-7), Formula (Ib-8), or Formula (Ib-9):

[1008] In some embodiments, the one or more of the cationic or ionizable lipids are represented by Formula (I), wherein R₁ and R₂ are each independently selected from:

[1009] In some embodiments, R₁ and R₂ are the same. In some embodiments, R₁ and R₂ are different.

[1010] In various embodiments, the one or more of the cationic or ionizable lipids are represented by Formula (I*):

wherein:
[1011] n* is an integer between 1 to 7,
[1012] R^{a} is hydrogen or hydroxyl,
[1013] R^{b} is hydrogen or C₁-C₆ alkyl,
   R₁ and R₂ are each independently a linear or branched C₁-C₃₀ alkyl, C₂-C₃₀ alkenyl, or C₁-C₃₀ heteroalkyl, optionally substituted by one or more substituents selected from oxo, halo, hydroxy, cyano, alkyl, alkenyl, aldehyde, heterocyclylalkyl, hydroxyalkyl, dihydroxyalkyl, hydroxyalkylaminoalkyl, aminoalkyl, alkylaminoalkyl, dialkylaminoalkyl, (heterocyclyl)(alkyl)aminoalkyl, heterocyclyl, heteroaryl, alkylheteroaryl, alkynyl, alkoxy, amino, dialkylamino, aminoalkylcarbonylamino, aminocarbonylalkylamino, (aminocarbonylalkyl)(alkyl)amino, alkenylcarbonylamino, hydroxycarbonyl, alkyloxycarbonyl, alkylcarbonyloxy, alkylcarbonate, alkenyloxycarbonyl, alkenylcarbonyloxy, alkenylcarbonate, alkynyloxycarbonyl, alkynylcarbonyloxy, alkynylcarbonate, aminocarbonyl, aminoalkylaminocarbonyl, alkylaminoalkylaminocarbonyl, dialkylaminoalkylaminocarbonyl, heterocyclylalkylaminocarbonyl, (alkylaminoalkyl)(alkyl)aminocarbonyl, alkylaminoalkylcarbonyl, dialkylaminoalkylcarbonyl, heterocyclylcarbonyl, alkenylcarbonyl, alkynylcarbonyl, alkylsulfoxide, alkylsulfoxidealkyl, alkylsulfonyl, and alkylsulfonealkyl.

[1014] Preparation methods for the above compounds and compositions are described herein below and/or known in the art.

[1015] It will be appreciated by those skilled in the art that in the process described herein the functional groups of intermediate compounds may need to be protected by suitable protecting groups. Such functional groups include, e.g., hydroxyl, amino, mercapto, and carboxylic acid. Suitable protecting groups for hydroxyl include, e.g., trialkylsilyl or diarylalkylsilyl (for example, t-butyldimethylsilyl, t-butyldiphenylsilyl or trimethylsilyl), tetrahydropyranyl, benzyl, and the like. Suitable protecting groups for amino, amidino, and guanidino include, e.g., t-butoxycarbonyl, benzyloxycarbonyl, and the like. Suitable protecting groups for mercapto include, e.g., —C(O)—R″ (where R″ is alkyl, aryl, or arylalkyl), p-methoxybenzyl, trityl, and the like. Suitable protecting groups for carboxylic acid include, e.g., alkyl, aryl, or arylalkyl esters. Protecting groups may be added or removed in accordance with standard techniques, which are known to one skilled in the art and as described herein. The use of protecting groups is described in detail in, e.g., Green, T. W. and P. G. M. Wutz, Protective Groups in Organic Synthesis (1999), 3rd Ed., Wiley. As one of skill in the art would appreciate, the protecting group may also be a polymer resin such as a Wang resin, Rink resin, or a 2-chlorotrityl-chloride resin.

[1016] It will also be appreciated by those skilled in the art, although such protected derivatives of compounds of this invention may not possess pharmacological activity as such, they may be administered to a mammal and thereafter metabolized in the body to form compounds of the invention which are pharmacologically active. Such derivatives may therefore be described as prodrugs. All prodrugs of compounds of this invention are included within the scope of the invention.

[1017] Furthermore, all compounds of the invention which exist in free base or acid form can be converted to their pharmaceutically acceptable salts by treatment with the appropriate inorganic or organic base or acid by methods known to one skilled in the art. Salts of the compounds of the invention can also be converted to their free base or acid form by standard techniques.

[1018] The following reaction scheme illustrates an exemplary method to make compounds of Formula (1):

[1019] A1 are purchased or prepared according to methods known in the art. Reaction of A1 with diol A2 under appropriate condensation conditions (e.g., DCC) yields ester/alcohol A3, which can then be oxidized (e.g., with PCC) to aldehyde A4. Reaction of A4 with amine A5 under reductive amination conditions yields a compound of Formula (1).

[1020] The following reaction scheme illustrates a second exemplary method to make compounds of Formula (1), wherein R₁ and R₃ are the same:

[1021] Modifications to the above reaction scheme, such as using protecting groups, may yield compounds wherein R₁ and R₃ are different. The use of protecting groups, as well as other modification methods, to the above reaction scheme will be readily apparent to one of ordinary skill in the art.

[1022] It is understood that one skilled in the art may be able to make these compounds by similar methods or by combining other methods known to one skilled in the art. It is also understood that one skilled in the art would be able to make other compounds of Formula (1) not specifically illustrated herein by using the appropriate starting materials and modifying the parameters of the synthesis. In general, starting materials may be obtained from sources such as Sigma Aldrich, Lancaster Synthesis, Inc., Maybridge, Matrix Scientific, TCI, and Fluorochem USA, etc. or synthesized according to sources known to those skilled in the art (see, e.g., Advanced Organic Chemistry: Reactions, Mechanisms, and Structure, 5th edition (Wiley, December 2000)) or prepared as described in this invention.

[1023] In some embodiments, an ionizable lipid is a compound of Formula (2):

wherein each n is independently 1, 2, 3, 4, 5, 6, 7, 8, 9, 10, 11, 12, 13, 14, or 15.

[1024] In some embodiments, as used in Formula (2), R₁ and R₂ are as defined in Formula (1).

[1025] In some embodiments, as used in Formula (2), R₁ and R₂ are each independently selected from a group consisting of:

[1026] In some embodiments, R₁ and/or R₂ as used in Formula (2) may be as described in International Pat. Pub. No. WO2015/095340 A1, which is incorporated herein by reference in its entirety. In some embodiments, R₁ as used in Formula (2) may be as described in International Pat. Pub. No. WO2019/152557 A1, which is incorporated herein by reference in its entirety.

[1027] In some embodiments, as used in Formula (2), R₃ is selected from a group consisting of:

[1028] In some embodiments, an ionizable lipid is a compound of Formula (3)

wherein X is selected from —O—, —S—, or —OC(O)—*, wherein * indicates the attachment point to R₁.

[1029] In some embodiments, an ionizable lipid is a compound of Formula (3-1):

[1030] In some embodiments, an ionizable lipid is a compound of Formula (3-2):

[1031] In some embodiments, an ionizable lipid is a compound of Formula (3-3):

[1032] In some embodiments, as used in Formula (3-1), (3-2), or (3-3), each R₁ is independently a branched saturated C₉-C₂₀ alkyl. In some embodiments, each R₁ is independently selected from a group consisting of:

[1033] In some embodiments, each R₁ in Formula (3-1), (3-2), or (3-3) are the same.

[1034] In some embodiments, as used in Formula (3-1), (3-2), or (3-3), R₂ is selected from a group consisting of:

[1035] In some embodiments, R₂ as used in Formula (3-1), (3-2), or (3-3) may be as described in International Pat. Pub. No. WO2019/152848A1, which is incorporated herein by reference in its entirety.

[1036] In some embodiments, an ionizable lipid is a compound of Formula (5):

wherein:
[1037] each n is independently 1, 2, 3, 4, 5, 6, 7, 8, 9, 10, 11, 12, 13, 14, or 15; and
[1038] R₂ is as defined in Formula (1).

[1039] In some embodiments, as used in Formula (5), R₄ and R₅ are defined as R₁ and R₃, respectively, in Formula (1). In some embodiments, as used in Formula (5), R₄ and R₅ may be as described in International Pat. Pub. No. WO2019/191780 A1, which is incorporated herein by reference in its entirety.

[1040] In some embodiments, an ionizable lipid is a compound of Formula (6):

wherein:
[1041] each n is independently an integer from 0-15;
[1042] L₁ and L₃ are each independently —OC(O)—* or —C(O)O—*, wherein “*” indicates the attachment point to R₁ or R₃;
[1043] R₁ and R₂ are each independently a linear or branched C₉-C₂₀ alkyl or C₉-C₂₀ alkenyl, optionally substituted by one or more substituents selected from a group consisting of oxo, halo, hydroxy, cyano, alkyl, alkenyl, aldehyde, heterocyclylalkyl, hydroxyalkyl, dihydroxyalkyl, hydroxyalkylaminoalkyl, aminoalkyl, alkylaminoalkyl, dialkylaminoalkyl, (heterocyclyl)(alkyl)aminoalkyl, heterocyclyl, heteroaryl, alkylheteroaryl, alkynyl, alkoxy, amino, dialkylamino, aminoalkylcarbonylamino, aminocarbonylalkylamino, (aminocarbonylalkyl)(alkyl)amino, alkenylcarbonylamino, hydroxycarbonyl, alkyloxycarbonyl, aminocarbonyl, aminoalkylaminocarbonyl, alkylaminoalkylaminocarbonyl, dialkylaminoalkylaminocarbonyl, heterocyclylalkylaminocarbonyl, (alkylaminoalkyl)(alkyl)aminocarbonyl, alkylaminoalkylcarbonyl, dialkylaminoalkylcarbonyl, heterocyclylcarbonyl, alkenylcarbonyl, alkynylcarbonyl, alkylsulfoxide, alkylsulfoxidealkyl, alkylsulfonyl, and alkylsulfonealkyl;
[1044] R₃ is selected from a group consisting of:

and
[1045] R₄ is a linear or branched C₁-C₁₅ alkyl or C₁-C₁₅ alkenyl.

[1046] In some embodiments, R₁ and R₂ are each independently selected from a group consisting of:

[1047] In some embodiments, R₁ and R₂ are the same. In some embodiments, R₁ and R₂ are different.

[1048] In some embodiments, an ionizable lipid of the disclosure is selected from Table 10a. In some embodiments, the ionizable lipid is Lipid 26 in Table 10a. In some embodiments, the ionizable lipid is Lipid 27 in Table 10a. In some embodiments, the ionizable lipid is Lipid 53 in Table 10a. In some embodiments, the ionizable lipid is Lipid 54 in Table 10a. In some embodiments, the ionizable lipid is Lipid 45 in Table 10a. In some embodiments, the ionizable lipid is Lipid 46 in Table 10a. In some embodiments, the ionizable lipid is Lipid 137 in Table 10a. In some embodiments, the ionizable lipid is Lipid 138 in Table 10a. In some embodiments, the ionizable lipid is Lipid 139 in Table 10a. In some embodiments, the ionizable lipid is Lipid 128 in Table 10a. In some embodiments, the ionizable lipid is Lipid 130 in Table 10a.

[1049] In some embodiments, an ionizable lipid of the disclosure is selected from the group consisting of:

[1050] In some embodiments, an ionizable lipid of the disclosure is selected from the group consisting of:

[1051] In some embodiments, an ionizable lipid of the disclosure is selected from the group consisting of:

[1052] In some embodiments, an ionizable lipid of the disclosure is selected from the group consisting of:

TABLE 10a

| Ionized | |
|---|---|
| lipid | |
| number | Structure |
| 1 | |
| 2 | |
| 3 | |
| 4 | |
| 5 | |
| 6 | |
| 7 | |
| 8 | |
| 9 | |
| 10 | |
| 11 | |
| 12 | |
| 13 | |
| 14 | |
| 15 | |
| 16 | |
| 17 | |
| 18 | |
| 19 | |
| 20 | |
| 21 | |
| 22 | |
| 23 | |
| 24 | |
| 25 | |
| 26 | |
| 27 | |
| 28 | |
| 29 | |
| 30 | |
| 31 | |
| 32 | |
| 33 | |
| 34 | |
| 35 | |
| 36 | |
| 37 | |
| 38 | |
| 39 | |
| 40 | |
| 41 | |
| 42 | |
| 43 | |
| 44 | |
| 45 | |
| 46 | |
| 47 | |
| 48 | |
| 49 | |
| 50 | |
| 51 | |
| 52 | |
| 53 | |
| 54 | |
| 55 | |
| 56 | |
| 57 | |
| 58 | |
| 59 | |
| 60 | |
| 61 | |
| 62 | |
| 63 | |
| 64 | |
| 65 | |
| 66 | |
| 67 | |
| 68 | |
| 69 | |
| 70 | |
| 71 | |
| 72 | |
| 73 | |
| 74 | |
| 75 | |
| 76 | |
| 77 | |
| 78 | |
| 79 | |
| 80 | |
| 81 | |
| 82 | |
| 83 | |
| 84 | |
| 85 | |
| 86 | |
| 87 | |
| 88 | |
| 89 | |
| 90 | |
| 91 | |
| 92 | |
| 93 | |
| 94 | |
| 95 | |
| 96 | |
| 97 | |
| 98 | |
| 99 | |
| 100 | |
| 101 | |
| 102 | |
| 103 | |
| 104 | |
| 105 | |
| 106 | |
| 107 | |
| 108 | |
| 109 | |
| 110 | |
| 111 | |
| 112 | |
| 113 | |
| 114 | |
| 115 | |
| 116 | |
| 117 | |
| 118 | |
| 119 | |
| 120 | |
| 121 | |
| 122 | |
| 123 | |
| 124 | |
| 125 | |
| 126 | |
| 127 | |
| 128 | |
| 129 | |
| 130 | |
| 131 | |
| 132 | |
| 133 | |
| 134 | |
| 135 | |
| 136 | |
| 137 | |
| 138 | |
| 139 | |
| 140 | |
| 141 | |
| 142 | |
| 143 | |
| 144 | |
| 145 | |
| 146 | |
| 147 | |
| 148 | |
| 149 | |
| 150 | |
| 151 | |

[1053] In some embodiments, the ionizable lipid has a beta-hydroxyl amine head group. In some embodiments, the ionizable lipid has a gamma-hydroxyl amine head group.

[1054] In some embodiments, an ionizable lipid of the disclosure is a lipid selected from Table 10b. In some embodiments, an ionizable lipid of the disclosure is Lipid 15 from Table 10b. In an embodiment, the ionizable lipid is described in US patent publication number US20170210697A1. In an embodiment, the ionizable lipid is described in US patent publication number US20170119904A1.

TABLE 10b

| Ionizable | |
|---|---|
| lipid | |
| number | Structure |
| 1 | |
| 2 | |
| 3 | |
| 4 | |
| 5 | |
| 6 | |
| 7 | |
| 8 | |
| 9 | |
| 10 | |
| 11 | |
| 12 | |
| 13 | |
| 14 | |
| 15 | |
| 16 | |
| 17 | |
| 18 | |
| 19 | |
| 20 | |
| 21 | |
| 22 | |
| 23 | |
| 24 | |
| 25 | |
| 26 | |
| 27 | |
| 28 | |
| 29 | |
| 30 | |
| 31 | |
| 32 | |
| 33 | |
| 34 | |
| 35 | |
| 36 | |
| 37 | |
| 38 | |
| 39 | |

[1055] In some embodiments, an ionizable lipid has one of the structures set forth in Table 10 below.

[1056] In some embodiments, an ionizable lipid of the disclosure is a lipid selected from Table 10c. In an embodiment, the ionizable lipid is described in International Patent Application publication number WO2023081526.

TABLE 10c

| Ionizable | |
|---|---|
| lipid | |
| number | Structure |
| 1 | |
| 2 | |
| 3 | |
| 4 | |
| 5 | |
| 6 | |
| 7 | |
| 8 | |
| 9 | |
| 10 | |
| 11 | |
| 12 | |
| 13 | |
| 14 | |
| 15 | |
| 16 | |
| 17 | |
| 18 | |
| 19 | |
| 20 | |
| 21 | |
| 22 | |
| 23 | |
| 24 | |
| 25 | |
| 26 | |
| 27 | |
| 28 | |
| 29 | |
| 30 | |
| 31 | |
| 32 | |
| 33 | |
| 34 | |
| 35 | |
| 36 | |
| 37 | |
| 38 | |
| 39 | |
| 40 | |
| 41 | |
| 42 | |
| 43 | |
| 44 | |
| 45 | |
| 46 | |
| 47 | |
| 48 | |
| 49 | |
| 50 | |
| 51 | |
| 52 | |
| 53 | |
| 54 | |
| 55 | |
| 56 | |
| 57 | |
| 58 | |
| 59 | |
| 60 | |
| 61 | |
| 62 | |
| 63 | |
| 64 | |
| 65 | |
| 66 | |
| 67 | |
| 68 | |
| 69 | |
| 70 | |
| 71 | |
| 72 | |
| 73 | |
| 74 | |
| 75 | |
| 76 | |
| 77 | |
| 78 | |
| 79 | |
| 80 | |
| 81 | |
| 82 | |
| 83 | |
| 84 | |
| 85 | |
| 86 | |
| 87 | |
| 88 | |
| 89 | |
| 90 | |
| 91 | |
| 92 | |
| 93 | |
| 94 | |
| 95 | |
| 96 | |
| 97 | |
| 98 | |
| 99 | |
| 100 | |
| 101 | |
| 102 | |
| 103 | |
| 104 | |
| 105 | |
| 106 | |
| 107 | |
| 108 | |
| 109 | |
| 110 | |
| 111 | |
| 112 | |
| 113 | |
| 114 | |
| 115 | |
| 116 | |
| 117 | |
| 118 | |
| 119 | |
| 120 | |
| 121 | |
| 122 | |

TABLE 10

| Number | Structure |
|---|---|
| 1 | |
| 2 | |
| 3 | |
| 4 | |
| 5 | |
| 6 | |
| 7 | |
| 8 | |
| 9 | |
| 10 | |
| 11 | |
| 12 | |
| 13 | |
| 14 | |
| 15 | |
| 16 | |
| 17 | |
| 18 | |
| 19 | |
| 20 | |
| 21 | |
| 22 | |
| 23 | |
| 24 | |
| 25 | |
| 26 | |
| 27 | |
| 28 | |
| 29 | |
| 30 | |
| 31 | |
| 32 | |
| 33 | |
| 34 | |
| 35 | |
| 36 | |
| 37 | |
| 38 | |
| 39 | |
| 40 | |
| 41 | |
| 42 | |
| 43 | |
| 44 | |
| 45 | |
| 46 | |
| 47 | |
| 48 | |
| 49 | |

[1057] In some embodiments, the ionizable lipid has one of the structures set forth in Table 11 below. In some embodiments, the ionizable lipid as set forth in Table 11 is as described in international patent application PCT/US2010/061058.

```
TABLE 11
  meso, cis


  Racemic, cis
  Racemic, trans





  Racemic, trans










  Racemic cis







  cis Racemic and optically pure
  Racemic and optically pure




















  cis Racemic and optically pure








  cis Racemic and optically pure
  cis Racemic and optically pure








  meso compound


  racemic compound
  racemic compound
  racemic compound






  cis Racemic and optically pure
  meso compound


  racemic compound
  racemic compound





















  n = 1-10





  n = 0-6
  n = 0-6




  Racemic and optically pure




  n = 0-6
  n = 0-6


  cis Racemic and optically pure
  n = 0-6




  Racemic and optically pure


  n = 0-6














  n = 0-6






  n = 0-6


  n = 0-6




























  n = 0-6


























  Q is O, NH, NMe
  Q is O, NH, NMe
  Q is O, NH, NMe








  Q is O, NH, NMe
  Q is O, NH, NMe
  Q is O, NH, NMe




  Q is O, NH, NMe
  Q is O, NH, NMe
  Q is O, NH, NMe
  Q is O, NH, NMe
  Q is O, NH, NMe
  Q is O, NH, NMe
  Q is O, NH, NMe
  Q is O, NH, NMe
  Q is O, NH, NMe



  Q is O, NH, NMe
  Q is O, NH, NMe
  Q is O, NH, NMe
  Q is O, NH, NMe
  Q is O, NH, NMe
  Q is O, NH, NMe
  Q is O, NH, NMe
  Q is O, NH, NMe
  Q is O, NH, NMe
  Q is O, NH, NMe
  Q is O, NH, NMe
  Q is O, NH, NMe

  Q is O, NH, NMe








  Q is O, NH, NMe
  Q is O, NH, NMe
  Q is O, NH, NMe













  X = O, S, NH, NMe; n = 0-6









  X = O, S, NH, NMe; n = 0-6











  n = 0-6


  Racemic and optically pure






  n = 1-10





  Racemic and optically pure





  n = 0-6
  Q is O
  Q is O
  Q is O
  Q is O
  Q is O
  Q is O
  Q is O
  Q is O
  Q is O
  Q is O
  Q is O
  Q is O
  Q is O
  Q is O
  Q is O
  Q is O
  Q is O
  Q is O
  Q is O
  Q is O
  Q is O
  Q is O
  Q is O

  X = O, S, NH, NMe; n = 0-6













  X = O, S, NH, NMe; n = 0-6

























  n = 0-6
  n = 0-6
  n = 0-6







  e.g., X = Me, OH, Cl, etc





  n = 0-6
  n = 0-6











  n = 0-6



































  n = 0-6












  Q is NH, NMe
  Q is NH, NMe
  Q is NH, NMe
  Q is NH, NMe
  Q is NH, NMe

  Q is NH, NMe
  Q is NH, NMe
  Q is NH, NMe
  Q is NH, NMe
  Q is NH, NMe
  Q is NH, NMe
  Q is NH, NMe
  Q is NH, NMe
  Q is NH, NMe
  Q is NH, NMe
  Q is NH, NMe
  Q is NH, NMe
  Q is NH, NMe
  Q is NH, NMe




  Q is NH, NMe
  Q is NH, NMe
  Q is NH, NMe
  Q is NH, NMe
  Q is NH, NMe






































```

[1058] In some embodiments, the transfer vehicle comprises Lipid A, Lipid B, Lipid C, and/or Lipid D. In some embodiments, inclusion of Lipid A, Lipid B, Lipid C, and/or Lipid D improves encapsulation and/or endosomal escape. In some embodiments, Lipid A, Lipid B, Lipid C, and/or Lipid D are described in international patent application PCT/US2017/028981.

[1059] In some embodiments, an ionizable lipid is Lipid A, which is (9Z,12Z)-3-((4,4-bis (octyloxy) butanoyl)oxy)-2-((((3-(diethylamino) propoxy) carbonyl)oxy) methyl) propyl octadeca9,12-dienoate, also called 3-((4,44bis (octyloxy) butanoyl)oxy)-2-((((3-(diethylamino)propoxy)carbonyl)oxy)methyl)propyl (9Z,12Z)-octadeca-9,12-dienoate. Lipid A can be depicted as:

[1060] Lipid A may be synthesized according to WO2015/095340 (e.g., pp. 84-86), incorporated by reference in its entirety.

[1061] In some embodiments, an ionizable lipid is Lipid B, which is ((5-((dimethylamino)methyl)-1,3-phenylene)bis(oxy))bis(octane-8,1-diyl)bis(decanoate). Lipid B can be depicted as:

[1062] Lipid B may be synthesized according to WO2014/136086 (e.g., pp. 107-09), incorporated by reference in its entirety.

[1063] In some embodiments, an ionizable lipid is Lipid C, which is 2-((4-(((3-(dimethylamino)propoxy)carbonyl)oxy)hexadecanoyl)oxy)propane-1,3-diyl(9Z,9′Z,12Z,12′Z)-bis(octadeca-9,12-dienoate). Lipid C can be depicted as:

[1064] In some embodiments, an ionizable lipid is Lipid D, which is 3-(((3-(dimethylamino)propoxy)carbonyl)oxy)-13-(octanoyloxy)tridecyl 3-octylundecanoate. Lipid D can be depicted as:

[1065] Lipid C and Lipid D may be synthesized according to WO2015/095340, incorporated by reference in its entirety.

[1066] In some embodiments, an ionizable lipid is described in US patent publication number 20190321489. In some embodiments, an ionizable lipid is described in international patent publication WO 2010/053572, incorporated herein by reference. In some embodiments, an ionizable lipid is C12-200, described at paragraph [00225] of WO 2010/053572.

[1067] Several ionizable lipids have been described in the literature, many of which are commercially available. In certain embodiments, such ionizable lipids are included in the transfer vehicles described herein. In some embodiments, the ionizable lipid N-[1-(2,3-dioleyloxy)propyl]-N,N,N-trimethylammonium chloride or “DOTMA” is used. (Felgner et al. Proc. Nat'l Acad. Sci. 84, 7413 (1987); U.S. Pat. No. 4,897,355). DOTMA can be formulated alone or can be combined with a neutral lipid, dioleoylphosphatidylethanolamine or “DOPE” or other cationic or non-cationic lipids into a lipid nanoparticle. Other suitable cationic lipids include, for example, ionizable cationic lipids as described in U.S. provisional patent application 61/617,468, filed Mar. 29, 2012 (incorporated herein by reference), such as, e.g., (15Z,18Z)—N,N-dimethyl-6-(9Z,12Z)-octadeca-9,12-dien-1-yl)tetracosa-15,18-dien-1-amine (HGT5000), (15Z,18Z)—N,N-dimethyl-6-((9Z,12Z)-octadeca-9,12-dien-1-yl)tetracosa-4,15,18-trien-1-amine (HGT5001), and (15Z,18Z)—N,N-dimethyl-6-((9Z,12Z)-octadeca-9,12-dien-1-yl)tetracosa-5,15,18-trien-1-amine (HGT5002), C₁₂-200 (described in WO 2010/053572), 2-(2,2-di((9Z,12Z)-octadeca-9,12-dien-1-yl)-1,3-dioxolan-4-yl)-N,N-dimethylethanamine (DLinKC2-DMA)) (See, WO 2010/042877; Semple et al., Nature Biotech. 28:172-176 (2010)), 2-(2,2-di((9Z,2Z)-octadeca-9,12-dien-1-yl)-1,3-dioxolan-4-yl)-N,N-dimethylethanamine (DLin-KC2-DMA), (3S,10R,13R,17R)-10,13-dimethyl-17-((R)-6-methylheptan-2-yl)-2, 3, 4, 7, 8, 9, 10, 11, 12, 13, 14, 15, 16, 17-tetradecahydro-1H-cyclopenta[a]phenanthren-3-yl 3-(1H-imidazol-4-yl)propanoate (ICE), (15Z,18Z)—N,N-dimethyl-6-(9Z,12Z)-octadeca-9,12-dien-1-yl)tetracosa-15,18-dien-1-amine (HGT5000), (15Z,18Z)—N,N-dimethyl-6-((9Z,12Z)-octadeca-9,12-dien-1-yl)tetracosa-4,15,18-trien-1-amine (HGT5001), (15Z,18 Z)—N,N-dimethyl-6-((9Z,12Z)-octadeca-9,12-dien-1-yl)tetracosa-5,15,18-trien-1-amine (HGT5002), 5-carboxyspermylglycine-dioctadecylamide (DOGS), 2,3-dioleyloxy-N-[2(spermine-carboxamido)ethyl]-N,N-dimethyl-1-propanaminium (DOSPA) (Behr et al. Proc. Nat.'l Acad. Sci. 86, 6982 (1989); U.S. Pat. Nos. 5,171,678; 5,334,761), 1,2-Dioleoyl-3-Dimethylammonium-Propane (DODAP), 1,2-Dioleoyl-3-Trimethylammonium-Propane or (DOTAP). Contemplated ionizable lipids also include 1,2-distcaryloxy-N,N-dimethyl-3-aminopropane (DSDMA), 1,2-dioleyloxy-N,N-dimethyl-3-aminopropane (DODMA), 1,2-dilinoleyloxy-N,N-dimethyl-3-aminopropane (DLinDMA), 1,2-dilinolenyloxy-N,N-dimethyl-3-aminopropane (DLenDMA), N-dioleyl-N,N-dimethylammonium chloride (DODAC), N,N-distearyl-N,N-dimethylammonium bromide (DDAB), N-(1,2-dimyristyloxyprop-3-yl)-N,N-dimethyl-N-hydroxyethyl ammonium bromide (DMRIE), 3-dimethylamino-2-(cholest-5-en-3-beta-oxybutan-4-oxy)-1-(cis,cis-9,12-octadecadienoxy)propane (CLinDMA), 2-[5′-(cholest-5-en-3-beta-oxy)-3′-oxapentoxy)-3-dimethyl-1-(cis,cis-9′,1-2′-octadecadienoxy)propane (CpLinDMA), N,N-dimethyl-3,4-dioleyloxybenzylamine (DMOBA), 1,2-N,N′-dioleylcarbamyl-3-dimethylaminopropane (DOcarbDAP), 2,3-Dilinoleoyloxy-N,N-dimethylpropylamine (DLinDAP), 1,2-N,N′-Dilinoleylcarbamyl-3-dimethylamninopropane (DLincarbDAP), 1,2-Dilinoleoylcarbamyl-3-dimethylaminopropane (DLinCDAP), 2,2-dilinoleyl-4-dimethylaminomethyl-[1,3]-dioxolane (DLin-K-DMA), 2,2-dilinoleyl-4-dimethylaminoethyl-[1,3]-dioxolane (DLin-K-XTC2-DMA) or GL67, or mixtures thereof. (Heyes, J., et al., J Controlled Release 107: 276-287 (2005); Morrissey, D V., et al., Nat. Biotechnol. 23(8): 1003-1007 (2005); PCT Publication WO2005/121348A1). The use of cholesterol-based ionizable lipids to formulate the transfer vehicles (e.g., lipid nanoparticles) is also contemplated by the present invention. Such cholesterol-based ionizable lipids can be used, either alone or in combination with other lipids. Suitable cholesterol-based ionizable lipids include, for example, DC-Cholesterol (N,N-dimethyl-N-ethylcarboxamidocholesterol), and 1,4-bis(3-N-oleylamino-propyl)piperazine (Gao, et al., Biochem. Biophys. Res. Comm. 179, 280 (1991); Wolf et al. BioTechniques 23, 139 (1997); U.S. Pat. No. 5,744,335).

[1068] Also contemplated are cationic lipids such as dialkylamino-based, imidazole-based, and guanidinium-based lipids. For example, also contemplated is the use of the ionizable lipid (3S,10R, 13R, 17R)-10,13-dimethyl-17-((R)-6-methylheptan-2-yl)-2, 3, 4, 7, 8, 9, 10, 11, 12, 13, 14, 15, 16, 17-tetradecahydro-1H-cyclopenta[a]phenanthren-3-yl 3-(1H-imidazol-4-yl)propanoate (ICE), as disclosed in International Application No. PCT/US2010/058457, incorporated herein by reference.

[1069] Also contemplated are ionizable lipids such as the dialkylamino-based, imidazole-based, and guanidinium-based lipids. For example, certain embodiments are directed to a composition comprising one or more imidazole-based ionizable lipids, for example, the imidazole cholesterol ester or “ICE” lipid, (3S, 10R, 13R, 17R)-10, 13-dimethyl-17-((R)-6-methylheptan-2-yl)-2, 3, 4, 7, 8, 9, 10, 11, 12, 13, 14, 15, 16, 17-tetradecahydro-1H-cyclopenta[a]phenanthren-3-yl 3-(1H-imidazol-4-yl)propanoate, as represented by structure (XIII) below. In an embodiment, a transfer vehicle for delivery of circRNA may comprise one or more imidazole-based ionizable lipids, for example, the imidazole cholesterol ester or “ICE” lipid (3S, 10R, 13R, 17R)-10, 13-dimethyl-17-((R)-6-methylheptan-2-yl)-2, 3, 4, 7, 9, 10, 11, 12, 13, 14, 15, 16, 17-tetradecahydro-1H-cyclopenta[a]phenanthren-3-yl 3-(1H-imidazol-4-yl)propanoate, as represented by structure (XIII).

[1070] Without wishing to be bound by a particular theory, it is believed that the fusogenicity of the imidazole-based cationic lipid ICE is related to the endosomal disruption which is facilitated by the imidazole group, which has a lower pKa relative to traditional ionizable lipids. The endosomal disruption in turn promotes osmotic swelling and the disruption of the liposomal membrane, followed by the transfection or intracellular release of the nucleic acid(s) contents loaded therein into the target cell.

[1071] The imidazole-based ionizable lipids are also characterized by their reduced toxicity relative to other ionizable lipids.

[1072] In some embodiments, an ionizable lipid is described by US patent publication number 20190314284. In certain embodiments, the an ionizable lipid is described by structure 3, 4, 5, 6, 7, 8, 9, or 10 (e.g., HGT4001, HGT4002, HGT4003, HGT4004 and/or HGT4005). In certain embodiments, the one or more cleavable functional groups (e.g., a disulfide) allow, for example, a hydrophilic functional head-group to dissociate from a lipophilic functional tail-group of the compound (e.g., upon exposure to oxidative, reducing or acidic conditions), thereby facilitating a phase transition in the lipid bilayer of the one or more target cells. For example, when a transfer vehicle (e.g., a lipid nanoparticle) comprises one or more of the lipids of structures 3-10, the phase transition in the lipid bilayer of the one or more target cells facilitates the delivery of the circRNA into the one or more target cells.

[1073] In certain embodiments, the ionizable lipid is described by structure (XIV),

wherein:
[1074] R₁ is selected from the group consisting of imidazole, guanidinium, amino, imine, enamine, an optionally-substituted alkyl amino (e.g., an alkyl amino such as dimethylamino) and pyridyl;
[1075] R₂ is selected from the group consisting of structure XV and structure XVI;

[1076] wherein R₃ and R₄ are each independently selected from the group consisting of an optionally substituted, variably saturated or unsaturated C₆-C₂₀ alkyl and an optionally substituted, variably saturated or unsaturated C₆-C₂₀ acyl; and wherein n is zero or any positive integer (e.g., one, two, three, four, five, six, seven, eight, nine, ten, eleven, twelve, thirteen, fourteen, fifteen, sixteen, seventeen, eighteen, nineteen, twenty or more). In certain embodiments, R₃ and R₄ are each an optionally substituted, polyunsaturated Cis alkyl, while in other embodiments R₃ and R₄ are each an unsubstituted, polyunsaturated Cis alkyl. In certain embodiments, one or more of R₃ and R₄ are (9Z,12Z)-octadeca-9,12-dien.

[1077] Also disclosed herein are pharmaceutical compositions that comprise the compound of structure XIV, wherein R₁ is selected from the group consisting of imidazole, guanidinium, amino, imine, enamine, an optionally-substituted alkyl amino (e.g., an alkyl amino such as dimethylamino) and pyridyl; wherein R₂ is structure XV; and wherein n is zero or any positive integer. Further disclosed herein are pharmaceutical compositions comprising the compound of structure XIV, wherein R₁ is selected from the group consisting of imidazole, guanidinium, amino, imine, enamine, an optionally-substituted alkyl amino (e.g., an alkyl amino such as dimethylamino) and pyridyl; wherein R₂ is structure XVI; wherein R₃ and R₄ are each independently selected from the group consisting of an optionally substituted, variably saturated or unsaturated C₆-C₂₀ alkyl and an optionally substituted, variably saturated or unsaturated C₆-C₂₀ acyl; and wherein n is zero or any positive integer. In certain embodiments. R₃ and R₄ are each an optionally substituted, polyunsaturated Cis alkyl, while in other embodiments R₃ and R₄ are each an unsubstituted, polyunsaturated Cis alkyl (e.g., octadeca-9,12-dien).

[1078] In certain embodiments, the R₁ group or head-group is a polar or hydrophilic group (e.g., one or more of the imidazole, guanidinium and amino groups) and is bound to the R₂ lipid group by way of the disulfide (S—S) cleavable linker group, for example as depicted in structure XIV. Other contemplated cleavable linker groups may include compositions that comprise one or more disulfide (S—S) linker group bound (e.g., covalently bound) to, for example an alkyl group (e.g., C₁ to C₁₀ alkyl). In certain embodiments, the R1 group is covalently bound to the cleavable linker group by way of a C₁-C₂₀ alkyl group (e.g., where n is one to twenty), or alternatively may be directly bound to the cleavable linker group (e.g., where n is zero). In certain embodiments, the disulfide linker group is cleavable in vitro and/or in vivo (e.g., enzymatically cleavable or cleavable upon exposure to acidic or reducing conditions).

[1079] In certain embodiments, the inventions relate to the compound 5-(((10,13-dimethyl-17-(6-methylheptan-2-yl)-2,3,4,7,8,9,10,11,12,13,14,15,16,17-tetradecahydro-1H-cyclopenta[a]phenanthren-3-yl)disulfanyl)methyl)-1H-imidazole, having structure XVII (referred to herein as “HGT4001”).

[1080] In certain embodiments, the inventions relate to the compound 1-(2-(((3S,10R,13R)-10,13-dimethyl-17-((R)-6-methylheptan-2-yl)-2,3,4,7,8,9,10,11,12,13,14,15,16,17-tetradecahydro-1H-cyclopenta[a]phenanthren-3-yl)disulfanyl)ethyl)guanidine, having structure XVIII (referred to herein as “HGT4002”).

[1081] In certain embodiments, the inventions relate to the compound 2-((2,3-Bis((9Z,12Z)-octadeca-9,12-dien-1-yloxy)propyl)disulfanyl)-N,N-dimethylethanamine, having structure XIX (referred to herein as “HGT4003”).

[1082] In other embodiments, the inventions relate to the compound 5-(((2,3-bis((9Z,12Z)-octadeca-9,12-dien-1-yloxy)propyl)disulfanyl)methyl)-1H-imidazole having the structure of structure XX (referred to herein as “HGT4004”).

[1083] In still other embodiments, the inventions relate to the compound 1-(((2,3-bis((9Z,12Z)-octadeca-9,12-dien-1-yloxy)propyl)disulfanyl)methyl)guanidine having structure XXI (referred to herein as “HGT4005”).

[1084] In certain embodiments, the compounds described as structures 3-10 are ionizable lipids.

[1085] The compounds, and in particular the imidazole-based compounds described as structures 3-8 (e.g., HGT4001 and HGT4004), are characterized by their reduced toxicity, in particular relative to traditional ionizable lipids. In some embodiments, the transfer vehicles described herein comprise one or more imidazole-based ionizable lipid compounds such that the relative concentration of other more toxic ionizable lipids in such pharmaceutical or liposomal composition may be reduced or otherwise eliminated.

[1086] The ionizable lipids include those disclosed in international patent application PCT/US2019/025246, and US patent publications 2017/0190661 and 2017/0114010, incorporated herein by reference in their entirety. The ionizable lipids may include a lipid selected from the following tables 12, 13, 14, or 15.

TABLE 12

| | |
|---|---|
| ATX-001 | |
| ATX-002 | |
| ATX-003 | |
| ATX-004 | |
| ATX-005 | |
| ATX-006 | |
| ATX-007 | |
| ATX-008 | |
| ATX-009 | |
| ATX-010 | |
| ATX-011 | |
| ATX-012 | |
| ATX-013 | |
| ATX-014 | |
| ATX-015 | |
| ATX-016 | |
| ATX-017 | |
| ATX-018 | |
| ATX-019 | |
| ATX-020 | |
| ATX-021 | |
| ATX-022 | |
| ATX-023 | |
| ATX-024 | |
| ATX-025 | |
| ATX-026 | |
| ATX-027 | |
| ATX-028 | |
| ATX-029 | |
| ATX-030 | |
| ATX-031 | |
| ATX-032 | |

TABLE 13

| | |
|---|---|
| | ATX-B-1 |
| | ATX-B-2 |
| | ATX-B-3 |
| | ATX-B-4 |
| | ATX-B-5 |
| | ATX-B-6 |
| | ATX-B-7 |
| | ATX-B-8 |
| | ATX-B-9 |
| | ATX-B-10 |
| | ATX-B-11 |
| | ATX-B-12 |

TABLE 14

| Compound | ATX-# |
|---|---|
| | 0063 |
| | 0130 |
| | 0131 |
| | 0044 |
| | 0111 |
| | 0132 |
| | 0134 |
| | 0133 |
| | 0064 |
| | 0061 |
| | 0100 |
| | 0117 |
| | 0114 |
| | 0115 |
| | 0101 |
| | 0106 |
| | 0116 |
| | 0043 |
| | 0086 |
| | 0058 |
| | 0081 |
| | 0123 |
| | 0122 |
| | 0057 |
| | 0088 |
| | 0087 |
| | 0124 |
| | 0128 |
| | 0127 |
| | 0126 |
| | 0129 |
| | 0082 |
| | 0085 |
| | 0083 |
| | 0121 |
| | 0091 |
| | 0102 |
| | 0098 |
| | 0092 |
| | 0084 |
| | 0095 |
| | 0125 |
| | 0094 |
| | 0109 |
| | 0110 |
| | 0118 |
| | 0108 |
| | 0107 |
| | 0093 |
| | 0097 |
| | 0096 |

TABLE 15a

| | |
|---|---|
| | 11 |
| | 13 |
| | 14 |
| | 15 |
| | 16 |
| | 17 |
| | 18 |
| | 19 |
| | 20 |

[1087] In some embodiments, an ionizable lipid is as described in international patent application PCT/US2019/015913. In some embodiments, an ionizable lipid is chosen from the following:

[1088] In some embodiments, a lipid or transfer vehicle is a lipid as described in International Patent Application Nos. WO2021113777A2, WO2023056033, and WO2023081526, the contents of which are herein incorporated by reference in their entireties.

### 5.1 Amine Lipids

[1089] In certain embodiments, transfer vehicle compositions for the delivery of circular RNA comprise an amine lipid. In certain embodiments, an ionizable lipid is an amine lipid. In some embodiments, an amine lipid is described in international patent application PCT/US2018/053569.

[1090] In some embodiments, the amine lipid is Lipid E, which is (9Z, 12Z)-3-((4,4-bis(octyloxy)butanoyl)oxy)-2-((((3-(diethylamino)propoxy)carbonyl)oxy)methyl)propyl octadeca-9, 12-dienoate.

[1091] Lipid E can be depicted as.

[1092] Lipid E may be synthesized according to WO2015/095340 (e.g., pp. 84-86). In certain embodiments, the amine lipid is an equivalent to Lipid E.

[1093] In certain embodiments, an amine lipid is an analog of Lipid E. In certain embodiments, a Lipid E analog is an acetal analog of Lipid E. In particular transfer vehicle compositions, the acetal analog is a C₄-C₁₂ acetal analog. In some embodiments, the acetal analog is a C₅-C₁₂ acetal analog. In additional embodiments, the acetal analog is a C₅-C₁₀ acetal analog. In further embodiments, the acetal analog is chosen from a C₄, C₅, C₆, C₇, C₉, C₁₀, C₁₁ and C₁₂ acetal analog.

[1094] Amine lipids and other biodegradable lipids suitable for use in the transfer vehicles, e.g., lipid nanoparticles, described herein are biodegradable in vivo. The amine lipids described herein have low toxicity (e.g., are tolerated in animal models without adverse effect in amounts of greater than or equal to 10 mg/kg). In certain embodiments, transfer vehicles composing an amine lipid include those where at least 75% of the amine lipid is cleared from the plasma within 8, 10, 12, 24, or 48 hours, or 3, 4, 5, 6, 7, or 10 days.

[1095] Biodegradable lipids include, for example, the biodegradable lipids of WO2017/173054, WO2015/095340, and WO2014/136086.

[1096] Lipid clearance may be measured by methods known by persons of skill in the art. See, for example, Maier, M. A., et al. Biodegradable Lipids Enabling Rapidly Eliminated Lipid Nanoparticles for Systemic Delivery of RNAi Therapeutics. Mol. Ther. 2013, 21(8), 1570-78.

[1097] Transfer vehicle compositions comprising an amine lipid can lead to an increased clearance rate. In some embodiments, the clearance rate is a lipid clearance rate, for example the rate at which a lipid is cleared from the blood, serum, or plasma. In some embodiments, the clearance rate is an RNA clearance rate, for example the rate at which an circRNA is cleared from the blood, serum, or plasma. In some embodiments, the clearance rate is the rate at which transfer vehicles are cleared from the blood, serum, or plasma. In some embodiments, the clearance rate is the rate at which transfer vehicles are cleared from a tissue, such as liver tissue or spleen tissue. In certain embodiments, a high rate of clearance leads to a safety profile with no substantial adverse effects. The amine lipids and biodegradable lipids may reduce transfer vehicle accumulation in circulation and in tissues. In some embodiments, a reduction in transfer vehicle accumulation in circulation and in tissues leads to a safety profile with no substantial adverse effects.

[1098] Lipids may be ionizable depending upon the pH of the medium they are in. For example, in a slightly acidic medium, the lipid, such as an amine lipid, may be protonated and thus bear a positive charge. Conversely, in a slightly basic medium, such as, for example, blood, where pH is approximately 7.35, the lipid, such as an amine lipid, may not be protonated and thus bear no charge.

[1099] The ability of a lipid to bear a charge is related to its intrinsic pKa. In some embodiments, the amine lipids of the present disclosure may each, independently, have a pKa in the range of from about 5.1 to about 7.4. In some embodiments, the bioavailable lipids of the present disclosure may each, independently, have a pKa in the range of from about 5.1 to about 7.4. For example, the amine lipids of the present disclosure may each, independently, have a pKa in the range of from about 5.8 to about 6.5. Lipids with a pKa ranging from about 5.1 to about 7.4 are effective for delivery of cargo in vivo, e.g., to the liver. Further, it has been found that lipids with a pKa ranging from about 5.3 to about 6.4 are effective for delivery in vivo, e.g., into tumors. See, e.g., WO2014/136086.

5.2 Lipids containing a disulfide bond

[1100] In some embodiments, the ionizable lipid is described in U.S. Pat. No. 9,708,628.

[1101] The present invention provides a lipid represented by structure (XXII):

[1102] In structure (XXII), X^{a} and X^{b} are each independently X¹ or X² shown below.

[1103] R⁴ in X¹ is an alkyl group having 1-6 carbon atoms, which may be linear, branched or cyclic. The alkyl group preferably has a carbon number of 1-3. Specific examples of the alkyl group having 1-6 carbon atoms include methyl group, ethyl group, propyl group, isopropyl group, n-butyl group, sec-butyl group, isobutyl group, tert-butyl group, pentyl group, isopentyl group, neopentyl group, t-pentyl group, 1,2-Dimethylpropyl Group, 2-Methylbutyl Group, 2-Methylpentyl group, 3-methylpentyl group, 2,2-dimethylbutyl group, 2,3-dimethylbutyl group, cyclohexyl group and the like. R⁴ is preferably a methyl group, an ethyl group, a propyl group or an isopropyl group, most preferably a methyl group.

[1104] The s in X² is 1 or 2. When s is 1, X² is a pyrrolidinium group, and when s is 2, X² is a piperidinium group. s is preferably 2. While the binding direction of X² is not limited, a nitrogen atom in X² preferably binds to R^{1a} and R^{1b}.

[1105] X^{a} may be the same as or different from X^{b}, and X^{a} is preferably the same group as X^{b}.

[1106] n^{a} and n^{b} are each independently 0 or 1, preferably 1. When n^{a} is 1, R^{3a} binds to X^{a} via Y^{a} and R^{2a}, and when n^{a} is 0, a structure of R^{3a}—X^{a}—R^{1a}—S— is taken. Similarly, when n^{b} is 1, R^{3b} binds to X^{b} via Y^{b} and R^{2b}, and when n^{b} is 0, a structure of R^{3b}—X^{b}—R^{1b}—S— is taken.

[1107] n^{a} may be the same as or different from n^{b}, and n^{a} is preferably the same as n^{b}.

[1108] R^{1a} and R^{1b} are each independently an alkylene group having 1-6 carbon atoms, which may be linear or branched, preferably linear. Specific examples of the alkylene group having 1-6 carbon atoms include methylene group, ethylene group, trimethylene group, isopropylene group, tetramethylene group, isobutylene group, pentamethylene group, neopentylene group and the like. R^{1a} and R^{1b} are each preferably a methylene group, an ethylene group, a trimethylene group, an isopropylene group or a tetramethylene group, most preferably an ethylene group.

[1109] R^{1a} may be the same as or different from R^{1b}, and R^{1a} is preferably the same group as Rib.

[1110] R^{2a} and R^{2b} are each independently an alkylene group having 1-6 carbon atoms, which may be linear or branched, preferably linear. Examples of the alkylene group having 1-6 carbon atoms include those recited as the examples of the alkylene group having 1-6 carbon atoms for Ria or R^{1b}. R^{2a} and R^{2b} are each preferably a methylene group, an ethylene group, a trimethylene group, an isopropylene group or a tetramethylene group.

[1111] When X^{a} and X^{b} are each X¹, R^{2a} and R^{2b} are preferably trimethylene groups. When X^{a} and X^{b} are each X², R^{2a} and R^{2b} are preferably ethylene groups.

[1112] R^{2a} may be the same as or different from R^{2b}, and R^{2a} is preferably the same group as R^{2b}.

[1113] Y^{a} and Y^{b} are each independently an ester bond, an amide bond, a carbamate bond, an ether bond or a urea bond, preferably an ester bond, an amide bond or a carbamate bond, most preferably an ester bond. While the binding direction of Y^{a} and Y^{b} is not limited, when Y^{a} is an ester bond, a structure of R^{3a}—CO—O—R^{2a}— is preferable, and when Y^{b} is an ester bond, a structure of R^{3b}—C—O—R^{2b}— is preferable.

[1114] Y^{a} may be the same as or different from Y^{b}, and Y^{a} is preferably the same group as Y^{b}.

[1115] R^{3a} and R^{3b} are each independently a sterol residue, a liposoluble vitamin residue or an aliphatic hydrocarbon group having 12-22 carbon atoms, preferably a liposoluble vitamin residue or an aliphatic hydrocarbon group having 12-22 carbon atoms, most preferably a liposoluble vitamin residue.

[1116] Examples of the sterol residue include a cholesteryl group (cholesterol residue), a cholestaryl group (cholestanol residue), a stigmasteryl group (stigmasterol residue), a β-sitosteryl group (0-sitosterol residue), a lanosteryl group (lanosterol residue), and an ergosteryl group (ergosterol residue) and the like. The sterol residue is preferably a cholesteryl group or a cholestaryl group.

[1117] As the liposoluble vitamin residue, a residue derived from liposoluble vitamin, as well as a residue derived from a derivative obtained by appropriately converting a hydroxyl group, aldehyde or carboxylic acid, which is a functional group in liposoluble vitamin, to other reactive functional group can be used. As for liposoluble vitamin having a hydroxyl group, for example, the hydroxyl group can be converted to a carboxylic acid by reacting with succinic acid anhydride, glutaric acid anhydride and the like. Examples of the liposoluble vitamin include retinoic acid, retinol, retinal, ergosterol, 7-dehydrocholesterol, calciferol, cholecalciferol, dihydroergocalciferol, dihydrotachysterol, tocopherol, tocotrienol and the like. Preferable examples of the liposoluble vitamin include retinoic acid and tocopherol.

[1118] The aliphatic hydrocarbon group having 12-22 carbon atoms may be linear or branched, preferably linear. The aliphatic hydrocarbon group may be saturated or unsaturated. In the case of an unsaturated aliphatic hydrocarbon group, the aliphatic hydrocarbon group generally contains 1-6, preferably 1-3, more preferably 1-2 unsaturated bonds. While the unsaturated bond includes a carbon-carbon double bond and a carbon-carbon triple bond, it is preferably a carbon-carbon double bond. The aliphatic hydrocarbon group has a carbon number of preferably 12-18, most preferably 13-17. While the aliphatic hydrocarbon group includes an alkyl group, an alkenyl group, an alkynyl group and the like, it is preferably an alkyl group or an alkenyl group. Specific examples of the aliphatic hydrocarbon group having 12-22 carbon atoms include dodecyl group, tridecyl group, tetradecyl group, pentadecyl group, hexadecyl group, heptadecyl group, octadecyl group, nonadecyl group, icosyl group, henicosyl group, docosyl group, dodecenyl group, tridecenyl group, tetradecenyl group, pentadecenyl group, hexadecenyl group, heptadecenyl group, octadecenyl group, nonadecenyl group, icosenyl group, henicosenyl group, docosenyl group, decadienyl group, tridecadienyl group, tetradecadienyl group, pentadecadienyl group, hexadecadienyl group, heptadecadienyl group, octadecadienyl group, nonadecadienyl group, icosadienyl group, henicosadienyl group, docosadienyl group, octadecatrienyl group, icosatrienyl group, icosatetraenyl group, icosapentaenyl group, docosahexaenyl group, isostearyl group and the like. The aliphatic hydrocarbon group having 12-22 carbon atoms is preferably tridecyl group, tetradecyl group, heptadecyl group, octadecyl group, heptadecadienyl group or octadecadienyl group, particularly preferably tridecyl group, heptadecyl group or heptadecadienyl group.

[1119] In one embodiment, an aliphatic hydrocarbon group having 12-22 carbon atoms, which is derived from fatty acid, aliphatic alcohol, or aliphatic amine is used. When R^{3a} (or R^{3b}) is derived from fatty acid, Y^{a} (or Y^{b}) is an ester bond or an amide bond, and fatty acid-derived carbonyl carbon is included in Y^{a} (or Y^{b}). For example, when linoleic acid is used, R^{3a} (or R^{3b}) is a heptadecadienyl group.

[1120] R^{3a} may be the same as or different from R^{3b}, and R^{3a} is preferably the same group as R^{3b}.

[1121] In one embodiment, X^{a} is the same as X^{b}, n^{a} is the same as n^{b}, R^{1a} is the same as R^{1b}, R^{2a} is the same as R^{2b}, R^{3a} is the same as R^{3b}, and Y^{a} is the same as Y^{b}.

[1122] In one embodiment,
[1123] X^{a} and X^{b} are each independently X1,
[1124] R⁴ is an alkyl group having 1-3 carbon atoms, n^{a} and n^{b} are each 1,
[1125] R^{1a} and R^{1b} are each independently an alkylene group having 1-6 carbon atoms,
[1126] R^{2a} and R^{2b} are each independently an alkylene group having 1-6 carbon atoms,
[1127] Y^{a} and Y^{b} are each an ester bond or an amide bond, and
[1128] R^{3a} and R^{3b} are each independently an aliphatic hydrocarbon group having 12-22 carbon atoms.

[1129] In one embodiment,
[1130] X^{a} and X^{b} are each X1,
[1131] R⁴ is an alkyl group having 1-3 carbon atoms, n^{a} and n^{b} are each 1,
[1132] R^{1a} and R^{1b} are each an alkylene group having 1-6 carbon atoms,
[1133] R^{2a} and R^{2b} are each an alkylene group having 1-6 carbon atoms,
[1134] Y^{a} and Y^{b} are each an ester bond or an amide bond,
[1135] R^{3a} and R^{3b} are each an aliphatic hydrocarbon group having 12-22 carbon atoms,
[1136] X^{a} is the same as X^{b},
[1137] R^{1a} is the same as R^{1b},
[1138] R^{2a} is the same as R^{2b}, and
[1139] R^{3a} is the same as R^{3b}.

[1140] In one embodiment,
[1141] X^{a} and X^{b} are each X1,
[1142] R⁴ is a methyl group, n^{a} and n^{b} are each 1,
[1143] R^{1a} and R^{1b} are each an ethylene group,
[1144] R^{2a} and R^{2b} are each a trimethylene group,
[1145] Y^{a} and Y^{b} are each CO—O—, and
[1146] R^{3a} and R^{3b} are each independently an alkyl group or alkenyl group having 13-17 carbon atoms.

[1147] In one embodiment,
[1148] X^{a} and X^{b} are each X1,
[1149] R⁴ is a methyl group, n^{a} and n^{b} are each 1,
[1150] R^{1a} and R^{1b} are each an ethylene group,
[1151] R^{2a} and R^{2b} are each a trimethylene group,
[1152] Y^{a} and Y^{b} are each CO—O—,
[1153] R^{3a} and R^{3b} are each an alkyl group or alkenyl group having 13-17 carbon atoms, and
[1154] R^{3a} is the same as R^{3b}.

[1155] In one embodiment,
[1156] X^{a} and X^{b} are each independently X¹,
[1157] R⁴ is an alkyl group having 1-3 carbon atoms, n^{a} and n^{b} are each 1,
[1158] R^{1a} and R^{1b} are each independently an alkylene group having 1-6 carbon atoms,
[1159] R^{2a} and R^{2b} are each independently an alkylene group having 1-6 carbon atoms,
[1160] Y^{a} and Y^{b} are each an ester bond or an amide bond, and
[1161] R^{3a} and R^{3b} are each independently a liposoluble vitamin residue (e.g., retinoic acid residue, tocopherol residue).

[1162] In one embodiment,
[1163] X^{a} and X^{b} are each X¹,
[1164] R⁴ is an alkyl group having 1-3 carbon atoms, n^{a} and n^{b} are each 1,
[1165] R^{1a} and R^{1b} are each an alkylene group having 1-6 carbon atoms,
[1166] R^{2a} and R^{2b} are each an alkylene group having 1-6 carbon atoms,
[1167] Y^{a} and Y^{b} are each an ester bond or an amide bond,
[1168] R^{3a} and R^{3b} are each a liposoluble vitamin residue (e.g., retinoic acid residue, tocopherol residue),
[1169] X^{a} is the same as X^{b},
[1170] R^{1a} is the same as R^{1b},
[1171] R^{2a} is the same as R^{2b}, and
[1172] R^{3a} is the same as R^{3b}.

[1173] In one embodiment,
[1174] X^{a} and X^{b} are each X¹,
[1175] R⁴ is a methyl group, n^{a} and n^{b} are each 1,
[1176] R^{1a} and R^{1b} are each an ethylene group,
[1177] R^{2a} and R^{2b} are each a trimethylene group,
[1178] Y^{a} and Y^{b} are each CO—O—, and
[1179] R^{3a} and R^{3b} are each independently a liposoluble vitamin residue (e.g., retinoic acid residue, tocopherol residue).

[1180] In one embodiment,
[1181] X^{a} and X^{b} are each X¹,
[1182] R⁴ is a methyl group, n^{a} and n^{b} are each 1,
[1183] R^{1a} and R^{1b} are each an ethylene group,
[1184] R^{2a} and R^{2b} are each a trimethylene group,
[1185] Y^{a} and Y^{b} are each CO—O—,
[1186] R^{3a} and R^{3b} are each a liposoluble vitamin residue (e.g., retinoic acid residue, tocopherol residue), and
[1187] R^{3a} is the same as R^{3b}.

[1188] In one embodiment,
[1189] X^{a} and X^{b} are each independently X²,
[1190] t is 2,
[1191] R^{1a} and R^{1b} are each independently an alkylene group having 1-6 carbon atoms,
[1192] R^{2a} and R^{2b} are each independently an alkylene group having 1-6 carbon atoms,
[1193] Y^{a} and Y^{b} are each an ester bond, and
[1194] R^{3a} and R^{3b} are each independently a liposoluble vitamin residue (e.g., retinoic acid residue, tocopherol residue) or an aliphatic hydrocarbon group having 12-22 carbon atoms (e.g., alkyl group having 12-22 carbon atoms).

[1195] In one embodiment,
[1196] X^{a} and X^{b} are each independently X²,
[1197] t is 2,
[1198] R^{1a} and R^{1b} are each independently an alkylene group having 1-6 carbon atoms,
[1199] R^{2a} and R^{2b} are each independently an alkylene group having 1-6 carbon atoms,
[1200] Y^{a} and Y^{b} are each an ester bond,
[1201] R^{3a} and R^{3b} are each independently a liposoluble vitamin residue (e.g., retinoic acid residue, tocopherol residue) or an aliphatic hydrocarbon group having 12-22 carbon atoms (e.g., alkyl group having 12-22 carbon atoms),
[1202] X^{a} is the same as X^{b},
[1203] R^{1a} is the same as R^{1b},
[1204] R^{2a} is the same as R^{2b}, and
[1205] R^{3a} is the same as R^{3b}.

[1206] In one embodiment,
[1207] X^{a} and X^{b} are each independently X²,
[1208] t is 2,
[1209] R^{1a} and R^{1b} are each an ethylene group,
[1210] R^{2a} and R^{2b} are each independently an alkylene group having 1-6 carbon atoms,
[1211] Y^{a} and Y^{b} are each an ester bond,
[1212] R^{3a} and R^{3b} are each independently a liposoluble vitamin residue (e.g., retinoic acid residue, tocopherol residue) or an aliphatic hydrocarbon group having 12-22 carbon atoms (e.g., alkyl group having 12-22 carbon atoms),
[1213] X^{a} is the same as X^{b},
[1214] R^{2a} is the same as R^{2b}, and
[1215] R^{3a} is the same as R^{3b}.

[1216] In some embodiments, an ionizable lipid has one of the structures set forth in Table 15b below.

TABLE 15b

| Number | Structure |
|---|---|
| 1 | |
| 2 | |
| 3 | |
| 4 | |
| 5 | |
| 6 | |
| 7 | |
| 8 | |
| 9 | |
| 10 | |
| 11 | |
| 12 | |
| 13 | |
| 14 | |
| 15 | |

[1217] A lipid of the present invention may have an —S—S— (disulfide) bond. The production method for such a compound includes, for example, a method including producing R^{3a}—(Y^{a}—R^{2a})n^{a}-X^{a}—R^{1a}—SH, and R^{3b}—(Y^{b}—R^{2b})n^{b}-X^{b}—R^{1b}—SH, and subjecting them to oxidation (coupling) to give a compound containing —S—S—, a method including sequentially bonding necessary parts to a compound containing an —S—S— bond to finally obtain the compound of the present invention and the like. Preferred is the latter method.

[1218] A specific example of the latter method is shown below, which is not to be construed as limiting.

[1219] Examples of the starting compound include —S—S— bond-containing two terminal carboxylic acid, two terminal carboxylate, two terminal amine, two terminal isocyanate, two terminal alcohol, two terminal alcohol having a leaving group such as MsO (mesylate group) and the like, a two terminal carbonate having a leaving group such as pNP (p-nitrophenylcarbonate group) and the like.

[1220] For example, when a compound containing X¹ or X² for X^{a} and X^{b} is produced, two terminal functional groups of compound (1) containing an S—S bond are reacted with an NH— group in compound (2) having the NH— group and one functional group at the terminal, the functional group at the terminal in compound (2) which did not contribute to the reaction is reacted with a functional group in compound (3) containing R³, whereby the compound of the present invention containing an —S—S— bond, R^{1a} and R^{1b}, X^{a} and X^{b}, R^{2a} and R^{2b}, Y^{a} and Y^{b}, and R^{3a} and R^{3b} can be obtained.

[1221] In the reaction of compound (1) and compound (2), an alkali catalyst such as potassium carbonate, sodium carbonate, potassium t-butoxide and the like may be used as a catalyst, or the reaction may be performed without a catalyst. Preferably, potassium carbonate or sodium carbonate is used as a catalyst.

[1222] The amount of catalyst is 0.1-100 molar equivalents, preferably, 0.1-20 molar equivalents, more preferably 0.1-5 molar equivalents, relative to compound (1). The amount of compound (2) to be charged is 1-50 molar equivalents, preferably 1-10 molar equivalents, relative to compound (1).

[1223] The solvent to be used for the reaction of compound (1) and compound (2) is not particularly limited as long as it is a solvent or aqueous solution that does not inhibit the reaction. For example, ethyl acetate, dichloromethane, chloroform, benzene, toluene and the like can be mentioned. Among these, toluene and chloroform are preferable.

[1224] The reaction temperature is −20 to 200° C., preferably 0 to 80° C., more preferably 20 to 50° C., and the reaction time is 1-48 hr, preferably 2-24 hr.

[1225] When the reaction product of compound (1) and compound (2) is reacted with compound (3), an alkali catalyst such as potassium carbonate, sodium carbonate, potassium t-butoxide and the like, or an acid catalyst such as PTS (p-toluenesulfonic acid), MSA (methanesulfonic acid) and the like may be used, like the catalyst used for the reaction of compound (1) and compound (2), or the reaction may be performed without a catalyst.

[1226] In addition, the reaction product of compound (1) and compound (2) may be directly reacted with compound (3) by using a condensing agent such as DCC (dicyclohexylcarbodiimide), DIC (diisopropylcarbodiimide), EDC (1-ethyl-3-(3-dimethylaminopropyl)carbodiimide hydrochloride) and the like. Alternatively, compound (3) may be treated with a condensing agent to be once converted to an anhydride and the like, after which it is reacted with the reaction product of compound (1) and compound (2).

[1227] The amount of compound (3) to be charged is 1-50 molar equivalents, preferably 1-10 molar equivalents, relative to the reaction product of compound (1) and compound (2).

[1228] The catalyst to be used is appropriately selected according to the functional groups to be reacted.

[1229] The amount of catalyst is 0.05-100 molar equivalents, preferably 0.1-20 molar equivalents, more preferably 0.2-5 molar equivalent, relative to compound (1).

[1230] The solvent to be used for the reaction of the reaction product of compound (1) and compound (2) with compound (3) is not particularly limited as long as it is a solvent or aqueous solution that does not inhibit the reaction. For example, ethyl acetate, dichloromethane, chloroform, benzene, toluene and the like can be mentioned. Among these, toluene and chloroform are preferable.

[1231] The reaction temperature is 0 to 200° C., preferably 0 to 120° C., more preferably 20 to 50° C., and the reaction time is 1 hr-48 hr, preferably 2-24 hr.

[1232] The reaction product obtained by the above-mentioned reaction can be appropriately purified by a general purification method, for example, washing with water, silica gel column chromatography, crystallization, recrystallization, liquid-liquid extraction, reprecipitation, ion exchange column chromatography and the like.

### 5.3 Structure XXIII Lipids

[1233] In some embodiments, an ionizable lipid is described in U.S. Pat. No. 9,765,022.

[1234] The present invention provides a compound represented by structure (XXIII):

[1235] In structure XXIII, a hydrophilic and optionally positively charged head is

in which each of Rₐ, Rₐ′, Rₐ″, and Rₐ′″, independently, is H, a C₁-C₂₀ monovalent aliphatic radical, a C₁-C₂₀ monovalent heteroaliphatic radical, a monovalent aryl radical, or a monovalent heteroaryl radical, and Z is a C₁-C₂₀ bivalent aliphatic radical, a C₁-C₂₀ bivalent heteroaliphatic radical, a bivalent aryl radical, or a bivalent heteroaryl radical; B is a C₁-C₂₄ monovalent aliphatic radical, a C₁-C₂₄ monovalent heteroaliphatic radical, a monovalent aryl radical, a monovalent heteroaryl radical, or

each of R₁ and R₄, independently, is a bond, a C₁-C₁₀ bivalent aliphatic radical, a C₁-C₁₀ bivalent heteroaliphatic radical, a bivalent aryl radical, or a bivalent heteroaryl radical; each of R₂ and R₅, independently, is a bond, a C₁-C₂₀ bivalent aliphatic radical, a C₁-C₂₀ bivalent heteroaliphatic radical, a bivalent aryl radical, or a bivalent heteroaryl radical; each of R₃ and R₆, independently, is a C₁-C₂₀ monovalent aliphatic radical, a C₁-C₂₀ monovalent heteroaliphatic radical, a monovalent aryl radical, or a monovalent heteroaryl radical; each of

a hydrophobic tail, and

also a hydrophobic tail, has 8 to 24 carbon atoms; and each of X, a linker, and Y, also a linker, independently, is

in which each of m, n, p, q, and t, independently, is 1-6; W is O, S, or NR_{c}; each of L₁, L₃, L₅, L₇, and L₉, directly linked to R₁, R₂, R₄, or R₅, independently, is a bond, O, S, or NRₐ; each of L₂, L₄, L₆, L₈, and L₁₀, independently, is a bond, O, S, or NRₑ; V is OR_{f}, SR_{g}, or NRₕRᵢ; and each of R_{b}, R_{c}, R_{d}, Rₑ, R_{f}, R_{g}, Rₕ, and Rᵢ, independently, is H, OH, C₁-C₁₀ oxyaliphatic radical, C₁-C₁₀ monovalent aliphatic radical, C₁-C₁₀ monovalent heteroaliphatic radical, a monovalent aryl radical, or a monovalent heteroaryl radical.

[1236] A subset of the above-described lipid-like compounds include those in which A is

each of Rₐ and Rₐ′, independently, being a C₁-C₁₀ monovalent monovalent aliphatic radical, a C₁-C₁₀ monovalent heteroaliphatic radical, a monovalent aryl radical, or a monovalent heteroaryl radical; and Z being a C₁-C₁₀ bivalent aliphatic radical, a C₁-C₁₀ bivalent heteroaliphatic radical, a bivalent aryl radical, or a bivalent heteroaryl radical.

[1237] Some lipid-like compounds of this invention feature each of R₁ and R₄, independently, being C₁-C₆ (e.g., C₁-C₄) bivalent aliphatic radical or a C₁-C₆ (e.g., C₁-C₄) bivalent heteroaliphatic radical, the total carbon number for R₂ and R₃ being 12-20 (e.g., 14-18), the total carbon number of R₅ and R₆ also being 12-20 (e.g., 14-18), and each of X and Y, independently, is

[1238] Specific examples of X and Y include

m being 2-6.

[1239] Still within the scope of this invention is a pharmaceutical composition containing a nanocomplex that is formed of a protein and a bioreducible compound. In this pharmaceutical composition, the nanocomplex has a particle size of 50 to 500 nm; the bioreducible compound contains a disulfide hydrophobic moiety, a hydrophilic moiety, and a linker joining the disulfide hydrophobic moiety and the hydrophilic moiety; and the protein binds to the bioreducible compound via a non-covalent interaction, a covalent bond, or both.

[1240] In certain embodiments, the disulfide hydrophobic moiety is a heteroaliphatic radical containing one or more —S—S— groups and 8 to 24 carbon atoms; the hydrophilic moiety is an aliphatic or heteroaliphatic radical containing one or more hydrophilic groups and 1-20 carbon atoms, each of the hydrophilic groups being amino, alkylamino, dialkylamino, trialkylamino, tetraalkylammonium, hydroxyamino, hydroxyl, carboxyl, carboxylate, carbamate, carbamide, carbonate, phosphate, phosphite, sulfate, sulfite, or thiosulfate; and the linker is 0, S, Si, C₁-C₆ alkylene,

in which the variables are defined above.

[1241] Specific examples of X and Y include O, S, Si, C₁-C₆ alkylene,

[1242] In some embodiments, a lipid-like compound of this invention, as shown instructure XXIII above, includes (i) a hydrophilic head, A; (ii) a hydrophobic tail, R₂—S—S—R₃; and (iii) a linker, X. Optionally, these compounds contain a second hydrophobic tail, R₅—S—S—R₆ and a second linker, Y.

[1243] The hydrophilic head of structure XXIII contains one or more hydrophilic functional groups, e.g., hydroxyl, carbonyl, carboxyl, amino, sulfhydryl, phosphate, amide, ester, ether, carbamate, carbonate, carbamide, and phosphodiester. These groups can form hydrogen bonds and are optionally positively or negatively charged.

[1244] Examples of the hydrophilic head include:

[1245] Other examples include those described in Akinc et al., Nature Biotechnology, 26, 561-69 (2008) and Mahon et al., US Patent Application Publication 2011/0293703.

[1246] The hydrophobic tail of structure XXIII is a saturated or unsaturated, linear or branched, acyclic or cyclic, aromatic or nonaromatic hydrocarbon moiety containing a disulfide bond and 8-24 carbon atoms. One or more of the carbon atoms can be replaced with a heteroatom, such as N, O, P, B, S, Si, Sb, A1, Sn, As, Se, and Ge. The tail is optionally substituted with one or more groups described above. The lipid-like compounds containing this disulfide bond can be bioreducible.

[1247] Examples include:

[1248] A linker of structure XXIII links the hydrophilic head and the hydrophobic tail. The linker can be any chemical group that is hydrophilic or hydrophobic, polar or non-polar, e.g., O, S, Si, amino, alkylene, ester, amide, carbamate, carbamide, carbonate, phosphate, phosphite, sulfate, sulfite, and thiosulfate. Examples include:

[1249] Shown below are exemplary lipid-like compounds of this invention:

[1250] The lipid-like compounds of structure XXIII can be prepared by methods well known the art. See Wang et al., ACS Synthetic Biology, 1, 403-07 (2012); Manoharan, et al., International Patent Application Publication WO 2008/042973; and Zugates et al., U.S. Pat. No. 8,071,082. The route shown below exemplifies synthesis of these lipid-like compounds:

[1251] Each of Lₐ, Lₐ′, L, and L′ can be one of L₁-L₁₀; each of Wₐ and W_{b}, independently, is W or V; and Rₐ and R₁-R₆ are defined above, as well as L₁-L₁₀, W, and V.

[1252] In this exemplary synthetic route, an amine compound, i.e., compound D, reacts with bromides E1 and E2 to form compound F, which is then coupled with both G1 and G2 to afford the final product, i.e., compound H. One or both of the double bonds in this compound (shown above) can be reduced to one or two single bonds to obtain different lipid-like compounds of structure XXIII.

[1253] Other lipid-like compounds of this invention can be prepared using other suitable starting materials through the above-described synthetic route and others known in the art. The method set forth above can include an additional step(s) to add or remove suitable protecting groups in order to ultimately allow synthesis of the lipid-like compounds. In addition, various synthetic steps can be performed in an alternate sequence or order to give the desired material. Synthetic chemistry transformations and protecting group methodologies (protection and deprotection) useful in synthesizing applicable lipid-like compounds are known in the art, including, for example, R. Larock, Comprehensive Organic Transformations (2nd Ed., VCH Publishers 1999); P. G. M. Wuts and T. W. Greene, Greene's Protective Groups in Organic Synthesis (4th Ed., John Wiley and Sons 2007); L. Fieser and M. Fieser, Fieser and Fieser's Reagents for Organic Synthesis (John Wiley and Sons 1994); and L. Paquette, ed., Encyclopedia of Reagents for Organic Synthesis (2nd ed., John Wiley and Sons 2009) and subsequent editions thereof. Certain lipid-like compounds may contain a non-aromatic double bond and one or more asymmetric centers. Thus, they can occur as racemates and racemic mixtures, single enantiomers, individual diastereomers, diastereomeric mixtures, and cis- or trans-isomeric forms. All such isomeric forms are contemplated.

[1254] As mentioned above, these lipid-like compounds are useful for delivery of pharmaceutical agents. They can be preliminarily screened for their efficacy in delivering pharmaceutical agents by an in vitro assay and then confirmed by animal experiments and clinic trials. Other methods will also be apparent to those of ordinary skill in the art.

[1255] Not to be bound by any theory, the lipid-like compounds of structure XXIII facilitate delivery of pharmaceutical agents by forming complexes, e.g., nanocomplexes and microparticles. The hydrophilic head of such a lipid-like compound, positively or negatively charged, binds to a moiety of a pharmaceutical agent that is oppositely charged and its hydrophobic moiety binds to a hydrophobic moiety of the pharmaceutical agent. Either binding can be covalent or non-covalent.

[1256] The above described complexes can be prepared using procedures described in publications such as Wang et al., ACS Synthetic Biology, 1, 403-07 (2012). Generally, they are obtained by incubating a lipid-like compound and a pharmaceutical agent in a buffer such as a sodium acetate buffer or a phosphate buffered saline (“PBS”).

### 5.4 Hydrophilic Groups

[1257] In certain embodiments, the selected hydrophilic functional group or moiety may alter or otherwise impart properties to the compound or to the transfer vehicle of which such compound is a component (e.g., by improving the transfection efficiencies of a lipid nanoparticle of which the compound is a component). For example, the incorporation of guanidinium as a hydrophilic head-group in the compounds disclosed herein may promote the fusogenicity of such compounds (or of the transfer vehicle of which such compounds are a component) with the cell membrane of one or more target cells, thereby enhancing, for example, the transfection efficiencies of such compounds. It has been hypothesized that the nitrogen from the hydrophilic guanidinium moiety forms a six-membered ring transition state which grants stability to the interaction and thus allows for cellular uptake of encapsulated materials. (Wender, et al., Adv. Drug Del. Rev. (2008) 60: 452-472.) Similarly, the incorporation of one or more amino groups or moieties into the disclosed compounds (e.g., as a head-group) may further promote disruption of the endosomal/lysosomal membrane of the target cell by exploiting the fusogenicity of such amino groups. This is based not only on the pKa of the amino group of the composition, but also on the ability of the amino group to undergo a hexagonal phase transition and fuse with the target cell surface, i.e. the vesicle membrane. (Koltover, et al. Science (1998) 281: 78-81.) The result is believed to promote the disruption of the vesicle membrane and release of the lipid nanoparticle contents into the target cell.

[1258] Similarly, in certain embodiments the incorporation of, for example, imidazole as a hydrophilic head-group in the compounds disclosed herein may serve to promote endosomal or lysosomal release of, for example, contents that are encapsulated in a transfer vehicle (e.g., lipid nanoparticle) of the invention. Such enhanced release may be achieved by one or both of a proton-sponge mediated disruption mechanism and/or an enhanced fusogenicity mechanism. The proton-sponge mechanism is based on the ability of a compound, and in particular a functional moiety or group of the compound, to buffer the acidification of the endosome. This may be manipulated or otherwise controlled by the pKa of the compound or of one or more of the functional groups comprising such compound (e.g., imidazole). Accordingly, in certain embodiments the fusogenicity of, for example, the imidazole-based compounds disclosed herein (e.g., HGT4001 and HGT4004) are related to the endosomal disruption properties, which are facilitated by such imidazole groups, which have a lower pKa relative to other traditional ionizable lipids. Such endosomal disruption properties in turn promote osmotic swelling and the disruption of the liposomal membrane, followed by the transfection or intracellular release of the polynucleotide materials loaded or encapsulated therein into the target cell. This phenomenon can be applicable to a variety of compounds with desirable pKa profiles in addition to an imidazole moiety. Such embodiments also include multi-nitrogen based functionalities such as polyamines, poly-peptide (histidine), and nitrogen-based dendritic structures.

[1259] Exemplary ionizable and/or cationic lipids are described in International PCT patent publications WO2015/095340, WO2015/199952, WO2018/011633, WO2017/049245, WO2015/061467, WO2012/040184, WO2012/000104, WO2015/074085, WO2016/081029, WO2017/004143, WO2017/075531, WO2017/117528, WO2011/022460, WO2013/148541, WO2013/116126, WO2011/153120, WO2012/044638, WO2012/054365, WO2011/090965, WO2013/016058, WO2012/162210, WO2008/042973, WO2010/129709, WO2010/144740, WO2012/099755, WO2013/049328, WO2013/086322, WO2013/086373, WO2011/071860, WO2009/132131, WO2010/048536, WO2010/088537, WO2010/054401, WO2010/054406, WO2010/054405, WO2010/054384, WO2012/016184, WO2009/086558, WO2010/042877, WO2011/000106, WO2011/000107, WO2005/120152, WO2011/141705, WO2013/126803, WO2006/007712, WO2011/038160, WO2005/121348, WO2011/066651, WO2009/127060, WO2011/141704, WO2006/069782, WO2012/031043, WO2013/006825, WO2013/033563, WO2013/089151, WO2017/099823, WO2015/095346, and WO2013/086354, and US patent publications US2016/0311759, US2015/0376115, US2016/0151284, US2017/0210697, US2015/0140070, US2013/0178541, US2013/0303587, US2015/0141678, US2015/0239926, US2016/0376224, US2017/0119904, US2012/0149894, US2015/0057373, US2013/0090372, US2013/0274523, US2013/0274504, US2013/0274504, US2009/0023673, US2012/0128760, US2010/0324120, US2014/0200257, US2015/0203446, US2018/0005363, US2014/0308304, US2013/0338210, US2012/0101148, US2012/0027796, US2012/0058144, US2013/0323269, US2011/0117125, US2011/0256175, US2012/0202871, US2011/0076335, US2006/0083780, US2013/0123338, US2015/0064242, US2006/0051405, US2013/0065939, US2006/0008910, US2003/0022649, US2010/0130588, US2013/0116307, US2010/0062967, US2013/0202684, US2014/0141070, US2014/0255472, US2014/0039032, US2018/0028664, US2016/0317458, and US2013/0195920, the contents of all of which are incorporated herein by reference in their entirety. International patent application WO 2019/131770 is also incorporated herein by reference in its entirety.

### B. Stabilizing Lipids

[1260] A stabilizing lipid or surface stabilizing lipid may be used to enhance the structure of the LNP. A stabilizing lipid as contemplated herein may be a polyethylene glycol (PEG)-modified phospholipid. The use and inclusion of polyethylene glycol (PEG)-modified phospholipids and derivatized lipids such as derivatized ceramides (PEG-CER), including N-Octanoyl-Sphingosine-1-[Succinyl(Methoxy Polyethylene Glycol)-2000](C8 PEG-2000 ceramide) in the liposomal and pharmaceutical compositions described herein is contemplated, preferably in combination with one or more of the compounds and lipids disclosed herein. Contemplated PEG-modified lipids include, but are not limited to, a polyethylene glycol chain of up to 5 kDa in length covalently attached to a lipid with alkyl chain(s) of C₆-C₂₀ length. In some embodiments, the PEG-modified lipid employed in the compositions and methods of the invention is 1,2-dimyristoyl-sn-glycerol, methoxypolyethylene Glycol (2000 MW PEG) “DMG-PEG2000.” The addition of PEG-modified lipids to the lipid delivery vehicle may prevent complex aggregation and may also provide a means for increasing circulation lifetime and increasing the delivery of the lipid-polynucleotide composition to the target tissues, (Klibanov et al. (1990) FEBS Letters, 268 (1): 235-237), or they may be selected to rapidly exchange out of the formulation in vivo (see U.S. Pat. No. 5,885,613). Particularly useful exchangeable lipids are PEG-ceramides having shorter acyl chains (e.g., C14 or C18). The PEG-modified phospholipid and derivatized lipids of the present invention may comprise a molar ratio from about 0% to about 20%, about 0.5% to about 20%, about 1% to about 15%, about 4% to about 10%, or about 2% of the total lipid present in a liposomal lipid nanoparticle.

[1261] In an embodiment, a PEG-modified lipid is described in International Pat. Appl. No. PCT/US2019/015913, which is incorporated herein by reference in their entirety. In an embodiment, a transfer vehicle comprises one or more PEG-modified lipids.

[1262] Non-limiting examples of PEG-modified lipids include PEG-modified phosphatidylethanolamines and phosphatidic acids, PEG-ceramide conjugates (e.g., PEG-CerC14 or PEG-CerC20), PEG-modified dialkylamines and PEG-modified 1,2-diacyloxypropan-3-amines. In some further embodiments, a PEG-modified lipid may be, e,g, PEG-c-DOMG, PEG-DMG, PEG-DLPE, PEG-DMPE, PEG-DPPC, or a PEG-DSPE.

[1263] In some still further embodiments, the PEG-modified lipid includes, but is not limited to 1,2-dimyristoyl-sn-glycerol methoxypolyethylene glycol (PEG-DMG), 1,2-distearoyl-sn-glycero-3-phosphoethanolamine-N-[amino(polyethylene glycol)](PEG-DSPE), PEG-disteryl glycerol (PEG-DSG), PEG-dipalmetoleyl, PEG-dioleyl, PEG-distearyl, PEG-diacylglycamide (PEG-DAG), PEG-dipalmitoyl phosphatidylethanolamine (PEG-DPPE), or PEG-1,2-dimyristyloxlpropyl-3-amine (PEG-c-DMA).

[1264] In various embodiments, a PEG-modified lipid may also be referred to as “PEGylated lipid” or “PEG-lipid.”

[1265] In one embodiment, the PEG-lipid is selected from the group consisting of a PEG-modified phosphatidylethanolamine, a PEG-modified phosphatidic acid, a PEG-modified ceramide, a PEG-modified dialkylamine, a PEG-modified diacylglycerol, a PEG-modified dialkylglycerol, and mixtures thereof.

[1266] In some embodiments, the lipid moiety of the PEG-lipids includes those having lengths of from about C₁₄ to about C₂₂, such as from about C₁₄ to about C₁₆. In some embodiments, a PEG moiety, for example a mPEG-NH₂, has a size of about 1000, about 2000, about 5000, about 10,000, about 15,000 or about 20,000 daltons. In one embodiment, the PEG-lipid is PEG2k-DMG.

[1267] In one embodiment, the lipid nanoparticles described herein can comprise a lipid modified with a non-diffusible PEG. Non-limiting examples of non-diffusible PEGs include PEG-DSG and PEG-DSPE.

[1268] PEG-lipids are known in the art, such as those described in U.S. Pat. No. 8,158,601 and International Pat. Publ. No. WO2015/130584 A2, which are incorporated herein by reference in their entirety.

[1269] In various embodiments, lipids (e.g., PEG-lipids), described herein may be synthesized as described International Pat. Publ. No. PCT/US2016/000129, which is incorporated by reference in its entirety.

[1270] The lipid component of a lipid nanoparticle composition may include one or more molecules comprising polyethylene glycol, such as PEG or PEG-modified lipids. Such species may be alternately referred to as PEGylated lipids. A PEG lipid is a lipid modified with polyethylene glycol. A PEG lipid may be selected from the non-limiting group including PEG-modified phosphatidylethanolamines, PEG-modified phosphatidic acids, PEG-modified ceramides, PEG-modified dialkylamines, PEG-modified diacylglycerols, PEG-modified dialkylglycerols, and mixtures thereof. For example, a PEG lipid may be PEG-c-DOMG, PEG-DMG, PEG-DLPE, PEG-DMPE, PEG-DPPC, or a PEG-DSPE lipid.

[1271] In some embodiments the PEG-modified lipids are a modified form of PEG-DMG. PEG-DMG has the following structure:

[1272] In some embodiments the PEG-modified lipids are a modified form of PEG-C18, or PEG-1. PEG-1 has the following structure

[1273] In one embodiment, PEG lipids useful in the present invention can be PEGylated lipids described in International Publication No. WO2012099755, the contents of which is herein incorporated by reference in its entirety. Any of these exemplary PEG lipids described herein may be modified to comprise a hydroxyl group on the PEG chain. In certain embodiments, the PEG lipid is a PEG-OH lipid. In certain embodiments, the PEG-OH lipid includes one or more hydroxyl groups on the PEG chain. In certain embodiments, a PEG-OH or hydroxy-PEGylated lipid comprises an —OH group at the terminus of the PEG chain. Each possibility represents a separate embodiment of the present invention.

[1274] In some embodiments, the PEG lipid is a compound of Formula (P1):

[1275] or a salt or isomer thereof, wherein:
[1276] r is an integer between 1 and 100;
[1277] R is C₁₀₋₄₀ alkyl, C₁₀₋₄₀ alkenyl, or C₁₀₋₄₀ alkynyl; and optionally one or more methylene groups of
[1278] R are independently replaced with C₃₋₁₀ carbocyclylene, 4 to 10 membered heterocyclylene, C₆₋₁₀ arylene, 4 to 10 membered heteroarylene, —N(R^{N})—, —O—, —S—, —C(O)—, —C(O)N(R^{N})—, —NR^{N}C(O)—, —NR^{N}C(O)N(R^{N})—, —C(O)O—, —OC(O)—, —OC(O)O—, —OC(O)^{N}(R^{N})—, —NR^{N}C)—, —C(O)S—, —SC(O)—, —C(═NR^{N})—, —C(═NR^{N})N(R^{N})—, —NR^{N}C(═NR^{N})—, —R^{N}C(R═NR^{N})N(R^{N})—, —C(S)—, —C(S)N(R^{N})—, —NR^{N}C(S)—, —NR^{N}C(S)^{N}(R^{N})—, —S(O)—, —OS(O)—, —S(O)O—, —OS(O)O—, —OS(O)₂—, —S(O)₂O—, —OS(O)₂O—, —N(R^{N})S(O)—, —S(O)N(R^{N})—, —N(R^{N})S(O)N(R^{N})—OS(O)N(R^{N})—, —N(R^{N})S(O)O—, —S(O)₂—, —N(R^{N})S(O)2-, —S(O)₂N(R^{N})—, —N(R^{N})S(O)₂N(R^{N})—OS(O)₂N(R^{N})—, or —N(R^{N})S(O)₂O—; and each instance of R^{N} is independently hydrogen, C₁₋₆ alkyl, or a nitrogen protecting group.

[1279] For example, R is C17 alkyl. For example, the PEG lipid is a compound of Formula (P1-a):

or a salt or isomer thereof, wherein r is an integer between 1 and 100.

[1280] For example, the PEG lipid is a compound of the following formula:

### C. Helper Lipids

[1281] In some embodiments, the transfer vehicle (e.g., LNP) described herein comprises one or more non-cationic helper lipids. In some embodiments, the helper lipid is a phospholipid. In some embodiments, the helper lipid is a phospholipid substitute or replacement. In some embodiments, the phospholipid or phospholipid substitute can be, for example, one or more saturated or (poly)unsaturated phospholipids, or phospholipid substitutes, or a combination thereof. In general, phospholipids comprise a phospholipid moiety and one or more fatty acid moieties.

[1282] A phospholipid moiety can be selected, for example, from the non-limiting group consisting of phosphatidyl choline, phosphatidyl ethanolamine, phosphatidyl glycerol, phosphatidyl serine, phosphatidic acid, 2-lysophosphatidyl choline, and a sphingomyelin.

[1283] A fatty acid moiety can be selected, for example, from the non-limiting group consisting of lauric acid, myristic acid, myristoleic acid, palmitic acid, palmitoleic acid, stearic acid, oleic acid, linoleic acid, alpha-linolenic acid, erucic acid, phytanoic acid, arachidic acid, arachidonic acid, eicosapentaenoic acid, behenic acid, docosapentaenoic acid, and docosahexaenoic acid.

[1284] Phospholipids include, but are not limited to, glycerophospholipids such as phosphatidylcholines, phosphatidylethanolamines, phosphatidylserines, phosphatidylinositols, phosphatidy glycerols, and phosphatidic acids. Phospholipids also include phosphosphingolipid, such as sphingomyelin.

[1285] In some embodiments, the helper lipid is a 1,2-distearoyl-177-glycero-3-phosphocholine (DSPC) analog, a DSPC substitute, oleic acid, or an oleic acid analog.

[1286] In some embodiments, a helper lipid is a non-phosphatidyl choline (PC) zwitterionic lipid, a DSPC analog, oleic acid, an oleic acid analog, or a DSPC substitute.

[1287] In some embodiments, a helper lipid is described in PCT/US2018/053569. Helper lipids suitable for use in a lipid composition of the disclosure include, for example, a variety of neutral, uncharged or zwitterionic lipids. Such helper lipids are preferably used in combination with one or more of the compounds and lipids disclosed herein. Examples of helper lipids include, but are not limited to, 5-heptadecylbenzene-1,3-diol (resorcinol), dipalmitoylphosphatidylcholine (DPPC), distearoylphosphatidylcholine (DSPC), pohsphocholine (DOPC), dimyristoylphosphatidylcholine (DMPC), phosphatidylcholine (PLPC), 1,2-distearoylsn-glycero-3-phosphocholine (DAPC), phosphatidylethanolamine (PE), egg phosphatidylcholine (EPC), dilauryloylphosphatidylcholine (DLPC), dimyristoylphosphatidylcholine (DMPC), 1-myristoyl-2-palmitoyl phosphatidylcholine (MPPC), 1-paimitoyl-2-myristoyl phosphatidylcholine (PMPC), 1-palmitoyl-2-stearoyl phosphatidylcholine (PSPC), 1,2-diarachidoyl-sn-glycero-3-phosphocholine (DBPC), 1-stearoyl-2-palmitoyl phosphatidylcholine (SPPC), 1,2-dieicosenoyl-sn-glycero-3-phosphocholine (DEPC), paimitoyioieoyl phosphatidylcholine (POPC), lysophosphatidyl choline, dioleoyl phosphatidylethanol amine (DOPE) dilinoleoylphosphatidylcholine distearoylphosphatidylethanolamine (DSPE), dimyristoyl phosphatidylethanolamine (DMPE), dipalmitoyl phosphatidylethanolamine (DPPE), palmitoyloleoyl phosphatidylethanolamine (POPE), lysophosphatidylethanolamine and combinations thereof. In one embodiment, the helper lipid may be distearoylphosphatidylcholine (DSPC) or dimyristoyl phosphatidyl ethanolamine (DMPE). In another embodiment, the helper lipid may be distearoylphosphatidylcholine (DSPC). Helper lipids function to stabilize and improve processing of the transfer vehicles. Such helper lipids are preferably used in combination with other excipients, for example, one or more of the ionizable lipids disclosed herein. In some embodiments, when used in combination with an ionizable lipid, the helper lipid may comprise a molar ratio of 5% to about 90%, or about 10% to about 70% of the total lipid present in the lipid nanoparticle.

### D. Structural Lipids

[1288] In an embodiment, a structural lipid is described in international patent application

[1289] The transfer vehicles described herein comprise one or more structural lipids. Incorporation of structural lipids in the lipid nanoparticle may help mitigate aggregation of other lipids in the particle. Structural lipids can include, but are not limited to, cholesterol, fecosterol, ergosterol, bassicasterol, tomatidine, tomatine, ursolic, alpha-tocopherol, and mixtures thereof. In certain embodiments, the structural lipid is cholesterol. In certain embodiments, the structural lipid includes cholesterol and a corticosteroid (such as, for example, prednisolone, dexamethasone, prednisone, and hydrocortisone), or a combination thereof.

[1290] In some embodiments, the structural lipid is a sterol. In certain embodiments, the structural lipid is a steroid. In certain embodiments, the structural lipid is cholesterol. In certain embodiments, the structural lipid is an analog of cholesterol. In certain embodiments, the structural lipid is alpha-tocopherol.

[1291] The transfer vehicles described herein comprise one or more structural lipids. Incorporation of structural lipids in a transfer vehicle, e.g., a lipid nanoparticle, may help mitigate aggregation of other lipids in the particle. In certain embodiments, the structural lipid includes cholesterol and a corticosteroid (such as, for example, prednisolone, dexamethasone, prednisone, and hydrocortisone), or a combination thereof.

[1292] In some embodiments, the structural lipid is a sterol. Structural lipids can include, but are not limited to, sterols (e.g., phytosterols or zoosterols).

[1293] In certain embodiments, the structural lipid is a steroid. For example, sterols can include, but are not limited to, cholesterol, β-sitosterol, fecosterol, ergosterol, sitosterol, campesterol, stigmasterol, brassicasterol, ergosterol, tomatidine, tomatine, ursolic acid, or alpha-tocopherol.

[1294] In some embodiments, a transfer vehicle includes an effective amount of an immune cell delivery potentiating lipid, e.g., a cholesterol analog or an amino lipid or combination thereof, that, when present in a transfer vehicle, e.g., an lipid nanoparticle, may function by enhancing cellular association and/or uptake, internalization, intracellular trafficking and/or processing, and/or endosomal escape and/or may enhance recognition by and/or binding to immune cells, relative to a transfer vehicle lacking the immune cell delivery potentiating lipid. Accordingly, while not intending to be bound by any particular mechanism or theory, in one embodiment, a structural lipid or other immune cell delivery potentiating lipid of the disclosure binds to C1q or promotes the binding of a transfer vehicle comprising such lipid to C1q. Thus, for in vitro use of the transfer vehicles of the disclosure for delivery of a nucleic acid molecule to an immune cell, culture conditions that include C1q are used (e.g., use of culture media that includes serum or addition of exogenous C1q to serum-free media). For in vivo use of the transfer vehicles of the disclosure, the requirement for C1q is supplied by endogenous C1q.

[1295] In certain embodiments, the structural lipid is cholesterol. In certain embodiments, the structural lipid is an analog of cholesterol. In some embodiments, the structural lipid is a lipid in Table 16:

| CMPD | |
|---|---|
| No. S- | Structure |
| 1 | |
| 22 | |
| 2 | |
| 3 | |
| 4 | |
| 5 | |
| 6 | |
| 7 | |
| 23 | |
| 24 | |
| 25 | |
| 26 | |
| 27 | |
| 28 | |
| 8 | |
| 9 | |
| 10 | |
| 11 | |
| 12 | |
| 13 | |
| 29 | |
| 30 | |
| 31 | |
| 32 | |
| 33 | |
| 34 | |
| 14 | |
| 15 | |
| 16 | |
| 17 | |
| 18 | |
| 19 | |
| 35 | |
| 36 | |
| 37 | |
| 38 | |
| 39 | |
| 40 | |
| 20 | |
| 21 | |
| 150 | |
| 154 | |
| 162 | |
| 41 | |
| 42 | |
| 165 | |
| 169 | |
| 170 | |
| 163 | |
| 164 | |
| 184 | |
| 171 | |
| 172 | |
| 43 | |
| 47 | |
| 44 | |
| 45 | |
| 46 | |
| 175 | |
| 176 | |
| 48 | |
| 49 | |
| 50 | |
| 177 | |
| 178 | |
| 51 | |
| 52 | |
| 53 | |
| 54 | |
| 55 | |
| 56 | |
| 57 | |
| 60 | |
| 61 | |
| 62 | |
| 63 | |
| 64 | |
| 65 | |
| 66 | |
| 58 | |
| 59 | |
| 153 | |
| 67 | |
| 149 | |
| 68 | |
| 69 | |
| 71 | |
| 72 | |
| 70 | |
| 73 | |
| 74 | |
| 75 | |
| 76 | |
| 77 | |
| 78 | |
| 79 | |
| 80 | |
| 81 | |
| 82 | |
| 83 | |
| 84 | |
| 85 | |
| 86 | |
| 87 | |
| 152 | |
| 157 | |
| 88 | |
| 89 | |
| 90 | |
| 91 | |
| 93 | |
| 94 | |
| 95 | |
| 96 | |
| 92 | |
| 97 | |
| 98 | |
| 99 | |
| 100 | |
| 101 | |
| 102 | |
| 103 | |
| 104 | |
| 105 | |
| 180 | |
| 181 | |
| 182 | |
| 106 | |
| 107 | |
| 108 | |
| 109 | |
| 110 | |
| 121 | |
| 111 | |
| 112 | |
| 113 | |
| 114 | |
| 115 | |
| 116 | |
| 117 | |
| 122 | |
| 123 | |
| 124 | |
| 125 | |
| 126 | |
| 127 | |
| 128 | |
| 118 | |
| 119 | |
| 120 | |
| 156 | |
| 158 | |
| 160 | |
| 129 | |
| 130 | |
| 155 | |
| 167 | |
| 168 | |
| 173 | |
| 161 | |
| 166 | |
| 174 | |
| 179 | |
| 131 | |
| 132 | |
| 133 | |
| 134 | |
| 135 | |
| 136 | |
| 137 | |
| 138 | |
| 139 | |
| 140 | |
| 142 | |
| 143 | |
| 144 | |
| 145 | |
| 146 | |
| 147 | |
| 148 | |
| 141 | |
| 159 | |
| 151 | |
| Composition | |
| S-No. | Structure |
| 183 | |
| | |
| | |
| | |

### E. Lipid Nanoparticle (LNP) Formulations

[1296] The formation of a lipid nanoparticle (LNP) described herein may be accomplished by any methods known in the art. For example, as described in U.S. Pat. Pub. No. US2012/0178702 A1, which is incorporated herein by reference in its entirety. Non-limiting examples of lipid nanoparticle compositions and methods of making them are described, for example, in Semple et al. (2010) Nat. Biotechnol. 28:172-176; Jayarama et al. (2012), Angew. Chem. Int. Ed., 51.8529-8533; and Maier et al. (2013) Molecular Therapy 21, 1570-1578 (the contents of each of which are incorporated herein by reference in their entirety).

[1297] In one embodiment, the LNP formulation may be prepared by, e.g., the methods described in International Pat. Pub. No. WO 2011/127255 or WO 2008/103276, the contents of each of which are herein incorporated by reference in their entirety.

[1298] In one embodiment, LNP formulations described herein may comprise a polycationic composition. As a non-limiting example, the polycationic composition may be a composition selected from Formulae 1-60 of U.S. Pat. Pub. No. US2005/0222064 A1, the content of which is herein incorporated by reference in its entirety.

[1299] In one embodiment, the lipid nanoparticle may be formulated by the methods described in U.S. Pat. Pub. No. US2013/0156845 A1, and International Pat. Pub. No. WO2013/093648 A2 or WO2012/024526 A2, each of which is herein incorporated by reference in its entirety.

[1300] In one embodiment, the lipid nanoparticles described herein may be made in a sterile environment by the system and/or methods described in U.S. Pat. Pub. No. US2013/0164400 A1, which is incorporated herein by reference in its entirety.

[1301] In one embodiment, the LNP formulation may be formulated in a nanoparticle such as a nucleic acid-lipid particle described in U.S. Pat. No. 8,492,359, which is incorporated herein by reference in its entirety.

[1302] A nanoparticle composition may optionally comprise one or more coatings. For example, a nanoparticle composition may be formulated in a capsule, film, or tablet having a coating. A capsule, film, or tablet including a composition described herein may have any useful size, tensile strength, hardness, or density.

[1303] In some embodiments, the lipid nanoparticles described herein may be synthesized using methods comprising microfluidic mixers. Exemplary microfluidic mixers may include, but are not limited to, a slit interdigitial micromixer including, but not limited to, those manufactured by Precision Nanosystems (Vancouver, BC, Canada), Microinnova (Allerheiligen bei Wildon, Austria) and/or a staggered herringbone micromixer (SHM) (Zhigaltsev, I. V. et al. (2012) Langmuir. 28:3633-40; Belliveau, N. M. et al. Mol. Ther. Nucleic. Acids. (2012) 1:e37; Chen, D. et al. J. Am. Chem. Soc. (2012) 134(16):6948-51; each of which is herein incorporated by reference in its entirety).

[1304] In some embodiments, methods of LNP generation comprising SHM, further comprise the mixing of at least two input streams wherein mixing occurs by microstructure-induced chaotic advection (MICA). According to this method, fluid streams flow through channels present in a herringbone pattern causing rotational flow and folding the fluids around each other. This method may also comprise a surface for fluid mixing wherein the surface changes orientations during fluid cycling. Methods of generating LNPs using SHM include those disclosed in U.S. Pat. Pub. Nos. US2004/0262223 A1 and US2012/0276209 A1, each of which is incorporated herein by reference in their entirety.

[1305] In one embodiment, the lipid nanoparticles may be formulated using a micromixer such as, but not limited to, a Slit Interdigital Microstructured Mixer (SIMM-V2) or a Standard Slit Interdigital Micro Mixer (SSIMM) or Caterpillar (CPMM) or Impinging-jet (IJMM) from the Institut fur Mikrotechnik Mainz GmbH, Mainz Germany). In one embodiment, the lipid nanoparticles are created using microfluidic technology (see, Whitesides (2006) Nature. 442: 368-373; and Abraham et al. (2002) Science. 295: 647-651; each of which is herein incorporated by reference in its entirety). As a non-limiting example, controlled microfluidic formulation includes a passive method for mixing streams of steady pressure-driven flows in micro channels at a low Reynolds number (see, e.g., Abraham et al. (2002) Science. 295: 647651; which is herein incorporated by reference in its entirety).

[1306] In one embodiment, the circRNA of the present invention may be formulated in lipid nanoparticles created using a micromixer chip such as, but not limited to, those from Harvard Apparatus (Holliston, MA), Dolomite Microfluidics (Royston, UK), or Precision Nanosystems (Van Couver, BC, Canada). A micromixer chip can be used for rapid mixing of two or more fluid streams with a split and recombine mechanism.

[1307] In one embodiment, the lipid nanoparticles may have a diameter from about 10 to about 100 nm such as, but not limited to, about 10 to about 20 nm, about 10 to about 30 nm, about 10 to about 40 nm, about 10 to about 50 nm, about 10 to about 60 nm, about 10 to about 70 nm, about to about 80 nm, about 10 to about 90 nm, about 20 to about 30 nm, about 20 to about 40 nm, about 20 to about 50 nm, about 20 to about 60 nm, about 20 to about 70 nm, about 20 to about 80 nm, about 20 to about 90 nm, about 20 to about 100 nm, about 30 to about 40 nm, about 30 to about 50 nm, about 30 to about 60 nm, about 30 to about 70 nm, about 30 to about 80 nm, about to about 90 nm, about 30 to about 100 nm, about 40 to about 50 nm, about 40 to about 60 nm, about 40 to about 70 nm, about 40 to about 80 nm, about 40 to about 90 nm, about 40 to about 100 nm, about 50 to about 60 nm, about 50 to about 70 nm about 50 to about 80 nm, about 50 to about 90 nm, about 50 to about 100 nm, about 60 to about 70 nm, about 60 to about 80 nm, about 60 to about 90 nm, about 60 to about 100 nm, about 70 to about 80 nm, about 70 to about 90 nm, about 70 to about 100 nm, about 80 to about 90 nm, about 80 to about 100 nm and/or about 90 to about 100 nm. In one embodiment, the lipid nanoparticles may have a diameter from about 10 to 500 nm. In one embodiment, the lipid nanoparticle may have a diameter greater than 100 nm, greater than 150 nm, greater than 200 nm, greater than 250 nm, greater than 300 nm, greater than 350 nm, greater than 400 nm, greater than 450 nm, greater than 500 nm, greater than 550 nm, greater than 600 nm, greater than 650 nm, greater than 700 nm, greater than 750 nm, greater than 800 nm, greater than 850 nm, greater than 900 nm, greater than 950 nm or greater than 1000 nm. Each possibility represents a separate embodiment of the present invention.

[1308] In some embodiments, a nanoparticle (e.g., a lipid nanoparticle) has a mean diameter of 10-500 nm, 20-400 nm, 30-300 nm, or 40-200 nm. In some embodiments, a nanoparticle (e.g., a lipid nanoparticle) has a mean diameter of 50-150 nm, 50-200 nm, 80-100 nm, or 80-200 nm.

[1309] In some embodiments, the lipid nanoparticles described herein can have a diameter from below 0.1 μm to up to 1 mm such as, but not limited to, less than 0.1 μm, less than 1.0 μm, less than 5 μm, less than 10 μm, less than 15 μm, less than 20 μm, less than 25 μm, less than 30 μm, less than 35 μm, less than 40 μm, less than 50 μm, less than 55 μm, less than 60 μm, less than 65 μm, less than 70 μm, less than 75 μm, less than 80 μm, less than 85 μm, less than 90 μm, less than 95 μm, less than 100 μm, less than 125 μm, less than 150 μm, less than 175 μm, less than 200 μm, less than 225 μm, less than 250 μm, less than 275 μm, less than 300 μm, less than 325 μm, less than 350 μm, less than 375 μm, less than 400 μm, less than 425 μm, less than 450 μm, less than 475 μm, less than 500 μm, less than 525 μm, less than 550 μm, less than 575 μm, less than 600 μm, less than 625 μm, less than 650 μm, less than 675 μm, less than 700 μm, less than 725 μm, less than 750 μm, less than 775 μm, less than 800 μm, less than 825 μm, less than 850 μm, less than 875 μm, less than 900 μm, less than 925 μm, less than 950 μm, less than 975 μm.

[1310] In another embodiment, LNPs may have a diameter from about 1 nm to about 100 nm, from about 1 nm to about 10 nm, about 1 nm to about 20 nm, from about 1 nm to about 30 nm, from about 1 nm to about 40 nm, from about 1 nm to about 50 nm, from about 1 nm to about 60 nm, from about 1 nm to about 70 nm, from about 1 nm to about 80 nm, from about 1 nm to about 90 nm, from about 5 nm to about from 100 nm, from about 5 nm to about 10 nm, about 5 nm to about 20 nm, from about 5 nm to about 30 nm, from about 5 nm to about 40 nm, from about 5 nm to about 50 nm, from about 5 nm to about 60 nm, from about 5 nm to about 70 nm, from about 5 nm to about 80 nm, from about 5 nm to about 90 nm, about 10 to about 50 nM, from about 20 to about 50 nm, from about 30 to about 50 nm, from about 40 to about 50 nm, from about 20 to about 60 nm, from about 30 to about 60 nm, from about 40 to about 60 nm, from about 20 to about 70 nm, from about 30 to about 70 nm, from about 40 to about 70 nm, from about 50 to about 70 nm, from about 60 to about 70 nm, from about 20 to about 80 nm, from about 30 to about 80 nm, from about 40 to about 80 nm, from about 50 to about 80 nm, from about 60 to about 80 nm, from about to about 90 nm, from about 30 to about 90 nm, from about 40 to about 90 nm, from about 50 to about 90 nm, from about 60 to about 90 nm and/or from about 70 to about 90 nm. Each possibility represents a separate embodiment of the present invention.

[1311] A nanoparticle composition may be relatively homogenous. A polydispersity index may be used to indicate the homogeneity of a nanoparticle composition, e.g., the particle size distribution of the nanoparticle compositions. A small (e.g., less than 0.3) polydispersity index generally indicates a narrow particle size distribution. A nanoparticle composition may have a polydispersity index from about 0 to about 0.25, such as 0.01, 0.02, 0.03, 0.04, 0.05, 0.06, 0.07, 0.08, 0.09, 0.10, 0.1 1, 0.12, 0.13, 0.14, 0.15, 0.16, 0.17, 0.18, 0.19, 0.20, 0.21, 0.22, 0.23, 0.24, or 0.25. In some embodiments, the polydispersity index of a nanoparticle composition may be from about 0.10 to about 0.20. Each possibility represents a separate embodiment of the present invention.

[1312] The zeta potential of a nanoparticle composition may be used to indicate the electrokinetic potential of the composition. For example, the zeta potential may describe the surface charge of a nanoparticle composition. Nanoparticle compositions with relatively low charges, positive or negative, are generally desirable, as more highly charged species may interact undesirably with cells, tissues, and other elements in the body. In some embodiments, the zeta potential of a nanoparticle composition may be from about −20 mV to about +20 mV, from about −20 mV to about +15 mV, from about −20 mV to about +10 mV, from about −20 mV to about +5 mV, from about −20 mV to about 0 mV, from about −20 mV to about −5 mV, from about −20 mV to about −10 mV, from about −20 mV to about −15 mV from about −20 mV to about +20 mV, from about −20 mV to about +15 mV, from about −20 mV to about +10 mV, from about −20 mV to about +5 mV, from about −20 mV to about 0 mV, from about 0 mV to about +20 mV, from about 0 mV to about +15 mV, from about 0 mV to about +10 mV, from about 0 mV to about +5 mV, from about +5 mV to about +20 mV, from about +5 mV to about +15 mV, or from about +5 mV to about +10 mV. Each possibility represents a separate embodiment of the present invention.

[1313] The efficiency of encapsulation of a therapeutic agent describes the amount of therapeutic agent that is encapsulated or otherwise associated with a nanoparticle composition after preparation, relative to the initial amount provided. The encapsulation efficiency is desirably high (e.g., close to 100%). The encapsulation efficiency may be measured, for example, by comparing the amount of therapeutic agent in a solution containing the nanoparticle composition before and after breaking up the nanoparticle composition with one or more organic solvents or detergents. Fluorescence may be used to measure the amount of free therapeutic agent (e.g., nucleic acids) in a solution. For the nanoparticle compositions described herein, the encapsulation efficiency of a therapeutic agent may be at least 50%, for example 50%, 55%, 60%, 65%, 70%, 75%, 80%, 85%, 90%, 91%, 92%, 93%, 94%, 95%, 96%, 97%, 98%, 99%, or 100%. In some embodiments, the encapsulation efficiency may be at least 80%. In certain embodiments, the encapsulation efficiency may be at least 90%. Each possibility represents a separate embodiment of the present invention. In some embodiments, the lipid nanoparticle has a polydiversity value of less than 0.4. In some embodiments, the lipid nanoparticle has a net neutral charge at a neutral pH. In some embodiments, the lipid nanoparticle has a mean diameter of 50-200 nm.

[1314] The properties of a lipid nanoparticle formulation may be influenced by factors including, but not limited to, the selection of the cationic lipid component, the degree of cationic lipid saturation, the selection of the non-cationic lipid component, the degree of noncationic lipid saturation, the selection of the structural lipid component, the nature of the PEGylation, ratio of all components and biophysical parameters such as size. As described herein, the purity of a PEG lipid component is also important to an LNP's properties and performance. The present invention contemplates the use of such lipid nanoparticle formulations as disclosed, for example, in International Application No. PCT/US2021/031629, in U.S. Provisional Application No. 63/022,248, filed on May 8, 2020; U.S. Provisional Application No. 63/087,582, filed on Oct. 5, 2020; and International Patent Application No. PCT/US2020/063494, filed on Dec. 4, 2020, the teachings of which are incorporated herein by reference in their entirety.

### F. Methods for Lipid Nanoparticles (LNP)

[1315] In one embodiment, a lipid nanoparticle formulation may be prepared by the methods described in International Publication Nos. WO2011127255 or WO2008103276, each of which is herein incorporated by reference in their entirety. In some embodiments, lipid nanoparticle formulations may be as described in International Publication No. WO2019131770, which is herein incorporated by reference in its entirety.

[1316] In some embodiments, circular RNA is formulated according to a process described in U.S. patent application Ser. No. 15/809,680. In some embodiments, the present invention provides a process of encapsulating circular RNA in transfer vehicles comprising the steps of forming lipids into pre-formed transfer vehicles (i.e. formed in the absence of RNA) and then combining the pre-formed transfer vehicles with RNA. In some embodiments, the novel formulation process results in an RNA formulation with higher potency (peptide or protein expression) and higher efficacy (improvement of a biologically relevant endpoint) both in vitro and in vivo with potentially better tolerability as compared to the same RNA formulation prepared without the step of preforming the lipid nanoparticles (e.g., combining the lipids directly with the RNA).

[1317] For certain cationic lipid nanoparticle formulations of RNA, in order to achieve high encapsulation of RNA, the RNA in buffer (e.g., citrate buffer) has to be heated. In those processes or methods, the heating is required to occur before the formulation process (i.e. heating the separate components) as heating post-formulation (post-formation of nanoparticles) does not increase the encapsulation efficiency of the RNA in the lipid nanoparticles. In contrast, in some embodiments of the novel processes of the present invention, the order of heating of RNA does not appear to affect the RNA encapsulation percentage. In some embodiments, no heating (i.e. maintaining at ambient temperature) of one or more of the solutions comprising the pre-formed lipid nanoparticles, the solution comprising the RNA and the mixed solution comprising the lipid nanoparticle encapsulated RNA is required to occur before or after the formulation process.

[1318] RNA may be provided in a solution to be mixed with a lipid solution such that the RNA may be encapsulated in lipid nanoparticles. A suitable RNA solution may be any aqueous solution containing RNA to be encapsulated at various concentrations. For example, a suitable RNA solution may contain an RNA at a concentration of or greater than about 0.01 mg/ml, 0.05 mg/ml, 0.06 mg/ml, 0.07 mg/ml, 0.08 mg/ml, 0.09 mg/ml, 0.1 mg/ml, 0.15 mg/ml, 0.2 mg/ml, 0.3 mg/ml, 0.4 mg/ml, 0.5 mg/ml, 0.6 mg/ml, 0.7 mg/ml, 0.8 mg/ml, 0.9 mg/ml, or 1.0 mg/ml. In some embodiments, a suitable RNA solution may contain an RNA at a concentration in a range from about 0.01-1.0 mg/ml, 0.01-0.9 mg/ml, 0.01-0.8 mg/ml, 0.01-0.7 mg/ml, 0.01-0.6 mg/ml, 0.01-0.5 mg/ml, 0.01-0.4 mg/ml, 0.01-0.3 mg/ml, 0.01-0.2 mg/ml, 0.01-0.1 mg/ml, 0.05-1.0 mg/ml, 0.05-0.9 mg/ml, 0.05-0.8 mg/ml, 0.05-0.7 mg/ml, 0.05-0.6 mg/ml, 0.05-0.5 mg/ml, 0.05-0.4 mg/ml, 0.05-0.3 mg/ml, 0.05-0.2 mg/ml, 0.05-0.1 mg/ml, 0.1-1.0 mg/ml, 0.2-0.9 mg/ml, 0.3-0.8 mg/ml, 0.4-0.7 mg/ml, or 0.5-0.6 mg/ml.

[1319] Typically, a suitable RNA solution may also contain a buffering agent and/or salt. Generally, buffering agents can include HEPES, Tris, ammonium sulfate, sodium bicarbonate, sodium citrate, sodium acetate, potassium phosphate or sodium phosphate. In some embodiments, suitable concentration of the buffering agent may be in a range from about 0.1 mM to 100 mM, 0.5 mM to 90 mM, 1.0 mM to 80 mM, 2 mM to 70 mM, 3 mM to 60 mM, 4 mM to 50 mM, 5 mM to 40 mM, 6 mM to 30 mM, 7 mM to 20 mM, 8 mM to 15 mM, or 9 to 12 mM.

[1320] Exemplary salts can include sodium chloride, magnesium chloride, and potassium chloride. In some embodiments, suitable concentration of salts in an RNA solution may be in a range from about 1 mM to 500 mM, 5 mM to 400 mM, 10 mM to 350 mM, 15 mM to 300 mM, 20 mM to 250 mM, 30 mM to 200 mM, 40 mM to 190 mM, 50 mM to 180 mM, 50 mM to 170 mM, 50 mM to 160 mM, 50 mM to 150 mM, or 50 mM to 100 mM.

[1321] In some embodiments, a suitable RNA solution may have a pH in a range from about 3.5-6.5, 3.5-6.0, 3.5-5.5, 3.5-5.0, 3.5-4.5, 4.0-5.5, 4.0-5.0, 4.0-4.9, 4.0-4.8, 4.0-4.7, 4.0-4.6, or 4.0-4.5.

[1322] Various methods may be used to prepare an RNA solution suitable for the present invention. In some embodiments, RNA may be directly dissolved in a buffer solution described herein. In some embodiments, an RNA solution may be generated by mixing an RNA stock solution with a buffer solution prior to mixing with a lipid solution for encapsulation. In some embodiments, an RNA solution may be generated by mixing an RNA stock solution with a buffer solution immediately before mixing with a lipid solution for encapsulation.

[1323] According to the present invention, a lipid solution contains a mixture of lipids suitable to form transfer vehicles for encapsulation of RNA. In some embodiments, a suitable lipid solution is ethanol based. For example, a suitable lipid solution may contain a mixture of desired lipids dissolved in pure ethanol (i.e. 100% ethanol). In another embodiment, a suitable lipid solution is isopropyl alcohol based. In another embodiment, a suitable lipid solution is dimethylsulfoxide-based. In another embodiment, a suitable lipid solution is a mixture of suitable solvents including, but not limited to, ethanol, isopropyl alcohol and dimethylsulfoxide.

[1324] A suitable lipid solution may contain a mixture of desired lipids at various concentrations. In some embodiments, a suitable lipid solution may contain a mixture of desired lipids at a total concentration in a range from about 0.1-100 mg/ml, 0.5-90 mg/ml, 1.0-80 mg/ml, 1.0-70 mg/ml, 1.0-60 mg/ml, 1.0-50 mg/ml, 1.0-40 mg/ml, 1.0-30 mg/ml, 1.0-20 mg/ml, 1.0-15 mg/ml, 1.0-10 mg/ml, 1.0-9 mg/ml, 1.0-8 mg/ml, 1.0-7 mg/ml, 1.0-6 mg/ml, or 1.0-5 mg/ml.

### G. Liposomes

[1325] In certain embodiments, liposomes or other lipid bilayer vesicles are disclosed herein and may be used as a component or as the whole transfer vehicle to facilitate or enhance the delivery and release of circular RAN to one or more target cells. Liposomes are usually characterized by having an interior space sequestered from an outer medium by a membrane of one or more bilayers forming a microscopic sack or vesicle. Bilayer membranes of liposomes are typically formed by lipids, i.e. amphiphilic molecules of synthetic or natural origin that comprise spatially separated hydrophobic or hydrophilic domains (Lasic, D, and Papahadjopoulos, D., eds. Medical Applications of Liposomes. Elsevier, Amsterdam, 1998).

[1326] In some embodiments, the circular RNA is encapsulated, or the liposome can be prepared using various methods, including but not limited to mechanical dispersion, solvent dispersion, and or detergent removal. Each of these methods include the steps of drying the lipids from organic solvents, dispersing the lipid in aqueous media, resizing the liposomes and purifying the/liposome suspension (Gomez et al., ACS Omega. 2019. 4(6): 10866-10876). Various other methods of liposome preparation can be found in Akbarzadeh et al., Nanoscale Res Lett. 2013; 8(1): 102. In some embodiments, the circular RNA may be loaded passively (i.e. the circular RNA is encapsulated during liposome formation) or actively (i.e. after liposome formation).

[1327] In some embodiments, the liposome disclosed herein may comprise one or more bilayers. In certain embodiments, the liposome may comprise a multilamellar vesicle or a unilamellar vesicle.

[1328] In certain embodiments, the liposome as described herein comprises of naturally derived or engineered phospholipids. In some embodiments, the liposomes may further comprise PEG-lipids that aid with stability of the overall liposome structure. Other improvements, including but not limited to corticosteroid and other steroids may be used to help with maintaining structure and stability of the liposome.

### Dendrimer

[1329] In certain embodiments, the transfer vehicle for transporting the circular RNA comprises a dendrimer. Use of “dendrimer” describes the architectural motif of the transfer vehicle. In some embodiments, the dendrimer includes but is not limited to containing an interior core and one or more layers (i.e. generations) that extend or attach out from the interior core. In some of the embodiments, the generations may contain one or more branching points and an exterior surface of terminal groups that attach to the outermost generation. The branching points, in certain embodiments, may be mostly monodispersed and contain symmetric branching units built around the interior core. In some embodiments, the interior core

[1330] Synthesis of the dendrimer may comprise the divergent method, convergent growth, hypercore and branched monomer growth, double exponential growth, lego chemistry, click chemistry and other methods as available in the art (Mendes L. et al., Molecules. 2017. 22 (9): 1401 further describes these methods).

### H. Polymer-Based Delivery

[1331] In certain embodiments, as described herein, the transfer vehicle for the circular RNA polynucleotide comprises a polymer nanoparticle. In some embodiments, the polymer nanoparticle includes nanocapsules and nanospheres. Nanocapsules, in some embodiments, are composed of an oily core surrounded by a polymeric shell. In some embodiments, the circular RNA is contained within the core and the polymeric shell controls the release of the circular RNA. On the other hand, nanospheres comprise a continuous polymeric network in which the circular RNA is retained or absorbed onto the surface. In some embodiments, cationic polymers is used to encapsulate the circular RNA due to the favorable electrostatic interaction of the cations to the negatively charged nucleic acids and cell membrane.

[1332] The polymer nanoparticle may be prepared by various methods. In some embodiments, the polymer nanoparticle may be prepared by nanoprecipitation, emulsion techniques, solvent evaporation, solvent diffusion, reverse salting-out or other methods available in the art.

### I. Polymer-Lipid Hybrids

[1333] In certain embodiments, as described herein, the transfer vehicle for the circular RNA polynucleotide comprises a polymer-lipid hybrid nanoparticle (LPHNP). In some embodiments, the LPHNP comprises a polymer core enveloped within a lipid bilayer. In some embodiments, the polymer core encapsulates the circular RNA polynucleotide. In some embodiments, the LPHNP further comprises an outer lipid bilayer. In certain embodiments this outer lipid bilayer comprises a PEG-lipid, helper lipid, cholesterol or other molecule as known in the art to help with stability in a lipid-based nanoparticle. The lipid bilayer closest to the polymer core mitigates the loss of the entrapped circular RNA during LPHNP formation and protects from degradation of the polymer core by preventing diffusion of water from outside of the transfer vehicle into the polymer core (Mukherjee et al., In J. Nanomedicine. 2019; 14: 1937-1952).

[1334] There are various methods of developing and formulating a LPHNP. In certain embodiments, the LPHNP is developed using a one-step or a two-step method available in the art. In some embodiments, the one-step method for forming an LPHNP is through nanoprecipitation or emulsification-solvent evaporation. In certain embodiments, the two-step method includes nanoprecipitation, emulsification-solvent evaporation, high-pressure homogenization, or other method available in the art.

### J. Peptide-Based Delivery

[1335] In certain embodiments, the circular RNA can be transported using a peptide-based delivery mechanism. In some embodiments, the peptide-based delivery mechanism comprises a lipoprotein. Based on the size of the drug to be delivered, the lipoprotein may be either a low-density (LDL) or high-density lipoprotein (HDL). As seen in U.S. Pat. No. 8,734,853B2, high-density lipoproteins are capable of transporting a nucleic acid in vivo and in vitro.

[1336] In particular embodiments, the lipid component includes cholesterol. In more particular embodiments, the lipid component includes a combination of cholesterol and cholesterol oleate.

[1337] The HDL-nucleic acid particle can be of any size, but in particular embodiments the particle has a molecular size of from about 100 Angstroms to about 500 Angstroms. In more particular embodiments, the particle has a molecular size of from about 100 Angstroms to about 300 Angstroms. The size may be dependent on the size of the nucleic acid component incorporated into the particle.

[1338] The HDL-nucleic acid particle can have a broad range in molecular weight. The weight is dependent on the size of the nucleic acid incorporated into the particle. For example, in some embodiments, the particle has a molecular weight of between about 100,000 Daltons to about 1,000,000 Daltons. In more particular embodiments, the particle has a molecular weight of between about 100,000 Daltons to about 500,000 Daltons. In specific embodiments, the particle has a molecular weight of between about 100,000 Daltons to about 300,000 Daltons.

[1339] The HDL-nucleic acid particles of the present invention can be made by different methods. For example, a nucleic acid (e.g., siRNA) may be neutralized by combining the nucleic acid with peptides or polypeptides composed of contiguous positively-charged amino acids. For example, as discussed above, amino acid sequences may include 2 or more contiguous lysine residues. The positive charge of the amino acid sequences neutralizes the negatively charged nucleic acid molecule. The nucleic acid can then be encapsulated in an HDL particle using a method as described in Lacko et al. (2002).

### K. Carbohydrate Carrier

[1340] In certain embodiments, the circular RNA polynucleotide can be transported using a carbohydrate carrier or a sugar-nanocapsule. In certain embodiments, the carbohydrate carrier comprises a sugar-decorated nanoparticle, peptide- and saccharide-conjugated dendrimer, nanoparticles based on polysaccharides, and other carbohydrate-based carriers available in the art. As described herein, the incorporation of carbohydrate molecules may be through synthetic means.

[1341] In some embodiments, the carbohydrate carrier comprises polysaccharides. These polysaccharides may be made from the microbial cell wall of the target cell. For example, carbohydrate carriers comprise of mannan carbohydrates have been shown to successfully deliver mRNA (Son et al., Nano Lett. 2020. 20(3): 1499-1509).

### L. Glycan-Decorated Nanoparticles/Glyconanoparticles

[1342] In certain embodiments, as provided herein, the transfer vehicle for the circular RNA is a glyconanoparticle (GlycoNP). As known in the art, glyconanoparticles comprise a core comprising gold, iron oxide, semiconductor nanoparticles or a combination thereof. In some embodiments, the glyconanoparticle is functionalized using carbohydrates. In certain embodiments, the glyconanoparticle comprises a carbon nanotube or graphene. In one embodiment the glyconanoparticle comprises a polysaccharide-based GlycoNP (e.g., chitosan-based GlycoNP). In certain embodiments, the glyconanoparticle is a glycodendrimer.

### M. Exosomes, Fusome & Organelle-Based Delivery Systems

[1343] In certain embodiments, as provided herein, the circular RNA is transferred through use of an exosome, a type of extracellular vesicle. Exosomes naturally are secreted by various types of cells and are used as a transport vesicle for various forms of cargo. During delivery exosomes can contain and protecting specific mRNAs, regulatory microRNAs, lipids, and proteins (Luan et al., Acta Pharmacologica Sinica. 2017. 38:754-763). Naturally, exosomes may be 30 nm to 125 nm.

[1344] In some embodiments, the exosome may be made in part from an immune cell. As shown in Haney et al, use of immune cell derived exosomes are able to avoid mononuclear phagocytes (J Control Release. 2015. 207:18-30). In some embodiments, the exosome may be a dendritic cell, macrophage, T-cell, B-cell or derived from another immune cell. As seen in WO/2021/041473A1, various forms of RNAs of varying lengths may be transported through exosome delivery including messenger RNA (mRNA), microRNA (miRNA), long intergenic non-coding RNA (lincRNA), long non-coding RNA (lncRNA), non-coding RNA (ncRNA), non-messenger RNA (nmRNA), small RNA (sRNA), small non-messenger RNA (smnRNA), DNA damage response RNA (DD RNA), extracellular RNA (exRNA), small nuclear RNA (snRNA), small nucleolar RNA (snoRNA), and precursor messenger RNA (pre-mRNA).

[1345] In other embodiments, the transfer vehicle may comprise in whole or in part from a fusome. In some embodiments, the fusome is derived from an endoplasmic reticulum of a germline cyst. In certain embodiments, the germline cyst is from a Drosophila ovary.

### N. Microneedles, Electroporation, Continous Pumps, & Gene Gun

[1346] In certain embodiments, the circular RNA polynucleotide may be transported using noncellular and instead be through mechanical delivery mechanisms. In some embodiments, this delivery method includes microneedles, electroporation, continuous pumps and/or gene guns.

[1347] Various methods and apparatuses have been developed for microneedling a nucleic acid into a specific set of cells. A method for delivery of biological material across the biological tissue has been described by Kodgule et al and is taught for example in US 2011/0196308, the contents of which are incorporated herein by reference in their entirety. According to Kodgule, multiple biodegradable microneedles containing a therapeutic active ingredient are incorporated in a device which delivers proteins, carbohydrates, nucleic acid molecules, lipids and other pharmaceutically active ingredients or combinations thereof.

[1348] Intradermal delivery of biologically active agents by needle-free injection and electroporation has been described by Hoffmann et al and is taught for example in U.S. Pat. No. 7,171,264 the contents of which are incorporated herein by reference in their entirety. According to Hoffmann, one or more needle-free injectors are incorporated into an electroporation device and the combination of needle-free injection and electroporation is sufficient to introduce the agent into cells in skin, muscle or mucosa. In certain embodiments, the electroporation is through a continuous-flow microfluidic electroporation.

### O. Pharmaceutical Salts, Buffers, & Solutions

[1349] In some embodiments, the transfer vehicle of the circular RNA polynucleotide is a solution or diluent comprising of a salt or a buffer.

### 7. Combinations of Proteins and IRES

[1350] In certain embodiments, as provided herein, the payload encoded by the circular RNA polynucleotide may be optimized through use of a specific internal ribosome entry sites (IRES) within the translation initiation element (TIE). In some embodiments, IRES specificity within a circular RNA can significantly enhance expression of specific proteins encoded within the coding element.

### 8. Targeting

### A. Targeting Methods

[1351] The present invention also contemplates the discriminatory targeting of target cells and tissues by both passive and active targeting means. The phenomenon of passive targeting exploits the natural distributions patterns of a transfer vehicle in vivo without relying upon the use of additional excipients or means to enhance recognition of the transfer vehicle by target cells. For example, transfer vehicles which are subject to phagocytosis by the cells of the reticulo-endothelial system are likely to accumulate in the liver or spleen, and accordingly may provide a means to passively direct the delivery of the compositions to such target cells.

[1352] Alternatively, the present invention contemplates active targeting, which involves the use of targeting moieties that may be bound (either covalently or non-covalently) to the transfer vehicle to encourage localization of such transfer vehicle at certain target cells or target tissues. For example, targeting may be mediated by the inclusion of one or more endogenous targeting moieties in or on the transfer vehicle to encourage distribution to the target cells or tissues. Recognition of the targeting moiety by the target tissues actively facilitates tissue distribution and cellular uptake of the transfer vehicle and/or its contents in the target cells and tissues (e.g., the inclusion of an apolipoprotein-E targeting ligand in or on the transfer vehicle encourages recognition and binding of the transfer vehicle to endogenous low density lipoprotein receptors expressed by hepatocytes). As provided herein, the composition can comprise a moiety capable of enhancing affinity of the composition to the target cell. Targeting moieties may be linked to the outer bilayer of the lipid particle during formulation or post-formulation. These methods are well known in the art. In addition, some lipid particle formulations may employ fusogenic polymers such as PEAA, hemagluttinin, other lipopeptides (see U.S. patent application Ser. No. 08/835,281, and 60/083,294, which are incorporated herein by reference) and other features useful for in vivo and/or intracellular delivery. In other some embodiments, the compositions of the present invention demonstrate improved transfection efficacies, and/or demonstrate enhanced selectivity towards target cells or tissues of interest. Contemplated therefore are compositions which comprise one or more moieties (e.g., peptides, aptamers, oligonucleotides, a vitamin or other molecules) that are capable of enhancing the affinity of the compositions and their nucleic acid contents for the target cells or tissues. Suitable moieties may optionally be bound or linked to the surface of the transfer vehicle. In some embodiments, the targeting moiety may span the surface of a transfer vehicle or be encapsulated within the transfer vehicle. Suitable moieties and are selected based upon their physical, chemical or biological properties (e.g., selective affinity and/or recognition of target cell surface markers or features). Cell-specific target sites and their corresponding targeting ligand can vary widely. Suitable targeting moieties are selected such that the unique characteristics of a target cell are exploited, thus allowing the composition to discriminate between target and non-target cells. For example, compositions of the invention may include surface markers (e.g., apolipoprotein-B or apolipoprotein-E) that selectively enhance recognition of, or affinity to hepatocytes (e.g., by receptor-mediated recognition of and binding to such surface markers). As an example, the use of galactose as a targeting moiety would be expected to direct the compositions of the present invention to parenchymal hepatocytes, or alternatively the use of mannose containing sugar residues as a targeting ligand would be expected to direct the compositions of the present invention to liver endothelial cells (e.g., mannose containing sugar residues that may bind preferentially to the asialoglycoprotein receptor present in hepatocytes). (See Hillery A M, et al. “Drug Delivery and Targeting: For Pharmacists and Pharmaceutical Scientists” (2002) Taylor & Francis, Inc.) The presentation of such targeting moieties that have been conjugated to moieties present in the transfer vehicle (e.g., a lipid nanoparticle) therefore facilitate recognition and uptake of the compositions of the present invention in target cells and tissues. Examples of suitable targeting moieties include one or more peptides, proteins, aptamers, vitamins and oligonucleotides.

[1353] In particular embodiments, a transfer vehicle comprises a targeting moiety. In some embodiments, the targeting moiety mediates receptor-mediated endocytosis selectively into a specific population of cells. In some embodiments, the targeting moiety is capable of binding to a T cell antigen. In some embodiments, the targeting moiety is capable of binding to a NK, NKT, or macrophage antigen. In some embodiments, the targeting moiety is capable of binding to a protein selected from the group CD3, CD4, CD8, PD-1, 4-1BB, and CD2. In some embodiments, the targeting moiety is an single chain Fv (scFv) fragment, nanobody, peptide, peptide-based macrocycle, minibody, heavy chain variable region, light chain variable region or fragment thereof. In some embodiments, the targeting moiety is selected from T-cell receptor motif antibodies, T-cell α chain antibodies, T-cell β chain antibodies, T-cell γ chain antibodies, T-cell δ chain antibodies, CCR7 antibodies, CD3 antibodies, CD4 antibodies, CD5 antibodies, CD7 antibodies, CD8 antibodies, CD11b antibodies, CD11c antibodies, CD16 antibodies, CD19 antibodies, CD20 antibodies, CD21 antibodies, CD22 antibodies, CD25 antibodies, CD28 antibodies, CD34 antibodies, CD35 antibodies, CD40 antibodies, CD45RA antibodies, CD45RO antibodies, CD52 antibodies, CD56 antibodies, CD62L antibodies, CD68 antibodies, CD80 antibodies, CD95 antibodies, CD117 antibodies, CD127 antibodies, CD133 antibodies, CD137 (4-1BB) antibodies, CD163 antibodies, F4/80 antibodies, IL-4R^{a} antibodies, Sca-1 antibodies, CTLA-4 antibodies, GITR antibodies GARP antibodies, LAP antibodies, granzyme B antibodies, LFA-1 antibodies, transferrin receptor antibodies, and fragments thereof. In some embodiments, the targeting moiety is a small molecule binder of an ectoenzyme on lymphocytes. Small molecule binders of ectoenzymes include A2A inhibitors CD73 inhibitors, CD39 or adesines receptors A2aR and A2bR. Potential small molecules include AB928.

[1354] In some embodiments, transfer vehicles are formulated and/or targeted as described in Shobaki N, Sato Y, Harashima H. Mixing lipids to manipulate the ionization status of lipid nanoparticles for specific tissue targeting. Int J Nanomedicine. 2018; 13:8395-8410. Published 2018 Dec. 10. In some embodiments, a transfer vehicle is made up of 3 lipid types. In some embodiments, a transfer vehicle is made up of 4 lipid types. In some embodiments, a transfer vehicle is made up of 5 lipid types. In some embodiments, a transfer vehicle is made up of 6 lipid types.

### B. Target Cells

[1355] Where it is desired to deliver a nucleic acid to an immune cell, the immune cell represents the target cell. In some embodiments, the compositions of the invention transfect the target cells on a discriminatory basis (i.e., do not transfect non-target cells). The compositions of the invention may also be prepared to preferentially target a variety of target cells, which include, but are not limited to, T cells, B cells, macrophages, and dendritic cells.

[1356] In some embodiments, the target cells are deficient in a protein or enzyme of interest. For example, where it is desired to deliver a nucleic acid to a hepatocyte, the hepatocyte represents the target cell. In some embodiments, the compositions of the invention transfect the target cells on a discriminatory basis (i.e., do not transfect non-target cells). The compositions of the invention may also be prepared to preferentially target a variety of target cells, which include, but are not limited to, hepatocytes, epithelial cells, hematopoietic cells, epithelial cells, endothelial cells, lung cells, bone cells, stem cells, mesenchymal cells, neural cells (e.g., meninges, astrocytes, motor neurons, cells of the dorsal root ganglia and anterior horn motor neurons), photoreceptor cells (e.g., rods and cones), retinal pigmented epithelial cells, secretory cells, cardiac cells, adipocytes, vascular smooth muscle cells, cardiomyocytes, skeletal muscle cells, beta cells, pituitary cells, synovial lining cells, ovarian cells, testicular cells, fibroblasts, B cells, T cells, reticulocytes, leukocytes, granulocytes and tumor cells.

[1357] The compositions of the invention may be prepared to preferentially distribute to target cells such as in the heart, lungs, kidneys, liver, and spleen. In some embodiments, the compositions of the invention distribute into the cells of the liver or spleen to facilitate the delivery and the subsequent expression of the circRNA comprised therein by the cells of the liver (e.g., hepatocytes) or the cells of spleen (e.g., immune cells). The targeted cells may function as a biological “reservoir” or “depot” capable of producing, and systemically excreting a functional protein or enzyme. Accordingly, in one embodiment of the invention the transfer vehicle may target hepatocytes or immune cells and/or preferentially distribute to the cells of the liver or spleen upon delivery. In an embodiment, following transfection of the target hepatocytes or immune cells, the circRNA loaded in the vehicle are translated and a functional protein product is produced, excreted and systemically distributed. In other embodiments, cells other than hepatocytes (e.g., lung, spleen, heart, ocular, or cells of the central nervous system) can serve as a depot location for protein production.

[1358] In one embodiment, the compositions of the invention facilitate a subject's endogenous production of one or more functional proteins and/or enzymes. In an embodiment of the present invention, the transfer vehicles comprise circRNA which encode a deficient protein or enzyme. Upon distribution of such compositions to the target tissues and the subsequent transfection of such target cells, the exogenous circRNA loaded into the transfer vehicle (e.g., a lipid nanoparticle) may be translated in vivo to produce a functional protein or enzyme encoded by the exogenously administered circRNA (e.g., a protein or enzyme in which the subject is deficient). Accordingly, the compositions of the present invention exploit a subject's ability to translate exogenously- or recombinantly-prepared circRNA to produce an endogenously-translated protein or enzyme, and thereby produce (and where applicable excrete) a functional protein or enzyme. The expressed or translated proteins or enzymes may also be characterized by the in vivo inclusion of native post-translational modifications which may often be absent in recombinantly-prepared proteins or enzymes, thereby further reducing the immunogenicity of the translated protein or enzyme.

[1359] The administration of circRNA encoding a deficient protein or enzyme avoids the need to deliver the nucleic acids to specific organelles within a target cell. Rather, upon transfection of a target cell and delivery of the nucleic acids to the cytoplasm of the target cell, the circRNA contents of a transfer vehicle may be translated and a functional protein or enzyme expressed.

[1360] In some embodiments, a circular RNA comprises one or more miRNA binding sites. In some embodiments, a circular RNA comprises one or more miRNA binding sites recognized by miRNA present in one or more non-target cells or non-target cell types (e.g., Kupffer cells or hepatic cells) and not present in one or more target cells or target cell types (e.g., hepatocytes or T cells). In some embodiments, a circular RNA comprises one or more miRNA binding sites recognized by miRNA present in an increased concentration in one or more non-target cells or non-target cell types (e.g., Kupffer cells or hepatic cells) compared to one or more target cells or target cell types (e.g., hepatocytes or T cells). miRNAs are thought to function by pairing with complementary sequences within RNA molecules, resulting in gene silencing.

[1361] In some embodiments, the compositions of the invention transfect or distribute to target cells on a discriminatory basis (i.e. do not transfect non-target cells). The compositions of the invention may also be prepared to preferentially target a variety of target cells, which include, but are not limited to, hepatocytes, epithelial cells, hematopoietic cells, epithelial cells, endothelial cells, lung cells, bone cells, stem cells, mesenchymal cells, neural cells (e.g., meninges, astrocytes, motor neurons, cells of the dorsal root ganglia and anterior horn motor neurons), photoreceptor cells (e.g., rods and cones), retinal pigmented epithelial cells, secretory cells, cardiac cells, adipocytes, vascular smooth muscle cells, cardiomyocytes, skeletal muscle cells, beta cells, pituitary cells, synovial lining cells, ovarian cells, testicular cells, fibroblasts, B cells, T cells, reticulocytes, leukocytes, granulocytes and tumor cells.

### 9. Pharmaceutical Compositions

[1362] In certain embodiments, provided herein are compositions (e.g., pharmaceutical compositions) comprising a therapeutic agent provided herein. In some embodiments, the therapeutic agent is a circular RNA polynucleotide provided herein. In some embodiments the therapeutic agent is a vector provided herein. In some embodiments, the therapeutic agent is a cell comprising a circular RNA or vector provided herein (e.g., a human cell, such as a human T cell). In certain embodiments, the composition further comprises a pharmaceutically acceptable carrier. In some embodiments, the compositions provided herein comprise a therapeutic agent provided herein in combination with other pharmaceutically active agents or drugs, such as anti-inflammatory drugs or antibodies capable of targeting B cell antigens, e.g., anti-CD20 antibodies, e.g., rituximab.

[1363] With respect to pharmaceutical compositions, the pharmaceutically acceptable carrier can be any of those conventionally used and is limited only by chemico-physical considerations, such as solubility and lack of reactivity with the active agent(s), and by the route of administration. The pharmaceutically acceptable carriers described herein, for example, vehicles, adjuvants, excipients, and diluents, are well-known to those skilled in the art and are readily available to the public. It is preferred that the pharmaceutically acceptable carrier be one which is chemically inert to the therapeutic agent(s) and one which has no detrimental side effects or toxicity under the conditions of use.

[1364] The choice of carrier will be determined in part by the particular therapeutic agent, as well as by the particular method used to administer the therapeutic agent. Accordingly, there are a variety of suitable formulations of the pharmaceutical compositions provided herein.

[1365] In certain embodiments, the pharmaceutical composition comprises a preservative. In certain embodiments, suitable preservatives may include, for example, methylparaben, propylparaben, sodium benzoate, and benzalkonium chloride. Optionally, a mixture of two or more preservatives may be used. The preservative or mixtures thereof are typically present in an amount of about 0.0001% to about 2% by weight of the total composition.

[1366] In some embodiments, the pharmaceutical composition comprises a buffering agent. In some embodiments, suitable buffering agents may include, for example, citric acid, sodium citrate, phosphoric acid, potassium phosphate, and various other acids and salts. A mixture of two or more buffering agents optionally may be used. The buffering agent or mixtures thereof are typically present in an amount of about 0.001% to about 4% by weight of the total composition.

[1367] In some embodiments, the concentration of therapeutic agent in the pharmaceutical composition can vary, e.g., less than about 1%, or at least about 1%, 2%, 3%, 4%, 5%, 6%, 7%, 8%, 9%, 10%, 15%, 20%, 25%, 30%, 35%, 40%, 45%, or about 50% or more by weight, and can be selected primarily by fluid volumes, and viscosities, in accordance with the particular mode of administration selected.

[1368] The following formulations for oral, aerosol, parenteral (e.g., subcutaneous, intravenous, intraarterial, intramuscular, intradermal, intraperitoneal, and intrathecal), and topical administration are merely exemplary and are in no way limiting. More than one route can be used to administer the therapeutic agents provided herein, and in certain instances, a particular route can provide a more immediate and more effective response than another route.

[1369] Formulations suitable for oral administration can comprise or consist of (a) liquid solutions, such as an effective amount of the therapeutic agent dissolved in diluents, such as water, saline, or orange juice; (b) capsules, sachets, tablets, lozenges, and troches, each containing a predetermined amount of the active ingredient, as solids or granules; (c) powders; (d) suspensions in an appropriate liquid; and (e) suitable emulsions. Liquid formulations may include diluents, such as water and alcohols, for example, ethanol, benzyl alcohol and the polyethylene alcohols, either with or without the addition of a pharmaceutically acceptable surfactant. Capsule forms can be of the ordinary hard or soft shelled gelatin type containing, for example, surfactants, lubricants, and inert fillers, such as lactose, sucrose, calcium phosphate, and corn starch. Tablet forms can include one or more of lactose, sucrose, mannitol, corn starch, potato starch, alginic acid, microcrystalline cellulose, acacia, gelatin, guar gum, colloidal silicon dioxide, croscarmellose sodium, talc, magnesium stearate, calcium stearate, zinc stearate, stearic acid, and other excipients, colorants, diluents, buffering agents, disintegrating agents, moistening agents, preservatives, flavoring agents, and other pharmacologically compatible excipients. Lozenge forms can comprise the therapeutic agent with a flavorant, usually sucrose, acacia or tragacanth. Pastilles can comprise the therapeutic agent with an inert base, such as gelatin and glycerin, or sucrose and acacia, emulsions, gels, and the like containing, in addition to, such excipients as are known in the art.

[1370] Formulations suitable for parenteral administration include aqueous and nonaqueous isotonic sterile injection solutions, which can contain antioxidants, buffers, bacteriostats, and solutes that render the formulation isotonic with the blood of the intended recipient, and aqueous and nonaqueous sterile suspensions that can include suspending agents, solubilizers, thickening agents, stabilizers, and preservatives. In some embodiments, the therapeutic agents provided herein can be administered in a physiologically acceptable diluent in a pharmaceutical carrier, such as a sterile liquid or mixture of liquids including water, saline, aqueous dextrose and related sugar solutions, an alcohol such as ethanol or hexadecyl alcohol, a glycol such as propylene glycol or polyethylene glycol, dimethylsulfoxide, glycerol, ketals such as 2,2-dimethyl-1,3-dioxolane-4-methanol, ethers, poly(ethyleneglycol) 400, oils, fatty acids, fatty acid esters or glycerides, or acetylated fatty acid glycerides with or without the addition of a pharmaceutically acceptable surfactant such as a soap or a detergent, suspending agent such as pectin, carbomers, methylcellulose, hydroxypropylmethylcellulose, or carboxymethylcellulose, or emulsifying agents and other pharmaceutical adjuvants.

[1371] Oils, which can be used in parenteral formulations in some embodiments, include petroleum, animal oils, vegetable oils, or synthetic oils. Specific examples of oils include peanut, soybean, sesame, cottonseed, corn, olive, petrolatum, and mineral oil. Suitable fatty acids for use in parenteral formulations include oleic acid, stearic acid, and isostearic acid. Ethyl oleate and isopropyl myristate are examples of suitable fatty acid esters.

[1372] Suitable soaps for use in certain embodiments of parenteral formulations include fatty alkali metal, ammonium, and triethanolamine salts, and suitable detergents include (a) cationic detergents such as, for example, dimethyl dialkyl ammonium halides. and alkyl pyridinium halides, (b) anionic detergents such as, for example, alkyl, aryl, and olefin sulfonates, alky, olefin, ether, and monoglyceride sulfates, and sulfosuccinates, (c) nonionic detergents such as, for example, fatty amine oxides, fatty acid alkanolamides, and polyoxyethylenepolypropylene copolymers, (d) amphoteric detergents such as, for example, alkyl-β-aminopropionates, and 2-alkyl-imidazoline quaternary ammonium salts, and (e) mixtures thereof.

[1373] In some embodiments, the parenteral formulations will contain, for example, from about 0.5% to about 25% by weight of the therapeutic agent in solution. Preservatives and buffers may be used. In order to minimize or eliminate irritation at the site of injection, such compositions may contain one or more nonionic surfactants having, for example, a hydrophile-lipophile balance (HLB) of from about 12 to about 17. The quantity of surfactant in such formulations will typically range, for example, from about 5% to about 15% by weight. Suitable surfactants include polyethylene glycol, sorbitan, fatty acid esters such as sorbitan monooleate, and high molecular weight adducts of ethylene oxide with a hydrophobic base formed by the condensation of propylene oxide with propylene glycol. The parenteral formulations can be presented in unit-dose or multi-dose sealed containers, such as ampoules or vials, and can be stored in a freeze-dried (lyophilized) condition requiring only the addition of a sterile liquid excipient, for example, water for injections, immediately prior to use. Extemporaneous injection solutions and suspensions can be prepared from sterile powders, granules, and tablets of the kind previously described.

[1374] In certain embodiments, injectable formulations are provided herein. The requirements for effective pharmaceutical carriers for injectable compositions are well-known to those of ordinary skill in the art (see, e.g., Pharmaceutics and Pharmacy Practice, J.B. Lippincott Company, Philadelphia, PA, Banker and Chalmers, eds., pages 238-250 (1982), and ASHP Handbook on Injectable Drugs, Toissel, 4th ed, pages 622-630 (1986)).

[1375] In some embodiments, topical formulations are provided herein. Topical formulations, including those that are useful for transdermal drug release, are suitable in the context of certain embodiments provided herein for application to skin. In some embodiments, the therapeutic agent alone or in combination with other suitable components, can be made into aerosol formulations to be administered via inhalation. These aerosol formulations can be placed into pressurized acceptable propellants, such as dichlorodifluoromethane, propane, nitrogen, and the like. They also may be formulated as pharmaceuticals for non-pressured preparations, such as in a nebulizer or an atomizer. Such spray formulations also may be used to spray mucosa.

[1376] In certain embodiments, the therapeutic agents provided herein can be formulated as inclusion complexes, such as cyclodextrin inclusion complexes, or liposomes. Liposomes can serve to target the therapeutic agents to a particular tissue. Liposomes also can be used to increase the half-life of the therapeutic agents. Many methods are available for preparing liposomes, as described in, for example, Szoka et al., Ann. Rev. Biophys. Bioeng., 9, 467 (1980) and U.S. Pat. Nos. 4,235,871, 4,501,728, 4,837,028, and 5,019,369.

[1377] In some embodiments, the therapeutic agents provided herein are formulated in time-released, delayed release, or sustained release delivery systems such that the delivery of the composition occurs prior to, and with sufficient time to, cause sensitization of the site to be treated. Such systems can avoid repeated administrations of the therapeutic agent, thereby increasing convenience to the subject and the physician, and may be particularly suitable for certain composition embodiments provided herein. In one embodiment, the compositions of the invention are formulated such that they are suitable for extended-release of the circRNA contained therein. Such extended-release compositions may be conveniently administered to a subject at extended dosing intervals. For example, in one embodiment, the compositions of the present invention are administered to a subject twice a day, daily or every other day. In an embodiment, the compositions of the present invention are administered to a subject twice a week, once a week, every ten days, every two weeks, every three weeks, every four weeks, once a month, every six weeks, every eight weeks, every three months, every four months, every six months, every eight months, every nine months or annually.

[1378] In some embodiments, a protein encoded by an inventive polynucleotide is produced by a target cell for sustained amounts of time. For example, the protein may be produced for more than one hour, more than four, more than six, more than 12, more than 24, more than 48 hours, or more than 72 hours after administration. In some embodiments the polypeptide is expressed at a peak level about six hours after administration. In some embodiments the expression of the polypeptide is sustained at least at a therapeutic level. In some embodiments, the polypeptide is expressed at least at a therapeutic level for more than one, more than four, more than six, more than 12, more than 24, more than 48, or more than 72 hours after administration. In some embodiments, the polypeptide is detectable at a therapeutic level in patient tissue (e.g., liver or lung). In some embodiments, the level of detectable polypeptide is from continuous expression from the circRNA composition over periods of time of more than one, more than four, more than six, more than 12, more than 24, more than 48, or more than 72 hours after administration.

[1379] In certain embodiments, a protein encoded by an inventive polynucleotide is produced at levels above normal physiological levels. The level of protein may be increased as compared to a control. In some embodiments, the control is the baseline physiological level of the polypeptide in a normal individual or in a population of normal individuals. In other embodiments, the control is the baseline physiological level of the polypeptide in an individual having a deficiency in the relevant protein or polypeptide or in a population of individuals having a deficiency in the relevant protein or polypeptide. In some embodiments, the control can be the normal level of the relevant protein or polypeptide in the individual to whom the composition is administered. In other embodiments, the control is the expression level of the polypeptide upon other therapeutic intervention, e.g., upon direct injection of the corresponding polypeptide, at one or more comparable time points.

[1380] In certain embodiments, the levels of a protein encoded by an inventive polynucleotide are detectable at 3 days, 4 days, 5 days, or 1 week or more after administration. Increased levels of protein may be observed in a tissue (e.g., liver or lung).

[1381] In some embodiments, the method yields a sustained circulation half-life of a protein encoded by an inventive polynucleotide. For example, the protein may be detected for hours or days longer than the half-life observed via subcutaneous injection of the protein or mRNA encoding the protein. In some embodiments, the half-life of the protein is 1 day, 2 days, 3 days, 4 days, 5 days, or 1 week or more.

[1382] Many types of release delivery systems are available and known to those of ordinary skill in the art. They include polymer based systems such as poly(lactide-glycolide), copolyoxalates, polycaprolactones, polyesteramides, polyorthoesters, polyhydroxybutyric acid, and polyanhydrides. Microcapsules of the foregoing polymers containing drugs are described in, for example, U.S. Pat. No. 5,075,109. Delivery systems also include non-polymer systems that are lipids including sterols such as cholesterol, cholesterol esters, and fatty acids or neutral fats such as mono-di- and tri-glycerides; hydrogel release systems; sylastic systems; peptide based systems: wax coatings; compressed tablets using conventional binders and excipients; partially fused implants; and the like. Specific examples include, but are not limited to: (a) erosional systems in which the active composition is contained in a form within a matrix such as those described in U.S. Pat. Nos. 4,452,775, 4,667,014, 4,748,034, and 5,239,660 and (b) diffusional systems in which an active component permeates at a controlled rate from a polymer such as described in U.S. Pat. Nos. 3,832,253 and 3,854,480. In addition, pump-based hardware delivery systems can be used, some of which are adapted for implantation.

[1383] In some embodiments, the therapeutic agent can be conjugated either directly or indirectly through a linking moiety to a targeting moiety. Methods for conjugating therapeutic agents to targeting moieties is known in the art. See, for instance, Wadwa et al., J, Drug Targeting 3:111 (1995) and U.S. Pat. No. 5,087,616.

[1384] In some embodiments, the therapeutic agents provided herein are formulated into a depot form, such that the manner in which the therapeutic agent is released into the body to which it is administered is controlled with respect to time and location within the body (see, for example, U.S. Pat. No. 4,450,150). Depot forms of therapeutic agents can be, for example, an implantable composition comprising the therapeutic agents and a porous or non-porous material, such as a polymer, wherein the therapeutic agents are encapsulated by or diffused throughout the material and/or degradation of the non-porous material. The depot is then implanted into the desired location within the body and the therapeutic agents are released from the implant at a predetermined rate.

### 10. Therapeutic Methods

### A. Areas for Treatment & Relevant Diseases/Disorders

[1385] In certain aspects, provided herein is a method of treating and/or preventing a condition, e.g., an autoimmune disorder or cancer.

[1386] In certain embodiments, the therapeutic agents provided herein are co-administered with one or more additional therapeutic agents (e.g., in the same pharmaceutical composition or in separate pharmaceutical compositions). In some embodiments, the therapeutic agent provided herein can be administered first and the one or more additional therapeutic agents can be administered second, or vice versa. Alternatively, the therapeutic agent provided herein and the one or more additional therapeutic agents can be administered simultaneously.

[1387] In some embodiments, the subject is a mammal. In some embodiments, the mammal referred to herein can be any mammal, including, but not limited to, mammals of the order Rodentia, such as mice and hamsters, or mammals of the order Logomorpha, such as rabbits. The mammals may be from the order Carnivora, including Felines (cats) and Canines (dogs). The mammals may be from the order Artiodactyla, including Bovines (cows) and Swines (pigs), or of the order Perssodactyla, including Equines (horses). The mammals may be of the order Primates, Ceboids, or Simoids (monkeys) or of the order Anthropoids (humans and apes). Preferably, the mammal is a human.

### EXAMPLES

[1388] Wesselhoeft et al., (2019) RNA Circularization Diminishes Immunogenicity and Can Extend Translation Duration In vivo. Molecular Cell. 74(3), 508-520 and Wesselhoeft et al., (2018) Engineering circular RNA for Potent and Stable Translation in Eukaryotic Cells. Nature Communications. 9, 2629 are incorporated by reference in their entirety.

[1389] The invention is further described in detail by reference to the following examples but are not intended to be limited to the following examples. These examples encompass any and all variations of the illustrations with the intention of providing those of ordinary skill in the art with complete disclosure and description of how to make and use the subject invention and are not intended to limit the scope of what is regarded as the invention.

### Example 1

### Example 1A: External Duplex Regions Allow for Circularization of Long Precursor RNA Using the Permuted Intron Exon (PIE) Circularization Strategy

[1390] A 1.1 kb sequence containing a full-length encephalomyocarditis virus (EMCV) IRES, a Gaussia luciferase (GLuc) expression sequence, and two short exon fragments of the permuted intron-exon (PIE) construct were inserted between the 3′ and 5′ introns of the permuted group I catalytic intron in the thymidylate synthase (Td) gene of the T4 phage. Precursor RNA was synthesized by run-off transcription. Circularization was attempted by heating the precursor RNA in the presence of magnesium ions and GTP, but splicing products were not obtained.

[1391] Perfectly complementary 9 nucleotide and 19 nucleotide long duplex regions were designed and added at the 5′ and 3′ ends of the precursor RNA. Addition of these homology arms increased splicing efficiency from 0 to 16% for 9 nucleotide duplex regions and to 48% for 19 nucleotide duplex regions as assessed by disappearance of the precursor RNA band.

[1392] The splicing product was treated with RNase R. Sequencing across the putative splice junction of RNase R-treated splicing reactions revealed ligated exons, and digestion of the RNase R-treated splicing reaction with oligonucleotide-targeted RNase H produced a single band in contrast to two bands yielded by RNase H-digested linear precursor. This shows that circular RNA is a major product of the splicing reactions of precursor RNA containing the 9 or 19 nucleotide long external duplex regions

### Example 1B: Spacers that Conserve Secondary Structures of IRES and PIE Splice Sites Increase Circularization Efficiency

[1393] A series of spacers was designed and inserted between the 3′ PIE splice site and the IRES. These spacers were designed to either conserve or disrupt secondary structures within intron sequences in the IRES, 3′ PIE splice site, and/or 5′ splice site. The addition of spacer sequences designed to conserve secondary structures resulted in 87% splicing efficiency, while the addition of a disruptive spacer sequences resulted in no detectable splicing.

### Example 2

### Example 2A: Internal Duplex Regions in Addition to External Duplex Regions Create a Splicing Bubble and Allows for Translation of Several Expression Sequences

[1394] Spacers were designed to be unstructured, non-homologous to the intron and IRES sequences, and to contain spacer-spacer duplex regions. These were inserted between the 5′ exon and IRES and between the 3′ exon and expression sequence in constructs containing external duplex regions, EMCV IRES, and expression sequences for Gaussia luciferase (total length: 1289 nt), Firefly luciferase (2384 nt), eGFP (1451 nt), human erythropoietin (1313 nt), and Cas9 endonuclease (4934 nt). Circularization of all 5 constructs was achieved. Circularization of constructs utilizing T4 phage and Anabaena introns were roughly equal. Circularization efficiency was higher for shorter sequences. To measure translation, each construct was transfected into HEK293 cells. Gaussia and Firefly luciferase transfected cells produced a robust response as measured by luminescence, human erythropoietin was detectable in the media of cells transfected with erythropoietin circRNA, and EGFP fluorescence was observed from cells transfected with EGFP circRNA. Co-transfection of Cas9 circRNA with sgRNA directed against GFP into cells constitutively expressing GFP resulted in ablated fluorescence in up to 97% of cells in comparison to an sgRNA-only control.

### Example 2B: Use of CVB3 IRES Increases Protein Production

[1395] Constructs with internal and external duplex regions and differing IRES containing either Gaussia luciferase or Firefly luciferase expression sequences were made. Protein production was measured by luminescence in the supernatant of HEK293 cells 24 hours after transfection. The Coxsackievirus B3 (CVB3) IRES construct produced the most protein in both cases.

### Example 2C: Use of polyA or polyAC Spacers Increases Protein Production

[1396] Thirty nucleotide long polyA or polyAC spacers were added between the IRES and splice junction in a construct with each IRES that produced protein in example 2B. Gaussia luciferase activity was measured by luminescence in the supernatant of HEK293 cells 24 hours after transfection. Both spacers improved expression in every construct over control constructs without spacers.

### Example 3

HEK293 or HeLa Cells Transfected with Circular RNA Produce More Protein than Those Transfected with Comparable Unmodified or Modified Linear RNA.

[1397] HPLC-purified Gaussia luciferase-coding circRNA (CVB3-GLuc-pAC) was compared with a canonical unmodified 5′ methylguanosine-capped and 3′ polyA-tailed linear GLuc mRNA, and a commercially available nucleoside-modified (pseudouridine, 5-methylcytosine) linear GLuc mRNA (from Trilink). Luminescence was measured 24 h post-transfection, revealing that circRNA produced 811.2% more protein than the unmodified linear mRNA in HEK293 cells and 54.5% more protein than the modified mRNA. Similar results were obtained in HeLa cells and a comparison of optimized circRNA coding for human erythropoietin with linear mRNA modified with 5-methoxyuridine.

[1398] Luminescence data was collected over 6 days. In HEK293 cells, circRNA transfection resulted in a protein production half-life of 80 hours, in comparison with the 43 hours of unmodified linear mRNA and 45 hours of modified linear mRNA. In HeLa cells, circRNA transfection resulted in a protein production half-life of 116 hours, in comparison with the 44 hours of unmodified linear mRNA and 49 hours of modified linear mRNA. CircRNA produced substantially more protein than both the unmodified and modified linear mRNAs over its lifetime in both cell types.

### Example 4

### Example 4A: Purification of circRNA by RNase Digestion, HPLC Purification, and Phosphatase Treatment Decreases Immunogenicity. Completely Purified Circular RNA is Significantly Less Immunogenic than Unpurified or Partially Purified Circular RNA. Protein Expression Stability and Cell Viability are Dependent on Cell Type and Circular RNA Purity

[1399] Human embryonic kidney 293 (HEK293) and human lung carcinoma A549 cells were transfected with:
[1400] a. products of an unpurified GLuc circular RNA splicing reaction,
[1401] b. products of RNase R digestion of the splicing reaction,
[1402] c. products of RNase R digestion and HPLC purification of the splicing reaction, or
[1403] d. products of RNase digestion, HPLC purification, and phosphatase treatment of the splicing reaction.

[1404] RNase R digestion of splicing reactions was insufficient to prevent cytokine release in A549 cells in comparison to untransfected controls.

[1405] The addition of HPLC purification was also insufficient to prevent cytokine release, although there was a significant reduction in interleukin-6 (IL-6) and a significant increase in interferon-α1 (IFNα1) compared to the unpurified splicing reaction.

[1406] The addition of a phosphatase treatment after HPLC purification and before RNase R digestion dramatically reduced the expression of all upregulated cytokines assessed in A549 cells. Secreted monocyte chemoattractant protein 1 (MCP1), IL-6, IFNα1, tumor necrosis factor α (TNFα), and IFNγ inducible protein-10 (IP-10) fell to undetectable or un-transfected baseline levels.

[1407] There was no substantial cytokine release in HEK293 cells. A549 cells had increased GLuc expression stability and cell viability when transfected with higher purity circular RNA. Completely purified circular RNA had a stability phenotype similar to that of transfected 293 cells.

### Example 4B: Circular RNA does not Cause Significant Immunogenicity and is not a RIG-I Ligand

[1408] A549 cells were transfected with:
[1409] a. unpurified circular RNA,
[1410] b. high molecular weight (linear and circular concatenations) RNA,
[1411] c. circular (nicked) RNA,
[1412] d. an early fraction of purified circular RNA (more overlap with nicked RNA peak),
[1413] e. a late fraction of purified circular RNA (less overlap with nicked RNA peak),
[1414] f. introns excised during circularization, or
[1415] g. vehicle (i.e. untransfected control).

[1416] Precursor RNA was separately synthesized and purified in the form of the splice site deletion mutant (DS) due to difficulties in obtaining suitably pure linear precursor RNA from the splicing reaction. Cytokine release and cell viability was measured in each case.

[1417] Robust IL-6, RANTES, and IP-10 release was observed in response to most of the species present within the splicing reaction, as well as precursor RNA. Early circRNA fractions elicited cytokine responses comparable to other non-circRNA fractions, indicating that even relatively small quantities of linear RNA contaminants are able to induce a substantial cellular immune response in A549 cells. Late circRNA fractions elicited no cytokine response in excess of that from untransfected controls. A549 cell viability 36 hours post-transfection was significantly greater for late circRNA fractions compared with all of the other fractions.

[1418] RIG-I and IFN-β1 transcript induction upon transfection of A549 cells with late circRNA HPLC fractions, precursor RNA or unpurified splicing reactions were analyzed. Induction of both RIG-I and IFN-β1 transcripts were weaker for late circRNA fractions than precursor RNA and unpurified splicing reactions. RNase R treatment of splicing reactions alone was not sufficient to ablate this effect. Addition of very small quantities of the RIG-I ligand 3p-hpRNA to circular RNA induced substantial RIG-I transcription. In HeLa cells, transfection of RNase R-digested splicing reactions induced RIG-I and IFN-β1, but purified circRNA did not. Overall, HeLa cells were less sensitive to contaminating RNA species than A549 cells.

[1419] A time course experiment monitoring RIG-I, IFN-β1, IL-6, and RANTES transcript induction within the first 8 hours after transfection of A549 cells with splicing reactions or fully purified circRNA did not reveal a transient response to circRNA. Purified circRNA similarly failed to induce pro-inflammatory transcripts in RAW264.7 murine macrophages.

[1420] A549 cells were transfected with purified circRNA containing an EMCV IRES and EGFP expression sequence. This failed to produce substantial induction of pro-inflammatory transcripts. These data demonstrate that non-circular components of the splicing reaction are responsible for the immunogenicity observed in previous studies and that circRNA is not a natural ligand for RIG-I.

### Example 5

### Circular RNA Avoids Detection by TLRs.

[1421] TLR 3, 7, and 8 reporter cell lines were transfected with multiple linear or circular RNA constructs and secreted embryonic alkaline phosphatase (SEAP) was measured.

[1422] Linearized RNA was constructed by deleting the intron and homology arm sequences. The linear RNA constructs were then treated with phosphatase (in the case of capped RNAs, after capping) and purified by HPLC.

[1423] None of the attempted transfections produced a response in TLR7 reporter cells. TLR3 and TLR8 reporter cells were activated by capped linearized RNA, polyadenylated linearized RNA, the nicked circRNA HPLC fraction, and the early circRNA fraction. The late circRNA fraction and m1ψ-mRNA did not provoke TLR-mediated response in any cell line.

[1424] In a second experiment, circRNA was linearized using two methods: treatment of circRNA with heat in the presence of magnesium ions and DNA oligonucleotide-guided RNase H digestion. Both methods yielded a majority of full-length linear RNA with small amounts of intact circRNA. TLR3, 7, and 8 reporter cells were transfected with circular RNA, circular RNA degraded by heat, or circular RNA degraded by RNase H, and SEAP secretion was measured 36 hours after transfection. TLR8 reporter cells secreted SEAP in response to both forms of degraded circular RNA, but did not produce a greater response to circular RNA transfection than mock transfection. No activation was observed in TLR3 and TLR7 reporter cells for degraded or intact conditions, despite the activation of TLR3 by in vitro transcribed linearized RNA.

### Example 6

Unmodified Circular RNA Produces Increased Sustained In Vivo Protein Expression than Linear RNA.

[1425] Mice were injected and HEK293 cells were transfected with unmodified and m1ψ-modified human erythropoietin (hEpo) linear mRNAs and circRNAs. Equimolar transfection of m1ψ-mRNA and unmodified circRNA resulted in robust protein expression in HEK293 cells. hEpo linear mRNA and circRNA displayed similar relative protein expression patterns and cell viabilities in comparison to GLuc linear mRNA and circRNA upon equal weight transfection of HEK293 and A549 cells.

[1426] In mice, hEpo was detected in serum after the injection of hEpo circRNA or linear mRNA into visceral adipose. hEpo detected after the injection of unmodified circRNA decayed more slowly than that from unmodified or m1ψ-mRNA and was still present 42 hours post-injection. Serum hEpo rapidly declined upon the injection of unpurified circRNA splicing reactions or unmodified linear mRNA. Injection of unpurified splicing reactions produced a cytokine response detectable in serum that was not observed for the other RNAs, including purified circRNA.

### Example 7

### Circular RNA can be Effectively Delivered In Vivo or In Vitro Via Lipid Nanoparticles.

[1427] Purified circular RNA was formulated into lipid nanoparticles (LNPs) with the ionizable lipidoid cKK-E12 (Dong et al., 2014; Kauffman et al., 2015). The particles formed uniform multilamellar structures with an average size, polydispersity index, and encapsulation efficiency similar to that of particles containing commercially available control linear mRNA modified with 5moU.

[1428] Purified hEpo circRNA displayed greater expression than 5moU-mRNA when encapsulated in LNPs and added to HEK293 cells. Expression stability from LNP-RNA in HEK293 cells was similar to that of RNA delivered by transfection reagent, with the exception of a slight delay in decay for both 5moU-mRNA and circRNA. Both unmodified circRNA and 5moU-mRNA failed to activate RIG-I/IFN-β1 in vitro.

[1429] In mice, LNP-RNA was delivered by local injection into visceral adipose tissue or intravenous delivery to the liver. Serum hEpo expression from circRNA was lower but comparable with that from 5moU-mRNA 6 hours after delivery in both cases. Serum hEpo detected after adipose injection of unmodified LNP-circRNA decayed more slowly than that from LNP-5moU-mRNA, with a delay in expression decay present in serum that was similar to that noted in vitro, but serum hEpo after intravenous injection of LNP-circRNA or LNP-5moU-mRNA decayed at approximately the same rate. There was no increase in serum cytokines or local RIG-I, TNFα, or IL-6 transcript induction in any of these cases.

### Example 8

### Expression and Functional Stability by IRES in HEK293, HepG2, and JCJC7 Cells.

[1430] Constructs including Anabaena intron/exon regions, a Gaussia luciferase expression sequence, and varying IRES were circularized. 100 ng of each circularization reaction was separately transfected into 20,000 HEK293 cells, HepG2 cells, and 1C1C7 cells using Lipofectamine MessengerMax. Luminescence in each supernatant was assessed after 24 hours as a measure of protein expression. In HEK293 cells, constructs including Crohivirus B, Salivirus FHB, Aichi Virus, Salivirus HG-J1, and Enterovirus J IRES produced the most luminescence at 24 hours (FIG. 1A). In HepG2 cells, constructs including Aichi Virus, Salivirus FHB, EMCV-Cf, and CVA3 IRES produced high luminescence at 24 hours (FIG. 1B). In 1C1C7 cells, constructs including Salivirus FHB, Aichi Virus, Salivirus NG-J1, and Salivirus A SZ-1 IRES produced high luminescence at 24 hours (FIG. 1C).

[1431] A trend of larger IRES producing greater luminescence at 24 hours was observed. Shorter total sequence length tends to increase circularization efficiency, so selecting a high expression and relatively short IRES may result in an improved construct. In HEK293 cells, a construct using the Crohivirus B IRES produced the highest luminescence, especially in comparison to other IRES of similar length (FIG. 2A). Expression from IRES constructs in HepG2 and 1C1C7 cells plotted against IRES size are in FIGS. 2B and 2C.

[1432] Functional stability of select IRES constructs in HepG2 and 1C1C7 cells were measured over 3 days. Luminescence from secreted Gaussia luciferase in supernatant was measured every 24 hours after transfection of 20,000 cells with 100 ng of each circularization reaction, followed by complete media replacement. Salivirus A GUT and Salivirus FHB exhibited the highest functional stability in HepG2 cells, and Salivirus N-J1 and Salivirus FHB produced the most stable expression in 1C1C7 cells (FIGS. 3A and 3B).

### Example 9

### Expression and Functional Stability by IRES in Jurkat Cells.

[1433] 2 sets of constructs including Anabaena intron/exon regions, a Gaussia luciferase expression sequence, and a subset of previously tested IRES were circularized. 60,000 Jurkat cells were electroporated with 1 μg of each circularization reaction. Luminescence from secreted Gaussia luciferase in supernatant was measured 24 hours after electroporation. A CVB3 IRES construct was included in both sets for comparison between sets and to previously defined IRES efficacy. CVB1 and Salivirus A SZ1 IRES constructs produced the most expression at 24h. Data can be found in FIGS. 4A and 4B.

[1434] Functional stability of the IRES constructs in each round of electroporated Jurkat cells was measured over 3 days. Luminescence from secreted Gaussia luciferase in supernatant was measured every 24 hours after electroporation of 60,000 cells with 1 μg of each circularization reaction, followed by complete media replacement (FIGS. 5A and 5B).

[1435] Salivirus A SZ1 and Salivirus A BN2 IRES constructs had high functional stability compared to other constructs.

### Example 10

### Expression, Functional Stability, and Cytokine Release of Circular and Linear RNA in Jurkat Cells.

[1436] A construct including Anabaena intron/exon regions, a Gaussia luciferase expression sequence, and a Salivirus FHB IRES was circularized. mRNA including a Gaussia luciferase expression sequence and a ˜150 nt polyA tail, and modified to replace 100% of uridine with 5-methoxy uridine (5moU) is commercially available and was purchased from Trilink. 5moU nucleotide modifications have been shown to improve mRNA stability and expression (Bioconjug Chem. 2016 Mar. 16; 27(3):849-53). Expression of modified mRNA, circularization reactions (unpure), and circRNA purified by size exclusion HPLC (pure) in Jurkat cells were measured and compared (FIG. 6A). Luminescence from secreted Gaussia luciferase in supernatant was measured 24 hours after electroporation of 60,000 cells with 1 μg of each RNA species.

[1437] Luminescence from secreted Gaussia luciferase in supernatant was measured every 24 hours after electroporation of 60,000 cells with 1 μg of each RNA species, followed by complete media replacement. A comparison of functional stability data of modified mRNA and circRNA in Jurkat cells over 3 days is in FIG. 6B.

[1438] IFNγ (FIG. 7A), IL-6 (FIG. 7B), IL-2 (FIG. 7C), RIG-I (FIG. 7D), IFN-β1 (FIG. 7E), and TNFα (FIG. 7F) transcript induction was measured 18 hours after electroporation of 60,000 Jurkat cells with 1 μg of each RNA species described above and 3p-hpRNA (5′ triphosphate hairpin RNA, which is a known RIG-I agonist).

### Example 11

### Expression of Circular and Linear RNA in Monocytes and Macrophages.

[1439] A construct including Anabaena intron/exon regions, a Gaussia luciferase expression sequence, and a Salivirus FHB IRES was circularized. mRNA including a Gaussia luciferase expression sequence and a ˜150 nt polyA tail, and modified to replace 100% of uridine with 5-methoxy uridine (5moU) was purchased from Trilink. Expression of circular and modified mRNA was measured in human primary monocytes (FIG. 8A) and human primary macrophages (FIG. 8B). Luminescence from secreted Gaussia luciferase in supernatant was measured 24 hours after electroporation of 60,000 cells with 1 μg of each RNA species. Luminescence was also measured 4 days after electroporation of human primary macrophages with media changes every 24 hours (FIG. 8C). The difference in luminescence was statistically significant in each case (p<0.05).

### Example 12

### Expression and Functional Stability by IRES in Primary T Cells.

[1440] Constructs including Anabaena intron/exon regions, a Gaussia luciferase expression sequence, and a subset of previously tested IRES were circularized and reaction products were purified by size exclusion HPLC. 150,000 primary human CD3+ T cells were electroporated with 1 μg of each circRNA. Luminescence from secreted Gaussia luciferase in supernatant was measured 24 hours after electroporation (FIG. 9A). Aichi Virus and CVB3 IRES constructs had the most expression at 24 hours.

[1441] Luminescence was also measured every 24 hours after electroporation for 3 days in order to compare functional stability of each construct (FIG. 9B). The construct with a Salivirus A SZ1 IRES was the most stable.

### Example 13

### Expression and Functional Stability of Circular and Linear RNA in Primary T Cells and PBMCs.

[1442] Constructs including Anabaena intron/exon regions, a Gaussia luciferase expression sequence, and a Salivirus A SZ1 IRES or Salivirus FHB IRES were circularized. mRNA including a Gaussia luciferase expression sequence and a ˜150 nt polyA tail, and modified to replace 100% of uridine with 5-methoxy uridine (5moU) and was purchased from Trilink. Expression of Salivirus A SZ1 IRES HPLC purified circular and modified mRNA was measured in human primary CD3+ T cells. Expression of Salivirus FHB HPLC purified circular, unpurified circular and modified mRNA was measured in human PBMCs. Luminescence from secreted Gaussia luciferase in supernatant was measured 24 hours after electroporation of 150,000 cells with 1 μg of each RNA species. Data for primary human T cells is in FIGS. 10A and 10B, and data for PBMCs is in FIG. 10C. The difference in expression between the purified circular RNA and unpurified circular RNA or linear RNA was significant in each case (p<0.05).

[1443] Luminescence from secreted Gaussia luciferase in primary T cell supernatant was measured every 24 hours after electroporation over 3 days in order to compare construct functional stability. Data is shown in FIG. 10B. The difference in relative luminescence from the day 1 measurement between purified circular RNA and linear RNA was significant at both day 2 and day 3 for primary T cells.

### Example 14

### Circularization Efficiency by Permutation Site in Anabaena Intron.

[1444] RNA constructs including a CVB3 IRES, a Gaussia luciferase expression sequence, Anabaena intron/exon regions, spacers, internal duplex regions, and homology arms were produced. Circularization efficiency of constructs using the traditional Anabaena intron permutation site and 5 consecutive permutations sites in P9 was measured by HPLC. HPLC chromatograms for the 5 consecutive permutation sites in P9 are shown in FIG. 11A.

[1445] Circularization efficiency was measured at a variety of permutation sites. Circularization efficiency is defined as the area under the HPLC chromatogram curve for each of: circRNA/(circRNA+precursor RNA). Ranked quantification of circularization efficiency at each permutation site is in FIG. 11B. 3 permutation sites (indicated in FIG. 11B) were selected for further investigation.

[1446] Circular RNA in this example was circularized by in vitro transcription (IVT) then purified via spin column. Circularization efficiency for all constructs would likely be higher if the additional step of incubation with Mg²⁺ and guanosine nucleotide were included; however, removing this step allowed for comparison between, and optimization of, circular RNA constructs. This level of optimization is especially useful for maintaining high circularization efficiency with large RNA constructs, such as those encoding chimeric antigen receptors.

### Example 15

### Circularization Efficiency of Alternative Introns.

[1447] Precursor RNA containing a permuted group 1 intron of variable species origin or permutation site and several constant elements including: a CVB3 IRES, a Gaussia luciferase expression sequence, spacers, internal duplex regions, and homology arms were created. Circularization data can be found in FIG. 12. FIG. 12A shows chromatograms resolving precursor, CircRNA and introns. FIG. 12B provides ranked quantification of circularization efficiency, based on the chromatograms shown in FIG. 12A, as a function of intron construct.

[1448] Circular RNA in this example was circularized by in vitro transcription (IVT) then spin column purification. Circularization efficiency for all constructs would likely be higher if the additional step of incubation with Mg²⁺ and guanosine nucleotide were included; however, removing this step allows for comparison between, and optimization of, circular RNA constructs. This level of optimization is especially useful for maintaining high circularization efficiency with large RNA constructs, such as those encoding chimeric antigen receptors.

### Example 16

### Circularization Efficiency by Homology Arm Presence or Length.

[1449] RNA constructs including a CVB3 IRES, a Gaussia luciferase expression sequence, Anabaena intron/exon regions, spacers, and internal duplex regions were produced. Constructs representing 3 Anabaena intron permutation sites were tested with 30 nt, 25% GC homology arms or without homology arms (“NA”). These constructs were allowed to circularize without the step of incubation with Mg²⁺. Circularization efficiency was measured and compared. Data can be found in FIG. 13. Circularization efficiency was higher for each construct lacking homology arms. FIG. 13A provides ranked quantification of circularization efficiency; FIG. 13B provides chromatograms resolving precursor, circRNA and introns.

[1450] For each of the 3 permutation sites, constructs were created with 10 nt, 20 nt, and 30 nt arm length and 25%, 50%, and 75% GC. Splicing efficiency of these constructs was measured and compared to constructs without homology arms (FIG. 14). Splicing efficiency is defined as the proportion of free introns relative to the total RNA in the splicing reaction.

[1451] FIG. 15 A (left) contains HPLC chromatograms showing the contribution of strong homology arms to improved splicing efficiency. Top left: 75% GC content, 10 nt homology arms. Center left: 75% GC content, 20 nt homology arms. Bottom left: 75% GC content, 30 nt homology arms.

[1452] FIG. 15 A (right) shows HPLC chromatograms indicating increased splicing efficiency paired with increased nicking, appearing as a shoulder on the circRNA peak. Top right: 75% GC content, 10 nt homology arms. Center right: 75% GC content, 20 nt homology arms. Bottom right: 75% GC content, 30 nt homology arms.

[1453] FIG. 15 B (left) shows select combinations of permutation sites and homology arms hypothesized to demonstrate improved circularization efficiency.

[1454] FIG. 15 B (right) shows select combinations of permutation sites and homology arms hypothesized to demonstrate improved circularization efficiency, treated with E. coli polyA polymerase.

[1455] Circular RNA in this example was circularized by in vitro transcription (IVT) then spin-column purified. Circularization efficiency for all constructs would likely be higher if an additional Mg²⁺ incubation step with guanosine nucleotide were included; however, removing this step allowed for comparison between, and optimization of, circular RNA constructs. This level of optimization is especially useful for maintaining high circularization efficiency with large RNA constructs, such as those encoding chimeric antigen receptors.

### Example 17

### Circular RNA Encoding Chimeric Antigen Receptors.

[1456] Constructs including Anabaena intron/exon regions, a Kymriah chimeric antigen receptor (CAR) expression sequence, and a CVB3 IRES were circularized. 100,000 human primary CD3+ T cells were electroporated with 500 ng of circRNA and co-cultured for 24 hours with Raji cells stably expressing GFP and firefly luciferase. Effector to target ratio (E:T ratio) 0.75:1. 100,000 human primary CD3+ T cells were mock electroporated and co-cultured as a control (FIG. 16).

[1457] Sets of 100,000 human primary CD3+ T cells were mock electroporated or electroporated with 1 μg of circRNA then co-cultured for 48 hours with Raji cells stably expressing GFP and firefly luciferase. E:T ratio 10:1 (FIG. 17).

[1458] Quantification of specific lysis of Raji target cells was determined by detection of firefly luminescence (FIG. 18). 100,000 human primary CD3+ T cells either mock electroporated or electroporated with circRNA encoding different CAR sequences were co-cultured for 48 hours with Raji cells stably expressing GFP and firefly luciferase. % Specific lysis defined as 1-[CAR condition luminescence]/[mock condition luminescence]. E:T ratio 10:1.

### Example 18

### Expression and Functional Stability of Circular and Linear RNA in Jurkat Cells and Resting Human T Cells.

[1459] Constructs including Anabaena intron/exon regions, a Gaussia luciferase expression sequence, and a subset of previously tested IRES were circularized and reaction products were purified by size exclusion HPLC. 150,000 Jurkat cells were electroporated with 1 μg of circular RNA or 5moU-mRNA. Luminescence from secreted Gaussia luciferase in supernatant was measured 24 hours after electroporation (FIG. 19A left). 150,000 resting primary human CD3+ T cells (10 days post-stimulation) were electroporated with 1 μg of circular RNA or 5moU-mRNA. Luminescence from secreted Gaussia luciferase in supernatant was measured 24 hours after electroporation (FIG. 19A right).

[1460] Luminescence from secreted Gaussia luciferase in supernatant was measured every 24 hours after electroporation, followed by complete media replacement. Functional stability data is shown in FIG. 19B. Circular RNA had more functional stability than linear RNA in each case, with a more pronounced difference in Jurkat cells.

### Example 19

IFN-β1, RIG-I, IL-2, IL-6, IFNγ, and TNFα Transcript Induction of Cells Electroporated with Linear RNA or Varying Circular RNA Constructs.

[1461] Constructs including Anabaena intron/exon regions, a Gaussia luciferase expression sequence, and a subset of previously tested IRES were circularized and reaction products were purified by size exclusion HPLC. 150,000 CD3+ human T cells were electroporated with 1 μg of circular RNA, 5moU-mRNA, or immunostimulatory positive control poly inosine:cytosine. IFN-β1 (FIG. 20A), RIG-I (FIG. 20B), IL-2 (FIG. 20C), IL-6 (FIG. 20D), IFN-γ (FIG. 20E), and TNF-α (FIG. 20F) transcript induction was measured 18 hours after electroporation.

### Example 20

Specific Lysis of Target Cells and IFNγ Transcript Induction by CAR Expressing Cells Electroporated with Different Amounts of Circular or Linear RNA; Specific Lysis of Target and Non-Target Cells by CAR Expressing Cells at Different E:T Ratios.

[1462] Constructs including Anabaena intron/exon regions, an anti-CD19 CAR expression sequence, and a CVB3 IRES were circularized and reaction products were purified by size exclusion HPLC. 150,000 human primary CD3+ T cells either mock electroporated or electroporated with different quantities of circRNA encoding an anti-CD19 CAR sequence were co-cultured for 12 hours with Raji cells stably expressing GFP and firefly luciferase at an E:T ratio of 2:1. Specific lysis of Raji target cells was determined by detection of firefly luminescence (FIG. 21A). % Specific lysis was defined as 1-[CAR condition luminescence]/[mock condition luminescence]. IFNγ transcript induction was measured 24 hours after electroporation (FIG. 21B).

[1463] 150,000 human primary CD3+ T cells were either mock electroporated or electroporated with 500 ng circRNA or m1ψ-mRNA encoding an anti-CD19 CAR sequence, then co-cultured for 24 hours with Raji cells stably expressing firefly luciferase at different E:T ratios. Specific lysis of Raji target cells was determined by detection of firefly luminescence (FIG. 22A). Specific lysis was defined as 1-[CAR condition luminescence]/[mock condition luminescence].

[1464] CAR expressing T cells were also co-cultured for 24 hours with Raji or K562 cells stably expressing firefly luciferase at different E:T ratios. Specific lysis of Raji target cells or K562 non-target cells was determined by detection of firefly luminescence (FIG. 22B). % Specific lysis is defined as 1-[CAR condition luminescence]/[mock condition luminescence].

### Example 21

Specific Lysis of Target Cells by T Cells Electroporated with Circular RNA or Linear RNA Encoding a CAR.

[1465] Constructs including Anabaena intron/exon regions, an anti-CD19 CAR expression sequence, and a CVB3 IRES were circularized and reaction products were purified by size exclusion HPLC. Human primary CD3+ T cells were electroporated with 500 ng of circular RNA or an equimolar quantity of m1ψ-mRNA, each encoding a CD19-targeted CAR. Raji cells were added to CAR-T cell cultures over 7 days at an E:T ratio of 10:1. % Specific lysis was measured for both constructs at 1, 3, 5, and 7 days (FIG. 23).

### Example 22

### Specific Lysis of Raji Cells by T Cells Expressing an Anti-CD19 CAR or an Anti-BCMA CAR.

[1466] Constructs including Anabaena intron/exon regions, anti-CD19 or anti-BCMA CAR expression sequence, and a CVB3 IRES were circularized and reaction products were purified by size exclusion HPLC. 150,000 primary human CD3+ T cells were electroporated with 500 ng of circRNA, then were co-cultured with Raji cells at an E:T ratio of 2:1. % Specific lysis was measured 12 hours after electroporation (FIG. 24).

### Example 23

### Expression, Functional Stability, and Cytokine Transcript Induction of Circular and Linear RNA Expressing Antigens.

[1467] Constructs including one or more antigen expression sequences are circularized and reaction products are purified by size exclusion HPLC. Antigen presenting cells are electroporated with circular RNA or mRNA.

[1468] In vitro antigen production is measured via ELISA. Optionally, antigen production is measured every 24 hours after electroporation. Cytokine transcript induction or release is measured 18 hours after electroporation of antigen presenting cells with circular or linear RNA encoding antigens. The tested cytokines may include IFN-β1, RIG-I, IL-2, IL-6, IFNγ, RANTES, and TNFα.

[1469] In vitro antigen production and cytokine induction are measured using purified circRNA, purified circRNA plus antisense circRNA, and unpurified circRNA in order to find the ratio that best preserves expression and immune stimulation.

### Example 24

### In Vivo Antigen and Antibody Expression in Animal Models.

[1470] To assess the ability of antigen encoding circRNAs to facilitate antigen expression and antibody production in vivo, escalating doses of RNA encoding one or more antigens is introduced into mice via intramuscular injection.

[1471] Mice are injected once, blood collected after 28 days, then injected again, with blood collected 14 days thereafter. Neutralizing antibodies against antigen of interest is measured via ELISA.

### Example 25

### Protection Against Infection.

[1472] To assess the ability of antigen encoding circRNAs to protect against or cure an infection, RNA encoding one or more antigens of a virus (such as influenza) is introduced into mice via intramuscular injection.

[1473] Mice receive an initial injection and boost injections of circRNA encoding one or more antigens. Protection from a virus such as influenza is determined by weight loss and mortality over 2 weeks.

### Example 26

### Example 26A: Synthesis of Compounds

[1474] Synthesis of representative ionizable lipids of the invention are described in PCT applications PCT/US2016/052352, PCT/US2016/068300, PCT/US2010/061058, PCT/US2018/058555, PCT/US2018/053569, PCT/US2017/028981, PCT/US2019/025246, PCT/US2018/035419, PCT/US2019/015913, and US applications with publication numbers 20190314524, 20190321489, and 20190314284, the contents of each of which are incorporated herein by reference in their entireties.

### Example 26B: Synthesis of Compounds

[1475] Synthesis of representative ionizable lipids of the invention are described in US patent publication number US20170210697A1, the contents of which is incorporated herein by reference in its entirety.

### Example 27

### Protein Expression by Organ

[1476] Circular or linear RNA encoding FLuc was generated and loaded into transfer vehicles with the following formulation: 50% ionizable Lipid 10b-15 represented by

10% DSPC, 1.5% PEG-DMG, 38.5% cholesterol. CD-1 mice were dosed at 0.2 mg/kg and luminescence was measured at 6 hours (live IVIS) and 24 hours (live IVIS and ex vivo IVIS). Total Flux (photons/second over a region of interest) of the liver, spleen, kidney, lung, and heart was measured (FIGS. 25 and 26).

### Example 28

### Distribution of Expression in the Spleen

[1477] Circular or linear RNA encoding GFP is generated and loaded into transfer vehicles with the following formulation: 50% ionizable Lipid 10b-15 represented by

10% DSPC, 1.5% PEG-DMG, 38.5% cholesterol. The formulation is administered to CD-1 mice. Flow cytometry is run on spleen cells to determine the distribution of expression across cell types.

### Example 29

### Example 29A: Production of Nanoparticle Compositions

[1478] In order to investigate safe and efficacious nanoparticle compositions for use in the delivery of circular RNA to cells, a range of formulations are prepared and tested. Specifically, the particular elements and ratios thereof in the lipid component of nanoparticle compositions are optimized.

[1479] Nanoparticles can be made in a 1 fluid stream or with mixing processes such as microfluidics and T-junction mixing of two fluid streams, one of which contains the circular RNA and the other has the lipid components.

[1480] Lipid compositions are prepared by combining an ionizable lipid, optionally a helper lipid (such as DOPE, DSPC, or oleic acid obtainable from Avanti Polar Lipids, Alabaster, AL), a PEG lipid (such as 1,2-dimyristoyl-sn-glycerol methoxypolyethylene glycol, also known as PEG-DMG, obtainable from Avanti Polar Lipids, Alabaster, AL), and a structural lipid such as cholesterol at concentrations of about, e.g., 40 or 50 mM in a solvent, e.g., ethanol. Solutions should be refrigerated for storage at, for example, −20° C. Lipids are combined to yield desired molar ratios (see, for example, Tables 17a and 17b below) and diluted with water and ethanol to a final lipid concentration of e.g., between about 5.5 mM and about 25 mM.

TABLE 17a

| Formulation | |
|---|---|
| number | Description |
| 1 | Aliquots of 50 mg/mL ethanolic solutions of C12-200, DOPE, Chol and DMG- |
| | PEG2K (40:30:25:5) are mixed and diluted with ethanol to 3 mL final volume. |
| | Separately, an aqueous buffered solution (10 mM citrate/150 mM NaCl, pH |
| | 4.5) of circRNA is prepared from a 1 mg/mL stock. The lipid solution is |
| | injected rapidly into the aqueous circRNA solution and shaken to yield a final |
| | suspension in 20% ethanol. The resulting nanoparticle suspension is filtered, |
| | diafiltrated with 1 × PBS (pH 7.4), concentrated and stored at 2-8° C. |
| 2 | Aliquots of 50 mg/mL ethanolic solutions of DODAP, DOPE, cholesterol and |
| | DMG-PEG2K (18:56:20:6) are mixed and diluted with ethanol to 3 mL final |
| | volume. Separately, an aqueous buffered solution (10 mM citrate/150 mM |
| | NaCl, pH 4.5) of EPO circRNA is prepared from a 1 mg/mL stock. The lipid |
| | solution is injected rapidly into the aqueous circRNA solution and shaken to |
| | yield a final suspension in 20% ethanol. The resulting nanoparticle suspension |
| | is filtered, diafiltrated with 1 × PBS (pH 7.4), concentrated and stored at 2-8° C. |
| | Final concentration = 1.35 mg/mL EPO circRNA (encapsulated). Zave = 75.9 nm |
| | (Dv(50) = 57.3 nm; Dv(90) = 92.1 nm). |
| 3 | Aliquots of 50 mg/mL ethanolic solutions of HGT4003, DOPE, cholesterol and |
| | DMG-PEG2K (50:25:20:5) are mixed and diluted with ethanol to 3 mL final |
| | volume. Separately, an aqueous buffered solution (10 mM citrate/150 mM |
| | NaCl, pH 4.5) of circRNA is prepared from a 1 mg/mL stock. The lipid solution |
| | is injected rapidly into the aqueous circRNA solution and shaken to yield a final |
| | suspension in 20% ethanol. The resulting nanoparticle suspension is filtered, |
| | diafiltrated with 1 × PBS (pH 7.4), concentrated and stored at 2-8° C. |
| 4 | Aliquots of 50 mg/mL ethanolic solutions of ICE, DOPE and DMG-PEG2K |
| | (70:25:5) are mixed and diluted with ethanol to 3 mL final volume. Separately, |
| | an aqueous buffered solution (10 mM citrate/150 mM NaCl, pH 4.5) of |
| | circRNA is prepared from a 1 mg/mL stock. The lipid solution is injected |
| | rapidly into the aqueous circRNA solution and shaken to yield a final |
| | suspension in 20% ethanol. The resulting nanoparticle suspension is filtered, |
| | diafiltrated with 1 × PBS (pH 7.4), concentrated and stored at 2-8° C. |
| 5 | Aliquots of 50 mg/mL ethanolic solutions of HGT5000, DOPE, cholesterol and |
| | DMG-PEG2K (40:20:35:5) are mixed and diluted with ethanol to 3 mL final |
| | volume. Separately, an aqueous buffered solution (10 mM citrate/150 mM |
| | NaCl, pH 4.5) of EPO circRNA is prepared from a 1 mg/mL stock. The lipid |
| | solution is injected rapidly into the aqueous circRNA solution and shaken to |
| | yield a final suspension in 20% ethanol. The resulting nanoparticle suspension |
| | is filtered, diafiltrated with 1 × PBS (pH 7.4), concentrated and stored at 2-8° C. |
| | Final concentration = 1.82 mg/mL EPO mRNA (encapsulated). Zave = 105.6 nm |
| | (Dv(50) = 53.7 nm; Dv(90) = 157 nm). |
| 6 | Aliquots of 50 mg/mL ethanolic solutions of HGT5001, DOPE, cholesterol and |
| | DMG-PEG2K (40:20:35:5) are mixed and diluted with ethanol to 3 mL final |
| | volume. Separately, an aqueous buffered solution (10 mM citrate/150 mM |
| | NaCl, pH 4.5) of EPO circRNA is prepared from a 1 mg/mL stock. The lipid |
| | solution is injected rapidly into the aqueous circRNA solution and shaken to |
| | yield a final suspension in 20% ethanol. The resulting nanoparticle suspension |
| | is filtered, diafiltrated with 1 × PBS (pH 7.4), concentrated and stored at 2-8° C. |
| 7 | Aliquots of 50 mg/mL ethanolic solutions of HGT5001, DOPE, cholesterol and |
| | DMG-PEG2K (35:16:46.5:2.5) are mixed and diluted with ethanol to 3 mL |
| | final volume. Separately, an aqueous buffered solution (10 mM citrate/150 mM |
| | NaCl, pH 4.5) of EPO circRNA is prepared from a 1 mg/mL stock. The lipid |
| | solution is injected rapidly into the aqueous circRNA solution and shaken to |
| | yield a final suspension in 20% ethanol. The resulting nanoparticle suspension |
| | is filtered, diafiltrated with 1 × PBS (pH 7.4), concentrated and stored at 2-8° C. |
| 8 | Aliquots of 50 mg/mL ethanolic solutions of HGT5001, DOPE, cholesterol and |
| | DMG-PEG2K (40:10:40:10) are mixed and diluted with ethanol to 3 mL final |
| | volume. Separately, an aqueous buffered solution (10 mM citrate/150 mM |
| | NaCl, pH 4.5) of EPO circRNA is prepared from a 1 mg/mL stock. The lipid |
| | solution is injected rapidly into the aqueous circRNA solution and shaken to |
| | yield a final suspension in 20% ethanol. The resulting nanoparticle suspension |
| | is filtered, diafiltrated with 1 × PBS (pH 7.4), concentrated and stored at 2-8° C. |
| 9 | Aliquots of 50 mg/mL ethanolic solutions of LP-01, DSPC, cholesterol and |
| | DMG-PEG2K (45:9:44:2) are mixed and diluted with ethanol to 3 mL final |
| | volume. Separately, an aqueous buffered solution (50 mM Na Acetate, pH 4.5) |
| | of FLuc, hEPO, micro-dystrophin, mini-dystrophin, or dystrophin circRNA is |
| | prepared from a 1 mg/mL stock. The lipid solution is injected rapidly into the |
| | aqueous circRNA solution and shaken to yield a final suspension in 25% |
| | ethanol. The resulting nanoparticle suspension is filtered, diafiltrated with |
| | 1 × PBS (pH 7.4), concentrated and stored at 2-8° C. |
| 10 | Aliquots of 50 mg/mL ethanolic solutions of LP-01, DSPC, cholesterol and |
| | DMG-PEG2K, and DMSO solution of Ethyl Lauroyl Arginate |
| | (38.25:7.65:37.4:1.7:15) are mixed and diluted with ethanol to 3 mL final |
| | volume. Separately, an aqueous buffered solution (50 mM Bis-Tris, pH 7.0) of |
| | FLuc, hEPO, micro-dystrophin, mini-dystrophin, or dystrophin circRNA is |
| | prepared from a 1 mg/mL stock. The lipid solution is injected rapidly into the |
| | aqueous circRNA solution and shaken to yield a final suspension in 25% |
| | ethanol. The resulting nanoparticle suspension is filtered, diafiltrated with |
| | 1 × PBS (pH 7.4), concentrated and stored at 2-8° C. |
| 11 | Aliquots of 50 mg/mL ethanolic solutions of SM-102, DSPC, cholesterol and |
| | DMG-PEG2K (50:10:38.5:1.5) are mixed and diluted with ethanol to 3 mL |
| | final volume. Separately, an aqueous buffered solution (6.25 mM Na Acetate, |
| | pH 4.5) of FLuc, hEPO, micro-dystrophin, mini-dystrophin, or dystrophin |
| | circRNA is prepared from a 1 mg/mL stock. The lipid solution is injected |
| | rapidly into the aqueous circRNA solution and shaken to yield a final |
| | suspension in 25% ethanol. The resulting nanoparticle suspension is filtered, |
| | diafiltrated with 1 × PBS (pH 7.4), concentrated and stored at 2-8° C. |
| 12 | Aliquots of 50 mg/mL ethanolic solutions of SM-102, DSPC, cholesterol and |
| | DMG-PEG2K, and DMSO solution of Ethyl Lauroyl Arginate |
| | (42.5:8.5:32.73:1.275:15) are mixed and diluted with ethanol to 3 mL final |
| | volume. Separately, an aqueous buffered solution (20 mM Na Acetate, pH 4.5) |
| | of FLuc, hEPO, micro-dystrophin, mini-dystrophin, or dystrophin circRNA is |
| | prepared from a 1 mg/mL stock. The lipid solution is injected rapidly into the |
| | aqueous circRNA solution and shaken to yield a final suspension in 25% |
| | ethanol. The resulting nanoparticle suspension is filtered, diafiltrated with |
| | 1 × PBS (pH 7.4), concentrated and stored at 2-8° C. |

[1481] In some embodiments, transfer vehicle has a formulation as described in Table 17a.

TABLE 17b

| Composition (mol %) | Components |
|---|---|
| 40:20:38.5:1.5 | Compound:Phospholipid:Phytosterol*:PEG- |
| | DMG |
| 45:15:38.5:1.5 | Compound:Phospholipid:Phytosterol*:PEG- |
| | DMG |
| 50:10:38.5:1.5 | Compound:Phospholipid:Phytosterol*:PEG- |
| | DMG |
| 55:5:38.5:1.5 | Compound:Phospholipid:Phytosterol*:PEG- |
| | DMG |
| 60:5:33.5:1.5 | Compound:Phospholipid:Phytosterol*:PEG- |
| | DMG |
| 45:20:33.5:1.5 | Compound:Phospholipid:Phytosterol*:PEG- |
| | DMG |
| 50:20:28.5:1.5 | Compound:Phospholipid:Phytosterol*:PEG- |
| | DMG |
| 55:20:23.5:1.5 | Compound:Phospholipid:Phytosterol*:PEG- |
| | DMG |
| 60:20:18.5:1.5 | Compound:Phospholipid:Phytosterol*:PEG- |
| | DMG |
| 40:15:43.5:1.5 | Compound:Phospholipid:Phytosterol*:PEG- |
| | DMG |
| 50:15:33.5:1.5 | Compound:Phospholipid:Phytosterol*:PEG- |
| | DMG |
| 55:15:28.5:1.5 | Compound:Phospholipid:Phytosterol*:PEG- |
| | DMG |
| 60:15:23.5:1.5 | Compound:Phospholipid:Phytosterol*:PEG- |
| | DMG |
| 40:10:48.5:1.5 | Compound:Phospholipid:Phytosterol*:PEG- |
| | DMG |
| 45:10:43.5:1.5 | Compound:Phospholipid:Phytosterol*:PEG- |
| | DMG |
| 55:10:33.5:1.5 | Compound:Phospholipid:Phytosterol*:PEG- |
| | DMG |
| 60:10:28.5:1.5 | Compound:Phospholipid:Phytosterol*:PEG- |
| | DMG |
| 40:5:53.5:1.5 | Compound:Phospholipid:Phytosterol*:PEG- |
| | DMG |
| 45:5:48.5:1.5 | Compound:Phospholipid:Phytosterol*:PEG- |
| | DMG |
| 50:5:43.5:1.5 | Compound:Phospholipid:Phytosterol*:PEG- |
| | DMG |
| 40:20:40:0 | Compound:Phospholipid:Phytosterol*:PEG- |
| | DMG |
| 45:20:35:0 | Compound:Phospholipid:Phytosterol*:PEG- |
| | DMG |
| 50:20:30:0 | Compound:Phospholipid:Phytosterol*:PEG- |
| | DMG |
| 55:20:25:0 | Compound:Phospholipid:Phytosterol*:PEG- |
| | DMG |
| 60:20:20:0 | Compound:Phospholipid:Phytosterol*:PEG- |
| | DMG |
| 45:15:45:0 | Compound:Phospholipid:Phytosterol*:PEG- |
| | DMG |

[1482] In some embodiments, transfer vehicle has a formulation as described in Table 17b.

[1483] For nanoparticle compositions including circRNA, solutions of the circRNA at concentrations of 0.1 mg/ml in deionized water are diluted in a buffer, e.g., 50 mM sodium citrate buffer at a pH between 3 and 4 to form a stock solution. Alternatively, solutions of the circRNA at concentrations of 0.15 mg/ml in deionized water are diluted in a buffer, e.g., 6.25 mM sodium acetate buffer at a pH between 3 and 4.5 to form a stock solution.

[1484] Nanoparticle compositions including a circular RNA and a lipid component are prepared by combining the lipid solution with a solution including the circular RNA at lipid component to circRNA wt:wt ratios between about 5:1 and about 50:1. The lipid solution is rapidly injected using, e.g., a NanoAssemblr microfluidic based system at flow rates between about 10 ml/min and about 18 ml/min or between about 5 ml/min and about 18 ml/min into the circRNA solution, to produce a suspension with a water to ethanol ratio between about 1:1 and about 4:1.

[1485] Nanoparticle compositions can be processed by dialysis to remove ethanol and achieve buffer exchange. Formulations are dialyzed twice against phosphate buffered saline (PBS), pH 7.4, at volumes 200 times that of the primary product using Slide-A-Lyzer cassettes (Thermo Fisher Scientific Inc., Rockford, IL) with a molecular weight cutoff of 10 kDa or 20 kDa. The formulations are then dialyzed overnight at 4° C. The resulting nanoparticle suspension is filtered through 0.2 m sterile filters (Sarstedt, Nümbrecht, Germany) into glass vials and sealed with crimp closures. Nanoparticle composition solutions of 0.01 mg/ml to 0.15 mg/ml are generally obtained.

[1486] The method described above induces nano-precipitation and particle formation.

[1487] Alternative processes including, but not limited to, T-junction and direct injection, may be used to achieve the same nano-precipitation. B. Characterization of nanoparticle compositions

[1488] A Zetasizer Nano ZS (Malvern Instruments Ltd, Malvern, Worcestershire, UK) can be used to determine the particle size, the polydispersity index (PDI) and the zeta potential of the nanoparticle compositions in 1×PBS in determining particle size and 15 mM PBS in determining zeta potential.

[1489] Ultraviolet-visible spectroscopy can be used to determine the concentration of circRNA in nanoparticle compositions. 100 μL of the diluted formulation in 1×PBS is added to 900 μL of a 4:1 (v/v) mixture of methanol and chloroform. After mixing, the absorbance spectrum of the solution is recorded, for example, between 230 nm and 330 nm on a DU 800 spectrophotometer (Beckman Coulter, Beckman Coulter, Inc., Brea, CA). The concentration of circRNA in the nanoparticle composition can be calculated based on the extinction coefficient of the circRNA used in the composition and on the difference between the absorbance at a wavelength of, for example, 260 nm and the baseline value at a wavelength of, for example, 330 nm.

[1490] A QUANT-IT™ RIBOGREEN® RNA assay (Invitrogen Corporation Carlsbad, CA) can be used to evaluate the encapsulation of circRNA by the nanoparticle composition. The samples are diluted to a concentration of approximately 5 μg/mL or 1 μg/mL in a TE buffer solution (10 mM Tris-HCl, 1 mM EDTA, pH 7.5). 50 μL of the diluted samples are transferred to a polystyrene 96 well plate and either 50 μL of TE buffer or 50 μL of a 2-4% Triton X-100 solution is added to the wells. The plate is incubated at a temperature of 37° C. for 15 minutes. The RIBOGREEN® reagent is diluted 1:100 or 1:200 in TE buffer, and 100 μL of this solution is added to each well. The fluorescence intensity can be measured using a fluorescence plate reader (Wallac Victor 1420 Multilabel Counter; Perkin Elmer, Waltham, MA) at an excitation wavelength of, for example, about 480 nm and an emission wavelength of, for example, about 520 nm. The fluorescence values of the reagent blank are subtracted from that of each of the samples and the percentage of free circRNA is determined by dividing the fluorescence intensity of the intact sample (without addition of Triton X-100) by the fluorescence value of the disrupted sample (caused by the addition of Triton X-100). C.

### Example 29B: In Vivo Formulation Studies

[1491] In order to monitor how effectively various nanoparticle compositions deliver circRNA to targeted cells, different nanoparticle compositions including circRNA are prepared and administered to rodent populations. Mice are intravenously, intramuscularly, intraarterially, or intratumorally administered a single dose including a nanoparticle composition with a lipid nanoparticle formulation. In some instances, mice may be made to inhale doses. Dose sizes may range from 0.001 mg/kg to 10 mg/kg, where 10 mg/kg describes a dose including 10 mg of a circRNA in a nanoparticle composition for each 1 kg of body mass of the mouse. A control composition including PBS may also be employed.

[1492] Upon administration of nanoparticle compositions to mice, dose delivery profiles, dose responses, and toxicity of particular formulations and doses thereof can be measured by enzyme-linked immunosorbent assays (ELISA), bioluminescent imaging, or other methods. Time courses of protein expression can also be evaluated. Samples collected from the rodents for evaluation may include blood and tissue (for example, muscle tissue from the site of an intramuscular injection and internal tissue); sample collection may involve sacrifice of the animals.

[1493] Higher levels of protein expression induced by administration of a composition including a circRNA will be indicative of higher circRNA translation and/or nanoparticle composition circRNA delivery efficiencies. As the non-RNA components are not thought to affect translational machineries themselves, a higher level of protein expression is likely indicative of a higher efficiency of delivery of the circRNA by a given nanoparticle composition relative to other nanoparticle compositions or the absence thereof.

### Example 30

### Characterization of Nanoparticle Compositions

a Zetasizer Nano ZS (Malvern Instruments Ltd, Malvern, Worcestershire, UK) can be used to determine the particle size, the polydispersity index (PDI) and the zeta potential of the transfer vehicle compositions in 1×PBS in determining particle size and 15 mM PBS in determining zeta potential.

[1494] Ultraviolet-visible spectroscopy can be used to determine the concentration of a therapeutic and/or prophylactic (e.g., RNA) in transfer vehicle compositions. 100 μL of the diluted formulation in 1×PBS is added to 900 μL of a 4:1 (v/v) mixture of methanol and chloroform. After mixing, the absorbance spectrum of the solution is recorded, for example, between 230 nm and 330 nm on a DU 800 spectrophotometer (Beckman Coulter, Beckman Coulter, Inc., Brea, CA). The concentration of therapeutic and/or prophylactic in the transfer vehicle composition can be calculated based on the extinction coefficient of the therapeutic and/or prophylactic used in the composition and on the difference between the absorbance at a wavelength of, for example, 260 nm and the baseline value at a wavelength of, for example, 330 nm.

[1495] For transfer vehicle compositions including RNA, a QUANT-IT™ RIBOGREEN® RNA assay (Invitrogen Corporation Carlsbad, CA) can be used to evaluate the encapsulation of RNA by the transfer vehicle composition. The samples are diluted to a concentration of approximately 5 μg/mL or 1 μg/mL in a TE buffer solution (10 mM Tris-HCl, 1 mM EDTA, pH 7.5). 50 μL of the diluted samples are transferred to a polystyrene 96 well plate and either 50 μL of TE buffer or 50 μL of a 2-4% Triton X-100 solution is added to the wells. The plate is incubated at a temperature of 37° C. for 15 minutes. The RIBOGREEN® reagent is diluted 1:100 or 1:200 in TE buffer, and 100 μL of this solution is added to each well. The fluorescence intensity can be measured using a fluorescence plate reader (Wallac Victor 1420 Multilablel Counter; Perkin Elmer, Waltham, MA) at an excitation wavelength of, for example, about 480 nm and an emission wavelength of, for example, about 520 nm. The fluorescence values of the reagent blank are subtracted from that of each of the samples and the percentage of free RNA is determined by dividing the fluorescence intensity of the intact sample (without addition of Triton X-100) by the fluorescence value of the disrupted sample (caused by the addition of Triton X-100).

### Example 31

### T Cell Targeting

[1496] To target transfer vehicles to T-cells, T cell antigen binders, e.g., anti-CD8 antibodies, are coupled to the surface of the transfer vehicle. Anti-T cell antigen antibodies are mildly reduced with an excess of DTT in the presence of EDTA in PBS to expose free hinge region thiols. To remove DTT, antibodies are passed through a desalting column. The heterobifunctional cross-linker SM(PEG)24 is used to anchor antibodies to the surface of circRNA-loaded transfer vehicles (Amine groups are present in the head groups of PEG lipids, free thiol groups on antibodies were created by DTT, SM(PEG)24 cross-links between amines and thiol groups). Transfer vehicles are first incubated with an excess of SM(PEG)24 and centrifuged to remove unreacted cross-linker. Activated transfer vehicles are then incubated with an excess of reduced anti-T cell antigen antibody. Unbound antibody is removed using a centrifugal filtration device.

### Example 32

### RNA Containing Transfer Vehicle Using RV88.

[1497] In this example RNA containing transfer vehicles are synthesized using the 2-D vortex microfluidic chip with the cationic lipid RV88 for delivery of circRNA.

TABLE 18a

| Materials and Instrument | Vendor | Cat # |
|---|---|---|
| 1M Tris-HCl, pH 6.0, Sterile | Teknova | T1080 |
| 5M Sodium Chloride solution | Teknova | S0250 |
| QB Citrate buffer, pH 6.0 | Teknova | Q2446 |
| (100 mM) | | |
| Nuclease-free water | Ambion | AM9937 |
| Triton X-100 | Sigma-Aldrich | T8787-100ML |
| RV88 | GVK bio | |
| DSPC | Lipoid | 556500 |
| Cholesterol | Sigma | C3045-5G |
| PEG2K | Avanti Polar Lipids | 880150 |
| Ethanol | Acros Organic | 615090010 |
| 5 mL Borosilicate glass vials | Thermo Scientific | ST5-20 |
| PD MiniTrap G-25 Desalting | GE Healthcare | VWR Cat. |
| Columns | | #95055-984 |
| Quant-iT RiboGreen RNA | Molecular Probes/Life | R11490 |
| Assay kit | Technologies | |
| Black 96-well microplates | Greiner | 655900 |

[1498] RV88, DSPC, and cholesterol all being prepared in ethanol at a concentration of 10 mg/ml in borosilica vials. The lipid 14.0-PEG2K PE is prepared at a concentration of 4 mg/ml also in a borosilica glass vial. Dissolution of lipids at stock concentrations is attained by sonication of the lipids in ethanol for 2 min. The solutions are then heated on an orbital tilting shaker set at 170 rpm at 37° C. for 10 min. Vials are then equilibrated at 26° C. for a minimum of 45 min. The lipids are then mixed by adding volumes of stock lipid as shown in Table 18b. The solution is then adjusted with ethanol such that the final lipid concentration was 7.92 mg/ml.

TABLE 18b

| | | | | | Stock | | Ethanol |
|---|---|---|---|---|---|---|---|
| Composition | MW | % | nmoles | mg | (mg/ml) | ul | (ul) |
| RV88 | 794.2 | 40% | 7200 | 5.72 | 10 | 571.8 | 165.3 |
| DSPC | 790.15 | 10% | 1800 | 1.42 | 10 | 142.2 | |
| Cholesterol | 386.67 | 48% | 8640 | 3.34 | 10 | 334.1 | |
| PEG2K | 2693.3 | 2% | 360 | 0.97 | 4 | 242.4 | |

[1499] RNA is prepared as a stock solution with 75 mM Citrate buffer at pH 6.0 and a concentration of RNA at 1.250 mg/ml. The concentration of the RNA is then adjusted to 0.1037 mg/ml with 75 mM citrate buffer at pH 6.0, equilibrated to 26° C. The solution is then incubated at 26° C. for a minimum of 25 min.

[1500] The microfluidic chamber is cleaned with ethanol and neMYSIS syringe pumps are prepared by loading a syringe with the RNA solution and another syringe with the ethanolic lipid. Both syringes are loaded and under the control of neMESYS software. The solutions are then applied to the mixing chip at an aqueous to organic phase ratio of 2 and a total flow rate of 22 ml/min (14.67 ml/min for RNA and 7.33 ml/min for the lipid solution. Both pumps are started synchronously. The mixer solution that flowed from the microfluidic chip is collected in 4×1 ml fractions with the first fraction being discarded as waste. The remaining solution containing the RNA-liposomes is exchanged by using G-25 mini desalting columns to 10 mM Tris-HCl, 1 mM EDTA, at pH 7.5. Following buffer exchange, the materials are characterized for size, and RNA entrapment through DLS analysis and Ribogreen assays, respectively.

### Example 33

### RNA Containing Transfer Vehicle Using RV94.

[1501] In this example, RNA containing liposome are synthesized using the 2-D vortex microfluidic chip with the cationic lipid RV94 for delivery of circRNA.

TABLE 19

| Materials and Instrument | Vendor | Cat # |
|---|---|---|
| 1M Trs-HCl, pH 6.0, Sterile | Teknova | T1080 |
| 5M Sodium Chloride solution | Teknova | S0250 |
| QB Citrate buffer, pH 6.0 | Teknova | Q2446 |
| (100 mM) | | |
| Nuclease-free water | Ambion | AM9937 |
| Triton X-100 | Sigma-Aldrich | T8787-100ML |
| RV94 | GVKbio | |
| DSPC | Lipoid | 556500 |
| Cholesterol | Sigma | C3045-5G |
| PEG2K | Avanti Polar Lipids | 880150 |
| Ethanol | Acros Organic | 615090010 |
| 5 mL Borosilicate glass vials | Thermo Scientific | ST5-20 |
| PD MiniTrap G-25 Desalting | GE Healthcare | VWR Cat |
| Columns | | #95055-984 |
| Quant-iT RiboGreen RNA | Molecular Probes/Life | R11490 |
| Assay kit | Technologies | |
| Black 96-well microplates | Greiner | 655900 |

[1502] The lipids were prepared as in Example 32 using the material amounts named in Table 19 to a final lipid concentration of 7.92 mg/ml.

TABLE 20

| | | | | | Stock | | Ethanol |
|---|---|---|---|---|---|---|---|
| Composition | MW | % | nmoles | mg | (mg/ml) | ul | (ul) |
| RV94 | 808.22 | 40% | 2880 | 2.33 | 10 | 232.8 | 155.3 |
| DSPC | 790.15 | 10% | 720 | 0.67 | 10 | 56.9 | |
| Cholesterol | 386.67 | 48% | 3456 | 1.34 | 10 | 133.6 | |
| PEG2K | 2693.3 | 2% | 144 | 0.39 | 4 | 97.0 | |

[1503] The aqueous solution of circRNA is prepared as a stock solution with 75 mM Citrate buffer at pH 6.0 the circRNA at 1.250 mg/ml. The concentration of the RNA is then adjusted to 0.1037 mg/ml with 75 mM citrate buffer at pH 6.0, equilibrated to 26° C. The solution is then incubated at 26° C. for a minimum of 25 min.

[1504] The microfluidic chamber is cleaned with ethanol and neMYSIS syringe pumps are prepared by loading a syringe with the RNA solution and another syringe with the ethanolic lipid. Both syringes are loaded and under the control of neMESYS software. The solutions are then applied to the mixing chip at an aqueous to organic phase ratio of 2 and a total flow rate of 22 ml/min (14.67 ml/min for RNA and 7.33 ml/min for the lipid solution. Both pumps are started synchronously. The mixer solution that flowed from the microfluidic chip is collected in 4×1 ml fractions with the first fraction being discarded as waste. The remaining solution containing the circRNA-transfer vehicles is exchanged by using G-25 mini desalting columns to 10 mM Tris-HCl, 1 mM EDTA, at pH 7.5, as described above. Following buffer exchange, the materials are characterized for size, and RNA entrapment through DLS analysis and Ribogreen assays, respectively. The biophysical analysis of the liposomes is shown in Table 21.

TABLE 21

| | | | | RNA | RNA | | |
|---|---|---|---|---|---|---|---|
| | | | Ratio | encapsulation | encapsulation | | |
| Sample | N:P | TFR | (aqueous/ | amount | yield | size | |
| Name | Ratio | ml/min | org phase) | (μg/ml) | % | d · nm | PDI |
| SAM- | 8 | 22 | 2 | 31.46 | 86.9 | 113.1 | 0.12 |
| RV94 | | | | | | | |

### Example 34

### General Protocol for in Line Mixing.

[1505] Individual and separate stock solutions are prepared—one containing lipid and the other circRNA. Lipid stock containing a desired lipid or lipid mixture, DSPC, cholesterol and PEG lipid is prepared by solubilized in 90% ethanol. The remaining 10% is low pH citrate buffer. The concentration of the lipid stock is 4 mg/mL. The pH of this citrate buffer can range between pH 3 and pH 5, depending on the type of lipid employed. The circRNA is also solubilized in citrate buffer at a concentration of 4 mg/mL. 5 mL of each stock solution is prepared.

[1506] Stock solutions are completely clear and lipids are ensured to be completely solubilized before combining with circRNA. Stock solutions may be heated to completely solubilize the lipids. The circRNAs used in the process may be unmodified or modified oligonucleotides and may be conjugated with lipophilic moieties such as cholesterol.

[1507] The individual stocks are combined by pumping each solution to a T-junction. A dual-head Watson-Marlow pump was used to simultaneously control the start and stop of the two streams. A 1.6 mm polypropylene tubing is further downsized to 0.8 mm tubing in order to increase the linear flow rate. The polypropylene line (ID=0.8 mm) are attached to either side of a T-junction. The polypropylene T has a linear edge of 1.6 mm for a resultant volume of 4.1 mm³. Each of the large ends (1.6 mm) of polypropylene line is placed into test tubes containing either solubilized lipid stock or solubilized circRNA. After the T-junction, a single tubing is placed where the combined stream exited. The tubing is then extended into a container with 2× volume of PBS, which is rapidly stirred. The flow rate for the pump is at a setting of 300 rpm or 110 mL/min. Ethanol is removed and exchanged for PBS by dialysis. The lipid formulations are then concentrated using centrifugation or diafiltration to an appropriate working concentration.

[1508] C57BL/6 mice (Charles River Labs, MA) receive either saline or formulated circRNA via tail vein injection. At various time points after administration, serum samples are collected by retroorbital bleed. Serum levels of Factor VII protein are determined in samples using a chromogenic assay (Biophen FVTI, Aniara Corporation, OH). To determine liver RNA levels of Factor VII, animals are sacrificed and livers are harvested and snap frozen in liquid nitrogen. Tissue lysates are prepared from the frozen tissues and liver RNA levels of Factor VII are quantified using a branched DNA assay (QuantiGene Assay, Panomics, CA).

[1509] FVII activity is evaluated in FVTI siRNA-treated animals at 48 hours after intravenous (bolus) injection in C57BL/6 mice. FVII is measured using a commercially available kit for determining protein levels in serum or tissue, following the manufacturer's instructions at a microplate scale. FVII reduction is determined against untreated control mice, and the results are expressed as % Residual FVII. Two dose levels (0.05 and 0.005 mg/kg FVII siRNA) are used in the screen of each novel liposome composition.

### Example 36

circRNA Formulation Using Preformed Vesicles.

[1510] Cationic lipid containing transfer vehicles are made using the preformed vesicle method. Cationic lipid, DSPC, cholesterol and PEG-lipid are solubilized in ethanol at a molar ratio of 40/10/40/10, respectively. The lipid mixture is added to an aqueous buffer (50 mM citrate, pH 4) with mixing to a final ethanol and lipid concentration of 30% (vol/vol) and 6.1 mg/mL respectively and allowed to equilibrate at room temperature for 2 min before extrusion. The hydrated lipids are extruded through two stacked 80 nm pore-sized filters (Nuclepore) at 22° C. using a Lipex Extruder (Northern Lipids, Vancouver, BC) until a vesicle diameter of 70-90 nm, as determined by Nicomp analysis, is obtained. For cationic lipid mixtures which do not form small vesicles, hydrating the lipid mixture with a lower pH buffer (50 mM citrate, pH 3) to protonate the phosphate group on the DSPC headgroup helps form stable 70-90 nm vesicles.

[1511] The FVII circRNA (solubilised in a 50 mM citrate, pH 4 aqueous solution containing 30% ethanol) is added to the vesicles, pre-equilibrated to 35° C., at a rate of ˜5 mL/min with mixing. After a final target circRNA/lipid ratio of 0.06 (wt wt) is achieved, the mixture is incubated for a further 30 min at 35° C. to allow vesicle re-organization and encapsulation of the FVII RNA. The ethanol is then removed and the external buffer replaced with PBS (155 mM NaCl, 3 mM Na2HP04, ImM KH2P04, pH 7.5) by either dialysis or tangential flow diafiltration. The final encapsulated circRNA-to-lipid ratio is determined after removal of unencapsulated RNA using size-exclusion spin columns or ion exchange spin columns.

### Example 37

### Example 37A: Expression of Trispecific Antigen Binding Proteins from Engineered Circular RNA

[1512] Circular RNAs are designed to include: (1) a 3′ post splicing group I intron fragment; (2) an Internal Ribosome Entry Site (IRES); (3) a trispecific antigen-binding protein coding region; and (4) a 3′ homology region. The trispecific antigen-binding protein regions are constructed to produce an exemplary trispecific antigen-binding protein that will bind to a target antigen, e.g., GPC3.

### Example 37B: Generation of a scFv CD3 Binding Domain

[1513] The Human CD3Epsilon Chain Canonical Sequence is Uniprot Accession No. P07766. The human CD3gamma chain canonical sequence is Uniprot Accession No. P09693. The human CD3delta chain canonical sequence is Uniprot Accession No. P043234. Antibodies against CD3epsilon, CD3gamma or CD3delta are generated via known technologies such as affinity maturation. Where murine anti-CD3 antibodies are used as a starting material, humanization of murine anti-CD3 antibodies is desired for the clinical setting, where the mouse-specific residues may induce a human-anti-mouse antigen (HAMA) response in subjects who receive treatment of a trispecific antigen-binding protein described herein. Humanization is accomplished by grafting CDR regions from murine anti-CD3 antibody onto appropriate human germline acceptor frameworks, optionally including other modifications to CDR and/or framework regions.

[1514] Human or humanized anti-CD3 antibodies are therefore used to generate scFv sequences for CD3 binding domains of a trispecific antigen-binding protein. DNA sequences coding for human or humanized VL and VH domains are obtained, and the codons for the constructs are, optionally, optimized for expression in cells from Homo sapiens. The order in which the VL and VH domains appear in the scFv is varied (i.e. VL-VH, or VH-VL orientation), and three copies of the “G4S” or “G₄S” subunit (G₄S)₃ connect the variable domains to create the scFv domain. Anti-CD3 scFv plasmid constructs can have optional Flag, His or other affinity tags, and are electroporated into HEK293 or other suitable human or mammalian cell lines and purified. Validation assays include binding analysis by FACS, kinetic analysis using Proteon, and staining of CD3-expressing cells.

### Example 37C: Generation of a scFv Glypican-3 (GPC3) Binding Domain

[1515] Glypican-3 (GPC3) is one of the cell surface proteins present on Hepatocellular Carcinoma but not on healthy normal liver tissue. It is frequently observed to be elevated in hepatocellular carcinoma and is associated with poor prognosis for HCC patients. It is known to activate Wnt signalling. GPC3 antibodies have been generated including MDX-1414, HN3, GC33, and YP7.

[1516] A scFv binding to GPC-3 or another target antigen is generated similarly to the above method for generation of a scFv binding domain to CD3.

### Example 37D: Expression of Trispecific Antigen-Binding Proteins In Vitro

[1517] A CHO cell expression system (Flp-In®, Life Technologies), a derivative of CHO-K1 Chinese Hamster ovary cells (ATCC, CCL-61) (Kao and Puck, Proc. Natl. Acad Sci USA 1968; 60(4):1275-81), is used. Adherent cells are subcultured according to standard cell culture protocols provided by Life Technologies.

[1518] For adaption to growth in suspension, cells are detached from tissue culture flasks and placed in serum-free medium. Suspension-adapted cells are cryopreserved in medium with 10% DMSO.

[1519] Recombinant CHO cell lines stably expressing secreted trispecific antigen-binding proteins are generated by transfection of suspension-adapted cells. During selection with the antibiotic Hygromycin B viable cell densities are measured twice a week, and cells are centrifuged and resuspended in fresh selection medium at a maximal density of 0.1×10⁶ viable cells/mL. Cell pools stably expressing trispecific antigen-binding proteins are recovered after 2-3 weeks of selection at which point cells are transferred to standard culture medium in shake flasks. Expression of recombinant secreted proteins is confirmed by performing protein gel electrophoresis or flow cytometry. Stable cell pools are cryopreserved in DMSO containing medium.

[1520] Trispecific antigen-binding proteins are produced in 10-day fed-batch cultures of stably transfected CHO cell lines by secretion into the cell culture supernatant. Cell culture supernatants are harvested after 10 days at culture viabilities of typically >75%. Samples are collected from the production cultures every other day and cell density and viability are assessed. On day of harvest, cell culture supernatants are cleared by centrifugation and vacuum filtration before further use.

[1521] Protein expression titers and product integrity in cell culture supernatants are analyzed by SDS-PAGE.

### Example 37E: Purification of Trispecific Antigen-Binding Proteins

[1522] Trispecific antigen-binding proteins are purified from CHO cell culture supernatants in a two-step procedure. The constructs are subjected to affinity chromatography in a first step followed by preparative size exclusion chromatography (SEC) on Superdex 200 in a second step. Samples are buffer-exchanged and concentrated by ultrafiltration to a typical concentration of >1 mg/mL Purity and homogeneity (typically >90%) of final samples are assessed by SDS PAGE under reducing and non-reducing conditions, followed by immunoblotting using an anti-(half-life extension domain) or anti idiotype antibody as well as by analytical SEC, respectively. Purified proteins are stored at aliquots at −80° C. until use.

### Example 38

Expression of Engineered Circular RNA with a Half-Life Extension Domain has Improved Pharmacokinetic Parameters than without a Half-Life Extension Domain

[1523] The trispecific antigen-binding protein encoded on a circRNA molecule of example 23 is administered to cynomolgus monkeys as a 0.5 mg/kg bolus injection intramuscularly. Another cynomolgus monkey group receives a comparable protein encoded on a circRNA molecule in size with binding domains to CD3 and GPC-3, but lacking a half-life extension domain. A third and fourth group receive a protein encoded on a circRNA molecule with CD3 and half-life extension domain binding domains and a protein with GPC-3 and half-life extension domains, respectively. Both proteins encoded by circRNA are comparable in size to the trispecific antigen-binding protein. Each test group consists of 5 monkeys. Serum samples are taken at indicated time points, serially diluted, and the concentration of the proteins is determined using a binding ELISA to CD3 and/or GPC-3.

[1524] Pharmacokinetic analysis is performed using the test article plasma concentrations. Group mean plasma data for each test article conforms to a multi-exponential profile when plotted against the time post-dosing. The data are fit by a standard two-compartment model with bolus input and first-order rate constants for distribution and elimination phases. The general equation for the best fit of the data for i.v. administration is: c(t)=Ae^{˜at}+Be^{˜pt}, where c(t) is the Plasma concentration at time t, A and B are intercepts on the Y-axis, and a and β are the apparent first-order rate constants for the distribution and elimination phases, respectively. The a-phase is the initial phase of the clearance and reflects distribution of the protein into all extracellular fluid of the animal, whereas the second or β-phase portion of the decay curve represents true plasma clearance. Methods for fitting such equations are well known in the art. For example, A=D/V(a−k21)/(a−p), B=D/V(p−k21)/(a−p), and a and β (for α>β) are roots of the quadratic equation: r²+(k12+k21+k10)r+k21k10=0 using estimated parameters of V=volume of distribution, k10=elimination rate, k12=transfer rate from compartment 1 to compartment 2 and k21=transfer rate from compartment 2 to compartment 1, and D=the administered dose.

[1525] Data analysis: Graphs of concentration versus time profiles are made using KaleidaGraph (KaleidaGraph™ V. 3.09 Copyright 1986-1997. Synergy Software. Reading, Pa.). Values reported as less than reportable (LTR) are not included in the PK analysis and are not represented graphically. Pharmacokinetic parameters are determined by compartmental analysis using WinNonlin software (WinNonlin® Professional V. 3.1 WinNonlin™ Copyright 1998-1999. Pharsight Corporation. Mountain View, Calif). Pharmacokinetic parameters are computed as described in Ritschel W A and Kearns G L, 1999, EST: Handbook Of Basic Pharmacokinetics Including Clinical Applications, 5th edition, American Pharmaceutical Assoc., Washington, D C.

[1526] It is expected that the trispecific antigen-binding protein encoded on a circRNA molecule of Example 23 has improved pharmacokinetic parameters such as an increase in elimination half-time as compared to proteins lacking a half-life extension domain.

### Example 39

### Cytotoxicity of the Trispecific Antigen-Binding Protein

[1527] The trispecific antigen-binding protein encoded on a circRNA molecule of Example 23 is evaluated in vitro on its mediation of T cell dependent cytotoxicity to GPC-3+ target cells.

[1528] Fluorescence labeled GPC3 target cells are incubated with isolated PBMC of random donors or T-cells as effector cells in the presence of the trispecific antigen-binding protein of Example 23. After incubation for 4 h at 37° C. in a humidified incubator, the release of the fluorescent dye from the target cells into the supernatant is determined in a spectrofluorimeter. Target cells incubated without the trispecific antigen-binding protein of Example 23 and target cells totally lysed by the addition of saponin at the end of the incubation serve as negative and positive controls, respectively.

[1529] Based on the measured remaining living target cells, the percentage of specific cell lysis is calculated according to the following formula: [1−(number of living targets(sample)/number of living targets(spontaneous))]×100%. Sigmoidal dose response curves and EC50 values are calculated by non-linear regression/4-parameter logistic fit using the GraphPad Software. The lysis values obtained for a given antibody concentration are used to calculate sigmoidal dose-response curves by 4 parameter logistic fit analysis using the Prism software.

### Example 40

### Synthesis of Ionizable Lipids

### 40.1 Synthesis of ((3-(2-methyl-1H-imidazol-1-yl)propyl)azanediyl)bis(hexane-6,1-diyl)bis(2-hexyldecanoate)(Lipid 10a-27) and ((3-(1H-imidazol-1-yl)propyl)azanediyl)bis(hexane-6,1-diyl)bis(2-hexyldecanoate)) (Lipid 10a-26)

[1530] In a 100 mL round bottom flask connected with condenser, 3-(1H-imidazol-1-yl)propan-1-amine (100 mg, 0.799 mmol) or 3-(2-methyl-1H-imidazol-1-yl)propan-1-amine (0.799 mmol), 6-bromohexyl 2-hexyldecanoate (737.2 mg, 1.757 mmol), potassium carbonate (485 mg, 3.515 mmol) and potassium iodide (13 mg, 0.08 mmol) were mixed in acetonitrile (30 mL), and the reaction mixture was heated to 80° C. for 48 h. The mixture was cooled to room temperature and was filtered through a pad of Celite. The filtrate was diluted with ethyl acetate. After washing with water, brine and dried over anhydrous sodium sulfate. The solvent was evaporated and the crude residue was purified by flash chromatography (SiO₂: CH₂Cl₂=100% to 10% of methanol in CH₂Cl₂) and colorless oil product was obtained (92 mg, 15%). Molecular formula of ((3-(1H-imidazol-1-yl)propyl)azanediyl)bis(hexane-6,1-diyl)bis(2-hexyldecanoate)) is C₅₀H₉₅N₃O₄ and molecular weight (M_{w}) is 801.7.

[1531] Reaction scheme for synthesis of ((3-(1H-imidazol-1-yl)propyl)azanediyl)bis(hexane-6,1-diyl)bis(2-hexyldecanoate)) (Lipid 10a-26).

[1532] Characterization of Lipid 10a-26 was performed by LC-MS. FIG. 27A-C shows characterization of Lipid 10a-26. FIG. 27A shows the proton NMR observed for Lipid 10a-26. FIG. 27B is a representative LC/MS trace for Lipid 10a-26 with total ion and UV chromatograms shown.

### 40.2 Synthesis of Lipid 22-S14

### 40.2.1 Synthesis of 2-(tetradecylthio)ethan-1-ol

[1533] To a mixture of 2-sulfanylethanol (5.40 g, 69.11 mmol, 4.82 mL, 0.871 eq) in acetonitrile (200 mL) was added 1-Bromotetradecane(22 g, 79.34 mmol, 23.66 mL, 1 eq) and potassium carbonate (17.55 g, 126.95 mmol, 1.6 eq) at 25° C. The reaction mixture was warmed to 40° C. and stirred for 12 hr. TLC (ethyl acetate/petroleum ether=25/1, R_{f}=0.3, stained by 12) showed the starting material was consumed completely and a new main spot was generated. The reaction mixture was filtered and the filter cake was washed with acetonitrile (50 mL) and then the filtrate was concentrated under vacuum to get a residue which was purified by column on silica gel (ethyl acetate/petroleum ether=1/100 to 1/25) to afford 2-(tetradecylthio)ethan-1-ol (14 g, yield 64.28%) as a white solid.

[1534] ¹H NMR (ET36387-45-P1A, 400 MHz, CHLOROFORM-d) δ 0.87-0.91 (m, 3H) 1.27 (s, 20H) 1.35-1.43 (m, 2H) 1.53-1.64 (m, 2H) 2.16 (br s, 1H) 2.49-2.56 (m, 2H) 2.74 (t, J=5.93 Hz, 2H) 3.72 (br d, J=4.89 Hz, 2H). FIG. 28 shows corresponding Nuclear Magnetic Resonance (NMR) spectrum.

### 40.2.2 Synthesis of 2-(tetradecylthio)ethyl acrylate

[1535] To a solution of 2-(tetradecylthio)ethan-1-ol (14 g, 51.00 mmol, 1 eq) in dichloromethane (240 mL) was added triethylamine (7.74 g, 76.50 mmol, 10.65 mL, 1.5 eq) and prop-2-enoyl chloride (5.54 g, 61.20 mmol, 4.99 mL, 1.2 eq) dropwise at 0° C. under nitrogen. The reaction mixture was warmed to 25° C. and stirred for 12 hr. TLC (ethyl acetate/petroleum ether=25/1, R_{f}=0.5, stained by I₂) showed the starting material was consumed completely and a new main spot was generated. The reaction solution was concentrated under vacuum to get crude which was purified by column on silica gel (ethyl acetate/petroleum ether=1/100 to 1/25) to afford 2-(tetradecylthio)ethyl acrylate (12 g, yield 71.61%) as a colorless oil.

[1536] ¹H NMR (ET36387-49-P1A, 400 MHz, CHLOROFORM-d) δ 0.85-0.93 (m, 3H) 1.26 (s, 19H) 1.35-1.43 (m, 2H) 1.53-1.65 (m, 2H) 2.53-2.62 (m, 2H) 2.79 (t, J=7.03 Hz, 2H) 4.32 (t, J=7.03 Hz, 2H) 5.86 (dd, J=10.39, 1.47 Hz, 1H) 6.09-6.19 (m, 1H) 6.43 (dd, J=17.30, 1.41 Hz, 1H). FIG. 29 shows corresponding Nuclear Magnetic Resonance (NMR) spectrum.

### 40.2.3 Synthesis of bis(2-(tetradecylthio)ethyl) 3,3′-((3-(2-methyl-1H-imidazol-1-yl)propyl)azanediyl)dipropionate (Lipid 22-S14)

[1537] A flask was charged with 3-(2-methyl-1H-imidazol-1-yl)propan-1-amine (300 mg, 2.16 mmol) and 2-(tetradecylthio)ethyl acrylate (1.70 g, 5.17 mmol). The neat reaction mixture was heated to 80° C. and stirred for 48 hr. TLC (ethyl acetate, R_{f}=0.3, stained by I₂, one drop ammonium hydroxide added) showed the starting material was consumed completely and a new main spot was formed. The reaction mixture was diluted with dichloromethane (4 mL) and purified by column on silica gel (petroleum ether/ethyl acetate=3/1 to 0/1, 0.1% ammonium hydroxide added) to get bis(2-(tetradecylthio)ethyl) 3,3′-((3-(2-methyl-1H-imidazol-1-yl)propyl)azanediyl)dipropionate (501 mg, yield 29.1%) as colorless oil.

[1538] ¹H NMR (ET36387-51-P1A, 400 MHz, CHLOROFORM-d) δ 0.87 (t, J=6.73 Hz, 6H) 1.25 (s, 40H) 1.33-1.40 (m, 4H) 1.52-1.61 (m, 4H) 1.81-1.90 (m, 2H) 2.36 (s, 3H) 2.39-2.46 (m, 6H) 2.53 (t, J=7.39 Hz, 4H) 2.70-2.78 (m, 8H) 3.84 (t, J=7.17 Hz, 2H) 4.21 (t, J=6.95 Hz, 4H) 6.85 (s, 1H) 6.89 (s, 1H). FIG. 30 shows corresponding Nuclear Magnetic Resonance (NMR) spectrum.

[1539] 40.3 Synthesis of bis(2-(tetradecylthio)ethyl) 3,3′-((3-(1H-imidazol-1-yl)propyl)azanediyl)dipropionate (Lipid 93-S14)

[1540] A flask was charged with 3-(1H-imidazol-1-yl)propan-1-amine (300 mg, 2.40 mmol, 1 eq) and 2-(tetradecylthio)ethyl acrylate (1.89 g, 5.75 mmol, 2.4 eq). The neat reaction mixture was heated to 80° C. and stirred for 48 hr. TLC (ethyl acetate, R_{f}=0.3, stained by I₂, one drop ammonium hydroxide added) showed the starting material was consumed completely and a new main spot was formed. The reaction mixture was diluted with dichloromethane (4 mL) and purified by column on silica gel (petroleum ether/ethyl acetate=1/20-0/100, 0.1% ammonium hydroxide added) to get bis(2-(tetradecylthio)ethyl) 3,3′-((3-(1H-imidazol-1-yl)propyl)azanediyl)dipropionate (512 mg, yield 27.22%) as colorless oil.

[1541] ¹H NMR (ET36387-54-P1A, 400 MHz, CHLOROFORM-d) δ 0.89 (t, J=6.84 Hz, 6H) 1.26 (s, 40H) 1.34-1.41 (m, 4H) 1.58 (br t, J=7.50 Hz, 4H) 1.92 (t, J=6.62 Hz, 2H) 2.36-2.46 (m, 6H) 2.55 (t, J=7.50 Hz, 4H) 2.75 (q, J=6.84 Hz, 8H) 3.97 (t, J=6.95 Hz, 2H) 4.23 (t, J=6.95 Hz, 4H) 6.95 (s, 1H) 7.06 (s, 1H) 7.51 (s, 1H). FIG. 31 shows corresponding Nuclear Magnetic Resonance (NMR) spectrum.

### 40.4 Synthesis of heptadecan-9-yl 8-((3-(2-methyl-1H-imidazol-1-yl)propyl)(8-(nonyloxy)-8-oxooctyl)amino)octanoate (Lipid 10a-54)

### 40.4.1 Synthesis of nonyl 8-bromooctanoate (3)

[1542] To a mixture of 8-bromooctanoic acid (2) (18.6 g, 83.18 mmol) and nonan-1-ol (1) (10 g, 69.32 mmol) in CH₂Cl₂ (500 mL) was added DMAP (1.7 g, 13.86 mmol), DIPEA (48 mL, 277.3 mmol) and EDC (16 g, 83.18 mmol). The reaction was stirred at room temperature overnight. After concentration of the reaction mixture, the crude residue was dissolved in ethyl acetate (500 mL), washed with 1N HCl, sat. NaHCO₃, water and Brine. The organic layer was dried over anhydrous Na₂SO₄. The solvent was evaporated and the crude residue was purified by flash chromatography (SiO₂: Hexane=100% to 30% of EtOAc in Hexane) and colorless oil product 3 was obtained (9 g, 37%).

### 40.4.2 Synthesis of heptadecan-9-yl 8-bromooctanoate (5)

[1543] To a mixture of 8-bromooctanoic acid (2) (10 g, 44.82 mmol) and heptadecan-9-ol (4) (9.6 g, 37.35 mmol) in CH₂Cl₂ (300 mL) was added DMAP (900 mg, 7.48 mmol), DIPEA (26 mL, 149.7 mmol) and EDC (10.7 g, 56.03 mmol). The reaction was stirred at room temperature overnight. After concentration of the reaction mixture, the crude residue was dissolved in ethyl acetate (300 mL), washed with 1N HCl, sat. NaHCO₃, water and Brine. The organic layer was dried over anhydrous Na₂SO₄. The solvent was evaporated and the crude residue was purified by flash chromatography (SiO₂: Hexane=100% to 30% of EtOAc in Hexane) and colorless oil product 5 was obtained (5 g, 29%).

[1544] ¹H NMR (300 MHz, CDCl₃): δ ppm 4.86 (m, 1H), 3.39 (t, J=7.0 Hz, 2H), 2.27 (t, J=7.6 Hz, 2H), 1.84 (m, 2H), 1.62 (m, 2H), 1.5-1.4 (m, 8H), 1.35-1.2 (m, 26H) 0.87 (t, J=6.7 Hz, 6H).

### 40.4.3 Synthesis of heptadecan-9-yl 8-((3-(2-methyl-1H-imidazol-1-yl)propyl)amino)octanoate (7)

[1545] In a 100 mL round bottom flask connected with condenser, heptadecan-9-yl 8-bromooctanoate (5) (860 mg, 1.868 mmol) and 3-(2-methyl-1H-imidazol-1-yl)propan-1-amine (6) (1.3 g, 9.339 mmol) were mixed in ethanol (10 mL). The reaction mixture was heated to reflux overnight. MS (APCI) showed the expected product. The mixture was cooled to room temperature and concentrated. The crude residue was purified by flash chromatography (SiO₂: CH₂Cl₂=100% to 10% of methanol+1% NH₄OH in CH₂Cl₂) and colorless oil product 7 was obtained (665 mg, 69%).

### 40.4.4 Synthesis of heptadecan-9-yl 8-((3-(2-methyl-1H-imidazol-1-yl)propyl)(8-(nonyloxy)-8-oxooctyl)amino)octanoate (Lipid 10a-54)

[1546] In a 100 mL round bottom flask connected with condenser, heptadecan-9-yl 8-((3-(2-methyl-1H-imidazol-1-yl)propyl)amino)octanoate (7) (665 mg, 1.279 mmol) and nonyl 8-bromooctanoate (3) (536 mg, 1.535 mmol) were mixed in ethanol (10 mL), then DIPEA (0.55 mL, 3.198 mmol) was added. The reaction mixture was heated to reflux overnight. Both MS (APCI) and TLC (10% MeOH+1% NH₄OH in CH₂Cl₂) showed the product and some unreacted starting material. The mixture was cooled to room temperature and concentrated. The crude residue was purified by flash chromatography (SiO₂: CH₂Cl₂=100% to 10% of methanol+1% NH₄OH in CH₂Cl₂) and colorless oil was obtained (170 mg, 17%).

### 40.5 Synthesis of heptadecan-9-yl 8-((3-(1H-imidazol-1-yl)propyl)(8-(nonyloxy)-8-oxooctyl)amino)octanoate (Lipid 10a-53)

[1547] Lipid 10a-53 is synthesized according to the scheme above. Reaction conditions are identical to Lipid 10a-54 with the exception of 3-(1H-imidazol-1-yl)propan-1-amine as the imidazole amine.

### 40.6 Synthesis of Heptadecan-9-yl 8-((3-(1H-imidazol-1-yl)propyl)(8-(nonyloxy)-8-oxooctyl)amino)octanoate (Lipid 10a-45)

### 40.6.1 Synthesis of heptadecan-9-yl 8-bromooctanoate (3)

[1548] To a mixture of 8-bromooctanoic acid (2) (10 g, 44.82 mmol) and heptadecan-9-ol (1) (9.6 g, 37.35 mmol) in CH₂Cl₂ (300 mL) was added DMAP (900 mg, 7.48 mmol), DIPEA (26 mL, 149.7 mmol) and EDC (10.7 g, 56.03 mmol). The reaction was stirred at room temperature overnight. After concentration of the reaction mixture, the crude residue was dissolved in ethyl acetate (300 mL), washed with 1N HCl, sat. NaHCO₃, water and Brine. The organic layer was dried over anhydrous Na₂SO₄. The solvent was evaporated and the crude residue was purified by flash chromatography (SiO₂: Hexane=100% to 30% of EtOAc in Hexane) and colorless oil product 3 was obtained (5 g, 29%).

[1549] ¹H NMR (300 MHz, CDCl₃): δ ppm 4.86 (m, 1H), 3.39 (t, J=7.0 Hz, 2H), 2.27 (t, J=7.6 Hz, 2H), 1.84 (m, 2H), 1.62 (m, 2H), 1.5-1.4 (m, 8H), 1.35-1.2 (m, 26H) 0.87 (t, J=6.7 Hz, 6H).

### 40.6.2 Synthesis of heptadecan-9-yl 8-((3-(1H-imidazol-1-yl)propyl)amino)octanoate (6)

[1550] In a 100 mL round bottom flask connected with condenser, heptadecan-9-yl 8-bromooctanoate (3) (1 g, 2.167 mmol) and 3-(1H-imidazol-1-yl)propan-1-amine (4) (1.3 mL, 10.83 mmol) were mixed in ethanol (10 mL). The reaction mixture was heated to reflux overnight. MS (APCI) showed the expected product. The mixture was cooled to room temperature and concentrated. The crude residue was purified by flash chromatography (SiO₂: CH₂Cl₂=100% to 10% of methanol+1% NH₄OH in CH₂Cl₂) and colorless oil product 6 was obtained (498 mg, 45%).

[1551] ¹H NMR (300 MHz, CDCl₃): δ ppm 7.47 (s, 1H), 7.04 (s, 1H), 6.91 (s, 1H), 4.85 (m, 1H), 4.03 (t, J=7.0 Hz, 2H), 2.56 (dd, J=14.5, 7.4 Hz, 4H), 2.27 (t, J=7.4 Hz, 2H), 1.92 (m, 2H), 1.60 (m, 2H), 1.48 (m, 6H), 1.30-1.20 (m, 31H), 0.86 (t, J=6.6 Hz, 6H). MS (APCI*): 506.4 (M+1).

[1552] 40.6.3 Synthesis of nonyl 8-bromooctanoate (9)

[1553] To a mixture of 8-bromooctanoic acid (2) (18.6 g, 83.18 mmol) and nonan-1-ol (8) (10 g, 69.32 mmol) in CH₂Cl₂ (500 mL) was added DMAP (1.7 g, 13.86 mmol), DIPEA (48 mL, 277.3 mmol) and EDC (16 g, 83.18 mmol). The reaction was stirred at room temperature overnight. After concentration of the reaction mixture, the crude residue was dissolved in ethyl acetate (500 mL), washed with IN HCl, sat. NaHCO₃, water and Brine. The organic layer was dried over anhydrous Na₂SO₄. The solvent was evaporated and the crude residue was purified by flash chromatography (SiO₂: Hexane=100% to 30% of EtOAc in Hexane) and colorless oil product 9 was obtained (9 g, 37%).

[1554] ¹H NMR (300 MHz, CDCl₃): δ ppm 4.05 (t, J=7.0 Hz, 2H), 3.39 (t, J=7.0 Hz, 2H), 2.29 (t, J=7.6 Hz, 2H), 1.84 (m, 2H), 1.62-1.56 (m, 6H), 1.40-1.20 (m, 16H), 0.87 (t, J=6.7 Hz, 3H).

### 40.6.4 Synthesis of heptadecan-9-yl 8-((3-(1H-imidazol-1-yl)propyl)(8-(nonyloxy)-8-oxooctyl)amino)octanoate

[1555] In a 100 mL round bottom flask connected with condenser, heptadecan-9-yl 8-((3-(1H-imidazol-1-yl)propyl)amino)octanoate (6) (242 mg, 0.478 mmol) and nonyl 8-bromooctanoate 9 (200 mg, 0.574 mmol) were mixed in ethanol (10 mL), then DIPEA (0.2 mL, 1.196 mmol) was added. The reaction mixture was heated to reflux overnight. Both MS (APCI) and TLC (10% MeOH+1% NH₄OH in CH₂Cl₂) showed the product and some unreacted starting material. The mixture was cooled to room temperature and concentrated. The crude residue was purified by flash chromatography (SiO₂: CH₂Cl₂=100% to 10% of methanol+1% NH₄OH in CH₂Cl₂) and colorless oil was obtained (35 mg, 10%).

[1556] ¹H NMR (300 MHz, CDCl₃): δ ppm 7.46 (s, 1H), 7.05 (s, 1H), 6.90 (s, 1H), 4.85 (m, 1H), 4.04 (t, J=6.6 Hz, 2H), 4.01 (t, J=6.6 Hz, 2H), 2.38 (m, 6H), 2.27 (t, J=3.8 Hz, 4H), 1.89 (m, 2H), 1.60-1.58 (m, 12H), 1.48 (m, 6H), 1.30-1.20 (m, 47H), 0.87 (t, J=7.1 Hz, 9H). MS (APCI+): 774.6 (M+1).

### 40.7 Synthesis of Heptadecan-9-yl 8-((3-(2-methyl-1H-imidazol-1-yl)propyl)(8-(nonyloxy)-8-oxooctyl)amino)octanoate (Lipid 10a-46)

[1557] Lipid 10a-46 is synthesized according to the scheme above. Reaction conditions are identical to Lipid 10a-45 with the exception of 3-(2-Methyl-1H-imidazol-1-yl)propan-1-amine as the imidazole amine.

[1558] ¹H NMR (300 MHz, CDCl₃): δ ppm 6.89 (s, 1H), 6.81 (s, 1H), 4.86 (m, 1H), 4.04 (t, J=6.8 Hz, 2H), 3.85 (t, J=7.4 Hz, 2H), 2.38-2.36 (m, 9H), 2.28 (m, 4H), 1.82 (m, 2H), 1.72-1.56 (m, 12H), 1.48 (m, 4H), 1.30-1.20 (m, 46H), 0.86 (t, J=6.6 Hz, 9H). MS (APCI⁺): 789.7 (M+1).

### 40.8Synthesis of Heptadecan-9-yl8-((3-(H-imidazol-1-yl)propyl)(8-oxo-8-(undecan-3-yloxy)octyl)amino)octanoate (Lipid 10a-137)

### 40.8.1 Synthesis of heptadecan-9-yl 8-bromooctanoate (3)

[1559] To a mixture of 8-bromooctanoic acid (2) (10 g, 44.82 mmol) and heptadecan-9-ol (1) (9.6 g, 37.35 mmol) in CH₂Cl₂ (300 mL) was added DMAP (900 mg, 7.48 mmol), DIPEA (26 mL, 149.7 mmol) and EDC (10.7 g, 56.03 mmol). The reaction was stirred at room temperature overnight. After concentration of the reaction mixture, the crude residue was dissolved in ethyl acetate (300 mL), washed with 1N HCl, sat. NaHCO₃, water and Brine. The organic layer was dried over anhydrous Na₂SO₄. The solvent was evaporated and the crude residue was purified by flash chromatography (SiO₂: Hexane=100% to 30% of EtOAc in Hexane) and colorless oil product 3 was obtained (5 g, 29%).

[1560] 1H NMR (300 MHz, CDCl₃): δ ppm 4.86 (m, 1H), 3.39 (t, J=7.0 Hz, 2H), 2.27 (t, J=7.6 Hz, 2H), 1.84 (m, 2H), 1.62 (m, 2H), 1.5-1.4 (m, 8H), 1.35-1.2 (m, 26H) 0.87 (t, J=6.7 Hz, 6H).

### 40.8.2 Synthesis of heptadecan-9-yl 8-((3-(1H-imidazol-1-yl)propyl)amino)octanoate (6)

[1561] In a 100 mL round bottom flask connected with condenser, heptadecan-9-yl 8-bromooctanoate (3) (1 g, 2.167 mmol) and 3-(1H-imidazol-1-yl)propan-1-amine (4) (1.3 mL, 10.83 mmol) were mixed in ethanol (10 mL). The reaction mixture was heated to reflux overnight. MS (APCI) showed the expected product. The mixture was cooled to room temperature and concentrated. The crude residue was purified by flash chromatography (SiO₂: CH₂Cl₂=100% to 10% of methanol+1% NH₄OH in CH₂Cl₂) and colorless oil product 6 was obtained (498 mg, 45%).

[1562] ¹H NMR (300 MHz, CDCl₃): δ ppm 7.47 (s, 1H), 7.04 (s, 1H), 6.91 (s, 1H), 4.85 (m, 1H), 4.03 (t, J=7.0 Hz, 2H), 2.56 (dd, J=14.5, 7.4 Hz, 4H), 2.27 (t, J=7.4 Hz, 2H), 1.92 (m, 2H), 1.60 (m, 2H), 1.48 (m, 6H), 1.30-1.20 (m, 31H), 0.86 (t, J=6.6 Hz, 6H). MS (APCI⁺): 506.4 (M+1).

### 40.8.3 Synthesis of undecan-3-ol (11)

[1563] To a mixture of nonanal (10) (5 g, 35.2 mmol), in anhydrous THF (100 mL) at 0° C. ice-water bath was dropwise added ethylmagnesium bromide (47 mL, 42.2 mmol, 0.9M in THF). The reaction was stirred at room temperature overnight. The reaction was quenched with ice and diluted with ethyl acetate (500 mL), washed with 1N HCl, sat. NaHCO₃, water and Brine. The organic layer was dried over anhydrous Na₂SO₄. The solvent was evaporated and the crude residue was purified by flash chromatography (SiO₂: Hexane=100% to 50% of EtOAc in Hexane) and colorless oil product 11 was obtained (4 g, 66%).

[1564] ¹H NMR (300 MHz, CDCl₃): δ ppm 3.52 (m, 1H), 1.56-1.3 (m, 4H), 1.3-1.20 (m, 12H), 0.93 (t, J=7.4 Hz, 3H), 0.87 (t, J=7.4 Hz, 3H).

### 40.8.4 Synthesis of undecan-3-yl 8-bromooctanoate (12)

[1565] To a mixture of 8-bromooctanoic acid (2) (6.2 g, 27.9 mmol) and undecan-3-ol (11) (4 g, 23.2 mmol) in CH₂Cl₂ (100 mL) was added DMAP (567.2 mg, 4.64 mmol), DIPEA (16.2 mL, 92.9 mmol) and EDC (6.7 g, 34.8 mmol). The reaction was stirred at room temperature overnight. After concentration of the reaction mixture, the crude residue was dissolved in ethyl acetate (500 mL), washed with 1N HCl, sat. NaHCO₃, water and Brine. The organic layer was dried over anhydrous Na₂SO₄. The solvent was evaporated and the crude residue was purified by flash chromatography (SiO₂: Hexane=100% to 30% of EtOAc in Hexane) and colorless oil product 12 was obtained (7.3 g, 83%).

[1566] ¹H NMR (300 MHz, CDCl₃): δ ppm 4.80 (m, 1H), 3.39 (t, J=6.8 Hz, 2H), 2.28 (t, J=7.7 Hz, 2H), 1.84 (m, 2H), 1.6-1.35 (m, 8H), 1.35-1.2 (m, 16H), 0.87 (t, J=7.4 Hz, 6H).

### 40.8.4 Synthesis of heptadecan-9-yl 8-((3-(1H-imidazol-1-yl)propyl)(8-(nonyloxy)-8-oxooctyl)amino)octanoate

[1567] In a 100 mL round bottom flask connected with condenser, heptadecan-9-yl 8-((3-(1H-imidazol-1-yl)propyl)amino)octanoate (6) (242 mg, 0.478 mmol) and undecan-3-yl 8-bromooctanoate (12) (200 mg, 0.574 mmol) were mixed in ethanol (10 mL), then DIPEA (0.2 mL, 1.196 mmol) was added. The reaction mixture was heated to reflux overnight. Both MS (APCI) and TLC (10% MeOH+1% NH₄OH in CH₂Cl₂) showed the product and some unreacted starting material. The mixture was cooled to room temperature and concentrated. The crude residue was purified by flash chromatography (SiO₂: CH₂Cl₂=100% to 10% of methanol+1% NH₄OH in CH₂Cl₂) and colorless oil was obtained (35 mg, 10%).

[1568] ¹H NMR (300 MHz, CDCl₃): δ ppm 7.45 (s, 1H), 7.04 (s, 1H), 6.90 (s, 1H), 4.82 (m, 2H), 3.97 (t, J=6.8 Hz, 2H), 2.35 (m, 6H), 2.27 (t, J=3.8 Hz, 4H), 1.89 (m, 2H), 1.60-1.48 (m, 14H), 1.30-1.20 (m, 50H), 0.87 (m, 12H). MS (APCI+): 802.8

### 40.9 Synthesis of Heptadecan-9-yl 8-((3-(2-methyl-1H-imidazol-1-yl)propyl)(8-(nonyloxy)-8-oxooctyl)amino)octanoate (Lipid 10a-138)

[1569] Lipid 10a-138 is synthesized according to the scheme above. Reaction conditions are identical to Lipid 10a-137 with the exception of 3-(2-Methyl-1H-imidazol-1-yl)propan-1-amine as the imidazole amine.

[1570] ¹H NMR (300 MHz, CDCl3): δ ppm 6.89 (s, 1H), 6.81 (s, 1H), 4.82 (m, 2H), 3.86 (t, J=7.1 Hz, 2H), 2.38-2.3 (m, 9H), 2.27 (t, J=3.8 Hz, 4H), 1.84 (m, 2H), 1.60-1.37 (m, 14H), 1.30-1.20 (m, 50H), 0.87 (m, 12H). MS (APCI+): 816.8 (M+1).

[1571] 40.10 Synthesis of (((2-(2-Methyl-1H-imidazol-1-yl)ethyl)azanediyl)bis(hexane-6,1-diyl)bis(2-hexyldecanoate (Lipid 10a-139)

[1572] 40.10.1 Synthesis of 6-bromohexyl 2-hexyldecanoate (3)

[1573] To a mixture of 2-hexyldecanoic acid (1) (102 g, 0.398 mol) and 6-bromo-1-hexanol (2) (60 g, 0.331 mol) in CH₂Cl₂ (1 L) was added DMAP (8.1 g, 66 mmol), DIPEA (230 mL, 1.325 mol) and EDC (76 g, 0.398 mol). The reaction was stirred at room temperature overnight. After concentration of the reaction mixture, the crude residue was dissolved in ethyl acetate (1 L), washed with 1N HCl, sat. NaHCO₃, water and Brine. The organic layer was dried over anhydrous Na₂SO₄. The solvent was evaporated and the crude residue was purified by flash chromatography (SiO₂: Hexane=100% to 30% of EtOAc in Hexane) and colorless oil product 3 was obtained (67 g, 48%).

[1574] ¹H NMR (300 MHz, CDCl₃): δ ppm 4.06 (t, J=6.6 Hz, 2H), 3.4 (t, J=6.8 Hz, 2H), 2.3 (m, 1H), 1.86 (m, 2H), 1.64 (m, 2H), 1.5-1.4 (m, 2H), 1.35-1.2 (m, 26H) 0.87 (t, J=6.7 Hz, 6H).

### 40.10.2 Synthesis of 6-((3-(1H-imidazol-1-yl)butyl)amino)hexyl 2-hexyldecanoate (7a)

[1575] In a 100 mL round bottom flask connected with condenser, 6-bromohexyl 2-hexyldecanoate (3) (1.2 g, 2.87 mmol) and 3-(1H-imidazol-1-yl)butan-1-amine (7) (2 g, 14.37 mmol) were mixed in ethanol (20 mL). The reaction mixture was heated to reflux overnight. MS (APCI) showed the expected product. The mixture was cooled to room temperature and concentrated. The crude residue was purified by flash chromatography (SiO₂: CH₂Cl₂=100% to 10% of methanol+1% NH₄OH in CH₂Cl₂) and colorless oil product 7a was obtained (626 mg, 46%).

[1576] ¹H NMR (300 MHz, CDCl₃): δ ppm 7.51 (s, 1H), 7.05 (s, 1H), 6.93 (s, 1H), 4.35 (m, 1H), 4.04 (t, J=6.6 Hz, 2H), 2.6-2.4 (m, 4H), 2.29 (m, 1H), 1.94 (td, J=14, 6.8 Hz, 2H), 1.64-1.56 (m, 4H), 1.47 (s, 3H), 1.42-1.20 (m, 29H), 0.86 (m, 6H). MS (APCI⁺): 478.8 (M+1)

### 40.10.2 Synthesis of ((2-(2-Methyl-1H-imidazol-1-yl)ethyl)azanediyl)bis(hexane-6,1-diyl)bis(2-hexyldecanoate

[1577] In a 100 mL round bottom flask connected with condenser, 6-((3-(1H-imidazol-1 yl)butyl)amino)hexyl 2-hexyldecanoate (7a) (626 mg, 1.31 mmol) and 6-bromohexyl 2-hexyldecanoate (3) (550 mg, 1.31 mmol) were mixed in ethanol (20 mL), then DIPEA (0.6 mL, 3.276 mmol) was added. The reaction mixture was heated to reflux overnight. Both MS (APCI) and TLC (100% MeOH+1% NH₄OH in CH₂Cl₂) showed the product and unreacted starting material 7a. The mixture was cooled to room temperature and concentrated. The crude residue was purified by flash chromatography (SiO₂: CH₂Cl₂=100% to 10% of methanol+1% NH₄OH in CH₂Cl₂) and the obtained product was further purified by C18 reverse phase chromatography (H₂O=9500 to 0.10% TFA in CH₃CN=100%) colorless oil (TFA salt) was obtained (140 mg, 13%).

[1578] ¹H-NMR (300 MHz, CDCl₃): δ 6.87 (s, 1H), 6.83 (s, 1H), 4.05 (t, J=6.7 Hz, 4H), 3.84 (t, J=6.9 Hz, 2H), 2.66 (t, J=6.9 Hz, 2H), 2.45-2.20 (m, 6H), 2.37 (s, 3H), 1.65-1.50 (m, 8H), 1.5-1.1 (m, 56H), 0.86 (t, J=6.5 Hz, 12H). MS (APCI⁺): 802.6 (M+1).

### 40.11 Synthesis of (((1-Methyl-1H-imidazol-2-yl)methyl)azanediyl)bis(hexane-6,1-diuty bis(2-hexyldecanoate) (Lipid 10a-130)

[1579] Lipid 10a-130 is synthesized according to the scheme above. Reaction conditions are identical to Lipid 10a-139 with the exception of 3-(1H-imidazol-1-yl)butyl amine as the imidazole amine.

### 40.12 Synthesis of (((1-Methyl-1H-imidazol-2-yl)methyl)azanediyl)bis(hexane-6,1-diyl)bis(2-hexyldecanoate) (Lipid 10a-128)

[1580] Lipid 10a-128 is synthesized according to the scheme above. Reaction conditions are identical to Lipid 10a-139 with the exception of 1-Methyl-1H-imidazol-2-yl)methyl amine as the imidazole amine.

[1581] ¹H-NMR (300 MHz, CDCl₃): δ 6.89 (d, J=1.4 Hz, 1H), 6.81 (d, J=1.4 Hz, 1H), 4.03 (t, J=6.7 Hz, 4H), 3.68 (s, 3H), 3.62 (s, 2H), 2.45-2.20 (m, 6H), 1.65-1.50 (m, 8H), 1.5-1.35 (m, 8H), 1.35-1.10 (m, 48H), 0.86 (t, J=6.5 Hz, 12H). MS (APCI⁺): 787.6 (M+1).

### Example 41

Lipid Nanoparticle Formulation with Circular RNA

[1582] Lipid Nanoparticles (LNPs) were formed using a Precision Nanosystems Ignite instrument with a ‘NextGen’ mixing chamber. Ethanol phase contained ionizable Lipid 10a-26, DSPC, Cholesterol, and DSPE-PEG 2000 (Avanti Polar Lipids Inc.) at a weight ratio of 16:1:4:1 or 62:4:33:1 molar ratio was combined with an aqueous phase containing circular RNA and 25 mM sodium acetate buffer at pH 5.2. A 3:1 aqueous to ethanol mixing ratio was used. The formulated LNP then were dialyzed in 1 L of water and exchanged 2 times over 18 hours. Dialyzed LNPs were filtered using 0.2 μm filter. Prior to in vivo dosing, LNPs were diluted in PBS. LNP sizes were determined by dynamic light scattering. A cuvette with 1 mL of 20 μg/mL LNPs in PBS (pH 7.4) was measured for Z-average using the Malvern Panalytical Zetasizer Pro. The Z-average and polydispersity index were recorded.

### 41.1 Formulation of Lipids 10a-26 and 10a-27

[1583] Lipid Nanoparticles (LNPs) were formed using a Precision Nanosystems Ignite instrument with a ‘NextGen’ mixing chamber. Ethanol phase contained ionizable Lipid 10a-26 or Lipid 10a-27, DOPE, Cholesterol, and DSPE-PEG 2000 (Avanti Polar Lipids Inc.) at a weight ratio of 16:1:4:1 or 62:4:33:1 molar ratio was combined with an aqueous phase containing circular RNA and 25 mM sodium acetate buffer at pH 5.2. A 3:1 aqueous to ethanol mixing ratio was used. The formulated LNPs were then dialyzed in 1 L of water and exchanged 2 times over 18 hours. Dialyzed LNPs were filtered using 0.2 μm filter. Prior to in vivo dosing, LNPs were diluted in PBS. LNP sizes were determined by dynamic light scattering. A cuvette with 1 mL of 20 μg/mL LNPs in PBS (pH 7.4) was measured for Z-average using the Malvern Panalytical Zetasizer Pro. The Z-average and polydispersity index were recorded.

### 41.2 Formulation of Lipids 10a-53 and 10a-54

[1584] Lipid Nanoparticles (LNPs) were formed using a Precision Nanosystems Ignite instrument with a ‘NextGen’ mixing chamber. Ethanol phase contained ionizable Lipid 10a-53 or 10a-54, DOPE, Cholesterol, and DSPE-PEG 2000 (Avanti Polar Lipids Inc.) at a molar ratio of 50:10:38.5:1.5 was combined with an aqueous phase containing circular RNA and 25 mM sodium acetate buffer at pH 5.2. A 3:1 aqueous to ethanol mixing ratio was used. The formulated LNPs were then dialyzed in IL of 1×PBS and exchanged 2 times over 18 hours. Dialyzed LNPs were filtered using 0.2 μm filter. Prior to in vivo dosing, LNPs were diluted in PBS. LNP sizes were determined by dynamic light scattering. A cuvette with 1 mL of 20 μg/mL LNPs in PBS (pH 7.4) was measured for Z-average using the Malvern Panalytical Zetasizer Pro. The Z-average and polydispersity index were recorded.

[1585] LNP zeta potential was measured using the Malvern Panalytical Zetasizer Pro. A mixture containing 200 μL of the particle solution in water and 800 μL of distilled RNAse-free water with a final particle concentration of 400 μg/mL was loaded into a zetasizer capillary cell for analysis.

[1586] RNA encapsulation was determined using a Ribogreen assay. Nanoparticle solutions were diluted in tris-ethylenediaminetetraacetic acid (TE) buffer at a theoretical circRNA concentration of 2 μg/mL. Standard circRNA solutions diluted in TE buffer were made ranging from 2 μg/mL to 0.125 pg/mL. The particles and standards were added to all wells and a second incubation was performed (37° C. at 350 rpm for 3 minutes). Fluorescence was measured using a SPECTRAmax® GEMINI XS microplate spectrofluorometer. The concentration of circular RNA in each particle solution was calculated using the standard curve. The encapsulation efficiency was calculated from the ratio of circRNA detected between lysed and unlysed particles.

TABLE 22a
Characterization of LNPs

| | | | Encapsulation | Zeta Data |
|---|---|---|---|---|
| Ionizable Lipid | Size (nm) | PDI | Efficiency (%) | Potential (mV) |
| 22-S14 | 88 | 0.09 | 96 | 3.968 |
| 93-S14 | 119 | 0.02 | 96 | −6.071 |
| Lipid 10a-26 | 86 | 0.08 | 92 | −15.24 |

TABLE 22b
Characterization of LNPs

| Ionizable Lipid | Z-Average (nm) | PDI | RNA Entrapment (%) |
|---|---|---|---|
| 22-S14 | 64 | 0.05 | 97 |
| 93-S14 | 74 | 0.04 | 95 |
| Lipid 10a-26 | 84 | 0.04 | 96 |

### Example 42

### In Vivo Analysis

[1587] Female CD-1 or female c57BL/6J mice ranging from 22-25 g were dosed at 0.5 mg/kg RNA intravenously. Six hours after injection, mice were injected intraperitoneally with 200 μL of D-luciferin at 15 mg/mL concentration. 5 minutes after injection, mice were anesthetized using isoflurane, and placed inside the IVIS Spectrum In Vivo Imaging System (Perkin Elmer) with dorsal side up. Whole body total IVIS flux of Lipids 22-514, 93-514, Lipid 10a-26 is presented in FIG. 32A. Post 10 minutes injection, mice were scanned for luminescence. Mice were euthanized and organs were extracted within 25 minutes of luciferin injection to scan for luminescence in liver, spleen, kidneys, lungs, and heart. Images (FIGS. 33A-B, 34A-B, 35A-B) were analyzed using Living Images (Perkin Elmer) software. Regions of interest were drawn to obtain flux and average radiance and analyzed for biodistribution of protein expression (FIG. 32A-B).

[1588] FIG. 32A illustrates the increased whole-body total flux observed from luciferase circRNA with Lipid 10a-26 LNPs compared to LNPs made with lipids 22-514 and 93-S14. FIG. 32B shows the ex vivo IVIS analysis of tissues further highlighting the increased overall expression with Lipid 10a-26 while maintaining the desired spleen to liver ratios observed with lipids 22-S14 and 93-S14 despite the significant structural changes designed to improve expression. These data highlight the improvements afforded by Lipid 10a-26 compared to previously reported lipids.

[1589] Similar analysis as described above was also performed with circRNA encapsulated in LNPs formed with Lipid 10b-15 or Lipid 10a-53 or 10a-54. FIGS. 36A-C show the ex vivo IVIS analysis of tissues, respectively highlighting the overall expression with Lipid 10b-15, 10a-53, and 10a-54 while maintaining the desired spleen to liver ratios despite the significant structural changes designed to improve expression. FIG. 36D shows the results for PBS control. These data demonstrates the improvements afforded by Lipids 10b-15, 10a-53, and 10a-54 compared to previously reported lipids such as 93-S14 and 22-514.

### Example 43

### Delivery of Luciferase

[1590] Human peripheral blood mononuclear cells (PBMCs) (Stemcell Technologies) were transfected with lipid nanoparticles (LNP) encapsulating firefly luciferase (f.luc) circular RNA and examined for luciferase expression. PBMCs from two different donors were incubated in vitro with five different LNP compositions, containing circular RNA encoding for firefly luciferase (200 ng), at 37° C. in RPMI, 2% human serum, IL-2 (10 ng/mL), and 50 uM BME. PBMCs incubated without LNP were used as a negative control. After 24 hours, the cells were lysed and analyzed for firefly luciferase expression based on bioluminescence (Promega BrightGlo).

[1591] Representative data are presented in FIGS. 37A and 37B, showing that that the tested LNPs are capable of delivering circular RNA into primary human immune cells resulting in protein expression.

### Example 44

### In Vitro Delivery of Green Fluorescent Protein (GFP) or Chimeric Antigen Receptor (CAR)

[1592] Human PBMCs (Stemcell Technologies) were transfected with LNP encapsulating GFP and examined by flow cytometry. PBMCs from five different donors (PBMC A-E) were incubated in vitro with one LNP composition, containing circular RNA encoding either GFP or CD19-CAR (200 ng), at 37° C. in RPMI, 2% human serum, IL-2 (10 ng/mL), and 50 uM BME. PBMCs incubated without LNP were used as a negative control. After 24, 48, or 72 hours post-LNP incubation, cells were analyzed for CD3, CD19, CD56, CD14, CD11 b, CD45, fixable live dead, and payload (GFP or CD19-CAR).

[1593] Representative data are presented in FIGS. 38A and 38B, showing that the tested LNP is capable of delivering circular RNA into primary human immune cells resulting in protein expression.

### Example 45

### Multiple IRES Variants can Mediate Expression of Murine CD19 CAR In Vitro

[1594] Multiple circular RNA constructs, encoding anti-murine CD19 CAR, contains unique IRES sequences and were lipotransfected into 1C1C7 cell lines. Prior to lipotransfection, 1C1C7 cells are expanded for several days in complete RPMI Once the cells expanded to appropriate numbers, 1C1C7 cells were lipotransfected (Invitrogen RNAiMAX) with four different circular RNA constructs. After 24 hours, 1C1C7 cells were incubated with His-tagged recombinant murine CD19 (Sino Biological) protein, then stained with a secondary anti-His antibody. Afterwards, the cells were analyzed via flow cytometry.

[1595] Representative data are presented in FIGS. 39, showing that IRES sourced from the indicated virus (Apodemus agrarius picornavirus, caprine kobuvirus, parabovirus, and salivirus) are capable of driving expression of an anti-mouse CD19 CAR in murine T cells.

### Example 46

### Murine CD19 CAR Mediates Tumor Cell Killing In Vitro

[1596] Circular RNA encoding anti-mouse CD19 CAR were electroporated into murine T cells to evaluate CAR-mediated cytotoxicity. For electroporation, T cells were electroporated with circular RNA encoding anti-mouse CD19 CAR using ThermoFisher's Neon Transfection System then rested overnight. For the cytotoxicity assay, electroporated T cells were co-cultured with Fluc+ target and non-target cells at 1:1 ratio in complete RPMI containing 10% FBS, IL-2 (10 ng/mL), and 50 uM BME and incubated overnight at 37° C. Cytotoxicity was measured using a luciferase assay system 24 hours post-co-culture (Promega Brightglo Luciferase System) to detect lysis of Fluc+ target and non-target cells. Values shown are calculated relative to the untransfected mock signal.

[1597] Representative data are presented in FIG. 40, showing that an anti-mouse CD19 CAR expressed from circular RNA is functional in murine T cells in vitro.

### Example 47

Functional Depletion of B Cells with a Lipid Encapsulated Circular RNA Encoding Murine CD19 CAR

[1598] C₅₇BL/6J mice were injected with LNP formed with Lipid 10b-15, encapsulating circular RNA encoding anti-murine CD19 CAR. As a control, Lipid 10b-15 encapsulating circular RNA encoding firefly luciferase (f.Luc) were injected in different group of mice. Female C57BL.6J, ranging from 20-25 g, were injected intravenously with 5 doses of 0.5 mg/kg of LNP, every other day. Between injections, blood draws were analyzed via flow cytometry for fixable live/dead, CD45, TCRvb, B220, CD11b, and anti-murine CAR. Two days after the last injection, spleens were harvested and processed for flow cytometry analysis. Splenocytes were stained with fixable live/dead, CD45, TCRvb, B220, CD11b, NK1.1, F4/80, CD11c, and anti-murine CAR. Data from mice injected with anti-murine CD19 CAR LNP were normalized to mice that received f.Luc LNP.

[1599] Representative data are presented in FIGS. 41A, 41B, and 41C, showing that an anti-mouse CD19 CAR expressed from circular circRNA delivered in vivo with LNPs is functional in murine T cells in vivo.

### Example 48

CD19 CAR Expressed from Circular RNA has Higher Yield and Create Cytotoxic Effect Compared to that Expressed from mRNA

[1600] Circular RNA encoding anti-CD19 chimeric antigen receptor, which includes, from N-terminus to C-terminus, a FMC63-derived scFv, a CD8 transmembrane domain, a 4-1BB costimulatory domain, and a CD3ζ intracellular domain, were electroporated into human peripheral T cells to evaluate surface expression and CAR-mediated cytotoxicity. For comparison, circular RNA-electroporated T cells were compared to mRNA-electroporated T cells in this experiment. For electroporation, CD3+ T cells were isolated from human PBMCs using commercially available T cell isolation kits (Miltenyi Biotec) from donor human PBMCs. After isolation, T cells were stimulated with anti-CD3/anti-CD28 (Stemcell Technologies) and expanded over 5 days at 37° C. in complete RPMI containing 10% FBS, IL-2 (10 ng/mL), and 50 uM BME. Five days post stimulation, T cells were electroporated with circular RNA encoding anti-human CD19 CAR using ThermoFisher's Neon Transfection System and then rested overnight. For the cytotoxicity assay, electroporated T cells were co-cultured with Fluc+ target and non-target cells at 1:1 ratio in complete RPMI containing 10% FBS, IL-2 (10 ng/mL), and 50 uM BME and incubated overnight at 37° C. Cytotoxicity was measured using a luciferase assay system 24 hours post-co-culture (Promega Brightglo Luciferase System) to detect lysis of Fluc+ target and non-target cells. Furthermore, an aliquot of electroporated T cells were taken and stained for live dead fixable staining, CD3, CD45, and chimeric antigen receptors (FMC63) at the day of analysis.

[1601] Representative data are presented in FIGS. 42 and 43. FIGS. 42A and 42B show that an anti-human CD19 CAR expressed from circular RNA is expressed at higher levels and longer than an anti-human CD19 CAR expressed from linear mRNA. FIGS. 43A and 43B show that an anti-human CD19 CAR expressed from circular RNA is exerts a greater cytotoxic effect relative a to anti-human CD19 CAR expressed from linear mRNA.

### Example 49

Functional Expression of Two CARs from a Single Circular RNA

[1602] Circular RNA encoding chimeric antigen receptors were electroporated into human peripheral T cells to evaluate surface expression and CAR-mediated cytotoxicity. The purpose of this study is to evaluate if circular RNA encoding for two CARs can be stochastically expressed with a 2A (P2A) or an IRES sequence. For electroporation, CD3+ T cells were commercially purchased (Cellero) and stimulated with anti-CD3/anti-CD28 (Stemcell Technologies) and expanded over 5 days at 37° C. in complete RPMI containing 10% FBS, IL-2 (10 ng/mL), and 50 uM BME. Four days post stimulation, T cells were electroporated with circular RNA encoding anti-human CD19 CAR, anti-human CD19 CAR-2A-anti-human BCMA CAR, and anti-human CD19 CAR-IRES-anti-human BCMA CAR using ThermoFisher's Neon Transfection System then rested overnight. For the cytotoxicity assay, electroporated T cells were co-cultured with Fluc+K562 cells expressing human CD19 or BCMA antigens at 1:1 ratio in complete RPMI containing 10% FBS, IL-2 (10 ng/mL), and 50 uM BME and incubated overnight at 37° C. Cytotoxicity was measured using a luciferase assay system 24 hours post-co-culture (Promega BrightGlo Luciferase System) to detect lysis of Fluc+ target cells.

[1603] Representative data are presented in FIG. 44, showing that two CARs can be functionally expressed from the same circular RNA construct and exert cytotoxic effector function.

### Example 50

### In Vivo Circular RNA Transfection Using Cre Reporter Mice

[1604] Circular RNAs encoding Cre recombinase (Cre) are encapsulated into lipid nanoparticles as previously described. Female, 6-8 week old B6.Cg-Gt(ROSA)26Sortm9(CAG-tdTomato)Hze/J (Ai9) mice were dosed with lipid nanoparticles at 0.5 mg/kg RNA intravenously. Fluorescent tdTomato protein was transcribed and translated in Ai9 mice upon Cre recombination, meaning circular RNAs have been delivered to and translated in tdTomato+ cells. After 48 hr, mice were euthanized and the spleens were harvested, processed into a single cell suspension, and stained with various fluorophore-conjugated antibodies for immunophenotyping via flow cytometry.

[1605] FIG. 45A shows representative FACS plots with frequencies of tdTomato expression in various spleen immune cell (CD45+, live) subsets, including total myeloid (CD11b+), B cells (CD19+), and T cells (TCR-B+) following treatment with LNPs formed with Lipid 10a-27 or 10a-26 or Lipid 10b-15. Ai9 mice injected with PBS represented background tdTomato fluorescence. FIG. 45B quantifies the proportion of myeloid cells, B cells, and T cells expressing tdTomato (mean+std. dev., n=3), which is equivalent to the proportion of each cell population which has been successfully transfected with Cre circular RNA. LNPs made with Lipids 10a-27 and 10a-26 exhibit significantly higher myeloid and T cell transfection compared with Lipid 93-S14, highlighting the improvements conferred by lipid structural modifications.

[1606] FIG. 45C illustrates the proportion of additional splenic immune cell populations expressing tdTomato with Lipids 10a-27 and 10a-26 (mean+std. dev., n=3), which also include NK cells (NKp46+, TCR-B—), classical monocytes (CD11b+, Ly-6G−, Ly-6C_hi), nonclassical monocytes (CD11b+, Ly-6G−, Ly-6C_lo), neutrophils (CD11b+, Ly-6G+), and dendritic cells (CD11c+, MHC-II+). These experiments demonstrate that LNPs made with Lipids 10a-27 and 10a-26 and Lipid 10b-15 are effective at delivering circular RNAs to many splenic immune cell subsets in mice and lead to successful protein expression from the circular RNA in those cells.

### Example 51

### Example 51A: Built-In polyA Sequences and Affinity-Purification to Produce Immune-Silent Circular RNA

[1607] PolyA sequences (20-30 nt) were inserted into the 5′ and 3′ ends of the RNA construct (precursor RNA with built-in polyA sequences in the introns). See, for example, FIG. 97A. Precursor RNA and introns can alternatively be polyadenylated post-transcriptionally using, e.g., E coli. polyA polymerase or yeast polyA polymerase, which requires the use of an additional enzyme.

[1608] Circular RNA in this example was circularized by in vitro transcription (IVT) and affinity-purified by washing over a commercially available oligo-dT resin to selectively remove polyA-tagged sequences (including free introns and precursor RNA) from the splicing reaction. See, for example, FIG. 98. The IVT was performed with a commercial IVT kit (New England Biolabs) or a customerized IVT mix (Orna Therapeutics), containing guanosine monophosphate (GMP) and guanosine triphosphate (GTP) at different ratios (GMP:GTP=8, 12.5, or 13.75). In some embodiments, GMP at a high GMP:GTP ratio may be preferentially included as the first nucleotide, yielding a majority of monophosphate-capped precursor RNAs. As a comparison, the circular RNA product was alternatively purified by the treatment with Xrn1, Rnase R, and Dnase I (enzyme purification). See, for example, FIG. 100.

[1609] Immunogenicity of the circular RNAs prepared using the affinity purification or enzyme purification process were then assessed. Briefly, the prepared circular RNAs were transfected into A549 cells. After 24 hours, the cells were lysed and interferon beta-1 induction relative to mock samples was measured by qPCR. 3p-hpRNA, a triphosphorylated RNA, was used as a positive control.

[1610] FIGS. 46B and 46C and FIGS. 99A and 99B show that the negative selection affinity purification removes non-circular products from splicing reactions when polyA sequences are included on elements that are removed during splicing and present in unspliced precursor molecules. FIG. 46D shows circular RNAs prepared with tested IVT conditions and purification methods are all immunoquiescent. These results suggest the negative selection affinity purification is equivalent or superior to enzyme purification for circular RNA purification and that customized circular RNA synthesis conditions (IVT conditions) may reduce the reliance on GMP excess to achieve maximal immunoquiescence.

### Example 51B: Dedicated Binding Site and Affinity-Purification for Circular RNA Production

[1611] Instead of polyA tags, one can include specifically design sequences (DBS, dedicated binding site). See, for example, FIG. 47A.

[1612] Instead of a polyA tag, a dedicated binding site (DBS), such as a specifically designed complementary oligonucleotide that can bind to a resin, may be used to selectively deplete precursor RNA and free introns. In this example, DBS sequences (30 nt) were inserted into the 5′ and 3′ ends of the precursor RNA, such as TATAATTCTACCCTATTGAGGCATTGACTA (3667), shown in FIG. 47A. RNA was transcribed and the transcribed product was washed over a custom complementary oligonucleotide linked to a resin.

[1613] FIGS. 47B and 47C demonstrates that including the designed DBS sequence in elements that are removed during splicing enables the removal of unspliced precursor RNA and free intron components in a splicing reaction, via negative affinity purification.

### Example 51C: Production of a Circular RNA Encoding Dystrophin

[1614] A 12 kb 12,000 nt circular RNA encoding dystrophin was produced by in vitro transcription of RNA precursors followed by enzyme purification using a mixture of Xrn1, DNase 1, and RNase R to degrade remaining linear components. FIG. 48 shows that the circular RNA encoding dystrophin was successfully produced.

### Example 51D: Negative Selection Affinity-Purification of Circular RNA

[1615] Affinity sequences are added to precursor RNAs, and circular RNA is produced by in vitro transcription (IVT), as described in Examples 51A and 51B. Oligonucleotides comprising a sequence that is 100% complementary to the affinity sequences are conjugated to a resin, or a commercially available resin conjugated to oligonucleotides complementary to the affinity sequences is obtained. The IVT reaction mixture may be directly added to the resin. Alternatively, the IVT reaction solution is buffer exchanged into binding buffer, such as a Tris buffer, comprising greater than 1 mM one or more monovalent salts, such as NaCl or KCl, or the one or more monovalent salts are simply added to the IVT reaction mixture before the IVT reaction mixture is added to the resin. Circular RNA that does not comprise an affinity sequence is then affinity-purified by washing the solution comprising linear RNA and circular RNA over the resin. The solution may be heated during this process in order to denature aberrantly hybridized sequences. The eluent from the beads is collected and buffer exchanged into water or storage buffer comprising 1 mM sodium citrate, pH 6.5, using a filtration threshold of 10-300 kDa.

### Example 52

### 5′ Spacer Between 3′ Intron Fragment and the IRES Improves Circular RNA Expression

[1616] Expression level of purified circRNAs with different 5′ spacers between the 3′ intron fragment and the IRES in Jurkat cells were compared. Briefly, luminescence from secreted Gaussia luciferase in supernatant was measured 24 hours after electroporation of 60,000 cells with 250 ng of each RNA.

[1617] Additionally, stability of purified circRNAs with different 5′ spacers between the 3′ intron fragment and the IRES in Jurkat cells were compared. Briefly, luminescence from secreted Gaussia luciferase in supernatant was measured over 2 days after electroporation of 60,000 cells with 250 ng of each RNA and normalized to day 1 expression.

[1618] The results are shown in FIGS. 49A and 49B, indicating that adding a spacer can enhance IRES function and the importance of sequence identity and length of the added spacer. A potential explanation is that the spacer is added right before the IRES and likely functions by allowing the IRES to fold in isolation from other structured elements such as the intron fragments.

### Example 53

[1619] This example describes deletion scanning from 5′ or 3′ end of the caprine kobuvirus IRES. IRES borders are generally poorly characterized and require empirical analysis, and this example can be used for locating the core functional sequences required for driving translation. Briefly, circular RNA constructs were generated with truncated IRES elements operably linked to a Gaussia luciferase coding sequence. The truncated IRES elements had nucleotide sequences of the indicated lengths removed from the 5′ or 3′ end. Luminescence from secreted Gaussia luciferase in supernatant was measured 24 and 48 hours after electroporation of primary human T cells with RNA. Stability of expression was calculated as the ratio of the expression level at the 48-hour time point relative to that at the 24-hour time point.

[1620] As shown in FIG. 50, deletion of more than 40 nucleotides from the 5′ end of the IRES reduced expression and disrupted IRES function. Stability of expression was relatively unaffected by the truncation of the IRES element but expression level was substantially reduced by deletion of 141 nucleotides from the 3′ end of the IRES, whereas deletion of 57 or 122 nucleotides from the 3′ end had a positive impact on the expression level.

[1621] It was also observed that deletion of the 6-nucleotide pre-start sequence reduced the expression level of the luciferase reporter. Replacement of the 6-nucleotide sequence with a classical kozak sequence (GCCACC) did not have a significant impact but at least maintained expression.

### Example 54

[1622] This example describes modifications (e.g., truncations) of selected IRES sequences, including Caprine Kobuvirus (CKV) IRES, Parabovirus IRES, Apodemus Picornavirus (AP) IRES, Kobuvirus SZAL6 IRES, Crohivirus B (CrVB) IRES, CVB3 IRES, and SAFV IRES. The sequences of the IRES elements are provided in SEQ ID NOs: 348-389. Briefly, circular RNA constructs were generated with truncated IRES elements operably linked to a Gaussia luciferase coding sequence. HepG2 cells were transfected with the circular RNAs. Luminescence in the supernatant was assessed 24 and 48 hours after transfection. Stability of expression was calculated as the ratio of the expression level at the 48-hour time point relative to that at the 24-hour time point.

[1623] As shown in FIG. 51, truncations had variable effects depending on the identity of the IRES, which may depend on the initiation mechanism and protein factors used for translation, which often differs between IRESs. 5′ and 3′ deletions can be effectively combined, for example, in the context of CKV IRES. Addition of a canonical Kozak sequence in some cases significantly improved expression (as in SAFV, Full vs Full+K) or diminished expression (as in CKV, 5d40/3d122 vs 5d40/3d122+K).

### Example 55

[1624] This example describes modifications of CK-739, AP-748, and PV-743 IRES sequences, including mutations altative translation initiation sites. Briefly, circular RNA constructs were generated with modified IRES elements operably linked to a Gaussia luciferase coding sequence. Luminescence from secreted Gaussia luciferase in supernatant was measured 24 and 48 hours after transfection of 1C1C7 cells with RNA.

[1625] CUG was the most commonly found alternative start site but many others were also characterized. These triplets can be present in the IRES scanning tract prior to the start codon and can affect translation of correct polypeptides. Four alternative start site mutations were created, with the IRES sequences provided in SEQ ID NOs: 378-380. As shown in FIG. 52, mutations of alternative translation initiation sites in the CK-739 IRES affected translation of correct polypeptides, positively in some instances and negatively in other instances. Mutation of all the alternative translation initiation sites reduced the level of translation.

[1626] Alternative Kozak sequences, 6 nucleotides before start codon, can also affect expression levels. The 6-nucleotide sequence upstream of the start codon were gTcacG, aaagtc, gTcacG, gtcatg, gcaaac, and acaacc, respectively, in CK-739 IRES and Sample Nos. 1-5 in the “6nt Pre-Start” group. As shown in FIG. 52, substitution of certain 6-nucleotide sequences prior to the start codon affected translation.

[1627] It was also observed that 5′ and 3′ terminal deletions in AP-748 and PV-743 IRES sequences reduced expression. However, in the CK-739 IRES, which had a long scanning tract, translation was relatively unaffected by deletions in the scanning tract.

### Example 56

[1628] This example describes modifications of selected IRES sequences by inserting 5′ and/or 3′ untranslated regions (UTRs) and creating IRES hybrids. Briefly, circular RNA constructs were generated with modified IRES elements operably linked to a Gaussia luciferase coding sequence. Luminescence from secreted Gaussia luciferase in supernatant was measured 24 and 48 hours after transfection of HepG2 cells with RNA.

[1629] IRES sequences with UTRs inserted are provided in SEQ ID NOs: 390-401. As shown in FIG. 53, insertion of 5′ UTR right after the 3′ end of the IRES and before the start codon slightly increased the translation from Caprine Kobuvirus (CK) IRES but in some instances abrogated translation from Salivirus SZ1 IRES. Insertion of 3′ UTR right after the stop cassette had no impact on both IRES sequences.

[1630] Hybrid CK IRES sequences are provided in SEQ ID NOs: 390-401. CK IRES was used as a base, and specific regions of the CK IRES were replaced with similar-looking structures from other IRES sequences, for example, SZ1 and AV (Aichivirus). As shown in FIG. 53, certain hybrid synthetic IRES sequences were functional, indicating that hybrid IRES can be constructed using parts from distinct IRES sequences that show similar predicted structures while deleting these structures completely abrogates IRES function.

### Example 57

[1631] This example describes modifications of circular RNAs by introducing stop codon or cassette variants. Briefly, circular RNA constructs were generated with IRES elements operably linked to a Gaussia luciferase coding sequence followed by variable stop codon cassettes, which included a stop codon in each frame and two stop codons in the reading frame of the Gaussia luciferase coding sequence. 1C1C7 cells were transfected with the circular RNAs. Luminescence in supernatant was assessed 24 and 48 hours after transfection.

[1632] The sequences of the stop codon cassettes are set forth in SEQ ID NOs: 3600-3606. As shown in FIG. 54, certain stop codon cassettes improved expression levels, although they had little impact on expression stability. In particular, a stop cassette with two frame 1 (the reading frame of the Gaussia luciferase coding sequence) stop codons, the first being TAA, followed by a frame 2 stop codon and a frame 3 stop codon, is effective for promoting functional translation.

### Example 58

[1633] This example describes modifications of circular RNAs by inserting 5′ UTR variants. Briefly, circular RNA constructs were generated with IRES elements with 5′ UTR variants inserted between the 3′ end of the IRES and the start codon, the IRES being operably linked to a Gaussia luciferase coding sequence. 1C1C7 cells were transfected with the circular RNAs. Luminescence in supernatant was assessed 24 and 48 hours after transfection.

[1634] The sequences of the 5′ UTR variants are set forth in SEQ ID NOs: 3596-3599. As shown in FIG. 55, a CK IRES with a canonical Kozak sequence (UTR4) was more effective when a 36-nucleotide unstructured/low GC spacer sequence was added (UTR2), suggesting that the GC-rich Kozak sequences may interfere with core IRES folding. Using a higher-GC/structured spacer with a kozak sequence did not show the same benefit (UTR3), possibly due to interference with IRES folding by the spacer itself. Mutating the kozak sequence to gTcacG (UTR1) enhanced translation to the same level as the Kozak+ spacer alternative without the need for a spacer.

### Example 59

[1635] This example describes the impact of miRNA target sites in circular RNAs on expression levels. Briefly, circular RNA constructs were generated with IRES elements operably linked to a human erythropoietin (hEPO) coding sequence, where 2 tandem miR-122 target sites were inserted into the construct. miR-122-expressing Huh7 cells were transfected with the circular RNAs. hEPO expression in supernatant was assessed 24 and 48 hours after transfection by sandwich ELISA.

[1636] As shown in FIG. 56, the hEPO expression level was abrogated where the miR-122 target sites were inserted into the circular RNA. This result demonstrates that expression from circular RNA can be regulated by miRNA. As such, cell type- or tissue-specific expression can be achieved by incorporating target sites of the miRNAs expressed in the cell types in which expression of the recombinant protein is undesirable.

### Example 60

[1637] This example shows transfection of human tumor cells by LNPs in vitro. SupT1 cells (a human T cell tumor line) and MV4-11 cells (a human macrophage tumor line) were plated at 100,000 cells/well and 100,000 cells/well, respectively, in a 96-well plate overnight. Then, LNPs containing circRNA coding for Firefly Luciferase (FLuc) were added to the cells at 200 ng RNA/well. After 24-hour incubation, luminescence was quantified using the Bright-Glo Luciferase Assay System (Promega) according to manufacturer's instructions and background luminescence from cells not treated with LNP was subtracted. FIG. 57 quantifies the measured Firefly luminescence, indicating that LNPs comprising Lipid 10a-27 (10a-27 (4.5D) LNP, see Example 70) or Lipid 10a-26 (10a-26 (4.5D) LNP, see Example 70) can transfect and express circRNA in both human T cell and macrophage tumor lines in vitro. 10a-27 (4.5D) LNP resulted in higher luminescence than 10a-26 (4.5D) LNP showing that levels of transfection of LNPs to human tumor cells can be affected by formulation.

### Example 61

[1638] This example shows transfection of primary human activated T cells in vitro. Primary human T cells from independent donors were stimulated with aCD3/aCD28 and allowed to proliferate for 6 days in the presence of human serum and IL-2. Then, 100,000 cells were plated in a 96 well plate and LNPs containing circRNA coding for Firefly Luciferase (FLuc) were added to the cells at 200 ng RNA/well with or without Apolipoprotein E3 (ApoE3). After 24-hour incubation, luminescence was quantified using the Bright-Glo Luciferase Assay System (Promega) according to manufacturer's instructions and background luminescence from cells not treated with LNPs was subtracted. FIG. 58 shows the measured Firefly luminescence across 4 independent donors, demonstrating that all LNPs tested transfect primary human T cells in vitro. LNPs containing Lipid 10a-27 generally produced higher luminescence than those containing Lipid 10a-26. Furthermore, the addition of ApoE3 generally increased the expression of luciferase more for 10a-27 (5.7A) and 10a-26 (5.7A) (average of 4.4-fold and 9.3-fold across 4 donors, respectively) compared to 10a-27 (4.5D) and 10a-26 (4.5D) (3.1-fold and 2.6-fold, respectively). This suggests that the helper lipid, PEG lipid, and ionizable lipid:phosphate ratio all contribute to the ApoE-dependence of different formulations made with the same ionizable lipids. (See Example 70 for LNP formulation procedure, e.g., for 10a-27 (5.7A), 10a-26 (5.7A), 10a-27 (4.5D), and 10a-26 (4.5D) LNPs.)

### Example 62

[1639] This example shows that different tail chemistries of LNPs result in different uptake mechanisms into T cells. To quantify the percent of human T cells expressing circRNA, LNPs containing eGFP circRNA were added to activated primary human T cells (prepared as described above in Example 61) at 200 ng RNA/well with or without ApoE3. After 24-hour incubation, cells were analyzed by flow cytometry and the percentage of live, GFP+ T cells was quantified. FIG. 59 graphs the % GFP+ T cells for 2 independent donors, with 5-10% of cells being GFP+ for LNP containing Lipid 10a-27 (10a-27 (4.5D) LNP, see Example 70) and for LNP containing Lipid 10a-46 (10a-46 (5.7A) LNP, see Example 70). Although ApoE3 addition resulted in increased transfection for 10a-27 (4.5D) LNP, it did not appear to increase transfection for 10a-46 (5.7A) LNP, suggesting the different tail chemistries between Lipids 10a-27 and 10a-46 may mediate different uptake mechanisms into T cells.

### Example 63

[1640] This example describes immune cell expression of Cre in a Cre reporter mouse model.

[1641] Ai9 mice (B6.Cg-Gt(ROSA)26Sortm9(CAG-tdTomato)Hze/J, female, 6-8 weeks, n=3 per group) were injected i.v. with 0.5 mg/kg Cre circRNA LNPs or PBS. Ai9 mice transcribe and translate the fluorescent reporter tdTomato upon Cre recombination; meaning cells which are tdTomato+ have successfully been transfected with Cre circRNA. After 48 hours, mice were euthanized and their spleens were collected and manually processed into single cell suspensions. The splenocytes were stained for dead cells (LiveDead Fixable Aqua, Thermo) and with anti-mouse antibodies (TCR-B chain, BV421, H57-597; CD45, BV711, 30—F11; CD11b, BV785, ICRF44; NKp46, AF647, 29A1.4; CD19, APC/750, 6D5; TruStain FcX, 93; all antibodies from Biolegend) at 1:200 ratio. Flow cytometry was performed using an Attune Nxt Flow Cytometer (Thermo).

[1642] The percent of tdTomato+ cells in splenic myeloid cells (CD11b+), B cells (CD19+), and T cells (TCR-B+) is presented in FIG. 60. Lipid 10a-27 and Lipid 10a-46 differ only by their tail chemistries, and formulations made with Lipid 10a-27 transfect significantly more splenic immune cells than those made with Lipid 10a-46. Additionally, 10a-27 (4.5D) LNP (see Example 70) formulated with Cre circRNA transfected approximately twice as many T cells than those formulated with Cre linear mRNA, suggesting that circRNA may result in improved protein expression in splenic T cells compared to linear mRNA.

TABLE 23
Characterization of LNPs

| | Z-Average | | RNA Encapsulation |
|---|---|---|---|
| Formulation | (nm) | PDI | Efficiency (%) |
| 10a-27 (4.5D), Study 1 | 65 | 0.07 | 96 |
| 10a-26 (4.5D), Study 1 | 74 | 0.06 | 94 |
| 10a-27 (4.5D), with mCre, | 75 | 0.05 | 93 |
| Study 1 | | | |
| 10a-46 (5.7A), Study 2 | 86 | 0.01 | 94 |

### Example 64

[1643] This example shows immune cell expression of mOX40L circRNA in wildtype mice.

[1644] C57BL/6 mice (female, 6-8 weeks, n=3 or 4 per group) were injected intravenously with 0.5 mg/kg mOX40L circRNA LNPs or PBS. After 24 hours, mice were euthanized and their spleens were collected and manually processed into single cell suspensions. Splenocytes were stained for dead cells (LiveDead Fixable Aqua, Thermo) and with anti-mouse antibodies (TCR-B chain, PacBlue, H57-597; CD11b, FITC, ICRF44; B220, PE, RA3-6B2; CD45, PerCP, 30-F11; mOX40L, AF647, RM134L; NK1.1, APC/750, PK136; TruStain FcX, 93; all antibodies from Biolegend) at 1:200. Flow cytometry was performed using an Attune NxT Flow Cytometer (Thermo).

[1645] The percent of mOX40L+ cells in splenic myeloid (CD11b+), T cells (TCR-B+), and NK cells (NK1.1+) is presented in FIG. 61. Notably, significantly different transfection efficiencies are observed between the same formulations injected intravenously in different buffers (hypotonic PBS, isotonic PBS, and isotonic TBS). 10a-27 4.5D LNP in hypotonic PBS results in approximately 14% myeloid cell transfection, 6% T cell transfection, and 21% NK cell transfection in the spleen. Of the formulations injected in isotonic buffer, 10a-27 DSPC 5.7A LNP demonstrates myeloid, T cell, and NK cell transfection in the spleen (9%, 3%, and 8%, respectively). (See Example 70 for LNP formulation procedure, e.g., for 10a-27 (4.5D) LNP and 10a-27 DSPC (5.7A) LNP.)

TABLE 24
Characterization of LNPs

| | | | RNA Encapsulation |
|---|---|---|---|
| Formulation | Z-Average (nm) | PDI | Efficiency (%) |
| 10a-27 (4.5D) | 63 | 0.02 | 93 |
| 10a-26 (4.5D) | 67 | 0.07 | 94 |
| 10a-27 DSPC (5.7A) | 82 | 0.05 | 96 |

### Example 65

[1646] This example shows single dose escalation of mOX40L circRNA-LNPs in wildtype mice.

[1647] 57BL/6 mice (female, 6-8 weeks, n=3 per group) were injected intravenously with 1 mg/kg or 3 mg/kg mOX40L circRNA LNPs or buffer control. After 24 hours, mice were euthanized and their spleens were collected and manually processed into single cell suspensions. Splenocytes were stained for dead cells (LiveDead Fixable Blue, Thermo) and stained with anti-mouse antibodies (TCR-B chain, BV421, H57-597; CD19, BV605, 6D5; CD45, BV711, 30—F11; CD11b, BV785, ICRF44; CD11c, FITC, N418; CD8a, PerCP, 53-6.7; mOX40L, PE, RM134L; NKp46, AF647, 29A1.4; CD4, APC/750, GK1.5; TruStain FcX, 93; all antibodies from Biolegend) at 1:200. Flow cytometry was performed using a BD FACSSymphony flow cytometer.

[1648] The percent of mOX40L+ cells in splenic T cells (all TCR-B+), CD4+ T cells (TCR-B+, CD4+), CD8+ T cells (TCR-B+, CD8a+), B cells (CD19+), NK cells (NKp46+), dendritic cells (CD11c+), and other myeloid cells (CD11b+, CD11c−) are shown in FIG. 62A and FIG. 62B, with corresponding mouse weight change after 24 hours shown in FIG. 62C. A dose-dependent increase in immune cell subset transfection is observed across 1 mg/kg and 3 mg/kg for all groups, with the exception of 10a-27 (4.5D) LNP 1×PBS group. At the 3 mg/kg dose, three different LNPs (10a-27 (4.5D) in TBS, 10a-26 (4.5D) in PBS, and 10a-27 DSPC (5.7A) in TBS; see Example 70 for formulation procedures) achieve 10-20% mOX40L transfection in splenic T cells, with similar transfection rates observed among CD4+ and CD8+ subsets. These three formulations also result in approximately 20% B cell, 60-70% dendritic cell, 60-70% NK cell, and 30-40% other myeloid cell mOX40L transfection in the spleen at 3 mg/kg. These three formulations lead to only minor (0-3%) mouse weight loss at 24 hours at the 3 mg/kg single dose with no reported clinical observations.

TABLE 25
Characterization of LNPs

| | | | RNA Encapsulation |
|---|---|---|---|
| Formulation | Z-Average (nm) | PDI | Efficiency (%) |
| 10a-27 (4.5D) | 76 | 0.06 | 91 |
| 10a-26 (4.5D) | 67 | 0.01 | 88 |
| 10a-27 DSPC (5.7A) | 77 | 0.01 | 93 |

### Example 66

[1649] This example shows circRNA-LNP CAR-mediated B cell depletion in mice.

[1650] C57BL/6 mice (female, 6-8 weeks, n=5 per group) were injected intravenously with 0.5 mg/kg aCD19-CAR circRNA LNPs or control FLuc circRNA LNPs on Days 0, 2, 5, 7, and 9. On Days −1, 1, 8 and 12, submandibular bleeds were performed to collect blood. 30 μL of blood was lysed with ACK lysis buffer and washed with MACS buffer to isolate immune cells. On Day 12, mice were euthanized and their spleens were collected and manually processed into single cell suspensions. To assess the frequency of B cells in the blood and spleen, these single cell suspensions were stained for dead cells (LiveDead Fixable Aqua, Thermo) and stained with anti-mouse antibodies (TCR-B chain, PacBlue, H57-597; CD11b, FITC, ICRF44; B220, PE, RA3-6B2; CD45, PerCP, 30-F11; TruStain FcX, 93; all antibodies from Biolegend) at 1:200. Flow cytometry was performed using an Attune NxT Flow Cytometer (Thermo).

[1651] FIG. 63A quantifies the B cell depletion observed in this study, as defined by percentage of B220+ B cells of live, CD45+ immune cells. The B cell depletion in the aCD19-CAR circRNA LNP group was compared to its respective FLuc circRNA LNP control on Days 8 and 12 (for blood) and Day 12 (for spleen). In the blood, aCD19-CAR 10a-27 (4.5D) and 10a-26 (4.5D) LNPs resulted in approximately 28% and 17% reductions, respectively, in % B220+ of live CD45+ at Day 8 compared to FLuc control. In the spleen, aCD19-CAR 10a-27 (4.5D) and 10a-26 (4.5D) LNPs resulted in approximately 5% and 9% reductions in % B220+ of live CD45+ at Day 12 compared to FLuc control as shown in FIG. 63B. In all, these results suggest that CAR-mediated B cell depletion is occurring in mice treated with aCD19-CAR circRNA LNPs for Lipid 10a-27 (4.5D) and Lipid 10a-26 (4.5D).

[1652] In addition, FIG. 63C shows the percent weight gain of mice in this study. There was not significant weight loss on average from the 10a-27 4.5D or 10a-26 4.5D LNP treated mice (5×0.5 mg/kg over 9 days), suggesting that these LNPs may be well-tolerated in mice at this dose and schedule.

TABLE 26
Characterization of LNPs

| | Z-Average | | RNA Encapsulation |
|---|---|---|---|
| Formulation | (nm) | PDI | Efficiency (%) |
| 10a-27 (4.5D), oLuc | 65 | 0.03 | 93 |
| 10a-27 (4.5D), oaCD19-CAR | 74 | 0.02 | 96 |
| 10a-26 (4.5D), oLuc | 71 | 0.04 | 91 |
| 10a-26, (4.5D), oaCD19-CAR | 71 | 0.04 | 93 |

### Example 67

[1653] LNP and circular RNA construct containing anti-CD19 CAR reduces B cells in the blood and spleen in vivo.

[1654] Circular RNA constructs encoding an anti-CD19 CAR expression were encapsulated within lipid nanoparticles as described above. For comparison, circular RNAs encoding luciferase expression were encapsulated within separate lipid nanoparticle.

[1655] C57BL/6 mice at 6 to 8 weeks old were injected with either LNP solution every other day for a total of 4 LNP injections within each mouse. 24 hours after the last LNP injection, the mice's spleen and blood were harvested, stained, and analyzed via flow cytometry. As shown in FIG. 64A and FIG. 64B, mice containing LNP-circular RNA constructs encoding an anti-CD19 CAR led to a statistically significant reduction in CD19+ B cells in the peripheral blood and spleen compared to mice treated with LNP-circular RNA encoding a luciferase.

### Example 68

IRES Sequences Contained within Circular RNA Encoding CARs Improves CAR Expressions and Cytotoxicity of T-Cells.

[1656] Activated murine T-cells were electroporated with 200 ng of circular RNA constructs containing a unique IRES and a murine anti-CD19 1Dζ CAR expression sequence. The IRES contained in these constructs were derived either in whole or in part from a Caprine Kobuvirus, Apodemus Picornavirus, Parabovirus, or Salivirus. A Caprine Kobuvirus derived IRES was additionally codon optimized. As a control, a circular RNA containing a wild-type zeta mouse CAR with no IRES was used for comparison. The T-cells were stained for the CD-19 CAR 24 hours post electroporation to evaluate for surface expression and then co-cultured with A20 Fluc target cells. The assay was then evaluated for cytotoxic killing of the Fluc+A20 cells 24 hours after co-culture of the T-cells with the target cells.

[1657] As seen in FIGS. 65A, 65B, 65C, and 66, the unique IRES were able to increase the frequency that the T-cells expressed the CAR protein and level of CAR expression on the surface of the cells. The increase frequency of expression of the CAR protein and level of CAR expression on the surface of cells lead to an improved anti-tumor response.

### Example 69

Cytosolic and Surface Proteins Expressed from Circular RNA Construct in Primary Human T-Cells.

[1658] Circular RNA construct contained either a sequence encoding for a fluorescent cytosolic reporter or a surface antigen reporter. Fluorescent reporters included green fluorescent protein, mCitrine, mWasabi, Tsapphire. Surface reporters included CD52 and Thy1.1^{bio}. Primary human T-cells were activated with an anti-CD3/anti-CD28 antibody and electroporated 6 days post activation of the circular RNA containing a reporter sequence. T-cells were harvested and analyzed via flow cytometry 24 hours post electroporation. Surface antigens were stained with commercially available antibodies (e.g., Biolegend, Miltenyi, and BD).

[1659] As seen in FIG. 67A and FIG. 67B, cytosolic and surface proteins can be expressed from circular RNA encoding the proteins in primary human T-cells.

### Example 70

Circular RNAs Containing Unique IRES Sequences have Improved Translation Expression Over Linear mRNA.

[1660] Circular RNA constructs contained a unique IRES along with an expression sequence for Firefly luciferase (FLuc).

[1661] Human T-cells from 2 donors were enriched and stimulated with anti-CD3/anti-CD28 antibodies. After several days of proliferation, activated T cells were harvested and electroporated with equal molar of either mRNA or circular RNA expressing FLuc payloads. Various IRES sequences, including those derived from Caprine Kobuvirus, Apodemus Picornavirus, and Parabovirus, were studied to evaluate expression level and durability of the payload expression across 7 days. Across the 7 days, the T-cells were lysed with Promega Brightglo to evaluate for bioluminescence.

[1662] As shown in FIGS. 68C, 68D, 68E, 68F, and 68G, the presence of an IRES within a circular RNA can increase translation and expression of a cytosolic protein by orders of magnitude and can improve expression compared to linear mRNA. This was found consistent across multiple human T-cell donors.

### Example 71

### Example 71A: LNP-Circular RNA Encoding Anti-CD19 Mediates Human T-Cell Killing of K562 Cells

[1663] Circular RNA constructs contained a sequence encoding for anti-CD19 antibodies. Circular RNA constructs were then encapsulated within a lipid nanoparticle (LNP).

[1664] Human T-cells were stimulated with anti-CD3/anti-CD28 and left to proliferate up to 6 says. At day 6, LNP-circular RNA and ApoE3 (1 μg/mL) were co-cultured with the T-cells to mediate transfection. 24 hours later, Fluc+K562 cells were electroporated with 200 ng of circular RNA encoding anti-CD19 antibodies and were later co-cultured at day 7. 48 hours post co-culture, the assay was assessed for CAR expression and cytotoxic killing of K562 cells through Fluc expression.

[1665] As shown in FIG. 69A and FIG. 69B, there is T-cell expression of anti-CD19 CAR from the LNP-mediated delivery of a CAR in vitro to T-cells and its capability to lyse tumor cells in a specific, antigen dependent manner in engineered K562 cells.

### Example 71B: LNP-Circular RNA Encoding Anti-BCMA Antibody Mediates Human T-Cell Killing of K562 Cells

[1666] Circular RNA constructs contained a sequence encoding for anti-BCMA antibodies. Circular RNA constructs were then encapsulated within a lipid nanoparticle (LNP).

[1667] Human T-cells were stimulated with anti-CD3/anti-CD28 and left to proliferate up to 6 says. At day 6, LNP-circular RNA and ApoE3 (1p g/mL) were co-cultured with the T-cells to mediate transfection. 24 hours later, Fluc+K562 cells were electroporated with 200 ng of circular RNA encoding anti-BCMA antibodies and were later co-cultured at day 7. 48 hours post co-culture, the assay was assessed for CAR expression and cytotoxic killing of K562 cells through Fluc expression.

[1668] As shown in FIG. 69B, there is T-cell expression of BCMA CAR from the LNP-mediated delivery of a CAR in vitro to T-cells and its capability to lyse tumor cells in a specific, antigen dependent manner in engineered K562 cells.

### Example 72

### Anti-CD19 CAR T-Cells Exhibit Anti-Tumor Activity In Vitro.

[1669] Human T-cells were activated with anti-CD3/anti-CD28 and electroporated once with 200 ng of anti-CD19 CAR-expressing circular RNA. Electroporated T-cells were co-cultured with FLuc+Nalm6 target cells and non-target Fluc+K562 cells to evaluate CAR-mediated killing. After 24 hours post co-culture, the T-cells were lysed and examined for remanent FLuc expression by target and non-target cells to evaluate expression and stability of expression across 8 days total.

[1670] As shown in FIGS. 70A and 70B, T-cells express circular RNA CAR constructs in specific, antigen-dependent manner. Results also shows improved cytotoxicity of circular RNAs encoding CARs compared to linear mRNA encoding CARs and delivery of a functional surface receptor.

### Example 73

Effective LNP Transfection of Circular RNA Mediated with ApoE3

[1671] Human T-cells were stimulated with anti-CD3/anti-CD28 and left to proliferate up to 6 days. At day 6, lipid nanoparticle (LNP) was and circular RNA expressing green fluorescence protein solution with or without ApoE3 (1 μg/mL) were co-cultured with the T-cells. 24 hours later, the T-cells were stained for live/dead T-cells and the live T-cells were analyzed for GFP expression on a flow cytometer.

[1672] As shown by FIGS. 71A, 71B, 71C, 72D, and 71E, efficient LNP transfection can be mediated by ApoE3 on activated T-cells, followed by significant payload expression. These results were exhibited across multiple donors.

### Example 74

### Example 74A: Lipid Nanoparticle Formulation Procedure

[1673] A Zetasizer Nano ZS (Malvern Instruments Ltd, Malvern, Worcestershire, UK) can be used to determine the particle size, the polydispersity index (PDI) and the zeta potential of the transfer vehicle compositions in 1×PBS in determining particle size and 15 mM PBS in determining zeta potential.

[1674] Ultraviolet-visible spectroscopy can be used to determine the concentration of a therapeutic and/or prophylactic (e.g., RNA) in transfer vehicle compositions. 100 μL of the diluted formulation in 1×PBS is added to 900 μL of a 4:1 (v/v) mixture of methanol and chloroform. After mixing, the absorbance spectrum of the solution is recorded, for example, between 230 nm and 330 nm on a DU 800 spectrophotometer (Beckman Coulter, Beckman Coulter, Inc., Brea, CA). The concentration of therapeutic and/or prophylactic in the transfer vehicle composition can be calculated based on the extinction coefficient of the therapeutic and/or prophylactic used in the composition and on the difference between the absorbance at a wavelength of, for example, 260 nm and the baseline value at a wavelength of, for example, 330 nm.

[1675] For transfer vehicle compositions including RNA, a QUANT-IT™ RIBOGREEN® RNA assay (Invitrogen Corporation Carlsbad, CA) can be used to evaluate the encapsulation of RNA by the transfer vehicle composition. The samples are diluted to a concentration of approximately 5 μg/mL or 1 μg/mL in a TE buffer solution (10 mM Tris-HCl, 1 mM EDTA, pH 7.5). 50 μL of the diluted samples are transferred to a polystyrene 96 well plate and either 50 μL of TE buffer or 50 μL of a 2-4% Triton X-100 solution is added to the wells. The plate is incubated at a temperature of 37° C. for 15 minutes. The RIBOGREEN® reagent is diluted 1:100 or 1:200 in TE buffer, and 100 μL of this solution is added to each well. The fluorescence intensity can be measured using a fluorescence plate reader (Wallac Victor 1420 Multilabel Counter; Perkin Elmer, Waltham, MA) at an excitation wavelength of, for example, about 480 nm and an emission wavelength of, for example, about 520 nm. The fluorescence values of the reagent blank are subtracted from that of each of the samples and the percentage of free RNA is determined by dividing the fluorescence intensity of the intact sample (without addition of Triton X-100) by the fluorescence value of the disrupted sample (caused by the addition of Triton X-100).

### Example 74B: RNA Encapsulation, Total Flux, and Percent Expression In Vitro for Ionizable Lipid:DOPE:Cholesterol:DSPE-PEG(2000)Formulation Ratio of 62:4:33:1

[1676] Lipid nanoparticles were formulated using Lipid 10a-27, 10a-26, 10a-46, or 10a-45 in a ionizable lipid:DOPE:cholesterol:DSPE-PEG(2000) formulation ratio of 62:4:33:1 mol %, and encapsulate the RNA molecule at a lipid-nitrogen-to-phosphate ratio (N:P) of 4.5. Expression of the RNA was present in all formulations. There was a greater total flux and percent expression within the spleen as shown in FIGS. 72A and 72B respectively.

| | | | | Ionizable lipid:Helper | Z- | | RNA |
|---|---|---|---|---|---|---|---|
| | Ionizable | Helper | | lipid:Cholesterol:PEG- | Average | | Encapsulation |
| Formulation | lipid | lipid | PEG-lipid | lipid (mol %) | (nm) | PDI | Efficiency (%) |
| 10a-27 | Lipid | DOPE | DSPE- | 62:4:33:1 | 71 | 0.02 | 94 |
| (4.5D) | 10a-27 | | PEG(2000) | | | | |
| 10a-26 | Lipid | DOPE | DSPE- | 62:4:33:1 | 71 | 0.04 | 92 |
| (4.5D) | 10a-26 | | PEG(2000) | | | | |
| 10a-46 | Lipid | DOPE | DSPE- | 62:4:33:1 | 110 | 0.1 | 93 |
| (4.5D) | 10a-26 | | PEG(2000) | | | | |
| 10a-45 | Lipid | DOPE | DSPE- | 62:4:33:1 | 157 | 0.13 | 83 |
| (4.5D) | 10a-25 | | PEG(2000) | | | | |

### Example 74C: RNA Encapsulation, Total Flux, and Percent Expression In Vitro for Ionizable Lipid.DOPE:Cholesterol:PMG-PEG(2000) Formulation Ratio of 50:10:38.5:1.5

[1677] Lipid nanoparticles were formulated using Lipid 10a-46 or 10a-45 in a ionizable lipid: DOPE:cholesterol:DMG-PEG(2000) formulation ratio of 50:10:38.5:1.5 mol %, and encapsulate the RNA molecule at a lipid-nitrogen-to-phosphate ratio (N:P) of 5.7. Expression of the RNA was present in all formulations. There was a greater total flux and percent expression within the spleen as shown in FIGS. 72C and 72D respectively.

| | | | | Ionizable | Z- | | RNA |
|---|---|---|---|---|---|---|---|
| | Ionizable | Helper | | lipid:DOPE:Cholesterol:PEG- | Average | | Encapsulation |
| Formulation | lipid | lipid | PEG-lipid | lipid (mol %) | (nm) | PDI | Efficiency (%) |
| 10a-45 (5.7A) | Lipid | DOPE | DMG- | 50:10:38.5:1.5 | 74 | 0.04 | 95 |
| | 10a-45 | | PEG(2000) | | | | |
| 10a-46 (5.7A) | Lipid | DOPE | DMG- | 50:10:38.5:1.5 | 84 | 0.04 | 96 |
| | 10a-46 | | PEG(2000) | | | | |

### Example 74D: RNA Encapsulation, Total Flux, and Percent Expression In Vitro for Ionizable Lipid:DOPE:Cholesterol:D9MG-PEG(2000) Formulation Ratio of 50.10:38.5.1.5 or for Ionizable Lipid:DSPC:Cholesterol:C₁₄-PEG(2000) Formulation Ratio 35.16:46.2.5

[1678] Lipid nanoparticles were formulated using Lipid 10a-45 or 10a-46 in an ionizable lipid: DOPE: cholesterol: DMG-PEG(2000) formulation ratio of 50:10:38.5:1.5 mol % or in an ionizable lipid:DSPC:cholesterol:C₁₄-PEG(2000) formulation ratio of 35:16:46.2.5 mol, and encapsulate the RNA molecule at a lipid-nitrogen-to-phosphate ratio (N:P) of 5.7 or 4.5. Expression of the RNA was present in all formulations. There was a greater total flux and percent expression within the spleen as shown in FIGS. 72E and 72F respectively.

| | | | | Ionizable lipid:Helper | Z- | | RNA |
|---|---|---|---|---|---|---|---|
| | Ionizable | Helper | | lipid:Cholesterol:PEG- | Average | | Encapsulation |
| Formulation | lipid | lipid | PEG-lipid | lipid (mol %) | (nm) | PDI | Efficiency (%) |
| 10a-45 DSPC | Lipid | DSPC | C₁₄- | 35:16:46.2.5 | 56 | 0.22 | 94 |
| (5.7E) | 10a-45 | | PEG(2000) | | | | |
| 10a-46 DSPC | Lipid | DSPC | C₁₄- | 35:16:46.2.5 | 68 | 0.02 | 95 |
| (5.7E) | 10a-46 | | PEG(2000) | | | | |
| 10a-46 | Lipid | DOPE | DMG- | 50:10:38.5:1.5 | 91 | 0.13 | 93 |
| (4.5A) | 10a-46 | | PEG(2000) | | | | |
| 10a-46 | Lipid | DOPE | DMG- | 50:10:38.5:1.5 | 76 | 0.06 | 93 |
| (5.7A) | 10a-46 | | PEG(2000) | | | | |

### Example 74E. RNA encapsulation, total flux, and percent expression in vitro for ionizable lipid:DOPE:cholesterol:DSPE-PEG(2000) formulation ratio of 62p4d33:1 or for ionizable lipid:DSPC:cholesterol:DMG-PEG(2000)pformulation ratio of 50:10:38:5:1.5

[1679] Lipid nanoparticles were formulated using Lipid 1a-26 or 1a-27 in a ionizable lipid DOPE cholesterol: DSPE-PEG(2000) formulationratio of62:4:33:1 mol (encapsulating the RNA molecule at a N:P ratio of 4.5) or ionizable lipid:DSPC:cholesterol:DMG-PEG(2000) formulation ratio of 50:10:38.5:1.5 mol % (encapsulating the RNA molecule at a N:P ratio of 5.7). Expression of the RNA was present in all formulations. There was a greater total flux and percent expression within the spleen as shown in FIGS. 72G and 72H respectively.

| | | | | Ionizable lipid:Helper | Z- | | RNA |
|---|---|---|---|---|---|---|---|
| | Ionizable | Helper | | lipid:Cholesterol:PEG- | Average | | Encapsulation |
| Formulation | lipid | lipid | PEG-lipid | lipid (mol %) | (nm) | PDI | Efficiency (%) |
| 10a-27 | Lipid | DOPE | DSPE- | 62:4:33:1 | 82 | 0.06 | 94 |
| (4.5D) | 10a-27 | | PEG(2000) | | | | |
| 10a-26 | Lipid | DOPE | DSPE- | 62:4:33:1 | 68 | 0.08 | 91 |
| (4.5D) | 10a-26 | | PEG(2000) | | | | |
| 10a-27 DSPC | Lipid | DSPC | DMG- | 50:10:38.5:1.5 | 79 | 0.06 | 96 |
| (5.7A) | 10a-27 | | PEG(2000) | | | | |
| 10a-26 DSPC | Lipid | DSPC | DMG- | 50:10:38.5:1.5 | 79 | 0.05 | 93 |
| (5.7A) | 10a-26 | | PEG(2000) | | | | |

### Example 74F: RNA Encapsulation, Total Flux, and Percent Expression In Vitro for Ionizable Lipid:DOPE:Cholesterol:DMG-PEG(2000) Formulation Ratio of 50:10:38.5:1.5

[1680] Lipid nanoparticles were formulated using Lipid 10a-26, 10a-27, or 10a-130 and/or Lipid 3-III-1 (represented by

in a ionizable lipid: DSPC:cholesterol:DMG-PEG(2000) formulation ratio of 50:10:38.5:1.5 mol %, and encapsulate the RNA molecule at a N:P ratio of 5.7. Expression of the RNA was present in all formulations. There was a greater total flux and percent expression within the liver as shown in FIGS. 72I and 72J respectively.

[1681] TNS and the particle's pKa was also calculated. 5 μL of 60 μg/mL 2-(p-toluidino) naphthalene-6-sulfonic acid (TNS) and 5 μL of 30 μg of RNA/mL lipid nanoparticles were added in to wells with HEPES buffer ranging from pH 2-12. The mixture was then shaken at room temperature for 5 minutes, and read for fluorescence (excitation 322 nm, emission 431 nm) using a plate reader. The inflection point of the fluorescence signal was calculated to determine the particle's pKₐ.

| | | | | Ionizable lipid:Helper | Z- | | | | |
|---|---|---|---|---|---|---|---|---|---|
| | Ionizable | Helper | | lipid:Cholesterol:PEG- | Average | | EE | Conc. | |
| Formulation | lipid | lipid | PEG-lipid | lipid (mol %) | (nm) | PDI | (%) | (ug/mL) | pKa |
| 10a-27/III-1 | Lipid 10a-27/ | DOPE | DMG- | 50:10:38.5:1.5 | 74 | 0 | 96 | 55.8 | 7.4 |
| (5.7A) | Lipid 3-III- | | PEG(2000) | | | | | | |
| | 1 3:1 ratio | | | | | | | | |
| 10a-27III-1 | Lipid 10a-27/ | DOPE | DMG- | 50:10:38.5:1.5 | 85 | 0.1 | 93 | 51.9 | 6.3 |
| (5.7A) | Lipid 3-III- | | PEG(2000) | | | | | | |
| | 11:3 ratio | | | | | | | | |
| 10a-26/III-1 | Lipid 10a-26/ | DOPE | DMG- | 50:10:38.5:1.5 | 87 | 0.1 | 94 | 51.7 | 6.8 |
| (5.7A) | Lipid 3-III- | | PEG(2000) | | | | | | |
| | 13:1 ratio | | | | | | | | |
| 10a-26/III-1 | Lipid 10a-26/ | DOPE | DMG- | 50:10:38.5:1.5 | 97 | 0.1 | 90 | 53.1 | 6.2 |
| (5.7A) | Lipid 3-III- | | PEG(2000) | | | | | | |
| | 11:3 ratio | | | | | | | | |
| 10a-130 | Lipid 10a- | DOPE | DMG- | 50:10:38.5:1.5 | 60 | 0.1 | 89 | 53.8 | 6.7 |
| (5.7A) | 130 | | PEG(2000) | | | | | | |

### Example 74G: RNA Encapsulation, Total Flux, and Percent Expression In Vitro for Ionizable Lipid:DOPE:Cholesterol:DSPE-PEG(2000) Formulation Ratio of 62:4:33:1 or for Ionizable Lipid:DSPC:Cholesterol:DMG-PEG(2000) Formulation Ratio of 50:10:38.5:1.5

[1682] Lipids nanoparticles were formulated using Lipid 10a-139 in a ionizable lipid:DOPE:cholesterol:DSPE-PEG(2000) formulation ratio of 62:4:33:1 mol % (encapsulating the RNA molecule at a N:P ratio of 4.5) or ionizable lipid:DOPE:cholesterol:DMG-PEG(2000) formulation ratio of 50:10:38.5:1.5 mol % (encapsulating the RNA molecule at a N:P ratio of 5.7). Expression of the RNA was present in all formulations. There was a greater total flux and percent expression within the liver as shown in FIGS. 72K and 72L respectively.

| | | | | Ionizable lipid:Helper | Z- | | |
|---|---|---|---|---|---|---|---|
| | Ionizable | Helper | | lipid:Cholesterol:PEG- | Average | | EE |
| Formulation | lipid | lipid | PEG-lipid | lipid (mol %) | (nm) | PDI | (%) |
| 10a-139 | Lipid 10a- | DOPE | DSPE- | 62:4:33:1 | 93 | 0.01 | 79 |
| (4.5D) | 139 | | PEG(2000) | | | | |
| 10a-139 | Lipid 10a- | DSPC | DMG- | 50:10:38.5:1.5 | 122 | 0.02 | 95 |
| (5.7A) | 139 | | PEG(2000) | | | | |

### Example 75

[1683] This example illustrates expression of SARS-CoV2 spike protein expression in vitro. Circular RNA encoding SARS-CoV2 stabilized spike protein was transfected into 293 cells using MessengerMax Transfection Reagent. 24 hours after transfection, the 293 cells were stained with a CR3022 anti-spike primary antibody and APC-labeled secondary antibody.

[1684] FIG. 73A shows circularization efficiency of roughly 4.5 kb SARS-Cov2 stabilized spike protein-encoding RNA resulting from an in vitro transcription reaction. FIG. 73B and FIG. 73C show SARS-CoV2 stabilized spike protein expression on 293 cells after the circular RNA transfection with MessengerMax Transfection Reagent relative to mock transfected cells.

[1685] FIG. 77A and FIG. 77B show SARS-CoV2 stabilized spike protein expression by percentage of cells and gMFI on 293 cells after transfection of a panel of circular RNAs, containing variable IRES sequences, codon optimized coding regions, and stabilized SARS-CoV2 spike proteins, using MessengerMax Transfection Reagent. FIG. 77C shows the relationship between MFI and percentage.

### Example 76

[1686] This example shows in vivo cytokine response after IV injection of 0.2 mg/kg circRNA preparations encapsulated in a lipid nanoparticle formulation. circRNA splicing reactions synthesized with GTP as a precursor RNA initiator and splicing nucleotide incited greater cytokine responses than purified circRNA and linear m1ψ-mRNA due to the presence of triphosphorylated 5′ termini in the splicing reaction. Levels of IL-1β, IL-6, IL-10, IL-12p70, RANTES, TNFα were measured from blood drawn 6 hours following intravenous injection of the LNP-formulated circRNA preparation. Mice injected with PBS were used as a control.

[1687] As seen in FIG. 74, circRNA splicing reactions synthesized with GTP as a precursor RNA initiator and splicing nucleotide incite greater cytokine responses than purified circRNA and linear m1ψ-mRNA due to the presence of triphosphorylated 5′ termini in the splicing reaction.

### Example 77

[1688] This example illustrates intramuscular delivery of varying doses of lipid nanoparticle containing circular RNAs. Mice were dosed with either 0.1 μg, 1 μg, or 10 μg of circRNA formulated in lipid nanoparticles. Whole body IVIS imagine was conducted at 6 hours following an injection of luciferin (FIG. 75A and FIG. 75B). Ex vivo IVIS imaging was conducted at 24-hour. Flux values for liver, quad, and calf are shown in FIG. 75C. FIG. 76B and FIG. 76C show that the expression of the circular RNA is present in the muscle tissue of the mice.

### Example 78

[1689] This example illustrates expression of multiple circular RNAs in LNP formulations. Circular RNA constructs encoding either hEPO or fLuc were dosed in a single and mixed set of LNPs. hEPO concentration in the serum (FIG. 76A) and total flux by IVIS imaging (FIG. 76B) was determined. The results show that the circular RNA hEPO or fLuc constructs individually formulated or co-formulated expressed protein efficiently.

### Example 79

### Example 79A: Hepatocyte Plating and Culture

[1690] Primary human hepatocytes (PHH), primary mouse hepatocytes (PMH), primary cynomolgus monkey hepatocytes (PCH) were thawed and resuspended in hepatocyte thawing medium (Xenotech, cat #K8600/K8650) followed by centrifugation. The supernatant was discarded, and the pelleted cells were resuspended in hepatocyte plating medium (Xenotech, cat #K8200). Cells were counted via hemocytometer and plated on Bio-coat collagen-I coated 96-well plates at a density of 25,000 cells/well for PHH, 25,000 cells/well for PMH, and 50,000 cells/well for PCH in 100 μL of plating media. Plated cells were allowed to settle and adhere for 6 hours in a tissue culture incubator at 37° C. and 5% CO₂ atmosphere. After incubation cells were checked for monolayer formation after which the plating media was aspirated and replaced with 100 ul of culture media (Xenotech, cat #K8300). Media was replaced every 24 hours for the duration of the experiment.

### Example 79B: In Vitro Screening of LNP Formulated Circular RNA Encoding Firefly Luciferase in Primary Human, Mouse, and Cynomolgus Monkey Hepatocytes

[1691] A circular RNA construct comprising a TIE and a coding element encoding for firefly luciferase was produced and transfected into LNPs. Various concentrations of LNPs formulated with the circularized RNA (oRNA) were diluted in hepatocyte media supplemented with 3% fetal bovine serum (FBS) (ThermoFisher, cat #A3160401). Media was aspirated from the cells prior to addition of 100 μL of LNP/FBS/media mixture to the cells.

[1692] Luciferase activity was detected in primary human (FIG. 90A), mouse (FIG. 90B), and cynomolgus monkey (FIG. 90C) hepatocyte. 24 hours post-transfection plates were removed from the incubator and allowed to equilibrate to room temperature for 15 mins. A volume of 100 μL of Firefly Luciferase one-step glow assay working solution (Pierce, cat #16196) was added to each well. The plate was placed on a microplate shaker (ThermoFisher, cat #S72050) and mixed at 300 rpm for 3 min. Post-mixing, the plate was allowed to incubate at room temperature for 10 min. Luminescence was read using a Varioskan or Bio-Tek Cytation5 instrument.

[1693] As seen in FIG. 90A, FIG. 90B, and FIG. 90C, TIE containing circular RNAs are capable of driving firefly luciferase protein expression in primary hepatocytes from multiple species in a dose-dependent manner when transfected in vitro with an LNP.

### Example 79C: In Vitro Screening of LNP Formulated Circular RNA Encoding Firefly Luciferase in Multiple Primary Human Hepatocyte Donors

[1694] A circular RNA construct comprising a TIE and a coding element encoding for firefly luciferase was produced and transfected into LNPs. Various concentrations of LNPs formulated with the circularized RNA (oRNA) were diluted in hepatocyte media supplemented with 3% fetal bovine serum (FBS) (ThermoFisher, cat #A3160401). Media was aspirated from the cells prior to addition of 100 ul of LNP/FBS/media mixture to the cells.

[1695] Luciferase activity was detected in primary human (FIG. 91A), mouse (FIG. 91B), and cynomolgus monkey (FIG. 91C) hepatocyte. 24 hours post-transfection plates were removed from the incubator and allowed to equilibrate to room temperature for 15 mins. A volume of 100 μL of Firefly Luciferase one-step glow assay working solution (Pierce, cat #16196) was added to each well. The plate was placed on a microplate shaker (ThermoFisher, cat #572050) and mixed at 300 rpm for 3 min. Post-mixing, the plate was allowed to incubate at room temperature for 10 min. Luminescence was read using a Varioskan or Bio-Tek Cytation5 instrument.

[1696] As seen in FIG. 91A, FIG. 91B, and FIG. 91C, TIE containing circular RNAs are capable of driving firefly luciferase protein expression in primary hepatocytes from multiple human donors in a dose-dependent manner when transfected in vitro with an LNP.

### Example 80

In Vitro Expression of LNP Formulated with Circular RNA Encoding for GFP in Multiple Human Cell Models.

[1697] A circular RNA construct was produced comprising a TIE and coding element encoding for a GFP protein. LNP were formulated with the circular RNA construct. Then various concentrations of the LNP containing the circular RNA construct were diluted in hepatocyte media supplemented with 3% fetal bovine (FBS) (ThermoFisher, cat #A3160401). Media was aspirated from the cells prior to addition of 100 ul of LNP/FBS/media mixture to the cells.

[1698] HeLa (human cervical adenocarcinoma; ATCC, cat #CCL-2), HEK293 (human embryonic kidney; ATCC, cat #CRL-1573), and HUH7 (human liver hepatocellular carcinoma; JCRB, cat #JCRB0403) were transfected as previously described with LNP formulated oRNAs. Twenty-four hours post-transfection, the media was removed and the cells were trypsinized. The trypsinized cells were neutralized with PBS supplemented with 10% FBS, harvested, and transferred to a tube. The tube was centrifuged to pellet the cells and the supernatant was aspirated. The pellet was stored at −80° C. prior to lysis. For lysis the cells were thawed on ice and were lysed with 100 μL/well RIPA buffer (Boston Bio Products, Cat. BP-115) plus freshly added 1 mM DTT, and 250 U/mL Benzonase (EMD Millipore, cat #71206-3), and protease inhibitor mixture consisting of complete protease inhibitor cocktail (Sigma, cat #11697498001). Cells were kept on ice for 30 minutes at which time NaCl (1M final concentration) was added. Cell lysates were thoroughly mixed and retained on ice for 30 min. The whole cell extracts (WCE) were centrifuged to pellet debris. A Bradford assay (Bio-Rad, cat #500-0001) was used to assess protein content of the lysates. The Bradford assay procedure was completed according to the manufacturer's protocol. Extracts were stored at −20° C. prior to use. Western blots were performed to assess GFP protein levels. Whole cell extract lysates were mixed with Laemmli buffer and denatured at 95° C. for 10 min. Western blots were run using the NuPage system on 4-12% Bis-Tris gels (ThermoFisher, cat #NP0335BOX) according to the manufacturer's protocol followed by wet transfer onto 0.45 m nitrocellulose membrane (ThermoFisher, cat #LC2001). After transfer membranes were rinsed thoroughly with water and stained with Ponceau S solution (Boston Bio Products, cat #ST-180) to confirm complete and even transfer. Blots were blocked using 5% Dry Milk in TBS for 30 minutes on a lab rocker at room temperature. Blots were rinsed with 1×TBST (Boston BioProducts, cat #IBB-180) and probed with mouse daylight 680-tagged anti-GFP monoclonal antibody (ThermoFisher, cat #MA515256D680) at 1:1,000 in 1×TBST. Anti-3-actin or GAPDH was used as a loading control (ThermoFisher, cat #AM4302/AM4300) at 1:4,000 in 1×TBST and incubated simultaneously with the GFP primary antibody. Blots were sealed in a bag and kept overnight at 4° C. on a lab rocker. After incubation, blots were rinsed 3 times for 5 minutes each in 1×TBST and probed with mouse secondary antibodies (ThermoFisher, cat #PI35519) at 1:25,000 each in 1×TBST for 30 minutes at room temperature. After incubation, blots were rinsed 3 times for 5 minutes each in 1×TBST. Blots were visualized and analyzed using a Licor Odyssey system.

[1699] As shown in FIG. 92, TIE-containing circular RNA is capable of expressing GFP protein in diverse human cell lines (e.g., HeLa, HEK293, and HUH7 cells) in a dose dependent manner when transfected in vitro with an LNP.

### Example 81

In Vitro Expression of LNP Formulated with Circular RNA Encoding for GFP in Primary Human Hepatocytes.

[1700] A circular RNA construct was produced comprising a TIE and coding element encoding for a GFP protein. Various concentrations of LNP containing circularized RNA (oRNA) were diluted in hepatocyte media supplemented with 3% fetal bovine serum (FBS) (ThermoFisher, cat #A3160401). Media was aspirated from the cells prior to addition of 100 μL of LNP/FBS/media mixture to the cells.

[1701] Primary human hepatocytes (PHH) were thawed and resuspended in hepatocyte thawing medium (Xenotech, cat #K8600/K8650) followed by centrifugation. The supernatant was discarded, and the pelleted cells were resuspended in hepatocyte plating medium (Xenotech, cat #K8200). Cells were counted via hemocytometer and plated on Bio-coat collagen-I coated 96-well plates at a density of 25,000 cells/well for PHH, 25,000 cells/well for PMH, and 50,000 cells/well for PCH in 100 ul of plating media. Plated cells were allowed to settle and adhere for 6 hours in a tissue culture incubator at 37° C. and 5% CO₂ atmosphere. After incubation cells were checked for monolayer formation after which the plating media was aspirated and replaced with 100 ul of culture media (Xenotech, cat #K8300). Media was replaced every 24 hours for the duration of the experiment.

[1702] Primary human hepatocytes were transfected as previously described with LNP formulated oRNAs. Twenty-four hours post-transfection, the media was removed and the cells were trypsinized. The trypsinized cells were neutralized with PBS supplemented with 10% FBS, harvested, and transferred to a tube. The tube was centrifuged to pellet the cells and the supernatant was aspirated. The pellet was stored at −80° C. prior to lysis. For lysis the cells were thawed on ice and were lysed with 100 μL/well RIPA buffer (Boston Bio Products, Cat. BP-115) plus freshly added 1 mM DTT, and 250 U/ml Benzonase (EMD Millipore, cat #71206-3), and protease inhibitor mixture consisting of complete protease inhibitor cocktail (Sigma, cat #11697498001). Cells were kept on ice for 30 minutes at which time NaCl (1M final concentration) was added. Cell lysates were thoroughly mixed and retained on ice for 30 min. The whole cell extracts (WCE) were centrifuged to pellet debris. A Bradford assay (Bio-Rad, cat #500-0001) was used to assess protein content of the lysates. The Bradford assay procedure was completed according to the manufacturer's protocol. Extracts were stored at −20° C. prior to use. Western blots were performed to assess GFP protein levels. Whole cell extract lysates were mixed with Laemmli buffer and denatured at 95° C. for 10 min. Western blots were run using the NuPage system on 4-12% Bis-Tris gels (ThermoFisher, cat #NP0335BOX) according to the manufacturer's protocol followed by wet transfer onto 0.45 μm nitrocellulose membrane (ThermoFisher, cat #LC2001). After transfer membranes were rinsed thoroughly with water and stained with Ponceau S solution (Boston Bio Products, cat #ST-180) to confirm complete and even transfer. Blots were blocked using 5% Dry Milk in TBS for 30 minutes on a lab rocker at room temperature. Blots were rinsed with 1×TBST (Boston BioProducts, cat #IBB-180) and probed with mouse dylight 680-tagged anti-GFP monoclonal antibody (ThermoFisher, cat #MA515256D680) at 1:1,000 in 1×TBST. Anti-β-actin or GAPDH was used as a loading control (ThermoFisher, cat #AM4302/AM4300) at 1:4,000 in 1×TBST and incubated simultaneously with the GFP primary antibody. Blots were sealed in a bag and kept overnight at 4° C. on a lab rocker. After incubation, blots were rinsed 3 times for 5 minutes each in 1×TBST and probed with mouse secondary antibodies (ThermoFisher, cat #PI35519) at 1:25,000 each in 1×TBST for 30 minutes at room temperature. After incubation, blots were rinsed 3 times for 5 minutes each in 1×TBST. Blots were visualized and analyzed using a Licor Odyssey system.

[1703] As shown in the western blot in FIG. 93, circular RNAs containing a TIE is capable of successfully encoding a GFP protein in primary human hepatocytes when transfected in vivo with an LNP.

### Example 82

### In Vitro Expression of Firefly Luciferase in Circular RNA Encoding Firefly Luciferase in Mouse Myoblast and Primary Human Skeletal Muscle Myoblast Cells Using Lipofectamine.

[1704] A circular RNA construct comprising a TIE and coding element encoding firefly luciferase protein.

[1705] Primary human skeletal muscle (HSkM) cells (Lonza, cat #20TL356514) were thawed in a 37° C. water bath and plated at recommended seeding density (3,000 to 5,000 per cm²) in SkGM-2 BulletKit growth media (Lonza, cat #CC-3245) and allowed to grow overnight. Cells were detached using ReagentPack subculture reagents (Lonza, cat #CC-5034) and plated on tissue culture grade 96-well plates at recommended seeding density and allowed to grow overnight in a tissue culture incubator at 37° C. and 5% CO₂ atmosphere or to 70-80% confluency with growth media changed every 2 days.

[1706] For one 96-well plate reaction, 0.3 μL of Lipofectamine-3000 transfection reagent (Lipo3K) (ThermoFisher, cat #L3000015) was mixed with 5 μL Opti-MEM reduced serum media (ThermoFisher, cat #51985091). In a separate tube, per reaction, firefly luciferase (fluc) oRNA (at 10-200 ng) was combined with 5 μL Opti-MEM and 0.2 μL P3000TM enhancer reagent (ThermoFisher, cat #L3000015). Equal volumes of Lipo3K/Opti-MEM mix was combined with oRNA/Opti-MEM mix and incubated at room temperature for 15 min. The Lipo3K/oRNA mixture was added to each well to be transfected and placed in a tissue culture incubator at 37° C. and 5% CO₂ atmosphere for 24 hours.

[1707] After 24 hours, the transfection plates were removed from the incubator and allowed to equilibrate to room temperature for 15 minutes. A volume of 100 μL of firefly luciferase one-step glow assay working solution (Pierce, cat #16196) was added to each well. The plate was placed on a microplate shaker (ThermoFisher, cat #S72050) and mixed at 300 rpm for 3 minutes. Post-mixing, the plate was allowed to incubate at room temperature for 10 minutes. Luminescence was read using a Varioskan or Bio-Tek Cytation5 instrument.

[1708] As shown in FIG. 94A and FIG. 94B, circular RNAs comprising a TIE is capable of driving firefly luciferase protein expression in myoblasts from different species in a dose-dependent manner when transfected in vitro with lipofectamine.

### Example 83

### In Vitro Expression of Firefly Luciferase in Circular RNA Encoding Firefly Luciferase in Differentiated Primary Human Skeletal Muscles Myotubes

[1709] A circular RNA construct comprising a TIE and coding element encoding firefly luciferase protein.

[1710] Primary human skeletal muscle (HSkM) cells (Lonza, cat #20TL356514) were thawed in a 37° C. water bath and plated at recommended seeding density (3,000 to 5,000 per cm²) in SkGM-2 BulletKit growth media (Lonza, cat #CC-3245) and allowed to grow overnight. Cells were detached using ReagentPack subculture reagents (Lonza, cat #CC-5034) and plated on tissue culture grade 96-well plates at recommended seeding density and allowed to grow overnight in a tissue culture incubator at 37° C. and 5% CO₂ atmosphere or to 70-80% confluency with growth media changed every 2 days. Once cells reached 70-80% confluency, growth media was removed, cells were washed twice in 1×PBS (Gibco, cat #10010023) and changed to differentiation media consisting of F-10 (1×) (Gibco, cat #11550-043) supplemented with 2% Horse Serum (Gibco, cat #26050088) and 1% Pen-Strep (Gibco, cat #15140-122). Media was changed daily for 5 to 6 days until nearly all myoblasts had fused to form myotubes.

[1711] For one 96-well plate reaction, 0.3 μL of Lipofectamine-3000 transfection reagent (Lipo3K) (ThermoFisher, cat #L3000015) was mixed with 5 ul Opti-MEM reduced serum media (ThermoFisher, cat #51985091). In a separate tube, per reaction, firefly luciferase (f.luc) oRNA (at 10-200 ng) was combined with 5 μL Opti-MEM and 0.2 μL P3000TM enhancer reagent (ThermoFisher, cat #L3000015). Equal volumes of Lipo3K/Opti-MEM mix was combined with oRNA/Opti-MEM mix and incubated at room temperature for 15 min. The Lipo3K/oRNA mixture was added to each well to be transfected and placed in a tissue culture incubator at 37° C. and 5% CO₂ atmosphere for 24 hours.

[1712] After 24 hours, transfection plates were removed from the incubator and allowed to equilibrate to room temperature for 15 minutes. A volume of 100 μL of Firefly Luc one-step glow assay working solution (Pierce, cat #16196) was added to each well. The plate was placed on a microplate shaker (ThermoFisher, cat #S72050) and mixed at 300 rpm for 3 minutes. Post-mixing, the plate was allowed to incubate at room temperature for 10 minutes. Luminescence was read using a Varioskan or Bio-Tek Cytation5 instrument.

[1713] As shown in FIG. 95A and FIG. 95B, a circular RNA comprising a TIE is capable of driving firefly luciferase protein expression in primary muscles cells through differentiated states (e.g., in myoblast and differentiated myotubes) in multiple human donors in a dose-dependent manner when transfected in vitro with lipofectamine.

### Example 83

[1714] Cell-free in vitro translation of circular RNAs containing TIEs

[1715] A cell-free rabbit reticulocyte in vitro translation assay (Promega, cat #L4540) was completed to characterize protein products from various RNA templates. Both linear mRNA and circular oRNA templates were used in the assay and reaction components were assembled according to the manufacturer's protocol. Prior to assay, RNA templates were denatured at 65° C. for 3 minutes and immediately cooled on ice. All reaction components were assembled on ice. Flexi Rabbit Reticulocyte kit components, complete amino acid mixture (Promega, cat #L5061), RNAsin TIEuclease inhibitor (Promega, cat #N2111), and transcend tRNA (Promega, cat #L5061) were added to denatured RNA templates. The reaction was vortexed to mix and incubated at 30° C. for 60 minutes and then placed on ice.

[1716] The reaction mixture was added to 1× sample buffer (ThermoFisher, cat #NP0007) and heated at 70° C. for 15 minutes. The denatured protein sample was loaded onto 4-12% Bis-Tris gels (ThermoFisher, cat #NP0335BOX). Gel electrophoresis was completed, and the gel was wet transferred onto 0.45 μm nitrocellulose membrane (ThermoFisher, cat #LC2001). Post-transfer, the membrane was blocked for 1 hour with rocking in freshly made TBS with 0.5% Tween-20 (Boston Bioproducts Inc Cat #IBB-180). The membrane was incubated for 45 min with rocking with streptavidin-AP (Promega, cat #V5591) at a 1:2,500 dilution. The membrane was rinsed with four cycles of: twice with TBST and twice with deionized water for 1 min per rinse. The membrane was incubated with Western Blue substrate (Promega, cat #S3841) for 45 minutes and the membrane was rinsed in water and scanned on a LICOR Odyssey CLx imaging system.

[1717] As shown in FIG. 96A and FIG. 96B, a circular RNA comprising a TIE is capable of driving protein expression in a cell-free lysate, independent of any cell type. FIG. 96A illustrates expression of firefly luciferase from a linear or circular RNA input. FIG. 96B illustrates expression of human and mouse ATP7B proteins with different codon optimization (co) approaches compared to wild-type native sequence (WT). The codon optimized-circular RNAs expressing ARP7B protein and the circular RNA expressing firefly luciferase shoed protein full-length protein expression.

### Example 84

### TIE Selection Methodology

[1718] Putative TIEs were identified for activity assessment from sequences in GenBank. Briefly, Riboviria and Unclassified Virus sequences greater than 1 kb in length were identified. 5′ and intergenic UTRs were extracted based on putative CDS start and end sites with a minimum length cutoff of 250 nt. Reverse sequences were also collected for negative sense CDS annotations. For genuses not expected to contain TIE sequences, a few noncoding regions per genus were selected at random. Duplicates, >10 nt repeat-containing sequences, sequences with both XbaI and BamHI sites, and low-quality sequences (non acgt) were culled, then sequences were clustered through CDHit with an 80% sequence similarity cutoff for clustering; representative sequences from each cluster were selected for further study. For unclassified sequences or sequences expected to contain a TIE, all 5′ and intergenic UTRs were selected; duplicates, >10 nt repeat-containing sequences, sequences with both XbaI and BamHI sites, and low-quality sequences (non acgt) were culled, then sequences were clustered through CDHit with a 95% (low risk, known IRESs) sequence similarity cutoff for clustering; representative sequences from each cluster were selected for further study. For both strategies, sequences shorter than 300 nt or unable to be synthesized due to sequence complexity were eliminated.

### Example 85

### Example 85A: TIE Activity in Primary Human T Cells

[1719] Nucleic acid sequences containing putative TIEs were inserted into a circular RNA (oRNA) construct prior to the start codon of a Gaussia luciferase reporter sequence. oRNA containing the TIE was synthesized and purified. Purified oRNA was formulated into lipid nanoparticles. LNP-oRNA was transfected into T cells in vitro. Supernatant was harvested and replaced 24 and 48 hours after transfection, and Gaussia luciferase expression from oRNA was determined using a coelenterazine-containing detection reagent and luminometer. Higher luminescence at 24 hours indicates higher TIE function. Higher luminescence at 48 hours relative to 24 hours indicates higher oRNA stability due to TIE function.

### Example 85B: TIE Activity in Primary Human Hepatocytes

[1720] Nucleic acid sequences containing putative TIEs were inserted into a circular RNA (oRNA) construct prior to the start codon of a Gaussia luciferase reporter sequence. oRNA containing the TIE was synthesized and purified. Purified oRNA was formulated into lipid nanoparticles. LNP-oRNA was transfected into hepatocytes in vitro. Supernatant was harvested and replaced 24 and 48 hours after transfection, and Gaussia luciferase expression from oRNA was determined using a coelenterazine-containing detection reagent and luminometer. Higher luminescence at 24 hours indicates higher TIE function. Higher luminescence at 48 hours relative to 24 hours indicates higher oRNA stability due to TIE function.

### Example 85C: TIE Activity in Primary Human Myotubes

[1721] Nucleic acid sequences containing putative TIEs were inserted into a circular RNA (oRNA) construct prior to the start codon of a Gaussia luciferase reporter sequence. oRNA containing the TIE was synthesized and purified. Purified oRNA was formulated into lipid nanoparticles. LNP-oRNA was transfected into human myotubes in vitro. Supernatant was harvested and replaced 24 and 48 hours after transfection, and Gaussia luciferase expression from oRNA was determined using a coelenterazine-containing detection reagent and luminometer. Higher luminescence at 24 hours indicates higher TIE function. Higher luminescence at 48 hours relative to 24 hours indicates higher oRNA stability due to TIE function.

### Example 86

### TIE Tissue Tropism

[1722] Select TIE-containing oRNAs were formulated into LNPs. LNP-oRNAs were transfected into T cells, hepatocytes, and myotubes. Supernatant was harvested and replaced 24 and 48 hours after transfection, and Gaussia luciferase expression from oRNA was determined using a coelenterazine-containing detection reagent and luminometer. Higher luminescence at 24 hours indicates higher TIE function. Higher luminescence at 48 hours relative to 24 hours may indicate higher oRNA stability due to TIE function. TIE activity was compared between cell types and differences resulting from TIE tissue preference were noted. Differences may be a result of the TIE engaging proteins that show tissue-specific expression and promoting enhanced translation initiation, degradation, or stability.

### Example 86

### Example 86A: TIE Deletion Scanning

[1723] Select TIE sequences with progressive deletions from either the 5′ end or 3′ end of the TIE were inserted into a circular RNA (oRNA) construct prior to the start codon of a Gaussia luciferase reporter sequence. oRNA containing the TIE variant was synthesized and purified. Purified oRNA was formulated into lipid nanoparticles. LNP-oRNA was transfected into human primary T cells. Supernatant was harvested and replaced 24 and 48 hours after transfection, and Gaussia luciferase expression from oRNA was determined using a coelenterazine-containing detection reagent and luminometer. Higher luminescence at 24 hours indicates higher TIE function. Higher luminescence at 48 hours relative to 24 hours may indicate higher oRNA stability due to TIE function. Expression or stability impairment due to progressive deletions identifies the core functional unit of the TIE.

### Example 86B: TIE Variant Generation and Identification

[1724] Select TIE-containing oRNA synthesis plasmids were subjected to error-prone PCR to introduce random mutations into the PCR product. PCR product was used as a template for oRNA synthesis. Purified oRNA was formulated into LNPs and transfected into primary human T cells. Polysome fractions were harvested from T cells at 6, 24, 48, and 72 hours post-transfection by HPLC. RNA associated with each polysome fraction was extracted from polysome fractions and sequenced by NGS. TIE mutation enrichment in each polysome fraction at each time point was analyzed to identify mutations that 1) maintain or improve translation activity from the TIE and/or 2) improve stability of the oRNA.

### Example 86C: TIE Single and Multi-Variant Validation

[1725] Nucleic acid sequences containing putative beneficial TIE mutations from example 6 alone or in combination were inserted into a circular RNA (oRNA) construct prior to the start codon of a Gaussia luciferase reporter sequence. oRNA containing the TIE variant was synthesized and purified. Purified oRNA was formulated into lipid nanoparticles. LNP-oRNA was transfected into human primary T cells. Supernatant was harvested and replaced 24 and 48 hours after transfection, and Gaussia luciferase expression from oRNA was determined using a coelenterazine-containing detection reagent and luminometer. Higher luminescence at 24 hours indicates higher TIE function. Higher luminescence at 48 hours relative to 24 hours indicates higher oRNA stability due to TIE function.

### Example 87

### Example 87A: Selection of Eukaryotic TIEs

[1726] Selection of eukaryotic TIEs. Putative eukaryotic TIEs were identified using several databases. TIEs selected include sequences 40-1578 nucleotides in length and may or may not contain identified modification (m6A) sites.

### Example 87B: TIEs Containing Modified Nucleotides (m6A)

[1727] Nucleic acid sequences containing putative TIEs were inserted into a circular RNA (oRNA) construct preceding the coding region of a Gaussia luciferase reporter sequence. oRNAs were synthesized with a titration of modified nucleotide. Purified oRNA was formulated into lipid nanoparticles. LNP-oRNAs were transfected into T cells, hepatocytes, and myotubes. Supernatant was harvested and replaced 24 and 48 hours after transfection, and Gaussia luciferase expression from oRNA was determined using a coelenterazine-containing detection reagent and luminometer. Higher luminescence of modified nucleotide containing TIEs at 24 hours indicates necessity for modification for enhanced function. Higher luminescence at 48 hours relative to 24 hours indicates modified nucleotide containing TIEs enhance stability of oRNA.

### Example 88

### Expression of TIEs in Cells Undergoing Oxidative and or Hypoxic Stress

[1728] Nucleic acid sequences containing putative TIEs were inserted into a circular RNA (oRNA) construct preceding the coding region of a Gaussia luciferase reporter sequence. Purified oRNA was formulated into lipid nanoparticles. Hepatocytes were treated with hydrogen peroxide to induce oxidative stress or CoCl₂ to induce hypoxic stress. LNP-oRNA was transfected into hepatocytes (under hypoxic stress, oxidative stress, or untreated) in vitro. Supernatant was harvested and replaced 24 and 48 hours after transfection, and Gaussia luciferase expression from oRNA was determined using a coelenterazine-containing detection reagent and luminometer. Higher luminescence at 24 hours indicates higher TIE function. Higher luminescence at 48 hours relative to 24 hours may indicate higher oRNA stability due to TIE function.

### Example 89

### Aptamer as a TIE

[1729] Nucleic acid sequences containing aptamers against translation initiation factors (ie eIF4E, eIF4G, eIF4a) were inserted into a circular RNA (oRNA) construct preceding the coding region of a Gaussia luciferase reporter sequence. Purified oRNA was formulated into lipid nanoparticles. LNP-oRNAs were transfected into hepatocytes. Supernatant was harvested and replaced 24 and 48 hours after transfection, and Gaussia luciferase expression from oRNA was determined using a coelenterazine-containing detection reagent and luminometer. Higher luminescence at 24 hours indicates higher TIE function. Higher luminescence at 48 hours relative to 24 hours may indicate higher oRNA stability due to TIE function.

### Example 90

### Tandem TIEs

[1730] Select combinations of viral, eukaryotic, and/or aptamer TIEs were inserted into a circular RNA (oRNA) construct preceding the coding region of a Gaussia luciferase reporter sequence. oRNAs were synthesized with a titration of modified nucleotide. Purified oRNA was formulated into lipid nanoparticles. LNP-oRNAs were transfected into T cells, hepatocytes, and myotubes. Supernatant was harvested and replaced 24 and 48 hours after transfection, and Gaussia luciferase expression from oRNA was determined using a coelenterazine-containing detection reagent and luminometer. Higher luminescence of constructs containing multiple TIEs at 24 hours indicates a synergy of TIEs. Higher luminescence at 48 hours relative to 24 hours may indicate having multiple TIEs in one construct enhance stability of oRNA.

### Example 91

### Example 91A: Coding Aptamers to Enhance Cap-Independent Translation

[1731] Certain aptamers that bind to eIF4E, eIF4a, and other translation initiators are known to inhibit translation by forcing the proteins to adopt a non-functional conformation. Nucleic acid sequences containing aptamers against translation initiation factors (ie eIF4E, eIF4a) were inserted into a circular RNA (oRNA) construct preceding a functional TIE and the coding region of a Gaussia luciferase reporter sequence. Purified oRNA was formulated into lipid nanoparticles. LNP-oRNAs were transfected into hepatocytes. Supernatant was harvested and replaced 24 and 48 hours after transfection, and Gaussia luciferase expression from oRNA was determined using a coelenterazine-containing detection reagent and luminometer. Higher luminescence at 24 hours indicates a preference for cap-independent translation. Higher luminescence at 48 hours relative to 24 hours indicates higher oRNA stability due to inhibition of cap-dependent translation.

### Example 91B: Coding Aptamers to Enhance Cap-Independent Translation

[1732] Cotransfection of oRNA and aptamers. Certain aptamers that bind to eIF4E, eIF4a, and other translation initiators are known to inhibit translation by forcing the proteins to adopt a non-functional conformation. Nucleic acid sequences containing aptamers against translation initiation factors (ie eIF4E, eIF4a) were co-transfected with a circular RNA (oRNA) containing a TIE and the coding region of a Gaussia luciferase reporter. Purified aptamer and oRNA were formulated into lipid nanoparticles together. LNP-oRNAs were transfected into hepatocytes. Supernatant was harvested and replaced 24 and 48 hours after transfection, and Gaussia luciferase expression from oRNA was determined using a coelenterazine-containing detection reagent and luminometer. Higher luminescence at 24 hours indicates a preference for cap-independent translation. Higher luminescence at 48 hours relative to 24 hours may indicate higher oRNA stability due to inhibition of cap-dependent translation.

### Example 92

[1733] Immunogenicity of circular RNAs was assessed. Induction of RIG-I and IFNB1 RNA expressions, markers of immune stimulation, was measured using RT-cPCR following transfection of the cells with various RNA preparations. All RNA preparations except for the commercially available 3phpRNA were produced using in vitro transcription (IVT) and circularization of RNA comprising an Anabaena permuted intron, GLuc reading frame, strong homology arms, 5′ and 3′ spacers, and a CVB3 IRES. In both HeLa cells (FIG. 10A) and A594 cells (FIG. 101B), the highest levels of RIG-1 and IFNB1 were induced by the IVT reaction product prepared in the absence of excess GMP and by the positive control 3phpRNA.

### Example 93

### IRES Selection and Screening

[1734] Roughly 3,000 potential internal ribosome entry site (IRES) sequence candidates were computationally identified from viral untranslated regions in partial and complete viral sequence available in the art (e.g., Genbank). Each DNA template was cloned to include of the IRES sequences from Table_A_IRES. Exemplary constructs included a 5′ enhanced intron element, a 5′ enhanced exon element, a punitive IRES, a coding element encoding Gaussia Luciferase, a 3′ enhanced exon element, and a 3′ enhanced intron element. Engineered circular RNA (oRNA) was generated from the DNA template by in vitro transcription (IVT); and oRNA was subsequently purified from non-circular RNA components of the IVT reaction.

[1735] Purified oRNA was nanoprecipitated with lipids to form LNP-oRNA constructs. LNPs were formulated first by creating empty lipid nanoparticles using a Precision Nanosystems Ignite instrument with a “NextGen” mixing chamber. Ethanol phase contained Lipid 39 from Table 10b, DSPC, cholesterol, and DMG-PEG 2000 (Avanti Polar Lipids, Inc., Alabaster, AL) at a molar ratio of 45:9:44:2 was combined with 50 mM sodium acetate buffer at pH 4.5. A 3:1 aqueous to ethanol mixing ratio was used. The empty LNPs were then dialyzed in 1 L of 1×PBS and exchanged 2 times over 18 hours. Dialyzed empty LNPs were then mixed with a final circular RNA concentration of 40 μg/mL in 50 mM sodium acetate buffer at pH 4.5. A 3:1 aqueous to empty lipid nanoparticle mixing ratio was used. The LNPs final ionizable lipid to RNA phosphate ratio was at 6.0.

[1736] Primary human skeletal myotubes, primary human hepatocytes, and activated primary human T cells were treated with formulated LNP-oRNA in triplicate. Protein expression in supernatant was assessed by luminescence measurements 48 hours following transfection. Table 27 provides the protein expression and stability measurements for the screening. Measured numbers are normalized to a control (caprine kobuvirus IRES) and represented as a fold change.

Control (caprine kobuvirus IRES)
gtggccacgcccgggccaccgatacttcccttcactcctt
cgggactgttggggaggaacacaacagggctcccctgttt
tcccattccttcccccttttcccaaccccaaccgccgtat
ctggtggcggcaagacacacgggtctttccctctaaagca
caattgtgtgtgtgtcccaggtcctcctgcgtacggtgcg
ggagtgctcccacccaactgttgtaagcctgtccaacgcg
tcgtcctggcaagactatgacgtcgcatgttccgctgcgg
atgccgaccgggtaaccggttccccagtgtgtgtagtgcg
atcttccaggtcctcctggttggcgttgtccagaaactgc
ttcaggtaagtggggtgtgcccaatccctacaaaggttga
ttctttcaccaccttaggaatgctccggaggtaccccagc
aacagctgggatctgaccggaggctaattgtctacgggtg
gtgtttcctttttcttttcacacaactctactgcGTacaa
ctcactgactatccacttgctctgTcacG

TABLE 27
Expression and functional stability screening of IRES

| | [Mod] | | [Mod] |
|---|---|---|---|
| SEQ | Fold | [Mod] T | PHH |
| ID | Change | Fold | Fold |
| NO | Myo | Change | Change |
| 97 | 0.260167 | 0.353177 | 1.163467 |
| 98 | 0.290648 | 0.677026 | 0.78802 |
| 99 | 0.163908 | 0.27666 | 1.020326 |
| 100 | 0.495163 | 0.48261 | 1.22777 |
| 101 | 0.533025 | 0.852995 | 1.370347 |
| 102 | 0.044695 | 0.030995 | 0.514093 |
| 103 | 0.045577 | 0.039508 | 0.647085 |
| 104 | 0.076071 | 0.168841 | 0.774536 |
| 105 | 0.249558 | 0.329006 | 0.642043 |
| 106 | 0.352419 | 0.648041 | 1.09325 |
| 107 | 0.287896 | 0.937122 | 1.119079 |
| 109 | 0.249157 | 0.626121 | 0.853308 |
| 110 | 0.242425 | 0.513277 | 0.717483 |
| 111 | 0.222321 | 0.465065 | 0.786969 |
| 112 | 0.371086 | 0.636962 | 0.807476 |
| 113 | 0.317071 | 0.43731 | 0.827882 |
| 114 | 0.05835 | 0.068124 | 0.789812 |
| 115 | 0.050735 | 0.046932 | 0.425032 |
| 116 | 0.039211 | 0.030739 | 0.529925 |
| 117 | 0.042734 | 0.046123 | 0.425775 |
| 118 | 0.154586 | 0.456184 | 0.666903 |
| 119 | 0.198021 | 0.987593 | 0.62119 |
| 120 | 0.275525 | 0.701885 | 0.489288 |
| 121 | 0.627572 | 1.028933 | 0.997696 |
| 122 | 0.388602 | 0.8876 | 0.832163 |
| 123 | 0.039714 | 0.030111 | 0.638047 |
| 125 | 0.382696 | 0.641754 | 0.649185 |
| 126 | 0.057929 | 0.06647 | 0.645602 |
| 127 | 0.293568 | 0.685807 | 0.674465 |
| 128 | 0.489317 | 0.583675 | 1.021214 |
| 129 | 0.053695 | 0.089454 | 0.668895 |
| 130 | 0.040577 | 0.060757 | 0.572842 |
| 131 | 0.039511 | 0.033359 | 0.53476 |
| 132 | 0.039977 | 0.031182 | 0.564324 |
| 133 | 0.039326 | 0.030041 | 0.541046 |
| 134 | 0.046625 | 0.052943 | 0.46727 |
| 136 | 0.047864 | 0.042316 | 0.428555 |
| 138 | 0.372287 | 0.637832 | 0.615651 |
| 139 | 0.059696 | 0.097316 | 0.520599 |
| 140 | 0.16008 | 0.399455 | 0.715372 |
| 141 | 0.040253 | 0.031062 | 0.546956 |
| 142 | 0.038521 | 0.027425 | 0.46798 |
| 143 | 0.03901 | 0.032654 | 0.420921 |
| 145 | 0.03927 | 0.026297 | 0.635934 |
| 146 | 0.043229 | 0.034645 | 0.587329 |
| 147 | 0.042637 | 0.036624 | 0.559359 |
| 148 | 0.039126 | 0.029094 | 0.736827 |
| 149 | 0.039186 | 0.028926 | 0.711791 |
| 150 | 0.03864 | 0.027048 | 0.514678 |
| 151 | 0.037309 | 0.026948 | 0.493258 |
| 152 | 0.038449 | 0.026258 | 0.615534 |
| 153 | 0.038341 | 0.025876 | 0.695107 |
| 154 | 0.0402 | 0.0304 | 0.722679 |
| 155 | 0.038723 | 0.027351 | 0.586864 |
| 156 | 0.038511 | 0.027142 | 0.627475 |
| 157 | 0.039049 | 0.027127 | 0.731503 |
| 158 | 0.038048 | 0.027701 | 0.672155 |
| 159 | 0.038668 | 0.025816 | 0.61191 |
| 160 | 0.039335 | 0.026247 | 0.5674 |
| 161 | 0.038824 | 0.025876 | 0.492452 |
| 162 | 0.038216 | 0.023393 | 0.575165 |
| 163 | 0.038264 | 0.027191 | 0.52053 |
| 164 | 0.038197 | 0.026151 | 0.524974 |
| 165 | 0.037817 | 0.026532 | 0.561699 |
| 166 | 0.038844 | 0.026828 | 0.575901 |
| 167 | 0.038524 | 0.025708 | 0.69976 |
| 168 | 0.038788 | 0.025543 | 0.731934 |
| 169 | 0.039231 | 0.027338 | 0.432891 |
| 170 | 0.037986 | 0.022969 | 0.541642 |
| 171 | 0.038154 | 0.027212 | 0.582587 |
| 172 | 0.037112 | 0.026558 | 0.639476 |
| 173 | 0.037335 | 0.026078 | 0.504809 |
| 174 | 0.037049 | 0.025905 | 0.577144 |
| 175 | 0.037822 | 0.025498 | 0.530502 |
| 177 | 0.038266 | 0.026051 | 0.561219 |
| 178 | 0.039045 | 0.027092 | 0.500802 |
| 179 | 0.037153 | 0.026609 | 0.50571 |
| 180 | 0.038755 | 0.028951 | 0.487148 |
| 181 | 0.037539 | 0.025831 | 0.659122 |
| 182 | 0.03747 | 0.025334 | 0.496612 |
| 183 | 0.038763 | 0.025478 | 0.768879 |
| 184 | 0.043604 | 0.030907 | 0.689648 |
| 185 | 0.039562 | 0.027297 | 0.687583 |
| 186 | 0.039007 | 0.026413 | 0.665244 |
| 187 | 0.038049 | 0.026641 | 0.587503 |
| 188 | 0.037709 | 0.026875 | 0.671188 |
| 189 | 0.037762 | 0.027089 | 0.52406 |
| 190 | 0.03731 | 0.026211 | 0.418576 |
| 191 | 0.038235 | 0.02599 | 0.484504 |
| 192 | 0.039939 | 0.027233 | 0.483419 |
| 194 | 0.020192 | 0.00648 | 0.519074 |
| 195 | 0.019531 | 0.006334 | 0.376436 |
| 196 | 0.019542 | 0.00641 | 0.498646 |
| 197 | 0.019244 | 0.006324 | 0.402627 |
| 198 | 0.018573 | 0.006291 | 0.419065 |
| 199 | 0.019198 | 0.006785 | 0.34161 |
| 200 | 0.019364 | 0.00696 | 0.385662 |
| 201 | 0.020124 | 0.006802 | 0.336954 |
| 202 | 0.019957 | 0.006958 | 0.433697 |
| 203 | 0.019453 | 0.006298 | 0.462718 |
| 204 | 0.019494 | 0.006471 | 0.441202 |
| 205 | 0.019442 | 0.006373 | 0.629439 |
| 206 | 0.018867 | 0.006885 | 0.374898 |
| 207 | 0.01914 | 0.006134 | 0.460931 |
| 208 | 0.018981 | 0.006092 | 0.433478 |
| 209 | 0.019624 | 0.006283 | 0.410556 |
| 210 | 0.019591 | 0.007049 | 0.588881 |
| 211 | 0.019397 | 0.006595 | 0.542165 |
| 212 | 0.019568 | 0.00626 | 0.532913 |
| 213 | 0.018989 | 0.006333 | 0.547859 |
| 214 | 0.01915 | 0.006268 | 0.425401 |
| 216 | 0.019187 | 0.006268 | 0.524257 |
| 217 | 0.019397 | 0.006238 | 0.390937 |
| 218 | 0.019339 | 0.006206 | 0.494667 |
| 219 | 0.018624 | 0.00708 | 0.490922 |
| 220 | 0.019181 | 0.006335 | 0.474431 |
| 221 | 0.019256 | 0.006244 | 0.457017 |
| 222 | 0.019112 | 0.006315 | 0.449704 |
| 223 | 0.01928 | 0.006732 | 0.413984 |
| 224 | 0.019162 | 0.006106 | 0.445024 |
| 225 | 0.019165 | 0.006185 | 0.408971 |
| 226 | 0.018975 | 0.006285 | 0.510492 |
| 227 | 0.019522 | 0.007133 | 0.437234 |
| 228 | 0.019859 | 0.006494 | 0.570592 |
| 229 | 0.019454 | 0.006315 | 0.473748 |
| 230 | 0.018871 | 0.006278 | 0.51804 |
| 231 | 0.019655 | 0.006844 | 0.511603 |
| 232 | 0.019285 | 0.006225 | 0.565024 |
| 233 | 0.019316 | 0.006211 | 0.442953 |
| 235 | 0.019002 | 0.007102 | 0.395003 |
| 236 | 0.018841 | 0.006315 | 0.509341 |
| 237 | 0.019316 | 0.006327 | 0.318761 |
| 238 | 0.019395 | 0.007836 | 0.596039 |
| 239 | 0.019249 | 0.006356 | 0.413194 |
| 241 | 0.019155 | 0.006661 | 0.275657 |
| 242 | 0.019203 | 0.006108 | 0.443553 |
| 243 | 0.019402 | 0.006124 | 0.451916 |
| 244 | 0.018854 | 0.007129 | 0.467265 |
| 245 | 0.019175 | 0.006401 | 0.543468 |
| 246 | 0.019056 | 0.007055 | 0.4824 |
| 247 | 0.018824 | 0.006353 | 0.484173 |
| 248 | 0.019655 | 0.006175 | 0.368398 |
| 249 | 0.01946 | 0.006185 | 0.396805 |
| 250 | 0.019 | 0.006117 | 0.480145 |
| 252 | 0.01904 | 0.007513 | 0.39182 |
| 253 | 0.018899 | 0.006977 | 0.575079 |
| 254 | 0.019338 | 0.006347 | 0.526008 |
| 255 | 0.019193 | 0.006255 | 0.287479 |
| 256 | 0.019022 | 0.006292 | 0.433444 |
| 257 | 0.01915 | 0.006647 | 0.428502 |
| 258 | 0.019567 | 0.006018 | 0.468423 |
| 259 | 0.019534 | 0.006067 | 0.58953 |
| 260 | 0.019436 | 0.007053 | 0.357243 |
| 261 | 0.019714 | 0.006449 | 0.480901 |
| 262 | 0.018951 | 0.006418 | 0.40858 |
| 263 | 0.019192 | 0.006212 | 0.560046 |
| 264 | 0.019612 | 0.006356 | 0.552301 |
| 265 | 0.019321 | 0.006195 | 0.401567 |
| 266 | 0.019369 | 0.006648 | 0.604516 |
| 267 | 0.019151 | 0.006684 | 0.464703 |
| 268 | 0.018286 | 0.007032 | 0.4753 |
| 269 | 0.01937 | 0.006374 | 0.5176 |
| 270 | 0.019261 | 0.006259 | 0.499406 |
| 271 | 0.019395 | 0.00619 | 0.412264 |
| 272 | 0.018911 | 0.006199 | 0.421016 |
| 274 | 0.019303 | 0.006349 | 0.455375 |
| 276 | 0.019357 | 0.006325 | 0.376791 |
| 278 | 0.019529 | 0.006257 | 0.583499 |
| 279 | 0.019217 | 0.006392 | 0.4111 |
| 281 | 0.019185 | 0.006136 | 0.587463 |
| 282 | 0.019681 | 0.006236 | 0.688522 |
| 283 | 0.020003 | 0.006456 | 0.361814 |
| 284 | 0.021001 | 0.008113 | 0.463016 |
| 285 | 0.019166 | 0.006828 | 0.350735 |
| 286 | 0.019521 | 0.006951 | 0.480012 |
| 287 | 0.019513 | 0.006754 | 0.469042 |
| 288 | 0.018469 | 0.006294 | 0.484396 |
| 289 | 0.019434 | 0.006129 | 0.551443 |
| 290 | 0.019277 | 0.006906 | 0.508385 |
| 291 | 0.021833 | 0.009489 | 0.384556 |
| 293 | 0.01252 | 0.006427 | 0.356902 |
| 294 | 0.011884 | 0.006276 | 0.322886 |
| 295 | 0.012392 | 0.00627 | 0.447166 |
| 297 | 0.012283 | 0.00621 | 0.567064 |
| 298 | 0.012177 | 0.006287 | 0.464133 |
| 299 | 0.012284 | 0.006151 | 0.348391 |
| 300 | 0.012339 | 0.006071 | 0.502548 |
| 301 | 0.012495 | 0.007116 | 0.35649 |
| 302 | 0.01222 | 0.006362 | 0.411845 |
| 303 | 0.012195 | 0.006278 | 0.26423 |
| 304 | 0.012215 | 0.006262 | 0.552091 |
| 305 | 0.01249 | 0.006788 | 0.42767 |
| 306 | 0.012402 | 0.006165 | 0.371097 |
| 307 | 0.012281 | 0.006139 | 0.520864 |
| 308 | 0.012497 | 0.00617 | 0.397038 |
| 309 | 0.012793 | 0.006274 | 0.245538 |
| 310 | 0.012404 | 0.006334 | 0.348876 |
| 311 | 0.012122 | 0.006441 | 0.294773 |
| 312 | 0.012249 | 0.006229 | 0.325353 |
| 313 | 0.012563 | 0.006174 | 0.365834 |
| 314 | 0.012287 | 0.006596 | 0.462958 |
| 315 | 0.012275 | 0.006142 | 0.298952 |
| 316 | 0.012716 | 0.007565 | 0.34122 |
| 317 | 0.012291 | 0.006397 | 0.309566 |
| 318 | 0.012115 | 0.006393 | 0.329808 |
| 319 | 0.01227 | 0.008317 | 0.304387 |
| 320 | 0.012221 | 0.006647 | 0.328903 |
| 321 | 0.012186 | 0.007163 | 0.399922 |
| 322 | 0.015035 | 0.031123 | 0.376798 |
| 323 | 0.012308 | 0.006096 | 0.237291 |
| 324 | 0.01192 | 0.006316 | 0.405807 |
| 325 | 0.012466 | 0.00625 | 0.493302 |
| 328 | 0.012498 | 0.00643 | 0.514255 |
| 329 | 0.012432 | 0.006216 | 0.374611 |
| 330 | 0.012053 | 0.006128 | 0.420442 |
| 331 | 0.012416 | 0.006082 | 0.375976 |
| 332 | 0.01236 | 0.006301 | 0.525602 |
| 333 | 0.012418 | 0.006263 | 0.410027 |
| 334 | 0.011605 | 0.006186 | 0.411457 |
| 335 | 0.011728 | 0.006232 | 0.357123 |
| 336 | 0.012106 | 0.006323 | 0.380811 |
| 337 | 0.012118 | 0.006278 | 0.325981 |
| 338 | 0.012218 | 0.006206 | 0.377091 |
| 339 | 0.012209 | 0.006258 | 0.32511 |
| 340 | 0.012372 | 0.006041 | 0.380202 |
| 341 | 0.012382 | 0.00629 | 0.480572 |
| 342 | 0.011896 | 0.006308 | 0.348783 |
| 343 | 0.01204 | 0.006332 | 0.37449 |
| 344 | 0.011928 | 0.006417 | 0.471347 |
| 345 | 0.01169 | 0.006267 | 0.36332 |
| 346 | 0.012345 | 0.006259 | 0.366717 |
| 347 | 0.012182 | 0.006163 | 0.363674 |
| 348 | 0.012163 | 0.00616 | 0.444482 |
| 349 | 0.012659 | 0.006222 | 0.317343 |
| 350 | 0.01182 | 0.006202 | 0.590775 |
| 351 | 0.011972 | 0.006135 | 0.408389 |
| 352 | 0.011885 | 0.006384 | 0.34904 |
| 353 | 0.011969 | 0.006398 | 0.336116 |
| 354 | 0.012428 | 0.006564 | 0.404646 |
| 355 | 0.012092 | 0.006308 | 0.299465 |
| 356 | 0.012409 | 0.006126 | 0.356694 |
| 357 | 0.012519 | 0.006278 | 0.390957 |
| 358 | 0.011963 | 0.006349 | 0.303741 |
| 359 | 0.012077 | 0.006261 | 0.334388 |
| 360 | 0.012007 | 0.006365 | 0.350437 |
| 361 | 0.012282 | 0.007154 | 0.317387 |
| 362 | 0.012469 | 0.007445 | 0.472965 |
| 363 | 0.012436 | 0.006211 | 0.393245 |
| 364 | 0.012106 | 0.006298 | 0.499986 |
| 365 | 0.012805 | 0.009062 | 0.426256 |
| 366 | 0.01212 | 0.006302 | 0.373071 |
| 367 | 0.01206 | 0.006217 | 0.396929 |
| 368 | 0.011994 | 0.006227 | 0.438247 |
| 369 | 0.011901 | 0.006318 | 0.340287 |
| 370 | 0.012341 | 0.007446 | 0.356303 |
| 371 | 0.012601 | 0.006237 | 0.447917 |
| 372 | 0.012511 | 0.007461 | 0.304352 |
| 373 | 0.012419 | 0.006273 | 0.445464 |
| 374 | 0.012212 | 0.006298 | 0.325297 |
| 375 | 0.012262 | 0.006342 | 0.253124 |
| 376 | 0.01206 | 0.00625 | 0.506673 |
| 377 | 0.012314 | 0.006239 | 0.391603 |
| 378 | 0.011869 | 0.006468 | 0.357757 |
| 380 | 0.013014 | 0.007118 | 0.33064 |
| 381 | 0.014152 | 0.007984 | 0.444288 |
| 382 | 0.012422 | 0.006289 | 0.366077 |
| 383 | 0.012649 | 0.0065 | 0.360518 |
| 384 | 0.012302 | 0.006376 | 0.350175 |
| 385 | 0.012345 | 0.006215 | 0.391858 |
| 386 | 0.012388 | 0.006074 | 0.51586 |
| 387 | 0.012519 | 0.007024 | 0.397167 |
| 388 | 0.013891 | 0.00748 | 0.425872 |
| 391 | 0.00426 | 0.025652 | 1.07762 |
| 392 | 0.004221 | 0.024819 | 0.967405 |
| 393 | 0.004402 | 0.026185 | 1.490273 |
| 395 | 0.004363 | 0.024306 | 1.116184 |
| 396 | 0.004078 | 0.025204 | 1.218613 |
| 397 | 0.004141 | 0.025195 | 1.186671 |
| 399 | 0.004058 | 0.025739 | 1.164329 |
| 400 | 0.004405 | 0.026216 | 0.849372 |
| 401 | 0.004166 | 0.025629 | 1.02162 |
| 402 | 0.004116 | 0.025377 | 1.037716 |
| 403 | 0.004734 | 0.028736 | 1.197277 |
| 404 | 0.004247 | 0.025532 | 0.859999 |
| 405 | 0.004301 | 0.025699 | 0.866291 |
| 406 | 0.004319 | 0.025744 | 1.453868 |
| 407 | 0.00439 | 0.026383 | 0.93497 |
| 408 | 0.00535 | 0.032252 | 0.865951 |
| 409 | 0.004149 | 0.025932 | 0.961605 |
| 410 | 0.004251 | 0.025634 | 1.117515 |
| 411 | 0.004339 | 0.025073 | 1.08764 |
| 412 | 0.004524 | 0.025372 | 0.873893 |
| 413 | 0.004216 | 0.025102 | 1.007087 |
| 414 | 0.004159 | 0.025802 | 0.964101 |
| 415 | 0.004389 | 0.025762 | 0.882981 |
| 416 | 0.004232 | 0.024642 | 1.018017 |
| 417 | 0.004211 | 0.025603 | 0.850283 |
| 418 | 0.004341 | 0.025106 | 0.846304 |
| 419 | 0.004202 | 0.024844 | 1.080883 |
| 420 | 0.004135 | 0.024946 | 0.97078 |
| 422 | 0.004459 | 0.025873 | 1.058666 |
| 423 | 0.004274 | 0.025787 | 1.226844 |
| 424 | 0.004383 | 0.024211 | 0.850711 |
| 425 | 0.004319 | 0.025464 | 0.973357 |
| 426 | 0.004226 | 0.025422 | 0.838836 |
| 427 | 0.004226 | 0.025762 | 0.973639 |
| 428 | 0.004161 | 0.025186 | 0.86052 |
| 429 | 0.004196 | 0.02512 | 1.028343 |
| 430 | 0.004215 | 0.0256 | 1.062937 |
| 431 | 0.00421 | 0.025733 | 1.00445 |
| 433 | 0.004741 | 0.027408 | 0.950117 |
| 434 | 0.004318 | 0.025754 | 1.092758 |
| 435 | 0.004428 | 0.025757 | 1.018609 |
| 436 | 0.004163 | 0.02512 | 0.727576 |
| 437 | 0.004243 | 0.025229 | 0.780294 |
| 438 | 0.00418 | 0.026218 | 1.039505 |
| 439 | 0.004887 | 0.026537 | 1.117939 |
| 440 | 0.005189 | 0.028072 | 0.889784 |
| 441 | 0.004272 | 0.025361 | 0.836717 |
| 442 | 0.004524 | 0.02738 | 0.921425 |
| 443 | 0.004218 | 0.025148 | 1.162762 |
| 444 | 0.004237 | 0.024847 | 0.728786 |
| 445 | 0.004293 | 0.025134 | 1.175772 |
| 446 | 0.005773 | 0.02595 | 0.999823 |
| 447 | 0.004274 | 0.025853 | 1.006288 |
| 448 | 0.004344 | 0.02546 | 0.863958 |
| 449 | 0.004346 | 0.025705 | 0.920647 |
| 450 | 0.004326 | 0.025476 | 0.816123 |
| 451 | 0.004237 | 0.025069 | 0.846299 |
| 452 | 0.005257 | 0.025596 | 0.800487 |
| 453 | 0.007428 | 0.026513 | 1.037012 |
| 454 | 0.004303 | 0.024553 | 0.94302 |
| 455 | 0.010434 | 0.037939 | 0.690676 |
| 456 | 0.007299 | 0.027948 | 1.099247 |
| 457 | 0.004251 | 0.025526 | 0.872239 |
| 458 | 0.004302 | 0.025162 | 1.050254 |
| 459 | 0.004217 | 0.025242 | 0.856808 |
| 460 | 0.004174 | 0.02491 | 0.771856 |
| 461 | 0.004283 | 0.023773 | 0.825394 |
| 462 | 0.004232 | 0.026042 | 1.06574 |
| 463 | 0.00424 | 0.02602 | 0.834992 |
| 464 | 0.004112 | 0.026109 | 1.215674 |
| 465 | 0.004229 | 0.025226 | 0.796978 |
| 466 | 0.004197 | 0.024889 | 1.287377 |
| 467 | 0.005177 | 0.025637 | 0.884542 |
| 469 | 0.00431 | 0.025306 | 1.013611 |
| 470 | 0.004249 | 0.025992 | 0.811355 |
| 471 | 0.004548 | 0.027775 | 0.99103 |
| 473 | 0.005266 | 0.027614 | 0.841048 |
| 474 | 0.005181 | 0.025263 | 1.045863 |
| 475 | 0.004214 | 0.024591 | 1.055417 |
| 476 | 0.004585 | 0.024957 | 0.96854 |
| 477 | 0.005587 | 0.026272 | 1.177024 |
| 478 | 0.005441 | 0.028445 | 0.988752 |
| 479 | 0.004717 | 0.027028 | 0.856542 |
| 480 | 0.004527 | 0.026333 | 0.732261 |
| 481 | 0.004189 | 0.026134 | 1.042274 |
| 482 | 0.004308 | 0.025592 | 1.144538 |
| 483 | 0.004232 | 0.025486 | 0.988084 |
| 484 | 0.005422 | 0.026264 | 0.930135 |
| 486 | 0.010488 | 0.036814 | 0.400608 |
| 487 | 0.009352 | 0.035227 | 0.398473 |
| 488 | 0.011628 | 0.039565 | 0.371609 |
| 489 | 0.010104 | 0.036386 | 0.522603 |
| 490 | 0.010243 | 0.035054 | 0.428049 |
| 491 | 0.009427 | 0.034974 | 0.456625 |
| 492 | 0.009978 | 0.034961 | 0.578826 |
| 493 | 0.017268 | 0.035854 | 0.439093 |
| 494 | 0.011939 | 0.036741 | 0.564414 |
| 495 | 0.009874 | 0.035139 | 0.393693 |
| 496 | 0.009436 | 0.033925 | 0.438625 |
| 499 | 0.017365 | 0.040412 | 0.408489 |
| 500 | 0.010443 | 0.035109 | 0.376297 |
| 501 | 0.098725 | 0.035501 | 0.705679 |
| 502 | 0.009362 | 0.036715 | 0.497175 |
| 503 | 0.010364 | 0.039033 | 0.408634 |
| 504 | 0.01097 | 0.034864 | 0.429402 |
| 505 | 0.011296 | 0.045354 | 0.444601 |
| 506 | 0.009332 | 0.034205 | 0.450232 |
| 507 | 0.009893 | 0.052264 | 0.571042 |
| 508 | 0.009472 | 0.034109 | 0.533749 |
| 510 | 0.010046 | 0.035326 | 0.405723 |
| 511 | 0.009439 | 0.03423 | 0.345853 |
| 512 | 0.009106 | 0.034492 | 0.364057 |
| 513 | 0.013017 | 0.036592 | 0.399432 |
| 514 | 0.029114 | 0.157091 | 0.665907 |
| 515 | 0.009588 | 0.035852 | 0.430589 |
| 516 | 0.01053 | 0.034159 | 0.347145 |
| 517 | 0.011616 | 0.049112 | 0.479119 |
| 518 | 0.010441 | 0.034833 | 0.526338 |
| 519 | 0.012705 | 0.03856 | 0.465362 |
| 520 | 0.036111 | 0.066426 | 0.601134 |
| 521 | 0.009721 | 0.035602 | 0.5263 |
| 522 | 0.009626 | 0.034174 | 0.411501 |
| 523 | 0.010243 | 0.034049 | 0.461773 |
| 524 | 0.009466 | 0.03404 | 0.450292 |
| 525 | 0.009484 | 0.035115 | 0.428652 |
| 526 | 0.034651 | 0.049443 | 0.470629 |
| 527 | 0.010225 | 0.035086 | 0.474979 |
| 528 | 0.01019 | 0.0345 | 0.559636 |
| 529 | 0.0097 | 0.044281 | 0.512486 |
| 531 | 0.011152 | 0.035546 | 0.358218 |
| 532 | 0.017782 | 0.037115 | 0.476891 |
| 533 | 0.010199 | 0.033963 | 0.420376 |
| 534 | 0.009483 | 0.035329 | 0.29936 |
| 535 | 0.90231 | 0.680855 | 0.881043 |
| 537 | 0.010176 | 0.034227 | 0.547417 |
| 539 | 0.009638 | 0.034846 | 0.4356 |
| 540 | 0.00967 | 0.035308 | 0.379571 |
| 541 | 0.020438 | 0.064563 | 0.553054 |
| 542 | 0.0096 | 0.035474 | 0.46663 |
| 543 | 0.010103 | 0.036928 | 0.391608 |
| 544 | 0.031817 | 0.071379 | 0.405136 |
| 545 | 0.011419 | 0.044632 | 0.471581 |
| 546 | 0.009434 | 0.034118 | 0.633882 |
| 547 | 0.009671 | 0.034574 | 0.37907 |
| 548 | 0.009753 | 0.03389 | 0.425888 |
| 549 | 0.009679 | 0.034543 | 0.416178 |
| 550 | 0.010414 | 0.035565 | 0.382037 |
| 551 | 0.009573 | 0.034555 | 0.569187 |
| 553 | 0.010895 | 0.037061 | 0.452852 |
| 554 | 0.0252 | 0.106556 | 0.399393 |
| 556 | 0.009499 | 0.034102 | 0.463958 |
| 557 | 0.016537 | 0.050391 | 0.406694 |
| 558 | 0.029851 | 0.098052 | 0.422865 |
| 559 | 0.240194 | 0.948046 | 0.755382 |
| 560 | 0.023732 | 0.142099 | 0.410883 |
| 561 | 0.009951 | 0.034656 | 0.525667 |
| 562 | 0.023838 | 0.071971 | 0.547672 |
| 563 | 0.029476 | 0.233222 | 0.518497 |
| 564 | 0.009775 | 0.033845 | 0.432675 |
| 565 | 0.014326 | 0.034722 | 0.462568 |
| 567 | 0.062129 | 0.223441 | 0.412738 |
| 568 | 0.010126 | 0.035292 | 0.406865 |
| 569 | 0.010231 | 0.035076 | 0.671012 |
| 570 | 0.010125 | 0.035003 | 0.480816 |
| 571 | 0.010039 | 0.034758 | 0.495482 |
| 572 | 0.010531 | 0.045745 | 0.522281 |
| 573 | 0.025354 | 0.034962 | 0.419466 |
| 574 | 0.243552 | 0.556199 | 0.762058 |
| 575 | 0.015572 | 0.035785 | 0.437496 |
| 576 | 0.013035 | 0.038805 | 0.531242 |
| 577 | 0.032586 | 0.079404 | 0.417157 |
| 578 | 0.02313 | 0.063316 | 0.474352 |
| 579 | 0.065246 | 0.302516 | 0.543815 |
| 581 | 0.354729 | 0.62217 | 1.144543 |
| 582 | 0.033618 | 0.058613 | 0.615124 |
| 583 | 0.308377 | 0.394948 | 0.932255 |
| 585 | 0.006337 | 0.020183 | 0.315108 |
| 586 | 0.163191 | 0.081969 | 0.381663 |
| 587 | 0.005108 | 0.023774 | 0.224587 |
| 588 | 0.021841 | 0.05963 | 0.370248 |
| 589 | 0.046721 | 0.333438 | 0.27475 |
| 590 | 0.090307 | 0.279891 | 0.29317 |
| 591 | 0.028787 | 0.07838 | 0.325743 |
| 592 | 0.005702 | 0.020121 | 0.306412 |
| 593 | 0.0099 | 0.046476 | 0.246072 |
| 594 | 0.015627 | 0.043937 | 0.215799 |
| 595 | 0.004629 | 0.019544 | 0.251833 |
| 596 | 0.046096 | 0.243097 | 0.24242 |
| 597 | 0.724998 | 0.981484 | 0.844379 |
| 598 | 0.026838 | 0.114469 | 0.289663 |
| 599 | 0.005828 | 0.019718 | 0.257416 |
| 600 | 0.005909 | 0.019865 | 0.251511 |
| 601 | 0.00614 | 0.020424 | 0.288905 |
| 602 | 0.005997 | 0.020776 | 0.216972 |
| 603 | 0.004669 | 0.019593 | 0.244223 |
| 604 | 0.008771 | 0.03346 | 0.323606 |
| 605 | 0.006624 | 0.020724 | 0.274329 |
| 606 | 0.005853 | 0.020382 | 0.242918 |
| 607 | 0.007747 | 0.021643 | 0.255363 |
| 608 | 0.005712 | 0.019678 | 0.221593 |
| 609 | 0.256073 | 0.504568 | 0.599603 |
| 610 | 0.005913 | 0.020199 | 0.199839 |
| 611 | 0.00447 | 0.019293 | 0.258074 |
| 612 | 0.005724 | 0.019734 | 0.360177 |
| 613 | 0.005694 | 0.019843 | 0.280102 |
| 614 | 0.005742 | 0.019885 | 0.286104 |
| 615 | 0.005705 | 0.019587 | 0.226829 |
| 616 | 0.006013 | 0.020573 | 0.266788 |
| 617 | 0.035272 | 0.094008 | 0.237734 |
| 618 | 0.026309 | 0.025971 | 0.242108 |
| 619 | 0.004687 | 0.020401 | 0.240359 |
| 620 | 0.00571 | 0.019825 | 0.218814 |
| 621 | 0.006001 | 0.020668 | 0.280146 |
| 622 | 0.082002 | 0.273485 | 0.335066 |
| 623 | 0.006029 | 0.020465 | 0.261982 |
| 624 | 0.140559 | 0.424388 | 0.42443 |
| 625 | 0.005826 | 0.019866 | 0.264531 |
| 626 | 0.051468 | 0.032244 | 0.306101 |
| 627 | 0.075104 | 0.276951 | 0.298932 |
| 628 | 0.005997 | 0.022048 | 0.26821 |
| 629 | 0.034034 | 0.401114 | 0.435605 |
| 630 | 0.011946 | 0.027566 | 0.254444 |
| 631 | 0.005914 | 0.020147 | 0.288981 |
| 632 | 0.037385 | 0.026122 | 0.362523 |
| 633 | 0.005826 | 0.019832 | 0.356419 |
| 634 | 0.010026 | 0.030547 | 0.206994 |
| 635 | 0.01508 | 0.04919 | 0.264614 |
| 636 | 0.296551 | 1.260655 | 0.610765 |
| 637 | 0.032124 | 0.375722 | 0.306647 |
| 638 | 0.005896 | 0.021846 | 0.271964 |
| 639 | 0.018881 | 0.148987 | 0.215144 |
| 640 | 0.018015 | 0.131161 | 0.288994 |
| 641 | 0.032334 | 0.02755 | 0.409355 |
| 642 | 0.067149 | 0.273403 | 0.35373 |
| 643 | 0.094609 | 0.53261 | 0.4944 |
| 644 | 0.006418 | 0.02472 | 0.231759 |
| 645 | 0.131335 | 0.734794 | 0.553125 |
| 646 | 0.029427 | 0.344127 | 0.390884 |
| 647 | 0.023863 | 0.136043 | 0.300959 |
| 650 | 0.010281 | 0.03014 | 0.242733 |
| 651 | 0.007994 | 0.028947 | 0.25194 |
| 652 | 0.15318 | 0.627023 | 0.43527 |
| 653 | 0.118823 | 0.69422 | 0.40527 |
| 654 | 0.105353 | 0.646828 | 0.388119 |
| 656 | 0.006783 | 0.02363 | 0.269316 |
| 657 | 0.307363 | 1.189775 | 0.605584 |
| 658 | 0.142732 | 0.450462 | 0.421859 |
| 659 | 0.22685 | 0.512994 | 0.582274 |
| 660 | 0.088314 | 0.402555 | 0.524885 |
| 661 | 0.180276 | 0.439707 | 0.530249 |
| 662 | 0.010698 | 0.060157 | 0.272901 |
| 663 | 0.161736 | 0.431703 | 0.609228 |
| 664 | 0.104153 | 0.348438 | 0.502663 |
| 665 | 0.509021 | 0.807128 | 0.717144 |
| 666 | 0.474224 | 0.60482 | 0.829418 |
| 667 | 0.04441 | 0.198916 | 0.289447 |
| 668 | 0.072205 | 0.466606 | 0.40305 |
| 669 | 0.026334 | 0.185174 | 0.304685 |
| 670 | 0.108713 | 0.572116 | 0.361198 |
| 671 | 0.054216 | 0.293384 | 0.286724 |
| 672 | 0.089022 | 0.461053 | 0.683679 |
| 673 | 0.052496 | 0.22393 | 0.290818 |
| 674 | 0.242917 | 0.426446 | 0.671781 |
| 675 | 0.020806 | 0.100778 | 0.254393 |
| 676 | 0.120498 | 0.594332 | 0.557211 |
| 677 | 0.083653 | 0.221249 | 0.399649 |
| 678 | 0.006713 | 0.026074 | 0.284843 |
| 679 | 0.012988 | 0.238136 | 0.251857 |
| 680 | 0.939588 | 1.168014 | 0.89748 |
| 682 | 0.116101 | 0.51627 | 0.411418 |
| 683 | 0.091835 | 0.41856 | 0.330861 |
| 684 | 0.269272 | 0.956985 | 0.388996 |
| 685 | 0.068553 | 0.420129 | 0.219238 |
| 686 | 0.118729 | 0.627236 | 0.408928 |
| 687 | 0.109438 | 0.486295 | 0.332833 |
| 688 | 0.136059 | 0.604523 | 0.382106 |
| 689 | 0.029476 | 0.230011 | 0.246326 |
| 690 | 0.713106 | 1.287446 | 0.527058 |
| 691 | 0.237497 | 0.831741 | 0.595391 |
| 692 | 0.223793 | 1.114774 | 0.464139 |
| 693 | 0.271839 | 2.152616 | 0.674694 |
| 694 | 0.05139 | 0.613276 | 0.240255 |
| 695 | 0.327666 | 1.036856 | 0.542561 |
| 696 | 0.098363 | 0.604772 | 0.25928 |
| 697 | 0.375897 | 0.957958 | 0.549728 |
| 698 | 0.026512 | 0.225899 | 0.241871 |
| 699 | 0.497694 | 1.50769 | 0.574673 |
| 700 | 0.288469 | 0.915024 | 0.510727 |
| 701 | 0.437509 | 1.020715 | 0.734873 |
| 702 | 0.046205 | 0.476705 | 0.190078 |
| 703 | 0.122863 | 0.83862 | 0.282447 |
| 704 | 0.147205 | 0.901082 | 0.301388 |
| 705 | 0.223074 | 0.853951 | 0.40577 |
| 706 | 0.008438 | 0.033092 | 0.191812 |
| 707 | 0.394494 | 0.997947 | 0.843619 |
| 708 | 0.186993 | 1.051411 | 0.468843 |
| 709 | 0.108893 | 0.601642 | 0.210326 |
| 710 | 0.091753 | 0.734575 | 0.237951 |
| 711 | 0.345755 | 1.159082 | 0.385849 |
| 712 | 0.115713 | 0.513471 | 0.287018 |
| 713 | 0.122493 | 0.686785 | 0.347889 |
| 714 | 0.191872 | 0.830288 | 0.567754 |
| 715 | 0.016321 | 0.055715 | 0.200218 |
| 716 | 0.020481 | 0.530732 | 0.198959 |
| 717 | 0.039274 | 0.234164 | 0.199885 |
| 718 | 0.344223 | 1.062216 | 0.47539 |
| 719 | 0.034917 | 0.299112 | 0.221854 |
| 720 | 0.149534 | 0.777313 | 0.356745 |
| 721 | 0.35108 | 1.01378 | 0.464163 |
| 722 | 0.234439 | 0.884539 | 0.353844 |
| 723 | 0.0088 | 0.035731 | 0.175315 |
| 724 | 0.302881 | 1.254204 | 0.495122 |
| 725 | 0.05075 | 0.39608 | 0.275113 |
| 726 | 0.081523 | 0.495768 | 0.301285 |
| 727 | 0.043541 | 0.247525 | 0.249821 |
| 728 | 0.33696 | 1.546341 | 0.460674 |
| 729 | 0.359043 | 1.008995 | 0.546047 |
| 730 | 0.097955 | 0.496152 | 0.329261 |
| 731 | 0.072919 | 0.443675 | 0.274429 |
| 732 | 0.015001 | 0.060524 | 0.182808 |
| 733 | 0.453244 | 1.410075 | 0.629982 |
| 734 | 0.342572 | 1.700432 | 0.413281 |
| 735 | 0.012613 | 0.050176 | 0.182816 |
| 736 | 0.016461 | 0.063952 | 0.182823 |
| 738 | 0.482005 | 1.605961 | 0.567678 |
| 739 | 0.58218 | 1.397435 | 0.754253 |
| 740 | 0.029093 | 0.051791 | 0.207152 |
| 741 | 0.349249 | 1.283688 | 0.511103 |
| 742 | 0.04606 | 0.482528 | 0.221214 |
| 743 | 0.141882 | 0.376925 | 2.230581 |
| 744 | 0.254656 | 0.939146 | 0.493241 |
| 745 | 0.015338 | 0.058975 | 0.213153 |
| 746 | 0.340833 | 0.962798 | 0.521323 |
| 747 | 0.701684 | 1.619727 | 0.658665 |
| 748 | 0.442992 | 1.472323 | 0.774321 |
| 749 | 0.196686 | 0.71019 | 0.441595 |
| 750 | 0.00964 | 0.038536 | 0.188239 |
| 751 | 0.360595 | 1.364262 | 0.554156 |
| 752 | 0.32576 | 1.182967 | 0.622747 |
| 753 | 0.066818 | 0.928007 | 0.240297 |
| 754 | 0.017628 | 0.16402 | 0.222692 |
| 755 | 0.237297 | 1.072629 | 0.451982 |
| 756 | 0.178168 | 1.009049 | 0.452329 |
| 757 | 0.012459 | 0.041059 | 0.194411 |
| 758 | 0.007271 | 0.030828 | 0.157203 |
| 759 | 0.031242 | 0.159577 | 0.186227 |
| 761 | 0.043353 | 0.146524 | 0.225515 |
| 762 | 0.007574 | 0.030242 | 0.208583 |
| 763 | 0.008587 | 0.032455 | 0.1986 |
| 764 | 0.008102 | 0.033408 | 0.169696 |
| 765 | 0.008951 | 0.03922 | 0.17488 |
| 766 | 0.018024 | 0.295069 | 0.205724 |
| 767 | 0.124411 | 0.768264 | 0.418591 |
| 768 | 0.008208 | 0.036795 | 0.183375 |
| 769 | 0.036346 | 0.37833 | 0.238709 |
| 770 | 0.279379 | 1.535747 | 0.723481 |
| 771 | 0.643475 | 0.520238 | 0.45387 |
| 772 | 0.014665 | 0.047355 | 0.166823 |
| 773 | 0.468419 | 2.022633 | 0.735404 |
| 774 | 0.362808 | 1.622526 | 0.436049 |
| 775 | 0.008859 | 0.038937 | 0.134732 |
| 776 | 0.311065 | 0.985297 | 0.574464 |
| 777 | 0.039862 | 0.065683 | 0.181863 |
| 779 | 0.123206 | 0.450318 | 0.697269 |
| 780 | 0.006814 | 0.029606 | 0.249389 |
| 781 | 0.009967 | 0.031473 | 0.286858 |
| 782 | 0.777497 | 1.325239 | 0.830948 |
| 783 | 0.587889 | 1.292049 | 1.019843 |
| 784 | 0.387894 | 0.821784 | 0.97539 |
| 786 | 0.120025 | 0.185762 | 0.380872 |
| 787 | 0.235698 | 0.942409 | 1.240669 |
| 788 | 0.336218 | 1.269178 | 0.957619 |
| 789 | 0.01732 | 0.096762 | 0.304029 |
| 791 | 0.617079 | 1.629033 | 1.466181 |
| 792 | 0.185997 | 0.704769 | 0.536405 |
| 793 | 0.877167 | 1.831368 | 1.454354 |
| 794 | 0.009408 | 0.076964 | 0.311169 |
| 795 | 0.099921 | 0.429592 | 0.632075 |
| 796 | 0.094809 | 0.536362 | 0.432216 |
| 797 | 0.244954 | 0.482612 | 0.621421 |
| 798 | 0.017916 | 0.084297 | 0.371982 |
| 799 | 0.012818 | 0.047289 | 0.29833 |
| 800 | 0.011675 | 0.13481 | 0.297163 |
| 801 | 0.099266 | 0.273608 | 0.403125 |
| 802 | 0.367887 | 1.18793 | 0.85394 |
| 803 | 0.006742 | 0.027036 | 0.289538 |
| 804 | 0.059456 | 0.162059 | 0.353715 |
| 805 | 0.01413 | 0.033509 | 0.294557 |
| 806 | 0.518086 | 1.610542 | 0.760268 |
| 807 | 0.022595 | 0.066194 | 0.294225 |
| 808 | 0.459064 | 1.277287 | 1.042237 |
| 810 | 0.012544 | 0.05468 | 0.274167 |
| 811 | 0.151174 | 0.538166 | 0.417778 |
| 812 | 0.006597 | 0.025521 | 0.283047 |
| 813 | 0.00961 | 0.027888 | 0.286255 |
| 814 | 0.048257 | 0.855988 | 0.357851 |
| 815 | 0.008921 | 0.03568 | 0.252635 |
| 816 | 0.39553 | 1.021138 | 0.918671 |
| 817 | 0.123764 | 0.912411 | 0.462477 |
| 818 | 0.007052 | 0.060048 | 0.259581 |
| 820 | 0.595672 | 0.572794 | 2.367059 |
| 821 | 0.027009 | 0.077125 | 0.292614 |
| 822 | 0.006996 | 0.035426 | 0.27968 |
| 823 | 0.61953 | 2.009281 | 0.808006 |
| 824 | 0.078118 | 0.029309 | 0.329722 |
| 825 | 0.038471 | 0.505871 | 0.321534 |
| 826 | 0.214307 | 1.236203 | 0.710454 |
| 827 | 0.187119 | 1.091001 | 0.678169 |
| 828 | 0.008155 | 0.032836 | 0.286114 |
| 829 | 0.043091 | 0.374192 | 0.385331 |
| 830 | 0.227057 | 0.993627 | 0.956788 |
| 831 | 0.111249 | 0.782791 | 0.514752 |
| 832 | 0.007741 | 0.034744 | 0.240929 |
| 833 | 0.148308 | 1.302523 | 0.621108 |
| 834 | 0.050544 | 0.635099 | 0.432155 |
| 835 | 0.107654 | 0.475431 | 0.419748 |
| 836 | 0.332776 | 1.197718 | 0.712195 |
| 837 | 0.007024 | 0.02723 | 0.249139 |
| 839 | 0.541139 | 1.487877 | 1.280705 |
| 840 | 0.434719 | 1.514761 | 1.27396 |
| 841 | 0.268407 | 1.048218 | 0.711256 |
| 842 | 0.258458 | 1.028083 | 0.818548 |
| 843 | 0.211266 | 0.691019 | 1.864166 |
| 846 | 0.14662 | 0.821729 | 1.1122 |
| 847 | 0.386867 | 1.568454 | 0.669131 |
| 848 | 0.080316 | 0.56734 | 0.850772 |
| 849 | 0.25383 | 1.721732 | 0.602704 |
| 850 | 0.526909 | 1.78363 | 0.891613 |
| 851 | 0.116222 | 0.76078 | 0.77039 |
| 852 | 0.206702 | 0.560921 | 1.415325 |
| 853 | 0.238304 | 1.081284 | 0.677935 |
| 854 | 0.053709 | 0.430447 | 0.580549 |
| 855 | 0.218825 | 0.941552 | 0.664315 |
| 856 | 0.101452 | 0.224533 | 0.577448 |
| 857 | 0.417144 | 0.902022 | 1.306233 |
| 858 | 0.03876 | 0.729869 | 0.32705 |
| 859 | 0.007745 | 0.034045 | 0.25266 |
| 860 | 0.008348 | 0.045165 | 0.274574 |
| 861 | 0.594983 | 1.639781 | 1.271579 |
| 862 | 0.900769 | 1.57937 | 1.004981 |
| 863 | 0.537996 | 1.331377 | 1.261956 |
| 864 | 0.388698 | 0.891772 | 1.285634 |
| 865 | 0.264661 | 1.079879 | 0.864063 |
| 866 | 0.06028 | 0.22964 | 0.478783 |
| 867 | 0.239258 | 0.716616 | 0.710261 |
| 868 | 0.008279 | 0.030116 | 0.264729 |
| 870 | 0.345182 | 0.941026 | 1.084312 |
| 871 | 0.381332 | 0.702232 | 1.235897 |
| 872 | 0.007184 | 0.0288 | 0.280018 |
| 873 | 0.011191 | 0.037242 | 0.285839 |
| 874 | 0.149494 | 0.617071 | 1.476994 |
| 875 | 0.172408 | 0.907391 | 0.867952 |
| 876 | 0.462175 | 1.088865 | 1.306636 |
| 878 | 0.010338 | 0.034189 | 0.216719 |
| 879 | 0.004925 | 0.019286 | 0.108567 |
| 881 | 0.005183 | 0.020939 | 0.088123 |
| 882 | 0.005094 | 0.020658 | 0.090945 |
| 883 | 0.005435 | 0.022801 | 0.085715 |
| 884 | 0.150855 | 0.669518 | 0.216276 |
| 885 | 0.352227 | 0.729722 | 0.522431 |
| 886 | 0.00519 | 0.04764 | 0.094334 |
| 887 | 0.006618 | 0.067628 | 0.098385 |
| 888 | 0.689507 | 1.833727 | 0.663895 |
| 889 | 0.192102 | 1.196074 | 0.344485 |
| 890 | 0.348046 | 1.61085 | 0.692815 |
| 891 | 0.080898 | 0.580847 | 0.200646 |
| 892 | 0.044425 | 0.718329 | 0.121203 |
| 893 | 0.382721 | 0.843293 | 0.376432 |
| 894 | 0.068781 | 0.640743 | 0.21479 |
| 896 | 0.014415 | 0.055218 | 0.107079 |
| 897 | 0.00687 | 0.027706 | 0.094585 |
| 898 | 0.286212 | 1.357183 | 0.357932 |
| 899 | 0.297653 | 1.1528 | 0.302755 |
| 900 | 0.327981 | 0.932419 | 0.386499 |
| 901 | 0.010727 | 0.05943 | 0.088041 |
| 902 | 0.350484 | 1.180504 | 0.40489 |
| 903 | 0.374566 | 1.622565 | 0.396166 |
| 904 | 0.166397 | 1.049689 | 0.320325 |
| 905 | 0.136541 | 0.817688 | 0.362347 |
| 906 | 0.291429 | 1.325833 | 0.396889 |
| 907 | 0.347797 | 1.267447 | 0.541789 |
| 908 | 0.034779 | 0.467747 | 0.163031 |
| 909 | 0.164487 | 0.350343 | 0.141732 |
| 910 | 0.265078 | 0.886219 | 0.407203 |
| 911 | 0.220201 | 0.717038 | 0.423402 |
| 912 | 0.186388 | 0.85741 | 0.362314 |
| 913 | 0.518467 | 1.762848 | 0.547938 |
| 914 | 0.40602 | 1.766605 | 0.454544 |
| 915 | 0.163459 | 1.042566 | 0.26138 |
| 916 | 0.296433 | 1.092387 | 0.371475 |
| 917 | 0.635553 | 1.261914 | 0.549559 |
| 918 | 0.291057 | 1.006901 | 0.474071 |
| 919 | 0.413799 | 1.246473 | 0.564896 |
| 920 | 0.179531 | 1.451147 | 0.495419 |
| 921 | 0.178932 | 1.285129 | 0.41161 |
| 923 | 0.317288 | 1.146979 | 0.387911 |
| 924 | 0.273164 | 0.914613 | 0.414757 |
| 925 | 0.19808 | 0.725391 | 0.296935 |
| 926 | 0.009777 | 0.035042 | 0.100935 |
| 927 | 0.436574 | 1.262457 | 0.683576 |
| 928 | 0.183262 | 0.813709 | 0.402288 |
| 929 | 0.094365 | 0.787482 | 0.213812 |
| 930 | 0.009025 | 0.063975 | 0.099171 |
| 931 | 0.032034 | 0.095047 | 0.131713 |
| 932 | 0.429418 | 1.050149 | 0.621605 |
| 933 | 0.0172 | 0.052524 | 0.099638 |
| 934 | 0.632772 | 1.169765 | 0.781487 |
| 935 | 0.253132 | 1.3481 | 0.278776 |
| 936 | 0.170298 | 1.000176 | 0.277753 |
| 937 | 0.15824 | 0.84717 | 0.442072 |
| 938 | 0.20538 | 0.88334 | 0.432407 |
| 939 | 0.224863 | 0.999881 | 0.380371 |
| 940 | 0.006178 | 0.021918 | 0.089462 |
| 941 | 0.011284 | 0.066173 | 0.115573 |
| 942 | 0.173491 | 0.708929 | 0.733394 |
| 943 | 0.189128 | 1.089849 | 0.316464 |
| 944 | 0.090245 | 0.422225 | 0.480858 |
| 946 | 0.230236 | 0.894889 | 0.396333 |
| 947 | 0.257151 | 0.909063 | 0.325964 |
| 948 | 0.170075 | 0.588195 | 0.260671 |
| 949 | 0.187726 | 0.806307 | 0.331384 |
| 950 | 0.22905 | 0.942413 | 0.603096 |
| 951 | 0.397644 | 0.841753 | 0.3522 |
| 952 | 0.049028 | 0.367599 | 0.253907 |
| 953 | 0.147509 | 0.791804 | 0.804695 |
| 954 | 0.16991 | 0.798194 | 0.475492 |
| 955 | 0.264691 | 0.591625 | 0.406549 |
| 957 | 0.148218 | 0.602345 | 0.46558 |
| 958 | 0.204506 | 0.863187 | 0.592641 |
| 959 | 0.255224 | 1.064249 | 0.774381 |
| 961 | 0.156063 | 1.110527 | 0.516403 |
| 962 | 0.212997 | 1.217959 | 0.365859 |
| 963 | 0.0211 | 0.144681 | 0.150198 |
| 964 | 0.489565 | 1.57383 | 0.615012 |
| 965 | 0.251985 | 0.770085 | 0.522089 |
| 966 | 0.55303 | 0.923252 | 0.527881 |
| 967 | 0.374958 | 1.224169 | 0.526617 |
| 968 | 0.07674 | 0.128785 | 0.431369 |
| 969 | 0.186199 | 0.698537 | 0.472067 |
| 970 | 0.161868 | 0.595542 | 0.889933 |
| 971 | 0.057774 | 0.497863 | 0.206401 |
| 972 | 0.089708 | 0.555687 | 0.328706 |
| 974 | 0.4611 | 1.588992 | 0.988689 |
| 975 | 0.501721 | 1.70434 | 0.729741 |
| 976 | 0.468553 | 1.572864 | 0.520521 |
| 977 | 0.465145 | 1.349452 | 0.80622 |
| 978 | 0.060567 | 1.227042 | 0.179786 |
| 980 | 0.649997 | 2.424418 | 0.991253 |
| 981 | 0.675473 | 1.395536 | 0.799773 |
| 982 | 0.493201 | 1.634458 | 0.836638 |
| 983 | 0.6355 | 4.406334 | 0.657997 |
| 984 | 0.622337 | 2.861176 | 0.393731 |
| 985 | 0.247394 | 1.921413 | 0.406224 |
| 986 | 0.098809 | 1.089629 | 0.184354 |
| 987 | 0.47511 | 2.42364 | 0.361921 |
| 988 | 0.364262 | 1.773289 | 0.713466 |
| 989 | 0.751797 | 1.903482 | 0.467399 |
| 992 | 0.251144 | 1.61049 | 0.379502 |
| 993 | 0.209284 | 1.691842 | 0.44776 |
| 994 | 0.34175 | 2.039731 | 0.798924 |
| 995 | 0.560565 | 3.12071 | 0.388763 |
| 996 | 0.407642 | 3.358356 | 0.353555 |
| 997 | 0.930576 | 2.730102 | 0.497813 |
| 998 | 0.325541 | 2.234049 | 0.512623 |
| 999 | 0.37115 | 2.362841 | 0.625508 |
| 1000 | 0.200748 | 2.565779 | 0.285251 |
| 1001 | 0.101767 | 1.532869 | 0.325446 |
| 1002 | 0.334714 | 3.270477 | 0.575591 |
| 1003 | 0.294501 | 2.785205 | 0.192242 |
| 1004 | 0.42759 | 3.329744 | 0.366353 |
| 1005 | 0.658112 | 2.554948 | 0.265405 |
| 1006 | 0.657566 | 1.865741 | 1.037788 |
| 1007 | 0.428267 | 2.664938 | 0.294918 |
| 1008 | 0.123986 | 1.595956 | 0.302035 |
| 1009 | 0.274442 | 2.817702 | 0.287299 |
| 1010 | 0.238204 | 3.007669 | 0.358667 |
| 1011 | 0.329633 | 2.440677 | 0.33232 |
| 1012 | 0.374152 | 3.023523 | 0.243111 |
| 1013 | 0.040086 | 0.407359 | 0.097212 |
| 1014 | 0.650383 | 2.577328 | 0.702306 |
| 1015 | 0.556326 | 3.822954 | 0.220832 |
| 1016 | 0.286549 | 2.359215 | 0.398523 |
| 1017 | 0.391716 | 5.493401 | 0.257803 |
| 1018 | 0.232929 | 2.135935 | 0.649378 |
| 1019 | 0.28219 | 2.371224 | 0.266729 |
| 1020 | 0.51863 | 2.875937 | 0.340747 |
| 1021 | 0.330813 | 1.726956 | 0.254804 |
| 1022 | 0.017793 | 0.063328 | 0.09479 |
| 1023 | 0.632422 | 5.001505 | 0.355245 |
| 1024 | 0.18462 | 1.771516 | 0.207356 |
| 1025 | 0.252709 | 2.019318 | 0.193805 |
| 1026 | 0.266125 | 3.425025 | 0.244887 |
| 1027 | 0.333355 | 2.88353 | 0.287246 |
| 1028 | 0.279444 | 1.656027 | 0.326932 |
| 1029 | 0.757301 | 2.168554 | 0.177607 |
| 1030 | 0.787768 | 3.103594 | 0.962656 |
| 1031 | 0.485323 | 3.727265 | 0.678268 |
| 1032 | 0.152334 | 1.921508 | 0.428204 |
| 1033 | 0.10525 | 1.592774 | 0.153351 |
| 1034 | 0.017448 | 0.092714 | 0.088247 |
| 1035 | 0.32027 | 2.717977 | 0.197946 |
| 1036 | 0.315469 | 1.59956 | 0.232083 |
| 1037 | 0.583145 | 2.318094 | 0.166805 |
| 1039 | 0.347433 | 2.874902 | 0.471893 |
| 1040 | 0.142964 | 1.920848 | 0.351992 |
| 1042 | 0.202209 | 2.100867 | 0.315035 |
| 1044 | 0.349521 | 2.320673 | 0.253838 |
| 1045 | 0.210983 | 0.761205 | 0.187876 |
| 1046 | 0.090748 | 0.371038 | 0.186849 |
| 1048 | 0.066928 | 0.667905 | 0.236017 |
| 1049 | 0.019242 | 0.114164 | 0.097972 |
| 1051 | 0.317465 | 2.158948 | 0.221567 |
| 1053 | 0.034762 | 0.16757 | 0.098127 |
| 1054 | 1.115094 | 3.572908 | 0.107919 |
| 1055 | 0.426255 | 2.279363 | 0.875474 |
| 1056 | 0.35721 | 2.140493 | 0.659378 |
| 1058 | 0.55246 | 3.14052 | 0.533825 |
| 1059 | 0.282424 | 1.535033 | 0.458698 |
| 1060 | 0.508811 | 3.071866 | 0.445119 |
| 1061 | 0.525733 | 2.601345 | 0.545443 |
| 1062 | 0.723702 | 1.828112 | 0.521941 |
| 1063 | 0.699279 | 2.002368 | 1.090698 |
| 1064 | 0.488057 | 1.746524 | 0.694956 |
| 1065 | 0.525503 | 2.352257 | 0.927797 |
| 1066 | 0.718979 | 3.256654 | 0.939838 |
| 1067 | 0.491483 | 1.809573 | 0.745394 |
| 1068 | 1.179541 | 3.74017 | 0.467877 |
| 1069 | 0.680638 | 2.4638 | 0.562974 |
| 1071 | 0.209584 | 0.500858 | 0.031699 |
| 1072 | 0.427886 | 1.498126 | 0.045503 |
| 1074 | 0.225285 | 0.934492 | 0.092819 |
| 1075 | 0.137715 | 0.599395 | 0.037514 |
| 1076 | 0.218044 | 1.024494 | 0.018691 |
| 1077 | 0.357504 | 1.710835 | 0.077848 |
| 1078 | 0.446448 | 1.518153 | 0.329426 |
| 1079 | 0.068825 | 0.57375 | 0.014851 |
| 1080 | 0.003884 | 0.019354 | 0.011699 |
| 1081 | 0.132094 | 0.892676 | 0.083692 |
| 1082 | 0.11434 | 0.923226 | 0.056705 |
| 1083 | 0.048631 | 0.398633 | 0.030346 |
| 1084 | 0.09557 | 0.924719 | 0.027728 |
| 1085 | 0.319794 | 0.776496 | 0.0123 |
| 1086 | 0.841477 | 2.348773 | 0.384012 |
| 1087 | 0.52158 | 1.199952 | 0.055537 |
| 1088 | 0.078823 | 0.411586 | 0.028465 |
| 1089 | 0.00343 | 0.019524 | 0.010609 |
| 1090 | 0.003436 | 0.019498 | 0.011946 |
| 1091 | 0.102675 | 0.821406 | 0.058983 |
| 1092 | 0.106604 | 0.815445 | 0.072592 |
| 1093 | 0.058575 | 0.476647 | 0.055827 |
| 1094 | 0.582942 | 1.352039 | 0.521226 |
| 1095 | 0.274994 | 0.998033 | 0.05091 |
| 1096 | 0.135482 | 0.659134 | 0.082443 |
| 1097 | 0.092301 | 0.934711 | 0.104868 |
| 1098 | 0.128824 | 1.226146 | 0.0726 |
| 1099 | 0.053711 | 0.584595 | 0.057494 |
| 1100 | 0.06731 | 0.735897 | 0.070774 |
| 1101 | 0.112476 | 0.815231 | 0.062219 |
| 1102 | 0.415663 | 1.212428 | 0.079545 |
| 1103 | 0.412005 | 1.754218 | 0.07277 |
| 1104 | 0.094334 | 0.470474 | 0.097149 |
| 1105 | 0.028017 | 0.537236 | 0.024877 |
| 1106 | 0.053871 | 0.742137 | 0.06444 |
| 1107 | 0.095169 | 1.103475 | 0.065829 |
| 1108 | 0.093046 | 0.820538 | 0.035385 |
| 1109 | 0.057641 | 0.482332 | 0.044518 |
| 1110 | 0.455043 | 1.55682 | 0.197962 |
| 1111 | 0.383534 | 1.350223 | 0.034935 |
| 1112 | 0.069077 | 0.719701 | 0.057509 |
| 1113 | 0.039422 | 0.485263 | 0.043295 |
| 1114 | 0.067072 | 0.91085 | 0.025613 |
| 1115 | 0.039005 | 0.503229 | 0.02457 |
| 1116 | 0.033876 | 0.323061 | 0.033704 |
| 1117 | 0.064028 | 0.56885 | 0.033787 |
| 1118 | 0.250182 | 0.508475 | 0.021224 |
| 1119 | 0.37371 | 0.826558 | 0.089181 |
| 1120 | 0.090101 | 0.592721 | 0.06047 |
| 1121 | 0.059672 | 1.02895 | 0.070457 |
| 1122 | 0.02492 | 0.538694 | 0.02872 |
| 1125 | 0.122305 | 0.680083 | 0.045805 |
| 1126 | 0.463398 | 1.267668 | 0.085815 |
| 1127 | 0.238281 | 1.080024 | 0.095938 |
| 1128 | 0.073365 | 0.521087 | 0.063778 |
| 1129 | 0.031089 | 0.393886 | 0.022686 |
| 1130 | 0.093374 | 0.767258 | 0.115614 |
| 1131 | 0.079149 | 0.574318 | 0.048331 |
| 1132 | 0.074191 | 0.643954 | 0.023463 |
| 1133 | 0.062971 | 0.480284 | 0.031931 |
| 1134 | 0.216714 | 2.20506 | 0.132402 |
| 1135 | 0.256515 | 0.844706 | 0.057365 |
| 1136 | 0.10945 | 0.887249 | 0.110266 |
| 1137 | 0.029429 | 0.352312 | 0.033672 |
| 1138 | 0.100706 | 0.864622 | 0.084684 |
| 1139 | 0.068952 | 0.846332 | 0.073941 |
| 1140 | 0.088214 | 0.797631 | 0.063666 |
| 1141 | 0.060094 | 0.359254 | 0.051047 |
| 1142 | 0.449206 | 1.015907 | 0.520133 |
| 1143 | 0.015059 | 0.08374 | 0.013579 |
| 1144 | 0.021431 | 0.415068 | 0.029096 |
| 1145 | 0.065197 | 0.376581 | 0.059013 |
| 1146 | 0.091757 | 0.625511 | 0.054384 |
| 1147 | 0.069289 | 0.534903 | 0.093464 |
| 1148 | 0.09357 | 0.984551 | 0.073067 |
| 1149 | 0.087768 | 0.722494 | 0.041795 |
| 1150 | 0.371622 | 1.089698 | 0.054021 |
| 1151 | 0.2795 | 0.947429 | 0.047765 |
| 1152 | 0.107195 | 0.384755 | 0.042152 |
| 1153 | 0.170766 | 0.881601 | 0.079923 |
| 1154 | 0.165804 | 1.199739 | 0.082085 |
| 1155 | 0.133725 | 0.619659 | 0.096667 |
| 1156 | 0.083408 | 0.615919 | 0.018728 |
| 1157 | 0.005065 | 0.022682 | 0.011868 |
| 1158 | 0.279768 | 0.567474 | 0.470594 |
| 1159 | 0.366023 | 1.092993 | 0.087006 |
| 1160 | 0.27576 | 0.987157 | 0.055226 |
| 1161 | 0.00888 | 0.211542 | 0.013514 |
| 1162 | 0.321948 | 1.123212 | 0.077234 |
| 1163 | 0.238473 | 0.676024 | 0.108033 |
| 1164 | 0.174887 | 0.553471 | 0.031922 |
| 1165 | 0.362907 | 1.060364 | 0.105512 |
| 1167 | 0.440301 | 3.41734 | |
| 1168 | 2.269595 | 6.148748 | |
| 1169 | 1.81238 | 4.676323 | |
| 1170 | 0.205013 | 0.821177 | |
| 1171 | 1.757897 | 3.916135 | |
| 1172 | 1.485171 | 1.939494 | |
| 1173 | 0.294994 | 0.522214 | |
| 1174 | 0.375652 | 1.011377 | |
| 1175 | 0.751857 | 4.08474 | |
| 1176 | 0.543517 | 3.338898 | |
| 1177 | 1.544519 | 7.245177 | |
| 1178 | 0.736878 | 2.629057 | |
| 1179 | 0.686547 | 2.072089 | |
| 1180 | 0.237255 | 0.98724 | |
| 1182 | 0.654624 | 1.237891 | |
| 1183 | 0.909645 | 4.061809 | |
| 1184 | 0.544952 | 2.024292 | |
| 1185 | 0.147863 | 1.25923 | |
| 1186 | 0.434429 | 1.954991 | |
| 1187 | 0.505786 | 3.505564 | |
| 1188 | 0.406861 | 2.548182 | |
| 1189 | 0.4624 | 2.051662 | |
| 1190 | 0.071895 | 0.226536 | |
| 1191 | 0.02375 | 0.087245 | |
| 1192 | 1.717893 | 7.465639 | |
| 1193 | 0.542623 | 4.373519 | |
| 1194 | 0.354838 | 3.577394 | |
| 1195 | 0.259933 | 3.12244 | |
| 1196 | 0.215423 | 2.052223 | |
| 1197 | 0.526893 | 2.109184 | |
| 1198 | 0.822275 | 1.940819 | |
| 1199 | 2.037406 | 9.409115 | |
| 1200 | 1.095359 | 5.130504 | |
| 1201 | 0.157644 | 0.731059 | |
| 1202 | 0.230264 | 1.923086 | |
| 1204 | 0.044579 | 0.913551 | |
| 1206 | 0.511955 | 1.209704 | |
| 1207 | 0.046192 | 0.162052 | |
| 1208 | 0.026908 | 0.124359 | |
| 1209 | 0.281822 | 3.216097 | |
| 1210 | 0.220147 | 2.427366 | |
| 1211 | 0.111229 | 1.298379 | |
| 1213 | 0.141412 | 0.865279 | |
| 1214 | 0.15488 | 0.459765 | |
| 1215 | 0.997818 | 3.321803 | |
| 1216 | 1.025901 | 4.406269 | |
| 1217 | 0.260845 | 2.930463 | |
| 1218 | 0.345315 | 3.143776 | |
| 1219 | 0.305255 | 1.957145 | |
| 1220 | 0.172212 | 1.168102 | |
| 1221 | 0.248967 | 0.814305 | |
| 1222 | 0.03732 | 0.119114 | |
| 1223 | 1.247387 | 3.024953 | |
| 1224 | 0.024175 | 0.081463 | |
| 1225 | 0.057454 | 0.455597 | |
| 1226 | 0.361586 | 4.237747 | |
| 1227 | 0.15804 | 1.518132 | |
| 1228 | 0.015375 | 0.056146 | |
| 1229 | 0.444241 | 1.249649 | |
| 1230 | 0.649691 | 1.15827 | |
| 1232 | 0.378509 | 0.925671 | |
| 1233 | 0.325411 | 2.625939 | |
| 1234 | 0.206621 | 2.051787 | |
| 1235 | 0.019165 | 0.09314 | |
| 1236 | 0.118642 | 1.658952 | |
| 1237 | 0.017709 | 0.057603 | |
| 1238 | 0.015895 | 0.043364 | |
| 1239 | 0.025104 | 0.079453 | |
| 1240 | 0.361175 | 2.493372 | |
| 1242 | 0.325351 | 1.821619 | |
| 1243 | 0.411323 | 2.267424 | |
| 1244 | 0.262681 | 1.368943 | |
| 1245 | 0.209877 | 1.009418 | |
| 1246 | 0.689115 | 0.935799 | |
| 1247 | 1.206727 | 3.45224 | |
| 1248 | 0.997846 | 3.186952 | |
| 1249 | 1.03331 | 4.151541 | |
| 1250 | 0.526962 | 1.830667 | |
| 1251 | 0.038789 | 0.160427 | |
| 1252 | 0.529876 | 1.476753 | |
| 1253 | 0.148526 | 0.512689 | |
| 1254 | 0.171619 | 0.496272 | |
| 1255 | 1.440028 | 4.650389 | |
| 1256 | 1.246323 | 3.526473 | |
| 1257 | 1.630471 | 3.27436 | |
| 1258 | 1.175351 | 3.563138 | |
| 1259 | 0.846546 | 1.714691 | |
| 1260 | 1.043862 | 0.869917 | |
| 1261 | 0.290872 | 0.44244 | |
| 1263 | 0.493679 | 0.657699 | 1.716926 |
| 1264 | 0.298742 | 0.443995 | 1.012966 |
| 1265 | 0.378744 | 0.471388 | 1.244712 |
| 1266 | 0.211218 | 0.327944 | 0.97188 |
| 1267 | 0.17315 | 0.41676 | 1.57404 |
| 1268 | 0.213092 | 0.396399 | 1.097609 |
| 1269 | 0.227781 | 0.372048 | 1.433456 |
| 1270 | 0.004499 | 0.018835 | 1.068802 |
| 1271 | 0.180553 | 0.407587 | 1.83541 |
| 1272 | 0.394666 | 0.599394 | 1.66783 |
| 1273 | 0.281898 | 0.489728 | 1.50982 |
| 1274 | 0.243913 | 0.319871 | 0.788908 |
| 1275 | 0.262209 | 0.4805 | 3.95034 |
| 1276 | 0.378342 | 0.610004 | 1.467933 |
| 1277 | 0.273883 | 0.469937 | 1.070136 |
| 1278 | 0.315846 | 0.734033 | 0.89974 |
| 1279 | 0.189246 | 0.354251 | 6.159851 |
| 1280 | 0.388472 | 0.494888 | 1.410746 |
| 1281 | 0.00514 | 0.020652 | 0.591781 |
| 1282 | 0.289013 | 0.482967 | 2.197797 |
| 1283 | 0.053841 | 0.067338 | 0.927451 |
| 1284 | 0.570301 | 0.633162 | 2.538618 |
| 1285 | 0.255977 | 0.464247 | 1.400939 |
| 1286 | 0.003738 | 0.01781 | 0.498459 |
| 1287 | 0.422493 | 0.771168 | 1.722777 |
| 1288 | 0.373076 | 0.512993 | 1.52444 |
| 1289 | 0.003707 | 0.017964 | 0.668949 |
| 1290 | 0.02527 | 0.048054 | 0.658627 |
| 1291 | 0.010359 | 0.025134 | 0.65155 |
| 1292 | 0.018398 | 0.043801 | 0.757339 |
| 1293 | 0.01987 | 0.051117 | 0.725236 |
| 1294 | 0.010602 | 0.029974 | 0.799556 |
| 1295 | 0.008196 | 0.027605 | 0.669465 |
| 1296 | 0.062396 | 0.233757 | 1.952551 |
| 1298 | 0.003269 | 0.017718 | 0.60053 |
| 1302 | 0.003654 | 0.017971 | 0.669614 |
| 1453 | 0.029035 | 0.074756 | 1.361452 |
| 1456 | 0.070888 | 0.141499 | 1.733833 |
| 1457 | 0.005302 | 0.02091 | 0.86533 |
| 1458 | 0.022487 | 0.056128 | 0.69949 |
| 1459 | 0.041481 | 0.10652 | 1.298416 |
| 1460 | 0.178585 | 0.283471 | 1.592463 |
| 1461 | 0.003819 | 0.018816 | 0.634444 |
| 1462 | 0.089803 | 0.219634 | 2.496717 |
| 1463 | 0.367361 | 0.489496 | 3.718475 |
| 1465 | 0.05509 | 0.079253 | 0.882252 |
| 1466 | 0.125624 | 0.195771 | 1.647541 |
| 1467 | 0.104653 | 0.186069 | 1.135532 |
| 1468 | 0.036721 | 0.09977 | 0.954748 |
| 1469 | 0.12058 | 0.220731 | 1.105286 |
| 1470 | 0.107829 | 0.199233 | 0.937104 |
| 1471 | 0.112351 | 0.216795 | 1.247919 |
| 1472 | 0.229734 | 0.29791 | 1.053188 |
| 1473 | 0.005236 | 0.020279 | 0.786991 |
| 1474 | 0.094218 | 0.183605 | 2.872396 |
| 1475 | 0.103852 | 0.178429 | 2.934125 |
| 1476 | 0.032997 | 0.071639 | 1.468191 |
| 1477 | 0.004763 | 0.019988 | 0.744601 |
| 1479 | 0.004862 | 0.02006 | 0.646639 |
| 1480 | 0.062493 | 0.120887 | 1.421179 |
| 1482 | 0.063512 | 0.117236 | 1.02612 |
| 1483 | 0.003687 | 0.018638 | 0.806893 |
| 1485 | 0.002923 | 0.016326 | 0.810278 |
| 1486 | 0.003046 | 0.016492 | 0.639067 |
| 1487 | 0.002997 | 0.016251 | 0.874065 |
| 1488 | 0.002931 | 0.015913 | 0.718561 |
| 1489 | 0.00278 | 0.016262 | 0.945829 |
| 1490 | 0.003396 | 0.017309 | 0.839493 |
| 1491 | 0.002835 | 0.016415 | 0.616515 |
| 1492 | 0.00337 | 0.017996 | 0.87573 |
| 1493 | 0.002838 | 0.016276 | 0.706791 |
| 1494 | 0.002936 | 0.016453 | 0.886075 |
| 1496 | 0.003021 | 0.016335 | 0.634456 |
| 1497 | 0.002921 | 0.016072 | 0.841508 |
| 1498 | 0.002932 | 0.016361 | 0.582778 |
| 1499 | 0.002819 | 0.017478 | 0.948983 |
| 1500 | 0.003006 | 0.017306 | 0.604048 |
| 1501 | 0.002807 | 0.016489 | 0.785628 |
| 1502 | 0.002769 | 0.015804 | 0.755524 |
| 1503 | 0.002882 | 0.016466 | 0.819839 |
| 1504 | 0.003412 | 0.016569 | 0.709579 |
| 1505 | 0.003997 | 0.017625 | 0.888899 |
| 1506 | 0.00289 | 0.017248 | 0.894677 |
| 1507 | 0.002795 | 0.01699 | 0.79213 |
| 1508 | 0.002911 | 0.016103 | 0.775025 |
| 1509 | 0.002935 | 0.016148 | 0.746427 |
| 1510 | 0.002847 | 0.016713 | 0.598686 |
| 1511 | 0.002895 | 0.016502 | 0.768356 |
| 1512 | 0.003954 | 0.017185 | 0.677016 |
| 1514 | 0.002815 | 0.027933 | 0.931244 |
| 1515 | 0.002933 | 0.027695 | 0.651567 |
| 1516 | 0.002785 | 0.026655 | 0.652685 |
| 1517 | 0.002783 | 0.027738 | 0.565322 |
| 1518 | 0.002828 | 0.026694 | 0.631511 |
| 1519 | 0.002834 | 0.027337 | 0.66479 |
| 1520 | 0.003453 | 0.028188 | 0.710203 |
| 1521 | 0.002992 | 0.026775 | 0.61482 |
| 1522 | 0.003072 | 0.028592 | 0.83538 |
| 1523 | 0.003473 | 0.028775 | 0.571612 |
| 1524 | 0.002805 | 0.027075 | 0.704035 |
| 1525 | 0.003615 | 0.030549 | 0.735642 |
| 1526 | 0.002812 | 0.027292 | 0.770641 |
| 1527 | 0.00283 | 0.026705 | 0.696095 |
| 1528 | 0.002794 | 0.026616 | 0.600694 |
| 1529 | 0.002883 | 0.026458 | 0.557503 |
| 1530 | 0.002978 | 0.028069 | 0.812791 |
| 1532 | 0.002984 | 0.027308 | 0.532545 |
| 1533 | 0.00285 | 0.02682 | 0.563657 |
| 1534 | 0.002846 | 0.02764 | 0.746323 |
| 1536 | 0.002799 | 0.027063 | 0.751124 |
| 1537 | 0.002812 | 0.02665 | 0.629611 |
| 1538 | 0.002753 | 0.026783 | 0.503323 |
| 1539 | 0.002909 | 0.027333 | 0.504615 |
| 1540 | 0.002819 | 0.027702 | 0.694792 |
| 1541 | 0.002759 | 0.02709 | 0.560466 |
| 1542 | 0.002733 | 0.027285 | 0.651773 |
| 1543 | 0.002765 | 0.026253 | 0.573015 |
| 1544 | 0.002706 | 0.027092 | 0.654941 |
| 1545 | 0.002874 | 0.026632 | 0.714128 |
| 1546 | 0.00294 | 0.027778 | 0.636466 |
| 1548 | 0.00279 | 0.028079 | 0.706656 |
| 1549 | 0.002731 | 0.027168 | 0.522207 |
| 1550 | 0.002677 | 0.027476 | 0.696415 |
| 1551 | 0.002816 | 0.027408 | 0.60935 |
| 1552 | 0.002864 | 0.027019 | 0.564324 |
| 1553 | 0.00289 | 0.027219 | 0.656982 |
| 1554 | 0.002904 | 0.027245 | 0.709589 |
| 1555 | 0.002857 | 0.027357 | 0.770251 |
| 1556 | 0.002779 | 0.027449 | 0.600841 |
| 1557 | 0.002804 | 0.027851 | 0.819866 |
| 1558 | 0.002822 | 0.027061 | 0.698614 |
| 1559 | 0.002789 | 0.026908 | 0.526565 |
| 1560 | 0.002867 | 0.02696 | 0.567773 |
| 1561 | 0.002954 | 0.026183 | 0.535325 |
| 1562 | 0.002832 | 0.028297 | 0.591001 |
| 1563 | 0.002851 | 0.026715 | 0.518507 |
| 1564 | 0.002773 | 0.027867 | 0.574878 |
| 1565 | 0.002829 | 0.027062 | 0.707218 |
| 1566 | 0.002787 | 0.027944 | 0.60274 |
| 1567 | 0.002789 | 0.026836 | 0.681669 |
| 1568 | 0.002819 | 0.026247 | 0.679288 |
| 1569 | 0.00288 | 0.026881 | 0.755689 |
| 1570 | 0.002853 | 0.026701 | 0.743775 |
| 1571 | 0.002811 | 0.027011 | 0.525869 |
| 1572 | 0.00285 | 0.027158 | 0.513429 |
| 1573 | 0.002801 | 0.027285 | 0.801479 |
| 1574 | 0.00283 | 0.026694 | 0.625502 |
| 1575 | 0.002879 | 0.026776 | 0.59054 |
| 1576 | 0.002797 | 0.026677 | 0.838621 |
| 1577 | 0.003048 | 0.027552 | 0.622979 |
| 1578 | 0.002889 | 0.027386 | 0.598139 |
| 1579 | 0.002955 | 0.027358 | 0.491017 |
| 1580 | 0.002857 | 0.026945 | 0.435188 |
| 1581 | 0.002782 | 0.02785 | 0.477584 |
| 1582 | 0.00277 | 0.026769 | 0.585209 |
| 1583 | 0.002882 | 0.027091 | 0.705566 |
| 1584 | 0.002823 | 0.026051 | 0.588066 |
| 1585 | 0.003011 | 0.02627 | 0.645734 |
| 1586 | 0.002783 | 0.027931 | 0.509146 |
| 1587 | 0.002834 | 0.027194 | 0.594226 |
| 1588 | 0.002788 | 0.027098 | 0.522658 |
| 1589 | 0.002909 | 0.027134 | 0.76665 |
| 1590 | 0.002772 | 0.026947 | 0.590476 |
| 1592 | 0.002841 | 0.026809 | 0.671333 |
| 1593 | 0.002895 | 0.026378 | 0.470406 |
| 1594 | 0.00308 | 0.026761 | 0.571625 |
| 1595 | 0.00292 | 0.026874 | 0.592748 |
| 1596 | 0.002734 | 0.02666 | 0.615701 |
| 1597 | 0.00288 | 0.026918 | 0.694078 |
| 1598 | 0.002796 | 0.028141 | 0.728341 |
| 1599 | 0.003183 | 0.027135 | 0.584021 |
| 1600 | 0.003303 | 0.02835 | 0.463076 |
| 1601 | 0.003179 | 0.02638 | 0.376498 |
| 1602 | 0.004066 | 0.027302 | 0.787392 |
| 1603 | 0.003293 | 0.027454 | 0.565816 |
| 1604 | 0.002846 | 0.02701 | 0.748421 |
| 1605 | 0.005887 | 0.032685 | 0.622649 |
| 1606 | 0.002889 | 0.02704 | 0.56754 |
| 1607 | 0.002831 | 0.026806 | 0.743947 |
| 1608 | 0.002965 | 0.027359 | 0.760013 |
| 1609 | 0.00396 | 0.027561 | 0.674454 |
| 1611 | 0.008586 | 0.075287 | 0.257982 |
| 1612 | 0.009539 | 0.076797 | 0.197109 |
| 1613 | 0.008018 | 0.072467 | 0.231769 |
| 1614 | 0.012023 | 0.075871 | 0.172221 |
| 1615 | 0.008328 | 0.071072 | 0.220705 |
| 1616 | 0.012023 | 0.075453 | 0.25357 |
| 1617 | 0.012384 | 0.075749 | 0.189438 |
| 1618 | 0.009907 | 0.074134 | 0.228244 |
| 1621 | 0.007789 | 0.070227 | 0.245667 |
| 1622 | 0.008908 | 0.072407 | 0.245921 |
| 1623 | 0.011175 | 0.077951 | 0.188074 |
| 1624 | 0.008036 | 0.069872 | 0.246323 |
| 1625 | 0.011073 | 0.074178 | 0.233123 |
| 1626 | 0.012397 | 0.076047 | 0.205037 |
| 1627 | 0.01196 | 0.082003 | 0.236073 |
| 1628 | 0.008087 | 0.073661 | 0.162851 |
| 1629 | 0.009228 | 0.071361 | 0.1983 |
| 1630 | 0.00787 | 0.068021 | 0.252184 |
| 1632 | 0.008463 | 0.070379 | 0.220109 |
| 1633 | 0.008069 | 0.070751 | 0.186138 |
| 1634 | 0.010343 | 0.072986 | 0.210934 |
| 1635 | 0.009638 | 0.077485 | 0.263883 |
| 1636 | 0.008719 | 0.074615 | 0.259029 |
| 1637 | 0.008512 | 0.073437 | 0.167086 |
| 1638 | 0.007929 | 0.072165 | 0.163977 |
| 1639 | 0.007868 | 0.07025 | 0.216269 |
| 1640 | 0.010217 | 0.075129 | 0.212716 |
| 1641 | 0.009846 | 0.072375 | 0.229234 |
| 1642 | 0.008044 | 0.072899 | 0.146821 |
| 1643 | 0.007903 | 0.073916 | 0.202451 |
| 1644 | 0.007997 | 0.072045 | 0.2269 |
| 1645 | 0.008005 | 0.071968 | 0.225724 |
| 1646 | 0.007868 | 0.072947 | 0.218694 |
| 1647 | 0.007874 | 0.07009 | 0.204347 |
| 1648 | 0.008126 | 0.072838 | 0.231684 |
| 1649 | 0.007985 | 0.07098 | 0.217341 |
| 1650 | 0.00805 | 0.073491 | 0.157452 |
| 1651 | 0.008583 | 0.074894 | 0.221222 |
| 1652 | 0.00782 | 0.073647 | 0.23366 |
| 1653 | 0.007727 | 0.072533 | 0.274822 |
| 1654 | 0.007898 | 0.072049 | 0.19207 |
| 1655 | 0.007809 | 0.072421 | 0.239521 |
| 1656 | 0.00814 | 0.070844 | 0.233632 |
| 1657 | 0.008044 | 0.069952 | 0.173161 |
| 1658 | 0.008147 | 0.070865 | 0.114916 |
| 1659 | 0.008054 | 0.070011 | 0.234503 |
| 1660 | 0.008051 | 0.073257 | 0.209313 |
| 1661 | 0.008006 | 0.073666 | 0.220585 |
| 1662 | 0.007882 | 0.072722 | 0.194041 |
| 1663 | 0.0079 | 0.07183 | 0.209789 |
| 1664 | 0.008074 | 0.069676 | 0.185531 |
| 1665 | 0.00878 | 0.071074 | 0.21086 |
| 1666 | 0.007895 | 0.071838 | 0.244376 |
| 1668 | 0.008053 | 0.072861 | 0.253493 |
| 1669 | 0.007873 | 0.073223 | 0.198109 |
| 1670 | 0.007816 | 0.068945 | 0.206857 |
| 1671 | 0.007989 | 0.071814 | 0.303432 |
| 1672 | 0.008207 | 0.073024 | 0.222844 |
| 1673 | 0.008259 | 0.0722 | 0.255081 |
| 1674 | 0.008145 | 0.071765 | 0.197578 |
| 1675 | 0.008243 | 0.07316 | 0.202955 |
| 1676 | 0.008121 | 0.07247 | 0.197388 |
| 1677 | 0.008023 | 0.071901 | 0.24222 |
| 1678 | 0.008907 | 0.074766 | 0.187839 |
| 1679 | 0.007883 | 0.072372 | 0.198258 |
| 1680 | 0.008303 | 0.07202 | 0.20641 |
| 1681 | 0.008051 | 0.068996 | 0.172375 |
| 1682 | 0.008184 | 0.073282 | 0.285672 |
| 1684 | 0.008361 | 0.072729 | 0.170928 |
| 1685 | 0.008716 | 0.074393 | 0.222029 |
| 1686 | 0.008059 | 0.071129 | 0.196348 |
| 1687 | 0.007953 | 0.070337 | 0.21236 |
| 1688 | 0.008643 | 0.070881 | 0.227238 |
| 1689 | 0.007905 | 0.069917 | 0.19241 |
| 1690 | 0.008127 | 0.072187 | 0.219756 |
| 1691 | 0.007958 | 0.073297 | 0.230226 |
| 1692 | 0.00806 | 0.069949 | 0.25326 |
| 1693 | 0.008331 | 0.073454 | 0.232442 |
| 1694 | 0.00995 | 0.07389 | 0.245006 |
| 1695 | 0.00813 | 0.070796 | 0.208166 |
| 1696 | 0.00828 | 0.070973 | 0.196401 |
| 1697 | 0.008427 | 0.070372 | 0.211389 |
| 1698 | 0.010244 | 0.071351 | 0.23418 |
| 1699 | 0.008127 | 0.071392 | 0.186818 |
| 1700 | 0.011627 | 0.078038 | 0.216352 |
| 1701 | 0.008158 | 0.071674 | 0.235836 |
| 1702 | 0.008405 | 0.072728 | 0.214028 |
| 1703 | 0.00931 | 0.072866 | 0.24933 |
| 1704 | 0.00834 | 0.06923 | 0.178878 |
| 1705 | 0.00998 | 0.07348 | 0.262106 |
| 1707 | 0.004095 | 0.007786 | 0.905391 |
| 1708 | 0.00319 | 0.007636 | 0.918093 |
| 1710 | 0.003179 | 0.007381 | 0.810737 |
| 1711 | 0.003206 | 0.007316 | 0.948158 |
| 1712 | 0.003223 | 0.007633 | 0.992454 |
| 1713 | 0.003147 | 0.007825 | 1.018484 |
| 1714 | 0.003156 | 0.007799 | 1.011062 |
| 1715 | 0.003144 | 0.007846 | 1.03755 |
| 1716 | 0.003126 | 0.007534 | 0.995065 |
| 1717 | 0.003303 | 0.008123 | 0.95218 |
| 1718 | 0.003174 | 0.007598 | 0.739364 |
| 1720 | 0.003107 | 0.007531 | 0.963791 |
| 1721 | 0.003184 | 0.007393 | 0.642433 |
| 1722 | 0.003234 | 0.007679 | 1.087014 |
| 1723 | 0.003183 | 0.007625 | 0.746413 |
| 1725 | 0.003166 | 0.00732 | 0.983384 |
| 1726 | 0.003192 | 0.007532 | 0.92262 |
| 1727 | 0.003216 | 0.007484 | 0.718343 |
| 1728 | 0.003213 | 0.00725 | 0.952505 |
| 1729 | 0.003225 | 0.007421 | 0.911589 |
| 1730 | 0.003281 | 0.007498 | 0.995307 |
| 1731 | 0.003053 | 0.007481 | 0.950875 |
| 1732 | 0.00316 | 0.007479 | 0.757397 |
| 1733 | 0.003214 | 0.007451 | 0.940672 |
| 1734 | 0.003219 | 0.007427 | 0.893661 |
| 1735 | 0.003254 | 0.007528 | 0.836399 |
| 1737 | 0.003227 | 0.007374 | 0.911326 |
| 1738 | 0.003214 | 0.007477 | 1.002511 |
| 1739 | 0.00327 | 0.008719 | 0.956423 |
| 1740 | 0.003147 | 0.007789 | 1.00538 |
| 1741 | 0.003279 | 0.007904 | 0.975752 |
| 1742 | 0.003162 | 0.007423 | 1.22881 |
| 1743 | 0.003139 | 0.007692 | 0.743436 |
| 1744 | 0.003205 | 0.007379 | 0.772479 |
| 1745 | 0.003182 | 0.007429 | 1.079506 |
| 1747 | 0.003253 | 0.0075 | 0.816336 |
| 1748 | 0.003362 | 0.008459 | 0.998276 |
| 1749 | 0.003015 | 0.007458 | 0.936332 |
| 1750 | 0.003212 | 0.008153 | 0.859119 |
| 1752 | 0.003259 | 0.007776 | 0.978627 |
| 1753 | 0.00325 | 0.007387 | 0.786866 |
| 1754 | 0.003162 | 0.006997 | 1.003224 |
| 1755 | 0.003259 | 0.007394 | 0.925965 |
| 1756 | 0.00318 | 0.007571 | 1.096225 |
| 1758 | 0.003337 | 0.007882 | 0.985142 |
| 1759 | 0.003418 | 0.008082 | 0.953122 |
| 1760 | 0.003232 | 0.007565 | 0.769634 |
| 1761 | 0.003209 | 0.007716 | 0.826567 |
| 1762 | 0.003197 | 0.007352 | 0.743692 |
| 1763 | 0.003236 | 0.007511 | 1.040475 |
| 1764 | 0.003251 | 0.007572 | 1.383275 |
| 1765 | 0.003257 | 0.013774 | 0.819945 |
| 1766 | 0.003138 | 0.007452 | 0.976752 |
| 1767 | 0.003206 | 0.007674 | 0.936511 |
| 1768 | 0.003234 | 0.008193 | 0.717088 |
| 1769 | 0.003178 | 0.007449 | 0.913192 |
| 1771 | 0.003187 | 0.007352 | 0.941054 |
| 1772 | 0.005576 | 0.019795 | 0.767377 |
| 1773 | 0.003294 | 0.012787 | 0.583382 |
| 1774 | 0.003183 | 0.007692 | 0.809862 |
| 1775 | 0.003131 | 0.007429 | 1.000089 |
| 1776 | 0.003174 | 0.007465 | 0.908376 |
| 1777 | 0.003238 | 0.00771 | 1.13952 |
| 1778 | 0.003232 | 0.007417 | 0.854898 |
| 1779 | 0.003218 | 0.007322 | 0.736095 |
| 1780 | 0.003511 | 0.008457 | 0.949085 |
| 1781 | 0.003302 | 0.009751 | 0.834468 |
| 1782 | 0.003093 | 0.007604 | 0.813662 |
| 1783 | 0.003061 | 0.007604 | 0.894994 |
| 1784 | 0.003161 | 0.007326 | 0.70474 |
| 1785 | 0.003225 | 0.007357 | 0.699541 |
| 1786 | 0.003164 | 0.007261 | 0.794668 |
| 1787 | 0.00315 | 0.007418 | 0.964931 |
| 1788 | 0.003283 | 0.007843 | 0.946281 |
| 1789 | 0.003291 | 0.007593 | 0.936091 |
| 1790 | 0.003761 | 0.00877 | 0.886762 |
| 1791 | 0.003112 | 0.007642 | 0.918008 |
| 1792 | 0.003268 | 0.007666 | 0.703354 |
| 1793 | 0.003133 | 0.007455 | 0.842638 |
| 1794 | 0.003159 | 0.007349 | 0.728775 |
| 1795 | 0.003246 | 0.007273 | 0.745148 |
| 1796 | 0.003613 | 0.007904 | 0.628593 |
| 1797 | 0.00427 | 0.008685 | 0.659605 |
| 1798 | 0.003091 | 0.007893 | 0.885414 |
| 1799 | 0.003119 | 0.007443 | 1.016389 |
| 1801 | 0.005041 | 0.009766 | 0.788892 |
| 1802 | 0.003799 | 0.009741 | 0.970487 |
| 1803 | 0.003191 | 0.007455 | 0.811591 |
| 1804 | 0.003256 | 0.007526 | 0.980185 |
| 1806 | 0.007832 | 0.015298 | 0.668837 |
| 1808 | 0.002099 | 0.00239 | 0.713927 |
| 1809 | 0.003792 | 0.004621 | 0.798598 |
| 1810 | 0.002017 | 0.002054 | 0.778629 |
| 1811 | 0.001935 | 0.002012 | 0.827105 |
| 1812 | 0.001955 | 0.002041 | 0.652207 |
| 1813 | 0.002017 | 0.002107 | 1.07398 |
| 1814 | 0.001992 | 0.00212 | 0.938161 |
| 1815 | 0.002057 | 0.002093 | 0.672235 |
| 1816 | 0.002067 | 0.002143 | 0.813551 |
| 1817 | 0.001993 | 0.00201 | 0.666663 |
| 1818 | 0.001943 | 0.002032 | 1.177111 |
| 1819 | 0.002001 | 0.002046 | 0.840791 |
| 1820 | 0.00202 | 0.002025 | 0.821089 |
| 1821 | 0.010528 | 0.014897 | 1.05278 |
| 1822 | 0.001978 | 0.002002 | 0.847594 |
| 1823 | 0.002033 | 0.002129 | 0.923411 |
| 1824 | 0.001995 | 0.002089 | 0.931098 |
| 1825 | 0.001951 | 0.002044 | 0.72614 |
| 1826 | 0.001901 | 0.002026 | 0.969977 |
| 1827 | 0.002017 | 0.002057 | 1.124311 |
| 1828 | 0.002003 | 0.002006 | 0.621247 |
| 1829 | 0.002024 | 0.002243 | 0.826881 |
| 1830 | 0.001924 | 0.001957 | 0.830188 |
| 1831 | 0.002058 | 0.002061 | 1.08971 |
| 1832 | 0.002021 | 0.002227 | 0.99019 |
| 1833 | 0.001961 | 0.002 | 1.043679 |
| 1834 | 0.001997 | 0.002049 | 1.079505 |
| 1835 | 0.002924 | 0.036425 | 0.9315 |
| 1836 | 0.002051 | 0.002049 | 0.764385 |
| 1837 | 0.001987 | 0.002013 | 0.939205 |
| 1838 | 0.001986 | 0.002074 | 0.945167 |
| 1839 | 0.00206 | 0.002081 | 0.757964 |
| 1840 | 0.001961 | 0.002069 | 0.963668 |
| 1841 | 0.001918 | 0.001952 | 0.824621 |
| 1842 | 0.001947 | 0.00206 | 0.828898 |
| 1844 | 0.002009 | 0.002099 | 0.812678 |
| 1845 | 0.001913 | 0.002007 | 0.924997 |
| 1846 | 0.002008 | 0.002012 | 1.067461 |
| 1847 | 0.002012 | 0.002021 | 0.910096 |
| 1848 | 0.002014 | 0.002092 | 1.070281 |
| 1849 | 0.00198 | 0.002053 | 1.115724 |
| 1850 | 0.00196 | 0.002017 | 0.780307 |
| 1851 | 0.001999 | 0.002057 | 0.88249 |
| 1852 | 0.001974 | 0.002022 | 0.630003 |
| 1853 | 0.00197 | 0.001976 | 0.893397 |
| 1854 | 0.002051 | 0.002022 | 0.767922 |
| 1855 | 0.002001 | 0.002064 | 1.128736 |
| 1856 | 0.002104 | 0.002101 | 1.08652 |
| 1857 | 0.001954 | 0.002061 | 0.814235 |
| 1858 | 0.001944 | 0.002018 | 0.855267 |
| 1859 | 0.001923 | 0.002007 | 1.245303 |
| 1860 | 0.001933 | 0.002022 | 0.820898 |
| 1861 | 0.001984 | 0.001993 | 0.92614 |
| 1862 | 0.002019 | 0.002032 | 1.0456 |
| 1863 | 0.002124 | 0.002046 | 0.904399 |
| 1864 | 0.002036 | 0.002068 | 0.957025 |
| 1865 | 0.001969 | 0.002058 | 0.878785 |
| 1866 | 0.001941 | 0.002003 | 0.88721 |
| 1867 | 0.001968 | 0.002036 | 0.765442 |
| 1868 | 0.002326 | 0.002549 | 0.633458 |
| 1869 | 0.002028 | 0.002049 | 0.630945 |
| 1870 | 0.002011 | 0.002052 | 1.044067 |
| 1871 | 0.002039 | 0.002032 | 0.858321 |
| 1872 | 0.002073 | 0.002103 | 0.894575 |
| 1874 | 0.00194 | 0.002077 | 0.741909 |
| 1876 | 0.002012 | 0.002203 | 0.77563 |
| 1877 | 0.002166 | 0.00293 | 0.909265 |
| 1878 | 0.002203 | 0.003175 | 0.764486 |
| 1879 | 0.002076 | 0.002159 | 0.870865 |
| 1880 | 0.002123 | 0.00211 | 0.974287 |
| 1882 | 0.001971 | 0.00206 | 1.194054 |
| 1883 | 0.001965 | 0.00198 | 0.850391 |
| 1884 | 0.001983 | 0.00208 | 0.739432 |
| 1885 | 0.004432 | 0.006831 | 0.921387 |
| 1886 | 0.001964 | 0.002047 | 0.905673 |
| 1887 | 0.002128 | 0.002131 | 0.970315 |
| 1888 | 0.00216 | 0.002141 | 0.900712 |
| 1889 | 0.001985 | 0.00209 | 0.904929 |
| 1890 | 0.002027 | 0.002135 | 0.942252 |
| 1891 | 0.001943 | 0.002032 | 1.031348 |
| 1892 | 0.001968 | 0.002051 | 0.673121 |
| 1894 | 0.002064 | 0.002078 | 1.215602 |
| 1895 | 0.002657 | 0.002895 | 0.952559 |
| 1897 | 0.004208 | 0.004197 | 0.877243 |
| 1898 | 0.001943 | 0.002098 | 0.720743 |
| 1899 | 0.001911 | 0.002064 | 0.771716 |
| 1900 | 0.001992 | 0.002012 | 1.042259 |
| 1902 | 0.002111 | 0.002087 | 0.877153 |
| 1903 | 0.002066 | 0.002106 | 1.055068 |
| 1904 | 0.003184 | 0.003144 | 1.09739 |
| 1909 | 0.002055 | 0.003948 | 0.847157 |
| 1912 | 0.00224 | 0.004186 | 0.742941 |
| 1914 | 0.002728 | 0.006378 | 1.015755 |
| 1915 | 0.002104 | 0.003971 | 1.11464 |
| 1916 | 0.002013 | 0.00378 | 0.838864 |
| 1917 | 0.002152 | 0.003877 | 0.908892 |
| 1919 | 0.002163 | 0.003718 | 0.800267 |
| 1921 | 0.002207 | 0.003959 | 0.605339 |
| 1922 | 0.002089 | 0.004028 | 0.664389 |
| 1923 | 0.002035 | 0.003926 | 0.807267 |
| 1924 | 0.002045 | 0.003803 | 0.75616 |
| 1925 | 0.002024 | 0.003787 | 0.78207 |
| 1926 | 0.002081 | 0.004003 | 0.919381 |
| 1927 | 0.002087 | 0.0039 | 0.87094 |
| 1928 | 0.002169 | 0.003842 | 0.85592 |
| 1929 | 0.002196 | 0.003892 | 1.04674 |
| 1930 | 0.002059 | 0.004072 | 0.758699 |
| 1931 | 0.002018 | 0.003893 | 0.935624 |
| 1932 | 0.00212 | 0.003782 | 0.741426 |
| 1935 | 0.002149 | 0.003827 | 0.781431 |
| 1936 | 0.002114 | 0.003987 | 0.983047 |
| 1939 | 0.002105 | 0.003927 | 1.012539 |
| 1940 | 0.002102 | 0.003894 | 0.972949 |
| 1943 | 0.002208 | 0.003969 | 0.819485 |
| 1944 | 0.002129 | 0.003932 | 0.90291 |
| 1949 | 0.002939 | 0.028633 | 0.702177 |
| 1951 | 0.00213 | 0.003953 | 0.756432 |
| 1954 | 0.002084 | 0.003994 | 0.716999 |
| 1955 | 0.002082 | 0.003928 | 0.924112 |
| 1956 | 0.002151 | 0.004369 | 0.83182 |
| 1959 | 0.002066 | 0.003906 | 0.943132 |
| 1960 | 0.002082 | 0.003897 | 0.845987 |
| 1962 | 0.002068 | 0.004065 | 0.677381 |
| 1964 | 0.002309 | 0.005092 | 0.691221 |
| 1965 | 0.002145 | 0.004599 | 1.02379 |
| 1966 | 0.002096 | 0.003928 | 0.821807 |
| 1967 | 0.002135 | 0.004049 | 0.784332 |
| 1969 | 0.00258 | 0.004963 | 0.869906 |
| 1970 | 0.002402 | 0.005499 | 0.802557 |
| 1971 | 0.003555 | 0.00803 | 0.915366 |
| 1972 | 0.002123 | 0.004341 | 1.002436 |
| 1973 | 0.002093 | 0.004195 | 0.739287 |
| 1974 | 0.002264 | 0.004213 | 1.090771 |
| 1975 | 0.00213 | 0.004172 | 0.890328 |
| 1976 | 0.002854 | 0.00629 | 1.03609 |
| 1977 | 0.0022 | 0.003857 | 0.750837 |
| 1978 | 0.002184 | 0.006424 | 0.789674 |
| 1979 | 0.00218 | 0.004072 | 1.041609 |
| 1980 | 0.002089 | 0.003918 | 0.742203 |
| 1981 | 0.002022 | 0.00393 | 0.802623 |
| 1983 | 0.00211 | 0.00387 | 0.823111 |
| 1985 | 0.00238 | 0.005063 | 0.920921 |
| 1987 | 0.002096 | 0.003989 | 0.820149 |
| 1988 | 0.002196 | 0.004207 | 0.733845 |
| 1993 | 0.002629 | 0.004548 | 0.923992 |
| 1994 | 0.003546 | 0.013836 | 0.780026 |
| 1996 | 0.00246 | 0.004831 | 0.793669 |
| 1998 | 0.005897 | 0.010175 | 0.864774 |
| 1999 | 0.002493 | 0.004889 | 0.91103 |
| 2001 | 0.003035 | 0.009213 | 0.760895 |
| 2004 | 0.009008 | 0.051959 | 0.315777 |
| 2006 | 0.007683 | 0.047495 | 0.479879 |
| 2007 | 0.00815 | 0.046714 | 0.350549 |
| 2009 | 0.007773 | 0.047424 | 0.356192 |
| 2010 | 0.008014 | 0.048727 | 0.376383 |
| 2011 | 0.007678 | 0.050682 | 0.388038 |
| 2012 | 0.007658 | 0.048585 | 0.40471 |
| 2013 | 0.00776 | 0.046273 | 0.269896 |
| 2014 | 0.007967 | 0.048251 | 0.353403 |
| 2015 | 0.008137 | 0.046658 | 0.338498 |
| 2016 | 0.007733 | 0.04596 | 0.356733 |
| 2017 | 0.007571 | 0.045682 | 0.396185 |
| 2018 | 0.007836 | 0.047143 | 0.396857 |
| 2019 | 0.008556 | 0.049704 | 0.356688 |
| 2020 | 0.007647 | 0.047487 | 0.406455 |
| 2021 | 0.007659 | 0.046888 | 0.36344 |
| 2022 | 0.007575 | 0.046464 | 0.411014 |
| 2023 | 0.008 | 0.046656 | 0.392491 |
| 2024 | 0.007671 | 0.046704 | 0.343154 |
| 2026 | 0.008452 | 0.049376 | 0.408859 |
| 2027 | 0.007698 | 0.046912 | 0.328525 |
| 2028 | 0.007683 | 0.046616 | 0.339399 |
| 2029 | 0.007666 | 0.046757 | 0.297973 |
| 2030 | 0.007675 | 0.046508 | 0.435685 |
| 2031 | 0.008134 | 0.04519 | 0.411958 |
| 2032 | 0.007675 | 0.045703 | 0.307964 |
| 2033 | 0.007603 | 0.046911 | 0.368773 |
| 2034 | 0.007487 | 0.046125 | 0.42095 |
| 2035 | 0.007824 | 0.048172 | 0.297846 |
| 2036 | 0.007336 | 0.048153 | 0.42074 |
| 2037 | 0.008092 | 0.047712 | 0.309579 |
| 2038 | 0.007771 | 0.046713 | 0.372379 |
| 2039 | 0.008147 | 0.047807 | 0.46323 |
| 2041 | 0.007752 | 0.046575 | 0.519016 |
| 2042 | 0.007808 | 0.047418 | 0.427933 |
| 2043 | 0.007841 | 0.048971 | 0.487233 |
| 2044 | 0.007751 | 0.04791 | 0.502666 |
| 2045 | 0.007997 | 0.04765 | 0.425789 |
| 2046 | 0.007681 | 0.047159 | 0.387429 |
| 2047 | 0.008297 | 0.04738 | 0.434821 |
| 2048 | 0.00876 | 0.04945 | 0.444633 |
| 2049 | 0.007392 | 0.046997 | 0.359452 |
| 2050 | 0.008459 | 0.051214 | 0.257893 |
| 2051 | 0.007739 | 0.048823 | 0.379033 |
| 2052 | 0.007651 | 0.047708 | 0.301475 |
| 2055 | 0.008096 | 0.046365 | 0.286331 |
| 2056 | 0.007633 | 0.045501 | 0.321644 |
| 2057 | 0.007723 | 0.04781 | 0.286926 |
| 2058 | 0.007596 | 0.047326 | 0.35697 |
| 2059 | 0.007819 | 0.048191 | 0.328469 |
| 2060 | 0.007522 | 0.049484 | 0.346836 |
| 2062 | 0.007728 | 0.04874 | 0.437359 |
| 2064 | 0.007614 | 0.047857 | 0.346887 |
| 2065 | 0.007718 | 0.04734 | 0.320753 |
| 2066 | 0.007861 | 0.048273 | 0.33439 |
| 2067 | 0.007787 | 0.048374 | 0.360579 |
| 2068 | 0.007899 | 0.047923 | 0.438593 |
| 2069 | 0.007997 | 0.047566 | 0.294398 |
| 2070 | 0.007618 | 0.047015 | 0.368413 |
| 2071 | 0.008211 | 0.047051 | 0.398477 |
| 2072 | 0.007816 | 0.045952 | 0.291645 |
| 2073 | 0.00744 | 0.047558 | 0.416445 |
| 2074 | 0.007748 | 0.047678 | 0.31422 |
| 2075 | 0.007821 | 0.049202 | 0.410995 |
| 2076 | 0.007579 | 0.048504 | 0.35862 |
| 2077 | 0.007606 | 0.048341 | 0.336701 |
| 2078 | 0.007833 | 0.047621 | 0.430521 |
| 2079 | 0.008881 | 0.04708 | 0.367176 |
| 2080 | 0.007632 | 0.046431 | 0.401737 |
| 2081 | 0.007585 | 0.047886 | 0.328978 |
| 2082 | 0.00782 | 0.048005 | 0.42346 |
| 2084 | 0.007872 | 0.048572 | 0.374299 |
| 2085 | 0.007508 | 0.048884 | 0.363426 |
| 2086 | 0.007641 | 0.04778 | 0.455748 |
| 2087 | 0.007576 | 0.046705 | 0.394438 |
| 2089 | 0.007588 | 0.050455 | 0.512216 |
| 2091 | 0.007914 | 0.049272 | 0.348157 |
| 2092 | 0.008757 | 0.085812 | 0.387008 |
| 2093 | 0.007033 | 0.04869 | 0.543809 |
| 2094 | 0.007412 | 0.048193 | 0.462981 |
| 2095 | 0.007785 | 0.048394 | 0.378497 |
| 2096 | 0.00808 | 0.04793 | 0.422319 |
| 2097 | 0.007585 | 0.052485 | 0.339995 |
| 2098 | 0.007722 | 0.077927 | 0.360082 |
| 2101 | 0.003196 | 0.02074 | 0.711343 |
| 2102 | 0.003171 | 0.019613 | 0.932187 |
| 2103 | 0.003015 | 0.019345 | 0.66012 |
| 2105 | 0.003183 | 0.019557 | 0.922989 |
| 2106 | 0.00304 | 0.019249 | 0.610898 |
| 2107 | 0.003086 | 0.020481 | 0.726218 |
| 2108 | 0.003083 | 0.01979 | 0.699435 |
| 2109 | 0.003083 | 0.019528 | 0.595743 |
| 2110 | 0.003043 | 0.01985 | 0.811218 |
| 2111 | 0.003105 | 0.019319 | 0.486517 |
| 2112 | 0.003041 | 0.018937 | 0.51889 |
| 2113 | 0.00304 | 0.019069 | 0.468082 |
| 2114 | 0.003108 | 0.018998 | 0.482694 |
| 2115 | 0.00313 | 0.019507 | 0.554585 |
| 2116 | 0.003166 | 0.020002 | 0.7362 |
| 2118 | 0.003188 | 0.01935 | 0.596176 |
| 2119 | 0.003134 | 0.019993 | 0.637627 |
| 2120 | 0.003081 | 0.019437 | 0.678214 |
| 2121 | 0.003146 | 0.019336 | 0.60839 |
| 2122 | 0.003065 | 0.019235 | 0.499429 |
| 2124 | 0.003203 | 0.019847 | 0.557828 |
| 2125 | 0.003239 | 0.02001 | 0.552858 |
| 2126 | 0.003195 | 0.019259 | 0.656 |
| 2127 | 0.003154 | 0.019186 | 0.483088 |
| 2129 | 0.003119 | 0.019051 | 0.620213 |
| 2130 | 0.003123 | 0.019615 | 0.424395 |
| 2134 | 0.003217 | 0.019331 | 0.536501 |
| 2135 | 0.003065 | 0.019226 | 0.52152 |
| 2137 | 0.003178 | 0.018652 | 0.698231 |
| 2138 | 0.003168 | 0.019197 | 0.587975 |
| 2140 | 0.003216 | 0.019528 | 0.625389 |
| 2141 | 0.00316 | 0.019709 | 0.682383 |
| 2142 | 0.003241 | 0.019746 | 0.516585 |
| 2143 | 0.00322 | 0.019625 | 0.613552 |
| 2144 | 0.003175 | 0.018746 | 0.700146 |
| 2145 | 0.003151 | 0.019352 | 0.390091 |
| 2146 | 0.003246 | 0.019676 | 0.504855 |
| 2147 | 0.00315 | 0.018806 | 0.691577 |
| 2148 | 0.00327 | 0.020065 | 0.647184 |
| 2149 | 0.003318 | 0.019742 | 0.593045 |
| 2150 | 0.003295 | 0.019112 | 0.545147 |
| 2151 | 0.003222 | 0.019324 | 0.623487 |
| 2153 | 0.003163 | 0.019031 | 0.622529 |
| 2154 | 0.003097 | 0.019212 | 0.412396 |
| 2155 | 0.003183 | 0.018864 | 0.628595 |
| 2157 | 0.003208 | 0.019445 | 0.512846 |
| 2158 | 0.00328 | 0.020175 | 0.608198 |
| 2159 | 0.00605 | 0.027206 | 0.523008 |
| 2160 | 0.003294 | 0.019204 | 0.60676 |
| 2161 | 0.003175 | 0.019186 | 0.58493 |
| 2162 | 0.003073 | 0.018774 | 0.676172 |
| 2163 | 0.003213 | 0.026017 | 0.717037 |
| 2164 | 0.003146 | 0.019228 | 0.629069 |
| 2165 | 0.003177 | 0.019712 | 0.651398 |
| 2166 | 0.015226 | 0.067595 | 0.77104 |
| 2168 | 0.003259 | 0.019199 | 0.709717 |
| 2169 | 0.003096 | 0.019088 | 0.552215 |
| 2170 | 0.003193 | 0.019073 | 0.843088 |
| 2171 | 0.003203 | 0.018715 | 0.663203 |
| 2173 | 0.003078 | 0.018872 | 0.596725 |
| 2174 | 0.003215 | 0.019295 | 0.586757 |
| 2175 | 0.003355 | 0.020379 | 0.591717 |
| 2176 | 0.00331 | 0.020075 | 0.621581 |
| 2178 | 0.003288 | 0.019762 | 0.563754 |
| 2179 | 0.023311 | 0.108889 | 0.634632 |
| 2180 | 0.003154 | 0.018821 | 0.582331 |
| 2181 | 0.003174 | 0.019114 | 0.467664 |
| 2182 | 0.003295 | 0.019446 | 0.780908 |
| 2183 | 0.003253 | 0.01977 | 0.567795 |
| 2184 | 0.003242 | 0.020002 | 0.791142 |
| 2185 | 0.003168 | 0.019575 | 0.775637 |
| 2186 | 0.003096 | 0.018948 | 0.568767 |
| 2187 | 0.003259 | 0.019195 | 0.523207 |
| 2188 | 0.003153 | 0.019022 | 0.565014 |
| 2189 | 0.003154 | 0.019989 | 0.535538 |
| 2190 | 0.003524 | 0.019646 | 0.64781 |
| 2191 | 0.004391 | 0.020707 | 0.675903 |
| 2192 | 0.00296 | 0.020679 | 0.695385 |
| 2193 | 0.00312 | 0.019868 | 0.56865 |
| 2194 | 0.003186 | 0.020148 | 0.67523 |
| 2195 | 0.003131 | 0.019043 | 0.529032 |
| 2196 | 0.003166 | 0.020125 | 0.702299 |
| 2197 | 0.003391 | 0.019802 | 0.716997 |
| 2198 | 0.007135 | 0.025543 | 0.647545 |
| 2200 | 0.006172 | 0.047972 | 0.218144 |
| 2201 | 0.006242 | 0.04465 | 0.132477 |
| 2202 | 0.00613 | 0.045688 | 0.181752 |
| 2203 | 0.006068 | 0.046964 | 0.152828 |
| 2204 | 0.005921 | 0.046084 | 0.14141 |
| 2205 | 0.006157 | 0.046238 | 0.191263 |
| 2206 | 0.006136 | 0.046016 | 0.190921 |
| 2207 | 0.005964 | 0.047186 | 0.153246 |
| 2208 | 0.006177 | 0.047117 | 0.155879 |
| 2210 | 0.006352 | 0.043635 | 0.146858 |
| 2211 | 0.006108 | 0.044772 | 0.155641 |
| 2212 | 0.006024 | 0.045543 | 0.142517 |
| 2213 | 0.005939 | 0.046344 | 0.143164 |
| 2214 | 0.006222 | 0.04614 | 0.192484 |
| 2215 | 0.006083 | 0.047678 | 0.16743 |
| 2216 | 0.006163 | 0.053998 | 0.13437 |
| 2217 | 0.006135 | 0.045467 | 0.137485 |
| 2218 | 0.006112 | 0.046402 | 0.156384 |
| 2219 | 0.006181 | 0.046612 | 0.162334 |
| 2220 | 0.006096 | 0.050543 | 0.162733 |
| 2221 | 0.006186 | 0.047334 | 0.152158 |
| 2222 | 0.006075 | 0.047502 | 0.194765 |
| 2223 | 0.006029 | 0.046467 | 0.137691 |
| 2224 | 0.006314 | 0.055065 | 0.20807 |
| 2226 | 0.006294 | 0.045913 | 0.209723 |
| 2227 | 0.006684 | 0.046979 | 0.190792 |
| 2228 | 0.006095 | 0.04607 | 0.165137 |
| 2229 | 0.006403 | 0.052747 | 0.16783 |
| 2231 | 0.006318 | 0.047325 | 0.120074 |
| 2232 | 0.006136 | 0.047645 | 0.154048 |
| 2233 | 0.008079 | 0.057783 | 0.168608 |
| 2234 | 0.006343 | 0.048289 | 0.130913 |
| 2238 | 0.006235 | 0.046307 | 0.168547 |
| 2239 | 0.006246 | 0.046488 | 0.140553 |
| 2241 | 0.006379 | 0.054148 | 0.24124 |
| 2242 | 0.006455 | 0.047961 | 0.131922 |
| 2243 | 0.006337 | 0.046456 | 0.186051 |
| 2244 | 0.006203 | 0.045602 | 0.125512 |
| 2245 | 0.006499 | 0.057369 | 0.154019 |
| 2246 | 0.006248 | 0.056398 | 0.149261 |
| 2247 | 0.006307 | 0.046397 | 0.228139 |
| 2248 | 0.006168 | 0.047874 | 0.112137 |
| 2249 | 0.006196 | 0.046805 | 0.155686 |
| 2250 | 0.00895 | 0.054401 | 0.183022 |
| 2251 | 0.00639 | 0.045554 | 0.169424 |
| 2252 | 0.006125 | 0.046755 | 0.150411 |
| 2253 | 0.00622 | 0.053633 | 0.191924 |
| 2254 | 0.006108 | 0.046631 | 0.13209 |
| 2255 | 0.00633 | 0.04723 | 0.135853 |
| 2256 | 0.006144 | 0.061456 | 0.112837 |
| 2257 | 0.006404 | 0.047664 | 0.179404 |
| 2258 | 0.00629 | 0.04559 | 0.115119 |
| 2259 | 0.006517 | 0.047495 | 0.139756 |
| 2260 | 0.006178 | 0.046241 | 0.166521 |
| 2261 | 0.006256 | 0.047309 | 0.21795 |
| 2262 | 0.006307 | 0.046961 | 0.155011 |
| 2263 | 0.006309 | 0.046877 | 0.215311 |
| 2264 | 0.00632 | 0.047891 | 0.153035 |
| 2265 | 0.006283 | 0.058641 | 0.211202 |
| 2266 | 0.006381 | 0.047328 | 0.134896 |
| 2267 | 0.006567 | 0.045783 | 0.135634 |
| 2269 | 0.006447 | 0.046908 | 0.133405 |
| 2270 | 0.006417 | 0.04824 | 0.139725 |
| 2271 | 0.00618 | 0.046553 | 0.166047 |
| 2272 | 0.006225 | 0.047393 | 0.160067 |
| 2273 | 0.006276 | 0.047685 | 0.170297 |
| 2274 | 0.00624 | 0.04688 | 0.198238 |
| 2275 | 0.006534 | 0.046315 | 0.157348 |
| 2276 | 0.007069 | 0.047997 | 0.152782 |
| 2277 | 0.009026 | 0.05061 | 0.196609 |
| 2278 | 0.014832 | 0.067865 | 0.14616 |
| 2279 | 0.006428 | 0.046196 | 0.131052 |
| 2280 | 0.006224 | 0.046989 | 0.145311 |
| 2281 | 0.006154 | 0.047328 | 0.14968 |
| 2282 | 0.006248 | 0.046031 | 0.150055 |
| 2283 | 0.006174 | 0.047343 | 0.163964 |
| 2284 | 0.008235 | 0.4302 | 0.20482 |
| 2285 | 1.795726 | 2.705619 | 0.273225 |
| 2286 | 0.008775 | 0.050342 | 0.1587 |
| 2287 | 0.00631 | 0.047599 | 0.134257 |
| 2288 | 0.006544 | 0.046959 | 0.161388 |
| 2289 | 0.008183 | 0.050593 | 0.141202 |
| 2290 | 0.006064 | 0.048815 | 0.175503 |
| 2291 | 0.00618 | 0.046271 | 0.152712 |
| 2292 | 0.007016 | 0.048265 | 0.181027 |
| 2293 | 0.008176 | 0.049316 | 0.164933 |
| 2294 | 0.006486 | 0.048746 | 0.152462 |
| 2295 | 0.006359 | 0.047944 | 0.131901 |
| 2296 | 0.00722 | 0.04902 | 0.134938 |
| 2299 | 0.001841 | 0.021836 | 0.688111 |
| 2300 | 0.086641 | 0.166328 | 0.690494 |
| 2301 | 0.001849 | 0.020911 | 0.564046 |
| 2302 | 0.001837 | 0.020036 | 0.674931 |
| 2303 | 0.001843 | 0.020641 | 0.808588 |
| 2304 | 0.001836 | 0.020295 | 0.58194 |
| 2305 | 0.001822 | 0.020215 | 0.654307 |
| 2306 | 0.002438 | 0.022581 | 0.736907 |
| 2307 | 0.00178 | 0.021066 | 0.620358 |
| 2308 | 0.001832 | 0.020095 | 0.668554 |
| 2309 | 0.00178 | 0.019898 | 0.763666 |
| 2310 | 0.003472 | 0.020626 | 0.667713 |
| 2311 | 0.001796 | 0.019725 | 0.588065 |
| 2312 | 0.001799 | 0.020161 | 0.680887 |
| 2313 | 0.001785 | 0.020109 | 0.751756 |
| 2314 | 0.001785 | 0.020767 | 0.734117 |
| 2315 | 0.001731 | 0.021027 | 0.575685 |
| 2316 | 0.001777 | 0.020545 | 0.621465 |
| 2317 | 0.001726 | 0.020462 | 0.635235 |
| 2319 | 0.001783 | 0.019558 | 0.623992 |
| 2320 | 0.001783 | 0.019848 | 0.456169 |
| 2321 | 0.001819 | 0.019947 | 0.557319 |
| 2322 | 0.001816 | 0.020314 | 0.849308 |
| 2323 | 0.001812 | 0.021185 | 0.5437 |
| 2324 | 0.002117 | 0.021167 | 0.623834 |
| 2325 | 0.001774 | 0.020086 | 0.705615 |
| 2326 | 0.001762 | 0.020397 | 0.609166 |
| 2327 | 0.001838 | 0.019555 | 0.516895 |
| 2328 | 0.001819 | 0.019407 | 0.566088 |
| 2329 | 0.001846 | 0.020255 | 0.675583 |
| 2330 | 0.001822 | 0.020372 | 0.658319 |
| 2331 | 0.00183 | 0.020907 | 0.712729 |
| 2332 | 0.001716 | 0.020645 | 0.633101 |
| 2333 | 0.001761 | 0.020053 | 0.496843 |
| 2334 | 0.001795 | 0.020116 | 0.470328 |
| 2335 | 0.001973 | 0.019994 | 0.69908 |
| 2336 | 0.002355 | 0.021316 | 0.639826 |
| 2337 | 0.002071 | 0.019995 | 0.717695 |
| 2338 | 0.003361 | 0.022952 | 0.608106 |
| 2339 | 0.002512 | 0.022295 | 0.934816 |
| 2340 | 0.001872 | 0.02124 | 0.653365 |
| 2341 | 0.001758 | 0.020188 | 0.628362 |
| 2342 | 0.00179 | 0.020031 | 0.430364 |
| 2343 | 0.00225 | 0.021727 | 0.620708 |
| 2344 | 0.487092 | 1.242389 | 0.705218 |
| 2346 | 0.62511 | 0.991799 | 0.755326 |
| 2347 | 0.007601 | 0.031311 | 0.516649 |
| 2348 | 0.003801 | 0.024391 | 0.44802 |
| 2349 | 0.001763 | 0.020418 | 0.710152 |
| 2352 | 0.001967 | 0.020354 | 0.674644 |
| 2353 | 0.002343 | 0.020885 | 0.451139 |
| 2354 | 0.005892 | 0.03064 | 0.7194 |
| 2355 | 0.002628 | 0.021243 | 0.487594 |
| 2356 | 0.002016 | 0.021037 | 0.615679 |
| 2357 | 0.002143 | 0.021701 | 0.386956 |
| 2358 | 0.00212 | 0.021198 | 0.829166 |
| 2359 | 0.001791 | 0.020172 | 0.544619 |
| 2360 | 0.001856 | 0.020163 | 0.486583 |
| 2361 | 0.001901 | 0.019958 | 0.530139 |
| 2362 | 0.001879 | 0.020308 | 0.653006 |
| 2363 | 0.001922 | 0.020067 | 0.590144 |
| 2364 | 0.001837 | 0.02092 | 0.592571 |
| 2365 | 0.001792 | 0.020929 | 0.551517 |
| 2366 | 0.001791 | 0.020276 | 0.562391 |
| 2367 | 0.001762 | 0.020237 | 0.490932 |
| 2368 | 0.001774 | 0.019958 | 0.581639 |
| 2369 | 0.002441 | 0.023886 | 0.442913 |
| 2370 | 0.001851 | 0.019744 | 0.597586 |
| 2371 | 0.001833 | 0.019874 | 0.780994 |
| 2372 | 0.001836 | 0.020828 | 0.624654 |
| 2373 | 0.002203 | 0.0221 | 0.648313 |
| 2374 | 0.001781 | 0.02029 | 0.477161 |
| 2375 | 0.001758 | 0.019773 | 0.487119 |
| 2376 | 0.001766 | 0.019771 | 0.526721 |
| 2377 | 0.001848 | 0.019724 | 0.617253 |
| 2379 | 0.001845 | 0.020022 | 0.490031 |
| 2380 | 0.001881 | 0.020903 | 0.584369 |
| 2381 | 0.329765 | 0.386006 | 0.504277 |
| 2382 | 0.002171 | 0.020794 | 0.601362 |
| 2383 | 0.001822 | 0.020056 | 0.529306 |
| 2384 | 0.001781 | 0.019899 | 0.518998 |
| 2385 | 0.002162 | 0.020271 | 0.525008 |
| 2386 | 0.001834 | 0.019886 | 0.548855 |
| 2387 | 0.002131 | 0.020496 | 0.494099 |
| 2388 | 0.002937 | 0.022063 | 0.622276 |
| 2390 | 0.001843 | 0.021049 | 0.592485 |
| 2392 | 0.001773 | 0.020597 | 0.495091 |
| 2394 | 0.001773 | 0.020237 | 0.601764 |
| 2395 | 0.001806 | 0.020086 | 0.558798 |
| 2396 | 0.001807 | 0.02021 | 0.456341 |
| 2397 | 0.002983 | 0.022137 | 0.664263 |
| 2399 | 0.002032 | 0.028561 | 0.419347 |
| 2400 | 0.001953 | 0.02732 | 0.539873 |
| 2401 | 0.001912 | 0.027274 | 0.638418 |
| 2402 | 0.001914 | 0.026898 | 0.523509 |
| 2403 | 0.001954 | 0.027389 | 0.678695 |
| 2404 | 0.001977 | 0.027124 | 0.765805 |
| 2405 | 0.00211 | 0.030541 | 0.701647 |
| 2406 | 0.00247 | 0.029078 | 0.813564 |
| 2407 | 0.002076 | 0.027414 | 0.698683 |
| 2408 | 0.001925 | 0.028973 | 0.656613 |
| 2409 | 0.002188 | 0.027465 | 0.541032 |
| 2410 | 0.001926 | 0.025909 | 0.545951 |
| 2411 | 0.00194 | 0.026781 | 0.754864 |
| 2412 | 0.00382 | 0.039591 | 0.762652 |
| 2413 | 0.002162 | 0.027084 | 0.685745 |
| 2414 | 0.002494 | 0.029168 | 0.594618 |
| 2415 | 0.002268 | 0.029022 | 0.768169 |
| 2416 | 0.001922 | 0.026555 | 0.470209 |
| 2417 | 0.002127 | 0.027122 | 0.636734 |
| 2418 | 0.001951 | 0.026994 | 0.650385 |
| 2419 | 0.001945 | 0.027143 | 0.883213 |
| 2420 | 0.002209 | 0.02794 | 0.572425 |
| 2421 | 0.003578 | 0.031521 | 0.65348 |
| 2422 | 0.4597 | 1.118984 | 0.742345 |
| 2423 | 0.002036 | 0.027481 | 0.594989 |
| 2424 | 0.001912 | 0.026795 | 0.566853 |
| 2425 | 0.002128 | 0.027336 | 0.616199 |
| 2426 | 0.004274 | 0.035029 | 0.701308 |
| 2427 | 0.002039 | 0.026637 | 0.688343 |
| 2428 | 0.002025 | 0.026834 | 0.482521 |
| 2430 | 0.002201 | 0.027234 | 0.454862 |
| 2431 | 0.002645 | 0.028863 | 0.606143 |
| 2432 | 0.002137 | 0.027883 | 0.73667 |
| 2433 | 0.001911 | 0.026777 | 0.764379 |
| 2434 | 0.002656 | 0.031144 | 0.654025 |
| 2435 | 0.357958 | 1.054187 | 0.789014 |
| 2436 | 0.002408 | 0.027834 | 0.652141 |
| 2437 | 0.002128 | 0.029482 | 0.589591 |
| 2438 | 0.002046 | 0.027328 | 0.6305 |
| 2439 | 0.002126 | 0.027527 | 0.702897 |
| 2441 | 0.001931 | 0.027353 | 0.554509 |
| 2442 | 0.00194 | 0.026835 | 0.748374 |
| 2443 | 0.00206 | 0.027504 | 0.580563 |
| 2444 | 0.002454 | 0.030028 | 0.562538 |
| 2445 | 0.002479 | 0.027979 | 0.691218 |
| 2446 | 0.002005 | 0.026464 | 0.592756 |
| 2447 | 0.00209 | 0.02736 | 0.67768 |
| 2448 | 0.00215 | 0.027489 | 0.746934 |
| 2449 | 0.001919 | 0.027314 | 0.63539 |
| 2450 | 0.001947 | 0.026788 | 0.971937 |
| 2451 | 0.002047 | 0.027081 | 0.714018 |
| 2452 | 0.00199 | 0.026765 | 0.687724 |
| 2453 | 0.002001 | 0.026884 | 0.675106 |
| 2454 | 0.002043 | 0.026814 | 0.578459 |
| 2455 | 0.002485 | 0.027898 | 0.62214 |
| 2456 | 0.003114 | 0.03194 | 0.536157 |
| 2457 | 0.002044 | 0.028064 | 0.672813 |
| 2458 | 0.015881 | 0.100316 | 0.627601 |
| 2460 | 0.00195 | 0.026811 | 0.61264 |
| 2461 | 0.001936 | 0.027321 | 0.614411 |
| 2462 | 0.001952 | 0.026879 | 0.570422 |
| 2463 | 0.001996 | 0.026846 | 0.724248 |
| 2464 | 0.003014 | 0.029551 | 0.681079 |
| 2465 | 0.851106 | 1.519622 | 0.556387 |
| 2466 | 0.001875 | 0.027585 | 0.573732 |
| 2467 | 0.001914 | 0.026865 | 0.584638 |
| 2468 | 0.001951 | 0.026667 | 0.76513 |
| 2469 | 0.001935 | 0.026646 | 0.483364 |
| 2470 | 0.001927 | 0.027128 | 0.708523 |
| 2471 | 0.002115 | 0.027369 | 0.645251 |
| 2472 | 0.002277 | 0.02739 | 0.83229 |
| 2473 | 0.003074 | 0.029112 | 0.868278 |
| 2474 | 0.001898 | 0.031517 | 0.628315 |
| 2475 | 0.001888 | 0.025737 | 0.488711 |
| 2476 | 0.001895 | 0.026321 | 0.539154 |
| 2477 | 0.001942 | 0.02957 | 0.540224 |
| 2478 | 0.001972 | 0.026698 | 0.560129 |
| 2479 | 0.002055 | 0.026361 | 0.588692 |
| 2480 | 0.002449 | 0.029257 | 0.564031 |
| 2481 | 0.002188 | 0.027339 | 0.617131 |
| 2482 | 0.001929 | 0.027532 | 0.647844 |
| 2483 | 0.001901 | 0.026611 | 0.505461 |
| 2484 | 0.001911 | 0.026331 | 0.632902 |
| 2485 | 0.001935 | 0.026733 | 0.781338 |
| 2486 | 0.00232 | 0.028127 | 0.762296 |
| 2487 | 0.002045 | 0.029716 | 0.555858 |
| 2488 | 0.002322 | 0.027239 | 0.655834 |
| 2489 | 0.003042 | 0.02839 | 0.619313 |
| 2490 | 0.001901 | 0.027794 | 0.675581 |
| 2491 | 0.001867 | 0.026896 | 0.63697 |
| 2492 | 0.001957 | 0.027113 | 0.720652 |
| 2493 | 0.00211 | 0.02692 | 0.928346 |
| 2494 | 0.001976 | 0.02681 | 0.505157 |
| 2496 | 0.005512 | 0.03457 | 0.661025 |
| 2498 | 0.001855 | 0.021094 | 1.26703 |
| 2499 | 0.001794 | 0.019382 | 1.205979 |
| 2500 | 0.001798 | 0.019209 | 1.194211 |
| 2501 | 0.001855 | 0.019647 | 1.175705 |
| 2502 | 0.001805 | 0.01951 | 1.05585 |
| 2503 | 0.001854 | 0.01969 | 0.740211 |
| 2504 | 0.001802 | 0.019108 | 1.169167 |
| 2505 | 0.001803 | 0.020364 | 1.044078 |
| 2507 | 0.001816 | 0.019238 | 0.826173 |
| 2508 | 0.0018 | 0.019457 | 0.747832 |
| 2509 | 0.001814 | 0.018725 | 0.764182 |
| 2510 | 0.001788 | 0.018705 | 0.961773 |
| 2511 | 0.001811 | 0.019187 | 1.002978 |
| 2512 | 0.00184 | 0.019337 | 0.951505 |
| 2513 | 0.001795 | 0.0198 | 0.784969 |
| 2514 | 0.001806 | 0.019423 | 1.155331 |
| 2515 | 0.001819 | 0.019277 | 0.899568 |
| 2516 | 0.001783 | 0.018727 | 0.906725 |
| 2517 | 0.001767 | 0.018491 | 1.156806 |
| 2518 | 0.001826 | 0.018843 | 0.984126 |
| 2519 | 0.001827 | 0.018971 | 1.106655 |
| 2520 | 0.001856 | 0.019129 | 0.981249 |
| 2521 | 0.001863 | 0.019361 | 0.815735 |
| 2522 | 0.001753 | 0.019788 | 0.683346 |
| 2523 | 0.00179 | 0.018958 | 0.763397 |
| 2524 | 0.001774 | 0.019189 | 0.99147 |
| 2525 | 0.001796 | 0.019005 | 1.173316 |
| 2526 | 0.00239 | 0.022053 | 0.703461 |
| 2527 | 0.001839 | 0.018912 | 0.926152 |
| 2528 | 0.002235 | 0.020166 | 0.849943 |
| 2529 | 0.001833 | 0.019542 | 1.169762 |
| 2531 | 0.001757 | 0.019516 | 0.804991 |
| 2532 | 0.001791 | 0.019332 | 0.97138 |
| 2533 | 0.00183 | 0.018744 | 0.932083 |
| 2534 | 0.001829 | 0.018966 | 0.603137 |
| 2535 | 0.001825 | 0.019067 | 0.775401 |
| 2536 | 0.001839 | 0.019239 | 1.005791 |
| 2537 | 0.001837 | 0.019027 | 0.742716 |
| 2538 | 0.00184 | 0.019119 | 1.025351 |
| 2539 | 0.001786 | 0.019252 | 1.038877 |
| 2540 | 0.001818 | 0.019031 | 1.121716 |
| 2541 | 0.001778 | 0.018762 | 0.803414 |
| 2542 | 0.00183 | 0.01897 | 0.935541 |
| 2543 | 0.001856 | 0.018641 | 0.779233 |
| 2544 | 0.001832 | 0.018997 | 0.936523 |
| 2545 | 0.001818 | 0.019351 | 0.785605 |
| 2546 | 0.001855 | 0.019618 | 1.078452 |
| 2547 | 0.001753 | 0.019425 | 0.952274 |
| 2548 | 0.001801 | 0.019016 | 0.883621 |
| 2549 | 0.001932 | 0.019884 | 0.963362 |
| 2550 | 0.001852 | 0.019493 | 0.756811 |
| 2551 | 0.001811 | 0.018994 | 0.735339 |
| 2552 | 0.001829 | 0.018641 | 0.751335 |
| 2553 | 0.001842 | 0.019264 | 0.734602 |
| 2555 | 0.001803 | 0.019524 | 0.791215 |
| 2556 | 0.001808 | 0.019326 | 1.234156 |
| 2557 | 0.001817 | 0.019034 | 0.844118 |
| 2559 | 0.0018 | 0.019361 | 0.832718 |
| 2560 | 0.001849 | 0.018958 | 1.108257 |
| 2561 | 0.001875 | 0.019191 | 0.924327 |
| 2562 | 0.00183 | 0.019757 | 0.913942 |
| 2563 | 0.001766 | 0.019449 | 1.039711 |
| 2564 | 0.001761 | 0.019642 | 0.975257 |
| 2565 | 0.001822 | 0.018907 | 0.875283 |
| 2566 | 0.001827 | 0.018953 | 0.804406 |
| 2567 | 0.00182 | 0.01881 | 0.84509 |
| 2568 | 0.001815 | 0.018919 | 0.949194 |
| 2569 | 0.00187 | 0.018963 | 0.839079 |
| 2570 | 0.001859 | 0.019606 | 0.843373 |
| 2571 | 0.001771 | 0.019425 | 0.664874 |
| 2572 | 0.001861 | 0.019316 | 0.807564 |
| 2573 | 0.001825 | 0.018896 | 1.142032 |
| 2574 | 0.001799 | 0.018916 | 0.733867 |
| 2575 | 0.001848 | 0.018948 | 0.764302 |
| 2576 | 0.001862 | 0.0189 | 0.934422 |
| 2578 | 0.001938 | 0.019715 | 0.942217 |
| 2579 | 0.001762 | 0.019242 | 0.986229 |
| 2580 | 0.001771 | 0.01972 | 0.75995 |
| 2581 | 0.001846 | 0.019138 | 0.813534 |
| 2582 | 0.001812 | 0.018893 | 1.03767 |
| 2583 | 0.001829 | 0.019116 | 0.974132 |
| 2584 | 0.001881 | 0.019667 | 0.850391 |
| 2585 | 0.002575 | 0.020133 | 1.050868 |
| 2586 | 0.002919 | 0.020784 | 0.982573 |
| 2587 | 0.001816 | 0.019662 | 0.675518 |
| 2588 | 0.001816 | 0.019437 | 0.754413 |
| 2589 | 0.001844 | 0.01968 | 0.725135 |
| 2590 | 0.00185 | 0.020018 | 0.754455 |
| 2591 | 0.001831 | 0.019558 | 0.900126 |
| 2593 | 0.001894 | 0.019772 | 0.853028 |
| 2594 | 0.003467 | 0.021701 | 0.877 |

### Example 94

### Expression of CD19-41BBζ, CD19-CD28ζ, HER2-41BBζ, or HER2-CD28ζ Chimeric Antigen Receptors (CARs) Following In Vitro Administration of Circular RNAs Encoding Said CARs

[1737] Human T cells from three unique T cells donors were activated with anti-CD3 or CD28 for three days and set to rest for 24 hours. Engineered circular RNA (oRNA) encoding CD19-41BBζ, CD19-CD28ζ, HER2-41BBζ, or HER2-CD28ζ chimeric antigen receptors (CARs) were electroporated into the human T cells. 24 hours post transfection CAR expression for each of the CARs were measured using fluorescence-activated cell sorting (FACS).

[1738] As seen in FIGS. 102A and 102B, the circular RNA constructs were able to express CAR for each of the different CAR constructs.

### Example 95

### Lysis of Tumor Cells Following In Vitro Transfection of CD19-41BBC and CD19-CD28C Chimeric Antigen Receptors (CARs) and Cytokine Production

[1739] Human T cells were activated with anti-CD3 or CD28 for three days and rested for 24 hours. The cells were then transfected with circular RNAs encoding for mOX40L (positive control), CD19-41BBζ, CD19-CD28ζ, HER2-41BBζ, or HER2-CD28ζ chimeric antigen receptors (CARs) via electroporation. 24 hours post-electroporation, said T cells were cocultured with Nalm6 tumor cells at a 1:1 effector to target (E:T) ratio. Nalm6 killing was measured 24 hours following coculturing of the human T cells with the Nalm6 tumor cells. Coculture supernatants were collect and analyzed using Meso Scale Discovery (MSD) (Agilent Technologies, Santa Clara, CA) for IFN-g and IL-2 expression.

[1740] As seen in FIG. 103A, CD19-41BBζ and CD19-CD28ζ encoding circular RNAs surpassed tumor cell killing to the positive control, mOX40L circular RNAs, and even surpassed HER2-41BBζ and HER2-CD28ζ. The circRNAs encoding CD19-BB ζ and CD19-28ζ also surpassed the IFN-g and IL-2 cytokine compared to the circRNAs encoding HER2-41BBζ, HER2-CD28ζ, or mOX40L (FIG. 103B and FIG. 103C). Antigen specific killing was observed at 1:3 effector to target (E:T) ratio following transfection of the circRNAs.

### Example 96

mOX40L Expression in Blood and Splenic Human T Cells of Humanized Mice Following Intravenous Administration of LNP-circRNA Encoding mOX40L

[1741] NOG mice (1E7 Mouse Hybridoma) were engrafted with human peripheral blood mononuclear cells (hPBMC). 3 weeks later the mice were treated with a single intravenous dose of LNP encapsulating circular RNAs encoding mOx40L at 2 mg/kg. LNP were formulated with ionizable lipid 10b-15 (Table 10b, Lipid 15), 10a-27 (Table 10a, Lipid 27), or 10a-26 (Table 10a, Lipid 26). 24 hours following intravenous administration, splenocytes and peripheral blood cells were isolated and analyzed for T cell expression of mOX40L.

[1742] As seen in FIGS. 104A and 104B, mOX40L was detected in the human T cells of the humanized mice's spleen and peripheral blood for each of the LNP constructs. Expression was higher for all three constructs in the spleen.

### Example 97

### B Cell Aplasia in the Spleen of Humanized Mice Following Intravenous Administration of LNP-circRNA Construct Encoding for an Anti-CD19 CAR

[1743] NOG mice (1E7 Mouse Hybridoma) were engrafted with human peripheral blood mononuclear cells (hPBMC) at 50-60% human engraftment in total. 3 weeks after engraftment, the mice were treated with a single dose of LNPs encapsulating circular RNA encoding anti-CD19 CAR or IXPBS (negative control) at 2 mg/kg. Six days post dosing, splenocytes were isolated and analyzed for the presence of B cells via CD19 expression.

[1744] As seen in FIG. 105, B cell aplasia was present in the humanized mice when comparing the splenocytes of the mice receiving LNP-circRNA constructs (the left of FIG. 105) compared to the splenocytes of the mice receiving the negative control (the right of FIG. 105).

### Example 98

### Nalm6 Killing Following In Vitro Administration of Circular RNA Constructs Encoding Different CARs

[1745] T cells were activated with anti-CD3 or anti-CD28 for three days and rested for 24 hours. The cells were then treated with LNP-circRNAs encoding mOX40L (positive control), CD19-41BBζ, CD19-CD28ζ, HER2-41BBζ, or HER2-CD28ζ chimeric antigen receptors (CARs). LNPs were formulated using ionizable lipid 10b-15 (Table 10b, Lipid 15). Expression of the CARs was measured by fluorescence-activated cell sorting (FACS) to measure the mean fluorescence activity (MFI). T cells were then cocultured with Nalm6 tumor cells. Nalm6 killing was measured the following day.

[1746] 48 hours after co-culturing the T cells with the Nalm6 cells, the effector to target (E:T) ratio was 1:5. As seen in FIG. 106A, percent killing of the Nalm6 tumor cells post administration of the LNP-circRNA constructs was significantly greater for the constructs encoding CD19-CD28ζ or CD19-41BBζ compared to the constructs encoding HER2-41BBζ, HER2-CD28ζ, or mOX40L (the positive control). FIG. 106B illustrates that circRNAs encoding CD19-28ζ CARs has a greater killing of Nalm6 cells than circRNAs encoding CD19-BBζ CARs.

### Example 99

[1747] 1E6 (Nalm6-Luc) cells were engrafted into NSG mice. 3 days later, CD3/CD28 treated hPBMCs were engrafted ex vivo. 24 hours post engraftment, the mice were dosed via in vivo administration with LNP encapsulating circular RNA constructs (circular RNAs encoded either CD19-41BBζ CARs, CD19-CD28ζ CARs, HER2-41BBζ CARs, HER2-CD28ζ CARS or mOX40L (positive control)) or PBS (negative control 1) or PBMC (negative control 2)) at 2 mg/kg. All of the LNPs were formulated with ionizable lipid 10b-15 (Table 10b, Lipid 15). The mice were dosed every other day for a total of 5 doses. Nalm6 tumor burden over time was quantified using IVIS imaging.

[1748] As seen in FIG. 107, LNPs formulated with CD19-CD28(CARs are more effective in tumor regression than the other CAR or controls (positive or negative).

### Example 100: Expression of Circular RNAs Encoding Anti-BCMA CARs A. Expression of circular RNAs encoding anti-BCMA CAR in vitro

[1749] T cells from a single donor were activated for 3 days with anti-CD3 and CD28 beads and allowed to rest for 24 hours. Concurrently, engineered circular RNA constructs were designed to encode a BCMA-41BBζ chimeric antigen receptor (CAR). For comparison purposes, “mock” or control circular RNAs encoded a HER2 or CD19 CAR. The circular RNAs were developed from an in vitro translation (IVT) reaction of DNA comprising a T7 polymerase promoter, permuted Anabaena intron exon segments, internal ribosome entry site (IRES) from Caprine Kobuvirus, Hunnivirus, Apodemus Picornavirus, or Picornavirales internal spacers, optionally internal homology arms, and a Xlab restriction site. DNA templates comprised of sequences from the table below. The donor T cells were electroporated with the circular RNAs at either 10 ng, 30 ng, or 100 ng per 0.1×10⁶ T cell to form CAR-T cells. As a control, “Mock” T cells not electroporated with circular RNAs were analyzed. T cells were then allowed to rest for 24 hours after electroporation. 24 hours after electroporation, the CAR-T cells were counted and assessed for BCMA CAR expression. Resulting circular RNA with anti-BCMA CAR encoding regions were given a commercially available soluble BCMA detection reagent containing R-phycoerythrin (PE) fluorophore (e.g., from AcroBiosystems, Delaware), anti-Whitlow PE linker antibody detection reagent, or an anti-G4S linker PE detection reagent (e.g., G4S-AF647). Anti-BCMA, CD19, or HER2 expression was assessed using fluorescence activated cell sorting (FACS) and gating flow cytometry methods known in the art (e.g., illustrated in FIG. 3 for T cells electroporated with circular RNAs derived from DNA Template B and dosed at 10 ng per 0.1×10⁶ T cells) at one or more timepoints from 24 to 72 hours post electroporation.

[1750] FIG. 108A provides the flow cytometry histogram, for each of the circular RNA constructs at the three different dosages collected at 24 hours, 48 hours and 72 hours. FIG. 108B shows the gMFI expression of each of the circular RNA constructs at the three different dosages collected at 24 hours. FIGS. 109A, 109D-109F depict percent CAR expression detected by either soluble BCMA PE, anti-Whitlow PE or anti-G4S linker PE detection reagent. FIGS. 109B and 109G gMFI and average MFI % respectively over the span of 24 hours to 96 hours post electroporation for each of the three dosages. FIG. 109C illustrates FACS imaging of the BCMA CARs as detected by the soluble BCMA detection reagent at 24 hours post electroporation.

TABLE 28

| | Internal Ribosome Entry Site | |
|---|---|---|
| ID | (IRES) Sequence | CAR Sequence |
| DNA | CCCCCCTCCCCCCCTTCCC | ATGGCTCTCCCCGTGACCGCTCTGCTG |
| Template A | TTCCCTTTGCAACGCAACA | CTCCCTCTGGCCCTCCTTCTGCACGCA |
| | ATTGTAAGTGCCCTCACCT | GCCAGACCACAGGTCAAGCTGGAGGA |
| | GTCAATTGGGACCACCACT | GTCTGGTGGCGGTCTGGTGCAGGCAG |
| | TTCAGTGACCCCATGCGAA | GGAGGAGCCTGAGGCTGAGCTGTGCA |
| | GTGCTGAGAGAAAGGAAG | GCTTCCGAGCACACATTCTCAAGCCA |
| | CTTTCTTACCCTTCATTTGT | CGTCATGGGGTGGTTCAGACAGGCTC |
| | GAACCCACTGGTCTAAGC | CCGGTAAAGAGAGGGAGTCCGTCGCC |
| | CGCTTGGAATACGATGAG | GTGATCGGATGGCGGGACATCTCCAC |
| | TGGAAAAGTTCATTCTTAA | CTCCTACGCCGACTCTGTGAAGGGCC |
| | TGGAGTGAAACATGCTTA | GGTTCACAATCTCACGCGATAATGCC |
| | AATTTCCAGCTCGTGCTGG | AAGAAGACACTGTATCTGCAGATGAA |
| | TCTTTCCAGTACGGGGCGG | TTCCTTGAAGCCCGAAGACACCGCCG |
| | CCCTGTCTGGCCGTAATTC | TCTATTACTGTGCTGCTAGACGGATCG |
| | TTCAGAGTGTCACGCCACA | ACGCTGCCGACTTCGACAGCTGGGGA |
| | CTTGTGGATCTCACGTGCC | CAGGGTACCCAAGTGACCGTTTCCTC |
| | ACATGACAGCGCTACAGC | CGGAGGCGGAGGTTCTGGAGGAGGTG |
| | TGGAACTGGGTGCTTGGTG | GGTCAGGTGGAGGTGGCTCCGAGGTG |
| | CCCATGGAGTAACAGCGA | CAGCTGGTCGAGTCTGGCGGTGGCTT |
| | AAAGTGTTAGATCAAGCC | GGTCCAGGCTGGAGGCAGTCTCAGAC |
| | TTGCTTGGGCTATGAGCCT | TCTCCTGCGCTGCTTCAGGGCGGACCT |
| | GCGGAACAACAACTGGTA | TCACCATGGGCTGGTTCAGGCAGGCC |
| | ACAGTTGCCTCAGGGGCC | CCAGGTAAGGAGAGGGAGTTCGTGGC |
| | GAAAGCCACGGTGTTAAC | CGCCATCTCCCTCTCCCCTACCCTGGC |
| | AGCACCCTCATAGTTTGAT | ATACTACGCTGAGTCCGTGAAGGGAC |
| | CCACCTCAGGGTGGTGAT | GGTTTACCATCTCCCGGGATAACGCA |
| | GTTTAGCAGTTAGTAGTTG | AAGAACACTGTGGTCCTCCAAATGAA |
| | CCAATCTGTGTTCACTGAA | CTCCCTCAAACCCGAGGACACCGCTC |
| | ATCTCGGCATACCGTGTAG | TCTACTATTGTGCCGCAGATCGGAAG |
| | TGTACAGGGGTGAAGGAT | AGCGTCATGTCCATCCGGCCCGATTA |
| | GCCCAGAAGGTACCCGTA | CTGGGGCCAAGGCACACAGGTGACTG |
| | GGTAACCTTAAGAGACTA | TGTCCAGCACCTCCACCACCACCCCA |
| | TGGATCTGATCTGGGGCCT | GCACCAAGGCCTCCAACCCCTGCACC |
| | TGTCCGGAGTGCTTTACAC | AACCATCGCCTCCCAGCCACTGTCTTT |
| | ACGGCTCAAGGTTAAAAA | GCGGCCAGAAGCATGCCGCCCAGCAG |
| | ACGTCTAGCCCCACAGAG | CAGGTGGAGCCGTGCATACAAGAGGC |
| | CCCGAGGGATTCGGGTTTT | CTGGACTTCGCCTGCGATATCTACATC |
| | CCCTTTAAAAACCCGACTA | TGGGCTCCTCTGGCCGGAACATGCGG |
| | GAGCTTATGGTGACAATTA | AGTCCTGCTCTTGTCCCTGGTGATCAC |
| | TTGCTGTTCAGACGAACAG | CCTGTACTGCAAGCGGGGTCGGAAGA |
| | TGTAATTGTTGTCTATTCA | AGCTCCTCTACATCTTCAAGCAGCCCT |
| | CAGCAGTTCTATCAGAGCT | TCATGAGACCCGTCCAGACCACCCAG |
| | TTTCCCACAACGGATCTTC | GAGGAGGACGGGTGCTCATGCAGGTT |
| | TTGGCAAGCAAATACAGC | CCCCGAAGAGGAGGAGGGTGGCTGTG |
| | AGGAGTCAAT | AGCTGCGGGTGAAGTTCAGCAGGTCA |
| | | GCAGACGCCCCTGCCTATCAGCAGGG |
| | | CCAAAACCAGTTGTACAACGAGCTGA |
| | | ATCTGGGGAGACGGGAGGAGTACGAT |
| | | GTCCTTGACAAGAGAAGGGGCCGGGA |
| | | TCCAGAGATGGGCGGGAAGCCAAGA |
| | | CGGAAGAATCCTCAGGAGGGTCTGTA |
| | | TAACGAGCTGCAGAAGGACAAGATG |
| | | GCCGAGGCCTACTCCGAGATCGGCAT |
| | | GAAAGGGGAGCGCCGCAGAGGAAAA |
| | | GGTCACGATGGTCTGTACCAGGGGTT |
| | | GAGCACCGCTACCAAGGATACTTACG |
| | | ACGCTCTGCACATGCAAGCTCTGCCA |
| | | CCCCGG |
| DNA | GTGGCCACGCCCGGGCCA | ATGGCACTCCCGGTAACCGCCTTATT |
| Template B | CCGATACTTCCCTTCACTC | GCTTCCCCTTGCCCTCTTGCTCCACGC |
| | CTTCGGGACTGTTGGGGA | AGCACGCCCCGATATAGTCTTGACTC |
| | GGAACACAACAGGGCTCC | AATCCCCACCCAGTTTGGCAATGTCA |
| | CCTGTTTTCCCATTCCTTCC | TTAGGCAAACGAGCAACAATTTCATG |
| | CCCTTTTCCCAACCCCAAC | TAGGGCATCCGAAAGTGTAACGATTT |
| | CGCCGTATCTGGTGGCGGC | TGGGGAGTCATTTAATTCATTGGTACC |
| | AAGACACACGGGTCTTTCC | AACAAAAGCCTGGACAACCCCCGACG |
| | CTCTAAAGCACAATTGTGT | CTCTTGATCCAATTAGCATCTAACGTC |
| | GTGTGTCCCAGGTCCTCCT | CAAACCGGAGTCCCCGCACGATTCTC |
| | GCGTACGGTGCGGGAGTG | AGGATCCGGTTCCCGGACTGATTTTA |
| | CTCCCACCCAACTGTTGTA | CATTAACTATTGATCCGGTAGAGGAA |
| | AGCCTGTCCAACGCGTCGT | GATGACGTCGCTGTCTATTATTGTCTT |
| | CCTGGCAAGACTATGACG | CAAAGTAGGACGATTCCACGGACATT |
| | TCGCATGTTCCGCTGCGGA | CGGTGGCGGAACTAAATTGGAGATTA |
| | TGCCGACCGGGTAACCGG | AAGGTTCCACCTCTGGTAGTGGGAAA |
| | TTCCCCAGTGTGTGTAGTG | CCCGGGTCCGGTGAAGGGTCCACTAA |
| | CGATCTTCCAGGTCCTCCT | AGGCCAAATTCAACTCGTTCAATCCG |
| | GGTTGGCGTTGTCCAGAA | GACCAGAACTGAAGAAGCCAGGAGA |
| | ACTGCTTCAGGTAAGTGG | AACTGTCAAAATAAGCTGTAAAGCTT |
| | GGTGTGCCCAATCCCTACA | CCGGTTATACATTTACAGATTATTCCA |
| | AAGGTTGATTCTTTCACCA | TAAATTGGGTGAAAAGGGCGCCAGGA |
| | CCTTAGGAATGCTCCGGA | AAAGGGTTAAAGTGGATGGGTTGGAT |
| | GGTACCCCAGCAACAGCT | TAATACAGAGACTCGGGAACCTGCAT |
| | GGGATCTGACCGGAGGCT | ATGCTTATGATTTTAGGGGAAGGTTT |
| | AATTGTCTACGGGTGGTGT | GCCTTTTCTCTGGAGACTTCCGCTTCA |
| | TTCCTTTTTCTTTTCACACA | ACTGCTTATCTCCAAATTAATAATCTT |
| | ACTCTACTGCTGACAACTC | AAATATGAGGACACAGCAACATACTT |
| | ACTGACTATCCACTTGCTC | CTGTGCTTTGGACTATAGTTATGCTAT |
| | TGTCACG | GGATTACTGGGGACAAGGAACCAGTG |
| | | TCACTGTAAGTTCCGCTGCTGCGACG |
| | | ACCACTCCTGCACCGCGACCACCCAC |
| | | TCCTGCCCCTACTATTGCTAGTCAACC |
| | | ACTTAGCTTGCGACCTGAGGCATGTC |
| | | GGCCCGCGGCAGGTGGCGCAGTCCAC |
| | | ACCAGGGGTTTAGACTTTGCTTGTGAT |
| | | ATTTATATTTGGGCACCACTCGCCGG |
| | | GACTTGCGGTGTTCTTCTCTTGTCCCT |
| | | TGTTATAACTCTTTATTGTAAGCGCGG |
| | | AAGGAAGAAATTGTTATATATTTTCA |
| | | AACAACCTTTTATGCGACCCGTACAA |
| | | ACAACTCAGGAAGAGGACGGGTGTTC |
| | | TTGTCGGTTTCCAGAAGAGGAAGAGG |
| | | GTGGGTGTGAACTCCGGGTCAAATTT |
| | | AGTAGGTCAGCAGATGCGCCGGCGTA |
| | | CCAACAAGGCCAAAACCAACTGTATA |
| | | ATGAACTCAATCTCGGTAGGCGTGAG |
| | | GAATATGATGTCCTTGATAAAAGGCG |
| | | CGGGAGAGATCCAGAAATGGGCGGA |
| | | AAACCACGGCGAAAGAATCCGCAGG |
| | | AAGGGTTATATAACGAACTTCAAAAG |
| | | GATAAAATGGCTGAAGCTTATTCCGA |
| | | AATTGGCATGAAAGGAGAGCGACGTA |
| | | GGGGCAAAGGGCATGATGGCCTTTAC |
| | | CAAGGGCTCTCAACCGCTACAAAAGA |
| | | TACTTACGACGCTTTACATATGCAAG |
| | | CACTTCCACCCAGG |
| DNA | CCCCCCTCCCCCCCTTCCC | ATGGCACTCCCGGTAACCGCCTTATT |
| Template C | TTCCCTTTGCAACGCAACA | GCTTCCCCTTGCCCTCTTGCTCCACGC |
| | ATTGTAAGTGCCCTCACCT | AGCACGCCCCGATATAGTCTTGACTC |
| | GTCAATTGGGACCACCACT | AATCCCCACCCAGTTTGGCAATGTCA |
| | TTCAGTGACCCCATGCGAA | TTAGGCAAACGAGCAACAATTTCATG |
| | GTGCTGAGAGAAAGGAAG | TAGGGCATCCGAAAGTGTAACGATTT |
| | CTTTCTTACCCTTCATTTGT | TGGGGAGTCATTTAATTCATTGGTACC |
| | GAACCCACTGGTCTAAGC | AACAAAAGCCTGGACAACCCCCGACG |
| | CGCTTGGAATACGATGAG | CTCTTGATCCAATTAGCATCTAACGTC |
| | TGGAAAAGTTCATTCTTAA | CAAACCGGAGTCCCCGCACGATTCTC |
| | TGGAGTGAAACATGCTTA | AGGATCCGGTTCCCGGACTGATTTTA |
| | AATTTCCAGCTCGTGCTGG | CATTAACTATTGATCCGGTAGAGGAA |
| | TCTTTCCAGTACGGGGCGG | GATGACGTCGCTGTCTATTATTGTCTT |
| | CCCTGTCTGGCCGTAATTC | CAAAGTAGGACGATTCCACGGACATT |
| | TTCAGAGTGTCACGCCACA | CGGTGGCGGAACTAAATTGGAGATTA |
| | CTTGTGGATCTCACGTGCC | AAGGTTCCACCTCTGGTAGTGGGAAA |
| | ACATGACAGCGCTACAGC | CCCGGGTCCGGTGAAGGGTCCACTAA |
| | TGGAACTGGGTGCTTGGTG | AGGCCAAATTCAACTCGTTCAATCCG |
| | CCCATGGAGTAACAGCGA | GACCAGAACTGAAGAAGCCAGGAGA |
| | AAAGTGTTAGATCAAGCC | AACTGTCAAAATAAGCTGTAAAGCTT |
| | TTGCTTGGGCTATGAGCCT | CCGGTTATACATTTACAGATTATTCCA |
| | GCGGAACAACAACTGGTA | TAAATTGGGTGAAAAGGGCGCCAGGA |
| | ACAGTTGCCTCAGGGGCC | AAAGGGTTAAAGTGGATGGGTTGGAT |
| | GAAAGCCACGGTGTTAAC | TAATACAGAGACTCGGGAACCTGCAT |
| | AGCACCCTCATAGTTTGAT | ATGCTTATGATTTTAGGGGAAGGTTT |
| | CCACCTCAGGGTGGTGAT | GCCTTTTCTCTGGAGACTTCCGCTTCA |
| | GTTTAGCAGTTAGTAGTTG | ACTGCTTATCTCCAAATTAATAATCTT |
| | CCAATCTGTGTTCACTGAA | AAATATGAGGACACAGCAACATACTT |
| | ATCTCGGCATACCGTGTAG | CTGTGCTTTGGACTATAGTTATGCTAT |
| | TGTACAGGGGTGAAGGAT | GGATTACTGGGGACAAGGAACCAGTG |
| | GCCCAGAAGGTACCCGTA | TCACTGTAAGTTCCGCTGCTGCGACG |
| | GGTAACCTTAAGAGACTA | ACCACTCCTGCACCGCGACCACCCAC |
| | TGGATCTGATCTGGGGCCT | TCCTGCCCCTACTATTGCTAGTCAACC |
| | TGTCCGGAGTGCTTTACAC | ACTTAGCTTGCGACCTGAGGCATGTC |
| | ACGGCTCAAGGTTAAAAA | GGCCCGCGGCAGGTGGCGCAGTCCAC |
| | ACGTCTAGCCCCACAGAG | ACCAGGGGTTTAGACTTTGCTTGTGAT |
| | CCCGAGGGATTCGGGTTTT | ATTTATATTTGGGCACCACTCGCCGG |
| | CCCTTTAAAAACCCGACTA | GACTTGCGGTGTTCTTCTCTTGTCCCT |
| | GAGCTTATGGTGACAATTA | TGTTATAACTCTTTATTGTAAGCGCGG |
| | TTGCTGTTCAGACGAACAG | AAGGAAGAAATTGTTATATATTTTCA |
| | TGTAATTGTTGTCTATTCA | AACAACCTTTTATGCGACCCGTACAA |
| | CAGCAGTTCTATCAGAGCT | ACAACTCAGGAAGAGGACGGGTGTTC |
| | TTTCCCACAACGGATCTTC | TTGTCGGTTTCCAGAAGAGGAAGAGG |
| | TTGGCAAGCAAATACAGC | GTGGGTGTGAACTCCGGGTCAAATTT |
| | AGGAGTCAAT | AGTAGGTCAGCAGATGCGCCGGCGTA |
| | | CCAACAAGGCCAAAACCAACTGTATA |
| | | ATGAACTCAATCTCGGTAGGCGTGAG |
| | | GAATATGATGTCCTTGATAAAAGGCG |
| | | CGGGAGAGATCCAGAAATGGGCGGA |
| | | AAACCACGGCGAAAGAATCCGCAGG |
| | | AAGGGTTATATAACGAACTTCAAAAG |
| | | GATAAAATGGCTGAAGCTTATTCCGA |
| | | AATTGGCATGAAAGGAGAGCGACGTA |
| | | GGGGCAAAGGGCATGATGGCCTTTAC |
| | | CAAGGGCTCTCAACCGCTACAAAAGA |
| | | TACTTACGACGCTTTACATATGCAAG |
| | | CACTTCCACCCAGG |
| DNA | TTTGCTCAGCGTAACTTCT | ATGGCACTCCCGGTAACCGCCTTATT |
| Template D | CCGGGTTACGTGGAGACC | GCTTCCCCTTGCCCTCTTGCTCCACGC |
| | AAAAGGCTACGGAGACTC | AGCACGCCCCGATATAGTCTTGACTC |
| | GGGCTACGGCCCTGGAGC | AATCCCCACCCAGTTTGGCAATGTCA |
| | ACCTAGGTGCTCCTAAAG | TTAGGCAAACGAGCAACAATTTCATG |
| | ACGTTAGAAGTTGTACAA | TAGGGCATCCGAAAGTGTAACGATTT |
| | ACTCGCCCAATAGGGCCC | TGGGGAGTCATTTAATTCATTGGTACC |
| | CCCAACCAGGGGGGTAGC | AACAAAAGCCTGGACAACCCCCGACG |
| | GGGCAAGCACTTCTGTTTC | CTCTTGATCCAATTAGCATCTAACGTC |
| | CCCGGTATGATCTCATAGG | CAAACCGGAGTCCCCGCACGATTCTC |
| | CTGTACCCACGGCTGAAA | AGGATCCGGTTCCCGGACTGATTTTA |
| | GAGAGATTATCGTTACCCG | CATTAACTATTGATCCGGTAGAGGAA |
| | CCTCACTACTTCGAGAAGC | GATGACGTCGCTGTCTATTATTGTCTT |
| | CCAGTAATGGTTCATGAA | CAAAGTAGGACGATTCCACGGACATT |
| | GTTGATCTCGTTGACCCGG | CGGTGGCGGAACTAAATTGGAGATTA |
| | TGTTTCCCCCACACCAGAA | AAGGTTCCACCTCTGGTAGTGGGAAA |
| | ACCTGTGATGGGGGTGGT | CCCGGGTCCGGTGAAGGGTCCACTAA |
| | CATCCCGGTCATGGCGAC | AGGCCAAATTCAACTCGTTCAATCCG |
| | ATGACGGACCTCCCCGCG | GACCAGAACTGAAGAAGCCAGGAGA |
| | CCGGCACAGGGCCTCTTCG | AACTGTCAAAATAAGCTGTAAAGCTT |
| | GAGGACGAGTGACATGGA | CCGGTTATACATTTACAGATTATTCCA |
| | TTCAACCGTGAAGAGCCT | TAAATTGGGTGAAAAGGGCGCCAGGA |
| | ATTGAGCTAGTGTTGATTC | AAAGGGTTAAAGTGGATGGGTTGGAT |
| | CTCCGCCCCCGTGAATGCG | TAATACAGAGACTCGGGAACCTGCAT |
| | GCTAATCCCAACTCCGGA | ATGCTTATGATTTTAGGGGAAGGTTT |
| | GCAGGCGGGCCCAAACCA | GCCTTTTCTCTGGAGACTTCCGCTTCA |
| | GGGTCTGGCCTGTCGTAAC | ACTGCTTATCTCCAAATTAATAATCTT |
| | GCGAAAGTCTGGAGCGGA | AAATATGAGGACACAGCAACATACTT |
| | ACCGACTACTTTCGGGAA | CTGTGCTTTGGACTATAGTTATGCTAT |
| | GGCGTGTTTCCTTTTGTTC | GGATTACTGGGGACAAGGAACCAGTG |
| | CTTTTATCAAGTTTTATGG | TCACTGTAAGTTCCGCTGCTGCGACG |
| | TGACAACTCCTGGTAGAC | ACCACTCCTGCACCGCGACCACCCAC |
| | GTTTTATTGCGTTTATTGA | TCCTGCCCCTACTATTGCTAGTCAACC |
| | GAGATTTCCAACAATTGA | ACTTAGCTTGCGACCTGAGGCATGTC |
| | ACAGACTAGAACCACTTG | GGCCCGCGGCAGGTGGCGCAGTCCAC |
| | TTTTATCAAACCCTCACAG | ACCAGGGGTTTAGACTTTGCTTGTGAT |
| | AATAAGATAACA | ATTTATATTTGGGCACCACTCGCCGG |
| | | GACTTGCGGTGTTCTTCTCTTGTCCCT |
| | | TGTTATAACTCTTTATTGTAAGCGCGG |
| | | AAGGAAGAAATTGTTATATATTTTCA |
| | | AACAACCTTTTATGCGACCCGTACAA |
| | | ACAACTCAGGAAGAGGACGGGTGTTC |
| | | TTGTCGGTTTCCAGAAGAGGAAGAGG |
| | | GTGGGTGTGAACTCCGGGTCAAATTT |
| | | AGTAGGTCAGCAGATGCGCCGGCGTA |
| | | CCAACAAGGCCAAAACCAACTGTATA |
| | | ATGAACTCAATCTCGGTAGGCGTGAG |
| | | GAATATGATGTCCTTGATAAAAGGCG |
| | | CGGGAGAGATCCAGAAATGGGCGGA |
| | | AAACCACGGCGAAAGAATCCGCAGG |
| | | AAGGGTTATATAACGAACTTCAAAAG |
| | | GATAAAATGGCTGAAGCTTATTCCGA |
| | | AATTGGCATGAAAGGAGAGCGACGTA |
| | | GGGGCAAAGGGCATGATGGCCTTTAC |
| | | CAAGGGCTCTCAACCGCTACAAAAGA |
| | | TACTTACGACGCTTTACATATGCAAG |
| | | CACTTCCACCCAGG |
| DNA | ATTCTCGGGCTACGGCCCT | ATGGCACTCCCGGTAACCGCCTTATT |
| Template E | GGAGCCACTCCGGCTCCTA | GCTTCCCCTTGCCCTCTTGCTCCACGC |
| | AAGATTTAGAAGTTTGAG | AGCACGCCCCGATATAGTCTTGACTC |
| | CACACCCGCCCACTAGGG | AATCCCCACCCAGTTTGGCAATGTCA |
| | CCCCCCATCCAGGGGGGC | TTAGGCAAACGAGCAACAATTTCATG |
| | AACGGGCAAGCACTTCTG | TAGGGCATCCGAAAGTGTAACGATTT |
| | TTTCCCCGGTATGATCTGA | TGGGGAGTCATTTAATTCATTGGTACC |
| | TAGGCTGTAACCACGGCT | AACAAAAGCCTGGACAACCCCCGACG |
| | GAAACAGAGATTATCGTT | CTCTTGATCCAATTAGCATCTAACGTC |
| | ATCCGCTTCACTACTTCGA | CAAACCGGAGTCCCCGCACGATTCTC |
| | GAAGCCTAGTAATGATGG | AGGATCCGGTTCCCGGACTGATTTTA |
| | GTGAAATTGAATCCGTTGA | CATTAACTATTGATCCGGTAGAGGAA |
| | TCCGGTGTCTCCCCCACAC | GATGACGTCGCTGTCTATTATTGTCTT |
| | CAGAAACTCATGATGAGG | CAAAGTAGGACGATTCCACGGACATT |
| | GTTGCCATCCCGGCTACGG | CGGTGGCGGAACTAAATTGGAGATTA |
| | CGACGTAGCGGGCATCCC | AAGGTTCCACCTCTGGTAGTGGGAAA |
| | TGCGCTGGCATGAGGCCTC | CCCGGGTCCGGTGAAGGGTCCACTAA |
| | TTAGGAGGACGGATGATA | AGGCCAAATTCAACTCGTTCAATCCG |
| | TGGATCTTGTCGTGAAGAG | GACCAGAACTGAAGAAGCCAGGAGA |
| | CCTATTGAGCTAGTGTCGA | AACTGTCAAAATAAGCTGTAAAGCTT |
| | CTCCTCCGCCCCCGTGAAT | CCGGTTATACATTTACAGATTATTCCA |
| | GCGGCTAATCCTAACCCCG | TAAATTGGGTGAAAAGGGCGCCAGGA |
| | GAGCAGGTGGGTCCAATC | AAAGGGTTAAAGTGGATGGGTTGGAT |
| | CAGGGCCTGGCCTGTCGTA | TAATACAGAGACTCGGGAACCTGCAT |
| | ATGCGTAAGTCTGGGACG | ATGCTTATGATTTTAGGGGAAGGTTT |
| | GAACCGACTACTTTCGGG | GCCTTTTCTCTGGAGACTTCCGCTTCA |
| | AAGGCGTGTTTCCATTTGT | ACTGCTTATCTCCAAATTAATAATCTT |
| | TCATTATTTGTGTGTTTAT | AAATATGAGGACACAGCAACATACTT |
| | GGTGACAACTCTGGGTAA | CTGTGCTTTGGACTATAGTTATGCTAT |
| | ACGTTCTATTGCGTTTATT | GGATTACTGGGGACAAGGAACCAGTG |
| | GAGAGATTCCCAACAATT | TCACTGTAAGTTCCGCTGCTGCGACG |
| | GAACAAACGAGAACTACC | ACCACTCCTGCACCGCGACCACCCAC |
| | TGTTTTATTAAATTTACAC | TCCTGCCCCTACTATTGCTAGTCAACC |
| | AGAGAAGAATTACA | ACTTAGCTTGCGACCTGAGGCATGTC |
| | | GGCCCGCGGCAGGTGGCGCAGTCCAC |
| | | ACCAGGGGTTTAGACTTTGCTTGTGAT |
| | | ATTTATATTTGGGCACCACTCGCCGG |
| | | GACTTGCGGTGTTCTTCTCTTGTCCCT |
| | | TGTTATAACTCTTTATTGTAAGCGCGG |
| | | AAGGAAGAAATTGTTATATATTTTCA |
| | | AACAACCTTTTATGCGACCCGTACAA |
| | | ACAACTCAGGAAGAGGACGGGTGTTC |
| | | TTGTCGGTTTCCAGAAGAGGAAGAGG |
| | | GTGGGTGTGAACTCCGGGTCAAATTT |
| | | AGTAGGTCAGCAGATGCGCCGGCGTA |
| | | CCAACAAGGCCAAAACCAACTGTATA |
| | | ATGAACTCAATCTCGGTAGGCGTGAG |
| | | GAATATGATGTCCTTGATAAAAGGCG |
| | | CGGGAGAGATCCAGAAATGGGCGGA |
| | | AAACCACGGCGAAAGAATCCGCAGG |
| | | AAGGGTTATATAACGAACTTCAAAAG |
| | | GATAAAATGGCTGAAGCTTATTCCGA |
| | | AATTGGCATGAAAGGAGAGCGACGTA |
| | | GGGGCAAAGGGCATGATGGCCTTTAC |
| | | CAAGGGCTCTCAACCGCTACAAAAGA |
| | | TACTTACGACGCTTTACATATGCAAG |
| | | CACTTCCACCCAGG |

B. Expression of Circular RNAs Encoding Anti-BCMA CAR Co-Cultured with MM1S

[1751] As a preliminary testing of various cell lines used, target protein expression on multiple myeloma positive cells (e.g., MM1S, NCI-H929, and RPMI-8226) and negative target cell line (e.g., Nalm6 target cell line) was analyzed using methods known in the art. Results of the preliminary testing were shown in FIG. 111.

[1752] Donor T cells were thawed and activated with anti-CD3/CD28 solutions. Three days after activation, the cells were washed. On the following day, the cells were electroporated with a range of 50 ng dosages of circular RNA encoding a BCMA-41BBζ or BCMA-CD28 ζ CAR or CD19-CD28ζ CAR per 0.1×10⁶ T cells to form engineered CAR-T cells (oCAR-T cells). Selected oCAR-T cells were analyzed for percent live cells for 6 circular RNA constructs encoding BCMA CARs and compared to the circular RNA construct comprising a CD19 28ζ CAR and a control comprising an EP Buffer only (results provided in FIG. 112). Circular RNAs were formed from DNA templates present in Table 28 and/or 30. The cells were given a commercially available soluble BCMA detection reagent containing R-phycoerythrin (PE) fluorophore (e.g., from AcroBiosystems, Delaware), anti-Whitlow PE detection reagent, or anti-G4S linker detection reagent (e.g., G4S-AF647). 24 hours post electroporation of the circular RNA into the T cells, oCAR-T cells were sub-gated on live T cells based on FACS results (e.g., illustrated in FIG. 114) and amount of detectable reagent was collected. Results are provided in FIGS. 113A-113D and the table below. From the collected detectable reagent, percent expression was calculated (e.g., percent soluble BCMA-PE, percent anti-Whitlow.PE, and percent G4S-AF647) and provided in FIG. 115A-115C.

[1753] The selected oCAR-T cells were co-cultured with targeted multiple myeloma cells (e.g., MM1S), NCI-H929, Nalm6 or K562.CD19 cells at an E:T ratio of 1:1 on the day following electroporation of the circular RNAs to the donor T cells. The oCAR-T cells were given soluble BCMA-PE or anti-Whitlow.PE detection reagent. BMCA expression via gMFI was collected (FIGS. 116A-116B and 116D) and percent soluble BCMA-PE was calculated (FIGS. 116C and 116E) at 24-72 hours.

TABLE 29

| ID | Soluble BCMA-PE | | Whitlow-PE | | G4S-AF647 | |
|---|---|---|---|---|---|---|
| Mock | −11.1 | −12.4 | −54.3 | −66.5 | −74.2 | −88.4 |
| DNA Template F | 71.7 | 81.5 | −54.6 | −54.2 | 6973 | 7037 |
| DNA Template G | 18239 | 18887 | 6221 | 6000 | −80.1 | −94.6 |
| DNA Template H | 57811 | 59733 | 14787 | 15078 | −95 | −87.8 |
| DNA Template A | 61524 | 66292 | −73.3 | −85.4 | 27263 | 27709 |
| DNA Template I | 57409 | 58003 | −71.3 | −73.7 | 21881 | 22384 |
| DNA Template J | 84711 | 93417 | −66 | −73.1 | 30438 | 28273 |

TABLE 30

| | Internal Ribosome Entry | |
|---|---|---|
| ID | Site (IRES) Sequence | CAR Sequence |
| DNA | GTGGCCACGCCCGGGCCACC | ATGGCTCTGCCTGTGACAGCTCTG |
| Template F | GATACTTCCCTTCACTCCTTC | CTGCTGCCTCTGGCTCTGCTTCTGC |
| | GGGACTGTTGGGGAGGAACA | ATGCCGCCAGACCTGACATCCAGA |
| | CAACAGGGCTCCCCTGTTTTC | TGACCCAGACAACCAGCAGCCTGT |
| | CCATTCCTTCCCCCTTTTCCCA | CTGCCAGCCTGGGCGATAGAGTGA |
| | ACCCCAACCGCCGTATCTGGT | CCATCAGCTGTAGAGCCAGCCAGG |
| | GGCGGCAAGACACACGGGTC | ACATCAGCAAGTACCTGAACTGGT |
| | TTTCCCTCTAAAGCACAATTG | ATCAGCAGAAACCCGACGGCACC |
| | TGTGTGTGTCCCAGGTCCTCC | GTGAAGCTGCTGATCTACCACACC |
| | TGCGTACGGTGCGGGAGTGCT | AGCAGACTGCACAGCGGCGTGCCA |
| | CCCACCCAACTGTTGTAAGCC | AGCAGATTTTCTGGCAGCGGCTCT |
| | TGTCCAACGCGTCGTCCTGGC | GGCACCGACTACAGCCTGACAATC |
| | AAGACTATGACGTCGCATGTT | AGCAACCTGGAACAAGAGGATAT |
| | CCGCTGCGGATGCCGACCGG | CGCTACCTACTTCTGCCAGCAAGG |
| | GTAACCGGTTCCCCAGTGTGT | CAACACCCTGCCTTACACCTTTGG |
| | GTAGTGCGATCTTCCAGGTCC | CGGAGGCACCAAGCTGGAAATCA |
| | TCCTGGTTGGCGTTGTCCAGA | CAGGCGGCGGAGGAAGCGGAGGC |
| | AACTGCTTCAGGTAAGTGGGG | GGAGGATCTGGTGGTGGTGGATCT |
| | TGTGCCCAATCCCTACAAAGG | GAAGTGAAACTGCAAGAGTCTGGC |
| | TTGATTCTTTCACCACCTTAG | CCTGGCCTGGTGGCCCCATCTCAA |
| | GAATGCTCCGGAGGTACCCCA | TCTCTGAGCGTGACCTGTACCGTC |
| | GCAACAGCTGGGATCTGACC | AGCGGAGTGTCCCTGCCTGATTAT |
| | GGAGGCTAATTGTCTACGGGT | GGCGTGTCCTGGATCCGGCAGCCT |
| | GGTGTTTCCTTTTTCTTTTCAC | CCTAGAAAAGGCCTGGAATGGCTG |
| | ACAACTCTACTGCTGACAACT | GGCGTGATCTGGGGCAGCGAGAC |
| | CACTGACTATCCACTTGCTCT | AACCTACTACAACAGCGCCCTGAA |
| | GTCACG | GTCCCGGCTGACCATCATCAAGGA |
| | | CAACTCCAAGAGCCAGGTGTTCCT |
| | | GAAGATGAACAGCCTGCAGACCG |
| | | ACGACACCGCCATCTACTATTGCG |
| | | CCAAGCACTACTACTACGGCGGCA |
| | | GCTACGCCATGGATTATTGGGGCC |
| | | AGGGCACCAGCGTGACCGTGTCTA |
| | | GCATCGAAGTGATGTACCCTCCAC |
| | | CTTACCTGGACAACGAGAAGTCCA |
| | | ACGGCACCATCATCCACGTGAAGG |
| | | GCAAGCACCTGTGTCCTTCTCCAC |
| | | TGTTCCCCGGACCTAGCAAGCCTT |
| | | TCTGGGTGCTCGTTGTTGTTGGCG |
| | | GCGTGCTGGCCTGTTACTCTCTGCT |
| | | GGTTACCGTGGCCTTCATCATCTTT |
| | | TGGGTCCGAAGCAAGCGGAGCCG |
| | | GCTGCTGCACTCCGACTACATGAA |
| | | CATGACCCCTAGACGGCCCGGACC |
| | | AACCAGAAAGCACTACCAGCCTTA |
| | | CGCTCCTCCTAGAGACTTCGCCGC |
| | | CTACCGGTCCAGAGTGAAGTTCAG |
| | | CAGATCCGCCGATGCTCCCGCCTA |
| | | TCAGCAGGGCCAAAACCAGCTGTA |
| | | CAACGAGCTGAACCTGGGGAGAA |
| | | GAGAAGAGTACGACGTGCTGGAC |
| | | AAGCGGAGAGGCAGAGATCCTGA |
| | | AATGGGCGGCAAGCCCAGACGGA |
| | | AGAATCCTCAAGAGGGCCTGTATA |
| | | ATGAGCTGCAGAAAGACAAGATG |
| | | GCCGAGGCCTACAGCGAGATCGG |
| | | AATGAAGGGCGAGCGCAGAAGAG |
| | | GCAAGGGACACGATGGACTGTACC |
| | | AGGGCCTGAGCACCGCCACCAAG |
| | | GATACCTATGATGCCCTGCACATG |
| | | CAGGCCCTGCCTCCAAGA |
| DNA | CCCCCCTCCCCCCCTTCCCTTC | ATGGCCCTCCCCGTCACAGCTCTC |
| Template G | CCTTTGCAACGCAACAATTGT | CTGCTCCCACTGGCCCTTCTTTTGC |
| | AAGTGCCCTCACCTGTCAATT | ACGCTGCTCGCCCCGATATCGTGC |
| | GGGACCACCACTTTCAGTGAC | TCACCCAGTCACCTCCAAGCCTTG |
| | CCCATGCGAAGTGCTGAGAG | CCATGAGCCTCGGGAAACGGGCTA |
| | AAAGGAAGCTTTCTTACCCTT | CCATCTCCTGCCGGGCTTCAGAGT |
| | CATTTGTGAACCCACTGGTCT | CCGTCACCATCCTCGGGTCACACC |
| | AAGCCGCTTGGAATACGATG | TCATCCACTGGTACCAACAGAAAC |
| | AGTGGAAAAGTTCATTCTTAA | CAGGGCAGCCTCCTACCCTCTTGA |
| | TGGAGTGAAACATGCTTAAAT | TCCAGTTGGCCTCCAACGTGCAAA |
| | TTCCAGCTCGTGCTGGTCTTT | CTGGGGTTCCCGCCAGGTTCAGTG |
| | CCAGTACGGGGCGGCCCTGTC | GCTCCGGATCCCGGACAGATTTCA |
| | TGGCCGTAATTCTTCAGAGTG | CACTTACCATCGATCCTGTGGAGG |
| | TCACGCCACACTTGTGGATCT | AGGACGATGTGGCCGTCTATTACT |
| | CACGTGCCACATGACAGCGCT | GCCTGCAGTCTCGCACCATCCCTC |
| | ACAGCTGGAACTGGGTGCTTG | GGACCTTCGGTGGAGGCACCAAGC |
| | GTGCCCATGGAGTAACAGCG | TCGAGATCAAGGGTAGCACCTCCG |
| | AAAAGTGTTAGATCAAGCCTT | GCTCTGGAAAGCCAGGCTCTGGTG |
| | GCTTGGGCTATGAGCCTGCGG | AGGGTTCTACCAAGGGCCAAATCC |
| | AACAACAACTGGTAACAGTT | AGCTGGTCCAGTCTGGGCCCGAGC |
| | GCCTCAGGGGCCGAAAGCCA | TGAAGAAACCCGGGGAGACCGTG |
| | CGGTGTTAACAGCACCCTCAT | AAGATCTCCTGCAAGGCCTCCGGT |
| | AGTTTGATCCACCTCAGGGTG | TATACCTTCACCGACTACTCCATC |
| | GTGATGTTTAGCAGTTAGTAG | AACTGGGTCAAGCGCGCTCCTGGA |
| | TTGCCAATCTGTGTTCACTGA | AAGGGCCTCAAGTGGATGGGCTGG |
| | AATCTCGGCATACCGTGTAGT | ATCAACACCGAAACCCGCGAGCCT |
| | GTACAGGGGTGAAGGATGCC | GCCTATGCTTACGACTTCAGGGGC |
| | CAGAAGGTACCCGTAGGTAA | CGGTTCGCTTTCTCACTGGAGACC |
| | CCTTAAGAGACTATGGATCTG | TCCGCTTCCACAGCCTACCTCCAG |
| | ATCTGGGGCCTTGTCCGGAGT | ATCAACAACCTCAAGTACGAAGAC |
| | GCTTTACACACGGCTCAAGGT | ACCGCCACCTATTTCTGCGCTCTCG |
| | TAAAAAACGTCTAGCCCCACA | ACTATTCCTACGCTATGGACTACT |
| | GAGCCCGAGGGATTCGGGTTT | GGGGTCAGGGCACCTCTGTGACCG |
| | TCCCTTTAAAAACCCGACTAG | TCTCTAGCGCAGCCGCCACCACAA |
| | AGCTTATGGTGACAATTATTG | CACCAGCCCCACGGCCACCTACTC |
| | CTGTTCAGACGAACAGTGTAA | CCGCACCCACCATCGCATCCCAAC |
| | TTGTTGTCTATTCACAGCAGT | CACTCAGTCTGAGGCCCGAGGCCT |
| | TCTATCAGAGCTTTTCCCACA | GTAGACCTGCTGCTGGAGGCGCAG |
| | ACGGATCTTCTTGGCAAGCAA | TGCATACCCGCGGTCTCGACTTCG |
| | ATACAGCAGGAGTCAAT | CCTGCGACATCTATATCTGGGCCC |
| | | CATTGGCAGGTACCTGTGGCGTGC |
| | | TGCTGCTGTCACTCGTCATCACCCT |
| | | GTACTGCCGGAGTAAGCGCTCTAG |
| | | GCTGTTGCACAGCGACTACATGAA |
| | | CATGACCCCAAGAAGACCAGGGC |
| | | CTACCCGGAAGCACTACCAGCCAT |
| | | ACGCACCTCCCCGGGACTTTGCCG |
| | | CCTATCGGTCTCGGGTGAAGTTCT |
| | | CACGCTCCGCTGATGCCCCAGCAT |
| | | ACCAGCAGGGGCAGAACCAGCTG |
| | | TACAATGAGCTCAACCTCGGTCGC |
| | | CGCGAAGAGTACGACGTGCTCGAC |
| | | AAGAGAAGGGGCAGGGACCCTGA |
| | | GATGGGAGGCAAGCCCCGCAGAA |
| | | AGAATCCCCAGGAAGGTCTGTACA |
| | | ACGAGCTGCAAAAGGATAAGATG |
| | | GCTGAGGCCTACAGCGAGATCGGC |
| | | ATGAAGGGCGAAAGGAGACGGGG |
| | | AAAGGGCCACGACGGGCTCTACCA |
| | | GGGACTCTCCACCGCCACCAAGGA |
| | | CACCTACGACGCCCTCCACATGCA |
| | | GGCTCTGCCACCCAGG |
| DNA | CCCCCCTCCCCCCCTTCCCTTC | ATGGCACTTCCCGTCACCGCTCTC |
| Template H | CCTTTGCAACGCAACAATTGT | CTGCTGCCCCTCGCACTGCTGCTCC |
| | AAGTGCCCTCACCTGTCAATT | ATGCAGCCCGCCCAGACATCGTCC |
| | GGGACCACCACTTTCAGTGAC | TGACCCAGTCCCCTCCCTCCCTCGC |
| | CCCATGCGAAGTGCTGAGAG | AATGTCCCTCGGGAAACGGGCCAC |
| | AAAGGAAGCTTTCTTACCCTT | CATCAGCTGCCGGGCCTCTGAGTC |
| | CATTTGTGAACCCACTGGTCT | AGTGACAATCCTCGGAAGCCATCT |
| | AAGCCGCTTGGAATACGATG | GATCCATTGGTACCAGCAGAAACC |
| | AGTGGAAAAGTTCATTCTTAA | CGGTCAGCCTCCAACCCTCCTCAT |
| | TGGAGTGAAACATGCTTAAAT | CCAGCTGGCCTCCAACGTGCAGAC |
| | TTCCAGCTCGTGCTGGTCTTT | AGGAGTCCCCGCTCGGTTCTCAGG |
| | CCAGTACGGGGCGGCCCTGTC | CAGCGGTTCCAGGACCGACTTCAC |
| | TGGCCGTAATTCTTCAGAGTG | CCTGACCATCGACCCCGTGGAAGA |
| | TCACGCCACACTTGTGGATCT | GGACGATGTGGCTGTGTACTACTG |
| | CACGTGCCACATGACAGCGCT | CCTCCAGTCCCGGACCATCCCACG |
| | ACAGCTGGAACTGGGTGCTTG | GACCTTCGGAGGTGGGACAAAGCT |
| | GTGCCCATGGAGTAACAGCG | GGAGATCAAAGGCAGCACCAGCG |
| | AAAAGTGTTAGATCAAGCCTT | GTTCTGGCAAGCCAGGGTCAGGTG |
| | GCTTGGGCTATGAGCCTGCGG | AGGGGAGCACAAAGGGTCAGATC |
| | AACAACAACTGGTAACAGTT | CAGCTGGTGCAGAGCGGTCCCGAG |
| | GCCTCAGGGGCCGAAAGCCA | CTGAAGAAGCCCGGGGAGACCGTT |
| | CGGTGTTAACAGCACCCTCAT | AAGATCTCCTGCAAGGCTAGCGGG |
| | AGTTTGATCCACCTCAGGGTG | TACACCTTCACCGACTATAGTATC |
| | GTGATGTTTAGCAGTTAGTAG | AACTGGGTCAAGCGCGCTCCTGGC |
| | TTGCCAATCTGTGTTCACTGA | AAGGGGCTCAAGTGGATGGGGTG |
| | AATCTCGGCATACCGTGTAGT | GATCAACACCGAAACCAGGGAGC |
| | GTACAGGGGTGAAGGATGCC | CCGCATACGCTTATGACTTTCGGG |
| | CAGAAGGTACCCGTAGGTAA | GCCGGTTCGCCTTTTCCCTGGAGA |
| | CCTTAAGAGACTATGGATCTG | CCAGCGCCTCTACCGCCTACCTCC |
| | ATCTGGGGCCTTGTCCGGAGT | AGATCAACAACCTGAAGTACGAG |
| | GCTTTACACACGGCTCAAGGT | GACACCGCCACCTACTTCTGCGCA |
| | TAAAAAACGTCTAGCCCCACA | CTCGACTACTCCTACGCTATGGAC |
| | GAGCCCGAGGGATTCGGGTTT | TACTGGGGTCAGGGTACCTCCGTC |
| | TCCCTTTAAAAACCCGACTAG | ACCGTCTCCAGCATCGAGGTCATG |
| | AGCTTATGGTGACAATTATTG | TACCCTCCTCCCTACCTGGACAAC |
| | CTGTTCAGACGAACAGTGTAA | GAGAAGTCCAACGGCACCATCATC |
| | TTGTTGTCTATTCACAGCAGT | CATGTGAAGGGCAAGCATCTCTGC |
| | TCTATCAGAGCTTTTCCCACA | CCCAGCCCACTGTTCCCCGGACCC |
| | ACGGATCTTCTTGGCAAGCAA | TCTAAGCCCTTCTGGGTCCTGGTC |
| | ATACAGCAGGAGTCAAT | GTCGTCGGCGGTGTTCTGGCTTGC |
| | | TACAGCTTGCTGGTCACCGTCGCC |
| | | TTCATCATCTTCTGGGTGCGCTCCA |
| | | AGAGGAGCCGGCTGCTGCATAGCG |
| | | ACTACATGAACATGACCCCTAGAA |
| | | GGCCTGGTCCAACCCGCAAGCACT |
| | | ACCAGCCTTACGCCCCTCCACGGG |
| | | ACTTCGCAGCCTACCGGTCACGGG |
| | | TGAAGTTCTCTCGGAGCGCAGATG |
| | | CCCCAGCATACCAGCAGGGCCAGA |
| | | ACCAGCTGTACAACGAACTTAACC |
| | | TTGGTCGGCGGGAGGAATACGATG |
| | | TGCTGGACAAGCGCAGGGGTCGG |
| | | GATCCTGAAATGGGCGGGAAACC |
| | | ACGCCGGAAGAACCCACAGGAGG |
| | | GGCTCTATAACGAGCTCCAAAAGG |
| | | ATAAGATGGCTGAGGCTTACAGCG |
| | | AGATTGGAATGAAGGGAGAAAGA |
| | | AGACGGGGCAAGGGTCACGACGG |
| | | GTTGTACCAGGGTCTGAGCACCGC |
| | | CACCAAGGACACCTACGACGCCCT |
| | | CCACATGCAAGCCCTTCCACCCCG |
| | | C |
| DNA | CCCCCCTCCCCCCCTTCCCTTC | ATGGCACTCCCCGTTACCGCCCTT |
| Template I | CCTTTGCAACGCAACAATTGT | CTGCTGCCTCTCGCCTTGCTGCTGC |
| | AAGTGCCCTCACCTGTCAATT | ACGCAGCCAGACCACAGGTCAAG |
| | GGGACCACCACTTTCAGTGAC | CTGGAGGAGTCTGGTGGCGGGCTC |
| | CCCATGCGAAGTGCTGAGAG | GTTCAAGCAGGTCGGAGTCTCCGC |
| | AAAGGAAGCTTTCTTACCCTT | CTGTCTTGCGCAGCATCAGAGCAT |
| | CATTTGTGAACCCACTGGTCT | ACCTTCTCCTCACACGTGATGGGG |
| | AAGCCGCTTGGAATACGATG | TGGTTCAGGCAAGCTCCCGGTAAG |
| | AGTGGAAAAGTTCATTCTTAA | GAGAGGGAGTCCGTGGCCGTTATC |
| | TGGAGTGAAACATGCTTAAAT | GGCTGGCGCGATATCAGCACCTCC |
| | TTCCAGCTCGTGCTGGTCTTT | TACGCAGACAGCGTTAAGGGCCGG |
| | CCAGTACGGGGCGGCCCTGTC | TTCACTATCTCCAGGGACAACGCT |
| | TGGCCGTAATTCTTCAGAGTG | AAGAAGACACTCTACCTCCAGATG |
| | TCACGCCACACTTGTGGATCT | AACAGTCTGAAGCCCGAGGACACC |
| | CACGTGCCACATGACAGCGCT | GCAGTGTACTATTGCGCTGCTCGG |
| | ACAGCTGGAACTGGGTGCTTG | CGGATCGATGCTGCCGACTTCGAC |
| | GTGCCCATGGAGTAACAGCG | AGCTGGGGTCAAGGGACCCAGGTC |
| | AAAAGTGTTAGATCAAGCCTT | ACCGTTTCCAGCGGAGGTGGCGGA |
| | GCTTGGGCTATGAGCCTGCGG | AGTGGTGGCGGAGGATCAGGTGGT |
| | AACAACAACTGGTAACAGTT | GGAGGCTCCGAGGTCCAGCTGGTG |
| | GCCTCAGGGGCCGAAAGCCA | GAATCAGGAGGCGGCTTGGTGCAG |
| | CGGTGTTAACAGCACCCTCAT | GCTGGTGGGTCTTTGCGGTTGTCCT |
| | AGTTTGATCCACCTCAGGGTG | GCGCAGCTTCCGGCAGGACCTTCA |
| | GTGATGTTTAGCAGTTAGTAG | CCATGGGATGGTTCAGACAAGCCC |
| | TTGCCAATCTGTGTTCACTGA | CAGGTAAGGAGCGGGAGTTTGTGG |
| | AATCTCGGCATACCGTGTAGT | CCGCAATCTCACTGTCTCCCACCCT |
| | GTACAGGGGTGAAGGATGCC | CGCTTACTACGCCGAGAGTGTGAA |
| | CAGAAGGTACCCGTAGGTAA | GGGGCGCTTCACAATCAGTCGCGA |
| | CCTTAAGAGACTATGGATCTG | CAACGCAAAGAACACCGTCGTCCT |
| | ATCTGGGGCCTTGTCCGGAGT | GCAAATGAACTCCCTGAAGCCTGA |
| | GCTTTACACACGGCTCAAGGT | GGATACCGCACTCTATTACTGCGC |
| | TAAAAAACGTCTAGCCCCACA | CGCCGATCGGAAGAGCGTCATGTC |
| | GAGCCCGAGGGATTCGGGTTT | CATCCGGCCCGACTATTGGGGCCA |
| | TCCCTTTAAAAACCCGACTAG | AGGCACCCAAGTGACCGTCAGCTC |
| | AGCTTATGGTGACAATTATTG | CACCTCCACAACCACTCCCGCCCC |
| | CTGTTCAGACGAACAGTGTAA | AAGACCACCTACCCCAGCCCCAAC |
| | TTGTTGTCTATTCACAGCAGT | AATCGCATCCCAGCCTCTGTCCCTT |
| | TCTATCAGAGCTTTTCCCACA | CGGCCCGAAGCTTGTCGCCCTGCA |
| | ACGGATCTTCTTGGCAAGCAA | GCAGGTGGAGCAGTGCACACCCG |
| | ATACAGCAGGAGTCAAT | GGGACTGGACTTCGCCTGCGACAT |
| | | CTACATCTGGGCACCCCTGGCTGG |
| | | AACCTGCGGCGTGTTGCTGCTGAG |
| | | CCTGGTGATCACCCTCTACTGCCG |
| | | CTCTAAGAGAAGCCGGCTGCTGCA |
| | | TAGCGACTACATGAACATGACCCC |
| | | TAGGAGACCAGGACCCACCCGGA |
| | | AGCACTACCAGCCTTACGCTCCTC |
| | | CACGGGATTTCGCTGCTTACCGCA |
| | | GCCGGGTGAAGTTTTCCAGGTCAG |
| | | CTGACGCCCCTGCCTACCAGCAGG |
| | | GCCAGAACCAATTGTACAACGAAC |
| | | TGAATCTGGGACGGCGCGAGGAAT |
| | | ACGACGTCCTGGACAAGAGGCGG |
| | | GGTAGAGATCCCGAGATGGGCGG |
| | | GAAACCTCGGCGGAAGAACCCTCA |
| | | GGAGGGGCTCTACAACGAGCTGCA |
| | | GAAGGATAAGATGGCCGAAGCCT |
| | | ACTCCGAGATCGGGATGAAGGGTG |
| | | AACGGAGGAGGGGCAAGGGACAC |
| | | GACGGCCTGTATCAGGGCCTCAGC |
| | | ACCGCTACCAAGGACACCTACGAC |
| | | GCCCTGCACATGCAGGCTCTCCCA |
| | | CCACGG |
| DNA | CCCCCCTCCCCCCCTTCCCTTC | ATGGCTCTTCCCGTCACCGCTTTGC |
| Template J | CCTTTGCAACGCAACAATTGT | TGCTGCCCCTGGCACTCCTCCTCCA |
| | AAGTGCCCTCACCTGTCAATT | TGCTGCTCGGCCTCAGGTGAAGCT |
| | GGGACCACCACTTTCAGTGAC | GGAGGAGAGTGGTGGCGGTCTGGT |
| | CCCATGCGAAGTGCTGAGAG | GCAAGCTGGCAGATCTCTGCGCCT |
| | AAAGGAAGCTTTCTTACCCTT | GTCTTGCGCAGCCAGCGAACACAC |
| | CATTTGTGAACCCACTGGTCT | CTTCTCCTCCCACGTGATGGGGTG |
| | AAGCCGCTTGGAATACGATG | GTTTCGGCAGGCACCCGGGAAAGA |
| | AGTGGAAAAGTTCATTCTTAA | GCGCGAGTCCGTCGCAGTCATCGG |
| | TGGAGTGAAACATGCTTAAAT | GTGGCGGGACATCTCTACCAGCTA |
| | TTCCAGCTCGTGCTGGTCTTT | CGCAGATTCCGTCAAGGGCCGGTT |
| | CCAGTACGGGGCGGCCCTGTC | CACCATTTCCCGGGATAACGCTAA |
| | TGGCCGTAATTCTTCAGAGTG | GAAGACCCTCTACCTGCAAATGAA |
| | TCACGCCACACTTGTGGATCT | CTCTCTGAAGCCCGAAGACACCGC |
| | CACGTGCCACATGACAGCGCT | CGTCTACTATTGCGCAGCAAGGCG |
| | ACAGCTGGAACTGGGTGCTTG | CATCGACGCTGCCGACTTCGACTC |
| | GTGCCCATGGAGTAACAGCG | TTGGGGCCAAGGAACCCAGGTCAC |
| | AAAAGTGTTAGATCAAGCCTT | CGTGTCTTCCGGAGGAGGAGGCTC |
| | GCTTGGGCTATGAGCCTGCGG | CGGTGGTGGAGGTTCTGGAGGTGG |
| | AACAACAACTGGTAACAGTT | CGGCTCAGAGGTGCAGCTCGTGGA |
| | GCCTCAGGGGCCGAAAGCCA | GAGCGGTGGTGGACTCGTTCAGGC |
| | CGGTGTTAACAGCACCCTCAT | AGGCGGCAGTTTGCGGCTGTCCTG |
| | AGTTTGATCCACCTCAGGGTG | TGCAGCCTCCGGTCGCACTTTCAC |
| | GTGATGTTTAGCAGTTAGTAG | TATGGGATGGTTCCGCCAGGCTCC |
| | TTGCCAATCTGTGTTCACTGA | TGGTAAAGAAAGGGAGTTCGTGGC |
| | AATCTCGGCATACCGTGTAGT | CGCCATCAGTCTGAGCCCCACCCT |
| | GTACAGGGGTGAAGGATGCC | CGCATACTACGCCGAGAGCGTGAA |
| | CAGAAGGTACCCGTAGGTAA | GGGTAGGTTCACTATCAGCCGGGA |
| | CCTTAAGAGACTATGGATCTG | CAACGCCAAGAACACCGTGGTGCT |
| | ATCTGGGGCCTTGTCCGGAGT | CCAGATGAATTCCCTGAAGCCTGA |
| | GCTTTACACACGGCTCAAGGT | GGATACCGCCCTCTACTACTGCGC |
| | TAAAAAACGTCTAGCCCCACA | TGCCGACCGCAAGAGCGTGATGAG |
| | GAGCCCGAGGGATTCGGGTTT | CATCCGGCCTGACTATTGGGGTCA |
| | TCCCTTTAAAAACCCGACTAG | GGGGACACAGGTGACCGTCAGCA |
| | AGCTTATGGTGACAATTATTG | GCATCGAGGTGATGTATCCACCAC |
| | CTGTTCAGACGAACAGTGTAA | CCTACCTCGACAACGAGAAGTCCA |
| | TTGTTGTCTATTCACAGCAGT | ACGGCACCATCATCCACGTCAAGG |
| | TCTATCAGAGCTTTTCCCACA | GGAAGCACCTCTGCCCTTCCCCTC |
| | ACGGATCTTCTTGGCAAGCAA | TGTTCCCTGGCCCCTCAAAGCCCTT |
| | ATACAGCAGGAGTCAAT | CTGGGTCCTGGTGGTGGTTGGTGG |
| | | GGTGCTGGCTTGCTACTCCCTGCTC |
| | | GTGACCGTGGCTTTCATCATCTTCT |
| | | GGGTTCGGAGCAAACGGTCCAGAC |
| | | TGCTGCACTCCGACTACATGAACA |
| | | TGACCCCAAGAAGACCTGGGCCCA |
| | | CACGGAAGCATTACCAACCCTATG |
| | | CACCACCTCGGGATTTCGCCGCCT |
| | | ACAGATCCCGGGTCAAGTTCTCCA |
| | | GGTCCGCCGATGCACCAGCCTATC |
| | | AGCAGGGGCAAAACCAGCTGTAT |
| | | AATGAGCTGAACCTTGGACGGCGC |
| | | GAGGAGTACGACGTGCTCGACAA |
| | | AAGACGCGGTCGCGACCCAGAGA |
| | | TGGGCGGCAAGCCTAGACGCAAG |
| | | AATCCCCAGGAGGGGCTCTATAAC |
| | | GAGTTGCAGAAGGATAAGATGGC |
| | | CGAGGCCTACAGCGAGATCGGGAT |
| | | GAAAGGCGAAAGACGGCGCGGAA |
| | | AGGGTCACGACGGACTCTACCAGG |
| | | GCCTGAGCACAGCCACCAAAGAC |
| | | ACCTACGACGCTCTGCATATGCAA |
| | | GCACTGCCTCCCCGG |

### Example 101: Cytotoxicity Analysis of CAR Expression

### A. BCMA CAR Expression and CD19 CAR Expression on Multiple Myeloma Positive and Negative Target Cell Lines

[1754] Donor T cells were thawed and activated with anti-CD3/CD28 solutions. Three days after activation, the cells were washed. On the following day, the cells were electroporated with a range of 10-30 ng dosages of circular RNA encoding a BCMA-41BBζ CAR or CD19CD28ζ CAR per 0.1×10⁶ T cells to form engineered CAR-T cells (oCAR-T cells). Circular RNAs comprised in the following order: a ′3 Anabaena exon, an internal ribosome entry site (IRES), a coding region encoding a BCMA CAR or CD19 CAR, and a 5′ Anabaena exon. Circular RNAs were formed from an IVT reaction of DNA templates from Table 28, Table 30 and Table 31. As a control, Mock T cells were used, wherein the Mock T cells were not electroporated with any circular RNAs. A day following electroporation of the circular RNAs to the T cells, the oCAR-T cells were co-cultured with target multiple myeloma (MM) positive or negative T cells at a 1:1 E:T ratio. MM positive T cells comprised of MM1S, NCI-H929 or RPM1-8226. MM negative T cells comprised of a CD19 positive T cell line (i.e., Nalm6 cell line). As a control, the target tumor cell without co-culturing with the T cells was analyzed for comparison purposes. The circular RNAs were given a commercially available soluble BCMA detection reagent containing R-phycoerythrin (PE) fluorophore or soluble CD19 detection reagent containing quantum dot (qdot) fluorophore (e.g., from AcroBiosystems, Delaware). The oCAR-T cells were also placed into a commercially available live-cell analysis portfolio system (e.g., an IncuCyte) and analyzed 0-72 or 0-96 hours post co-culture for cytotoxicity. The cytotoxicity results can be seen in FIGS. 117A-117C for each of the circular RNAs encoding BCMA, CD19, or HER2 CARs, respectively. Cross-reactivity for the various circular RNAs encoding the various CARs was observed on MM1S, Nalm6 and CD19 positive T cell line in FIGS. 117A, 117B, and 117C respectively.

### B. Cytotoxicity of BCMA Targeted Killing on MM1S Via FACS

[1755] BMCA positive cells were acquired and prepped. The cells were electroporated with ng per 0.1×10⁶ cells of circular RNA comprising a 3′ Anabaena exon, an internal ribosome entry site (IRES), a BCMA-41BBζ CAR, and a 5′ Anabaena exon. Circular RNAs were formed from an IVT reaction of DNA templates from Table 28, Table 30, and Table 31. On the following day, the cells were then co-cultured with MM1S cells and dyed with FSC-A, CD3-Brilliant Violet 650-A, LD-fixable Near IR-A for fluorescence activated cell sorting analysis (FACS). Resulting FACS imaging for cell post 24 hours after co-culturing with MM1S can be seen in FIG. 118A. From the FACS imaging, percent cell lysis was calculated (e.g., % cell lysis=(1-((% of live Target Cells in Test Sample)/(% of live Target Cells in Control Sample)))×100).

[1756] As a follow up, FACS cytotoxicity assays were performed for circular RNAs encoding BCMA-41BBζ, CD19-CD28ζ or HER2-CD28ζ CAR and an IRES at either 10, 30, 50 or 100 ng per 0.1×10⁶ T cells (FACS imaging for the T cell electroporated with circular RNAs along with their mock counterpart (T cells lacking circular RNAs) was shown in FIGS. 119A and 119B). Circular RNAs were formed from an IVT reaction of DNA templates from Table 28, Table 30, and Table 31. The T cells containing circular RNAs (oCAR-T) were co-cultured with one of four target cell—either MM1S (a BCMA positive cell line), NCI-H929 (a BCMA positive cell line) Nalm6 cells (a CD19 positive cell line), a CD19 T stable cell line (e.g., K562.CD19)—at an E:T ratio of 1:1. 24 hours post co-culture of the oCAR-T cells with the MM1S, Nalm6, NCI-H929, or CD19 T stable cells. MM1S+Mock (i.e., MMIS tumor cells cocultured with T cells not electroporated with circular RNAs), MM1S (i.e., MM1S tumor cells not cocultured with T cells), Nalm6+Mock (i.e., Nalm6 tumor cells cocultured with T cells not electroporated with circular RNAs), Nalm6 (i.e., Nalm6 tumor cells not co-cultured with T cells), Mock+NCI-H929 (i.e., NCI-H929 tumor cells cocultured with T cells not electroporated with circular RNAs), and Mock+K562.CD19 (i.e., K562.CD19 tumor cells cocultured with T cells not electroporated with circular RNAs) were used as controls. Resulting FACS imaging for each of the cell types post 24 hours after co-culturing the T cells with the target cells was calculated. From the FACS imaging, percent cell lysis was calculated (e.g., % cell lysis=(1−((% of live Target Cells in Test Sample)/(% of live Target Cells in Control Sample)))×100) and provided in FIG. 118B (FACS cytotoxicity in MM1S) and FIG. 118C (FACS cytotoxicity in Nalm6). Percent target killing for MIlS, NCI-H929, Nalm6 and K562.CD19 cocultured with the T cells along with their viabilities were provided in FIG. 120A-120D. INY (shown in FIGS. 121A and 121B, and FIGS. 122A-122P), IL2, Granzyme and B, GM-CSF, IL2 and TNFα production was evaluated by a commercially available cytokine secretion kit (e.g., MSD) for cytokine secretion levels at either 24 or 48 hours post co-culture of target cell to the T cell.

TABLE 31

| | Internal Ribosome Entry | |
|---|---|---|
| ID | Site (IRES) Sequence | CAR Sequence |
| DNA | GTGGCCACGCCCGGGCCACCG | ATGGCTCTGCCTGTGACAGCTCT |
| Template K | ATACTTCCCTTCACTCCTTCGG | GCTGCTGCCTCTGGCTCTGCTTCT |
| | GACTGTTGGGGAGGAACACAA | GCATGCCGCCAGACCTGACATCC |
| | CAGGGCTCCCCTGTTTTCCCAT | AGATGACTCAGAGCCCCAGCAGC |
| | TCCTTCCCCCTTTTCCCAACCC | CTGTCTGCCTCTGTGGGAGACAG |
| | CAACCGCCGTATCTGGTGGCG | AGTGACAATTACCTGCCGGGCCA |
| | GCAAGACACACGGGTCTTTCC | GCCAGGATGTGAATACTGCTGTC |
| | CTCTAAAGCACAATTGTGTGT | GCCTGGTATCAACAAAAGCCTGG |
| | GTGTCCCAGGTCCTCCTGCGTA | CAAGGCCCCTAAGCTCCTGATCT |
| | CGGTGCGGGAGTGCTCCCACC | ACAGCGCCAGCTTTCTGTACAGC |
| | CAACTGTTGTAAGCCTGTCCA | GGCGTGCCCAGCAGATTCTCCGG |
| | ACGCGTCGTCCTGGCAAGACT | AAGCAGAAGCGGCACAGATTTC |
| | ATGACGTCGCATGTTCCGCTGC | ACACTGACCATAAGCAGCCTGCA |
| | GGATGCCGACCGGGTAACCGG | GCCAGAGGATTTCGCCACCTACT |
| | TTCCCCAGTGTGTGTAGTGCGA | ATTGCCAGCAGCACTACACCACA |
| | TCTTCCAGGTCCTCCTGGTTGG | CCTCCAACCTTTGGCCAGGGCAC |
| | CGTTGTCCAGAAACTGCTTCA | CAAGGTCGAGATTAAGAGAACA |
| | GGTAAGTGGGGTGTGCCCAAT | GGCAGCACATCTGGCTCTGGCAA |
| | CCCTACAAAGGTTGATTCTTTC | ACCTGGATCTGGCGAGGGCTCTG |
| | ACCACCTTAGGAATGCTCCGG | AAGTCCAGCTGGTGGAATCTGGC |
| | AGGTACCCCAGCAACAGCTGG | GGAGGACTGGTTCAACCTGGCGG |
| | GATCTGACCGGAGGCTAATTG | CTCTCTGAGACTGTCTTGTGCCG |
| | TCTACGGGTGGTGTTTCCTTTT | CCTCCGGCTTCAACATCAAGGAC |
| | TCTTTTCACACAACTCTACTGC | ACCTACATCCACTGGGTCCGACA |
| | TGACAACTCACTGACTATCCA | AGCCCCAGGCAAAGGACTTGAGT |
| | CTTGCTCTGTCACG | GGGTCGCCAGGATCTACCCCACC |
| | | AACGGCTACACCAGATACGCCGA |
| | | CTCTGTGAAGGGCAGATTCACCA |
| | | TCTCTGCCGACACCAGCAAGAAT |
| | | ACCGCCTACCTGCAGATGAACTC |
| | | CCTGAGAGCCGAAGATACCGCTG |
| | | TGTATTACTGTTCCAGATGGGGA |
| | | GGCGACGGCTTCTACGCCATGGA |
| | | TGTTTGGGGCCAAGGCACCCTCG |
| | | TGACCGTTTCTTCTATCGAAGTG |
| | | ATGTACCCTCCACCTTACCTGGA |
| | | CAACGAGAAGTCCAACGGCACC |
| | | ATCATCCACGTGAAGGGCAAGCA |
| | | CCTGTGTCCTTCTCCACTGTTCCC |
| | | CGGACCTAGCAAGCCTTTCTGGG |
| | | TGCTCGTTGTTGTTGGCGGCGTG |
| | | CTGGCCTGTTACTCTCTGCTGGTT |
| | | ACCGTGGCCTTCATCATCTTTTGG |
| | | GTCCGAAGCAAGCGGAGCCGGC |
| | | TGCTGCACTCCGACTACATGAAC |
| | | ATGACCCCTAGACGGCCCGGACC |
| | | AACCAGAAAGCACTACCAGCCTT |
| | | ACGCTCCTCCTAGAGACTTCGCC |
| | | GCCTACCGGTCCAGAGTGAAGTT |
| | | CAGCAGATCCGCCGATGCTCCCG |
| | | CCTATCAGCAGGGCCAAAACCAG |
| | | CTGTACAACGAGCTGAACCTGGG |
| | | GAGAAGAGAAGAGTACGACGTG |
| | | CTGGACAAGCGGAGAGGCAGAG |
| | | ATCCTGAAATGGGCGGCAAGCCC |
| | | AGACGGAAGAATCCTCAAGAGG |
| | | GCCTGTATAATGAGCTGCAGAAA |
| | | GACAAGATGGCCGAGGCCTACA |
| | | GCGAGATCGGAATGAAGGGCGA |
| | | GCGCAGAAGAGGCAAGGGACAC |
| | | GATGGACTGTACCAGGGCCTGAG |
| | | CACCGCCACCAAGGATACCTATG |
| | | ATGCCCTGCACATGCAGGCCCTG |
| | | CCTCCAAGA |

### Example 102: Circular RNAs Encoding HER2 CARs Induction of Cytotoxicity In Vivo

[1757] Plates were coated with 0.0100 poly-L-ornithine solution or 5 μL/mL fibronectin diluted in 0.1% BSA. The dilute apoptosis reagent (e.g., Annexin V) was prepared in a medium and cell treatments are prepared. Cell treatments comprised of circular RNAs comprising a 3′ exon segment, a Caprine Kobuvirus or a Hunnivirus internal ribosome entry site (IRES), a coding region encoding HER2, and a 5′ exon segment with an E:T ratio of 1:1 or 1:2. Circular RNAs were derived from DNA Templates from Table 31 or 33 that underwent IVT reactions 100 μL/well of 25,000-50,000 of HER2 positive BT474 or SKBR2 target cells were placed into the coated 96-well plates and allowed to adhere overnight. After about 24 hours, the BT474/SKBR3 cells were adhered and the cell treatment at 0 and 100 ng dosages containing the circular RNAs and Annexin V were added to the BT474 or SKBR2 cells. As a control, some BT474/SKBR3 cells were not given any circular RNAs but were given Annexin V. All the plates containing the target cells were analyzed in a live-cell analysis portfolio system (e.g., an IncuCyte) which captured images every 2-3 hours. In the imaging, alive Nalm6 cells retained a green fluorescence, and Annexin V apoptotic cells had a red luminescence. % apoptotic cells were then calculated by measuring the amount of ((green area+red area)/green area). Resulting % apoptotic cells was shown in FIG. 123.

[1758] Further, activated PBMC T cells from a single donor were prepared. Separately, circular RNAs encoding HER2-CD28ζ, HER2-41BBζ or CD19-CD28(CAR prepared from an IVT reaction of DNA templates comprising a 3′ intron segment, a 3′ exon segment, an internal ribosome entry site (IRES), a coding region encoding either a HER2.28ζ, HER2.BBζ or CD19-28(CAR, a 5′ exon segment, and a 5′ intron segment. The circular RNAs were transfected onto the activated PBMC T cells using frozen or fresh lipid nanoparticles comprising an ionizable lipid from Table 10c at a concentration listed in the table below. For comparison purposes, activated PBMC T cells were given no circular RNAs as a control. On the day of post-delivery of the circular RNAs to activated PBMC T cells, the circular RNA-activated PBMC T cells were co-cultured with one of three HER2 positive cell lines (i.e., BT474, SKBR3, JIMT1). The resulting co-cultured cells given Annexin V and were analyzed in live-cell analysis portfolio system (e.g., an IncuCyte). FIGS. 124A-124C depict the results of the live-cell analysis portfolio system as calculated by % Annexin V/phase. FIG. 125A-125B illustrates fresh and frozen LNP delivery of the circular RNAs and FIG. 125C depicts cytokine release (e.g., INFγ and/or TNFα) of the cocultured cells.

TABLE 32

| | | RNA | | | |
|---|---|---|---|---|---|
| Coding Region of | DNA | Concentration | EE | Diameter | |
| Circular RNA | Template | (μg/mL) | (%) | (nm) | PDI |
| HER2-CD282 CAR | K | 494 | 93 | 82 | 0.06 |
| HER2-41BBC CAR | L | 463 | 93 | 80 | 0.06 |
| CD19-CD282 CAR | M | 498 | 93 | 85 | 0.00 |

TABLE 33

| | Internal Ribosome Entry | |
|---|---|---|
| ID | Site (IRES) Sequence | CAR Sequence |
| DNA | GTGGCCACGCCCGGGCCACC | ATGGCTCTGCCTGTGACAGCTCTG |
| Template L | GATACTTCCCTTCACTCCTTC | CTGCTGCCTCTGGCTCTGCTTCTG |
| | GGGACTGTTGGGGAGGAACA | CATGCCGCCAGACCTGACATCCA |
| | CAACAGGGCTCCCCTGTTTTC | GATGACTCAGAGCCCCAGCAGCC |
| | CCATTCCTTCCCCCTTTTCCCA | TGTCTGCCTCTGTGGGAGACAGA |
| | ACCCCAACCGCCGTATCTGGT | GTGACAATTACCTGCCGGGCCAG |
| | GGCGGCAAGACACACGGGTC | CCAGGATGTGAATACTGCTGTCG |
| | TTTCCCTCTAAAGCACAATTG | CCTGGTATCAACAAAAGCCTGGC |
| | TGTGTGTGTCCCAGGTCCTCC | AAGGCCCCTAAGCTCCTGATCTAC |
| | TGCGTACGGTGCGGGAGTGCT | AGCGCCAGCTTTCTGTACAGCGG |
| | CCCACCCAACTGTTGTAAGCC | CGTGCCCAGCAGATTCTCCGGAA |
| | TGTCCAACGCGTCGTCCTGGC | GCAGAAGCGGCACAGATTTCACA |
| | AAGACTATGACGTCGCATGTT | CTGACCATAAGCAGCCTGCAGCC |
| | CCGCTGCGGATGCCGACCGG | AGAGGATTTCGCCACCTACTATTG |
| | GTAACCGGTTCCCCAGTGTGT | CCAGCAGCACTACACCACACCTC |
| | GTAGTGCGATCTTCCAGGTCC | CAACCTTTGGCCAGGGCACCAAG |
| | TCCTGGTTGGCGTTGTCCAGA | GTCGAGATTAAGAGAACAGGCAG |
| | AACTGCTTCAGGTAAGTGGGG | CACATCTGGCTCTGGCAAACCTG |
| | TGTGCCCAATCCCTACAAAGG | GATCTGGCGAGGGCTCTGAAGTC |
| | TTGATTCTTTCACCACCTTAG | CAGCTGGTGGAATCTGGCGGAGG |
| | GAATGCTCCGGAGGTACCCCA | ACTGGTTCAACCTGGCGGCTCTCT |
| | GCAACAGCTGGGATCTGACC | GAGACTGTCTTGTGCCGCCTCCGG |
| | GGAGGCTAATTGTCTACGGGT | CTTCAACATCAAGGACACCTACA |
| | GGTGTTTCCTTTTTCTTTTCAC | TCCACTGGGTCCGACAAGCCCCA |
| | ACAACTCTACTGCTGACAACT | GGCAAAGGACTTGAGTGGGTCGC |
| | CACTGACTATCCACTTGCTCT | CAGGATCTACCCCACCAACGGCT |
| | GTCACG | ACACCAGATACGCCGACTCTGTG |
| | | AAGGGCAGATTCACCATCTCTGC |
| | | CGACACCAGCAAGAATACCGCCT |
| | | ACCTGCAGATGAACTCCCTGAGA |
| | | GCCGAAGATACCGCTGTGTATTA |
| | | CTGTTCCAGATGGGGAGGCGACG |
| | | GCTTCTACGCCATGGATGTTTGGG |
| | | GCCAAGGCACCCTCGTGACCGTTT |
| | | CTTCTACCACCACACCAGCTCCTC |
| | | GGCCTCCAACTCCTGCTCCTACAA |
| | | TTGCCAGCCAGCCTCTGTCTCTGA |
| | | GGCCCGAAGCTTGTAGACCTGCT |
| | | GCTGGCGGAGCCGTGCATACAAG |
| | | AGGACTGGATTTCGCCTGCGACA |
| | | TCTACATCTGGGCTCCTCTGGCCG |
| | | GAACATGTGGCGTTCTGCTGCTGA |
| | | GCCTGGTCATCACCCTGTACTGTA |
| | | AGCGGGGCAGAAAGAAGCTGCTG |
| | | TACATCTTCAAGCAGCCCTTCATG |
| | | CGGCCCGTGCAGACCACACAAGA |
| | | GGAAGATGGCTGCTCCTGCAGAT |
| | | TCCCCGAGGAAGAAGAAGGCGGC |
| | | TGCGAGCTGAGAGTGAAGTTCAG |
| | | CAGATCCGCCGATGCTCCCGCCTA |
| | | TCAGCAGGGCCAAAACCAGCTGT |
| | | ACAACGAGCTGAACCTGGGGAGA |
| | | AGAGAAGAGTACGACGTGCTGGA |
| | | CAAGCGGAGAGGCAGAGATCCTG |
| | | AAATGGGCGGCAAGCCCAGACGG |
| | | AAGAATCCTCAAGAGGGCCTGTA |
| | | TAATGAGCTGCAGAAAGACAAGA |
| | | TGGCCGAGGCCTACAGCGAGATC |
| | | GGAATGAAGGGCGAGCGCAGAA |
| | | GAGGCAAGGGACACGATGGACTG |
| | | TACCAGGGCCTGAGCACCGCCAC |
| | | CAAGGATACCTATGATGCCCTGC |
| | | ACATGCAGGCCCTGCCTCCAAGA |
| DNA | CCCCCCTCCCCCCCTTCCCTTC | ATGGCACTGCCCGTCACCGCACTC |
| Template M | CCTTTGCAACGCAACAATTGT | CTGCTCCCACTGGCACTGCTGCTC |
| | AAGTGCCCTCACCTGTCAATT | CATGCAGCTCGCCCCGATATCCA |
| | GGGACCACCACTTTCAGTGAC | GATGACCCAGACCACCTCTAGCC |
| | CCCATGCGAAGTGCTGAGAG | TCAGCGCCTCTCTGGGTGACCGCG |
| | AAAGGAAGCTTTCTTACCCTT | TCACCATCTCTTGCCGGGCCAGCC |
| | CATTTGTGAACCCACTGGTCT | AAGACATCTCTAAGTACCTGAAC |
| | AAGCCGCTTGGAATACGATG | TGGTACCAGCAGAAACCTGACGG |
| | AGTGGAAAAGTTCATTCTTAA | AACCGTGAAGCTGCTGATCTACC |
| | TGGAGTGAAACATGCTTAAAT | ACACCAGTCGGCTGCATTCCGGG |
| | TTCCAGCTCGTGCTGGTCTTT | GTGCCTTCCAGGTTCAGCGGTTCC |
| | CCAGTACGGGGCGGCCCTGTC | GGCTCTGGGACCGATTATAGTCTC |
| | TGGCCGTAATTCTTCAGAGTG | ACCATCTCCAACCTCGAGCAGGA |
| | TCACGCCACACTTGTGGATCT | GGACATCGCAACCTACTTCTGCCA |
| | CACGTGCCACATGACAGCGCT | GCAGGGGAACACCCTGCCCTACA |
| | ACAGCTGGAACTGGGTGCTTG | CCTTCGGTGGCGGGACCAAGCTG |
| | GTGCCCATGGAGTAACAGCG | GAGATCACTGGAGGTGGTGGCAG |
| | AAAAGTGTTAGATCAAGCCTT | CGGAGGTGGAGGATCAGGTGGAG |
| | GCTTGGGCTATGAGCCTGCGG | GCGGTAGCGAGGTGAAGCTGCAG |
| | AACAACAACTGGTAACAGTT | GAGTCCGGACCTGGTCTGGTGGC |
| | GCCTCAGGGGCCGAAAGCCA | CCCAAGCCAGTCCCTCAGCGTCA |
| | CGGTGTTAACAGCACCCTCAT | CCTGCACAGTGTCCGGGGTGTCCC |
| | AGTTTGATCCACCTCAGGGTG | TGCCTGACTACGGTGTCTCCTGGA |
| | GTGATGTTTAGCAGTTAGTAG | TCAGGCAACCACCCCGGAAGGGT |
| | TTGCCAATCTGTGTTCACTGA | CTCGAGTGGCTGGGCGTCATCTG |
| | AATCTCGGCATACCGTGTAGT | GGGCTCCGAGACCACCTACTACA |
| | GTACAGGGGTGAAGGATGCC | ACAGCGCTCTGAAGTCCCGGCTG |
| | CAGAAGGTACCCGTAGGTAA | ACCATCATCAAAGACAACTCCAA |
| | CCTTAAGAGACTATGGATCTG | GAGCCAGGTGTTCTTGAAGATGA |
| | ATCTGGGGCCTTGTCCGGAGT | ACTCCCTGCAAACCGATGACACC |
| | GCTTTACACACGGCTCAAGGT | GCCATCTACTACTGCGCCAAGCA |
| | TAAAAAACGTCTAGCCCCACA | CTACTACTATGGCGGTAGCTACGC |
| | GAGCCCGAGGGATTCGGGTTT | CATGGATTATTGGGGTCAGGGCA |
| | TCCCTTTAAAAACCCGACTAG | CCAGTGTCACCGTCTCCTCCATCG |
| | AGCTTATGGTGACAATTATTG | AGGTGATGTACCCTCCACCCTATC |
| | CTGTTCAGACGAACAGTGTAA | TGGACAACGAGAAGTCCAACGGC |
| | TTGTTGTCTATTCACAGCAGT | ACCATCATCCACGTGAAGGGCAA |
| | TCTATCAGAGCTTTTCCCACA | GCACCTGTGCCCTAGCCCTCTGTT |
| | ACGGATCTTCTTGGCAAGCAA | CCCAGGACCCTCCAAGCCCTTCTG |
| | ATACAGCAGGAGTCAAT | GGTGCTGGTCGTGGTGGGAGGAG |
| | | TCCTGGCCTGCTATTCCCTCCTCG |
| | | TCACCGTGGCATTTATCATCTTCT |
| | | GGGTCCGGAGCAAGCGGTCACGC |
| | | CTGCTCCACTCCGACTACATGAAC |
| | | ATGACTCCTCGCAGACCTGGACC |
| | | CACCCGGAAGCACTACCAGCCTT |
| | | ATGCCCCACCCCGCGACTTTGCCG |
| | | CTTACCGCTCTCGGGTCAAGTTCT |
| | | CTCGGTCAGCAGACGCCCCTGCA |
| | | TACCAGCAGGGCCAGAACCAGCT |
| | | GTATAACGAGCTGAACCTCGGCA |
| | | GACGGGAGGAGTACGATGTGCTG |
| | | GACAAGAGGAGAGGCAGAGACC |
| | | CCGAGATGGGTGGTAAGCCACGG |
| | | CGCAAGAACCCACAGGAGGGCTT |
| | | GTACAACGAACTGCAGAAGGACA |
| | | AGATGGCCGAGGCCTACAGCGAG |
| | | ATCGGCATGAAGGGAGAGAGGCG |
| | | CAGGGGCAAGGGTCACGACGGCC |
| | | TGTACCAAGGGCTGTCCACCGCA |
| | | ACCAAGGACACCTACGATGCCCT |
| | | GCACATGCAGGCCCTCCCACCAA |
| | | GG |

### Example 103: Circular RNAs Encoding HER2 CARs Tumor Killing Activity In Vivo

[1759] Female NSG immune deficient mice (aged 8 to 12 weeks) with 1×107 JIMT-1 or BT-474 tumor cells (in subcutaneous flank engraftment) were prepared to have an average tumor size of 50-100 mm3. 1×107 human PBMC T cells from two different donors were activated with anti-CD3 and anti-CD8 for 72 hours, then activation was removed and cells were prepared in PBS for injection. On the fifth day after human PBMC thawed, 200 μL of 50×106/mL of the stimulated human PBMC T cells were injected into the tail vein of mice intravenously. A day after the activated human PBMC T cells were injected, the mice were dosed with either docetaxel (control, no PBMC) at 10 mL/kg, PBS (control), or LNP comprising circular RNAs encoding HER2.28ζ, HER2.BBζ or CD19.28ζ CAR at 3 mg/kg intravenously. Circular RNAs further comprised internal ribosome entry sites (IRESes) derived from Caprine Kobuvirus or Hunnivirus. LNPs comprised the ionizable referenced in the preceding example. The mice were dosed every other day (within a four-hour timeframe) for a total of 4 dosages. FIGS. 126A-126G provides total tumor volume accumulated over the span of 50 days for mice comprising the JIMT-1 (FIGS. 126A-126F) and BT-474 (FIGS. 126F-126L) tumor cells.

### INCORPORATION BY REFERENCE

[1760] All publications, patents, and patent applications mentioned in this specification are herein incorporated by reference to the same extent as if each individual publication, patent, or patent application was specifically and individually indicated as being incorporated by reference herein.

What is claimed is:

1. A circular RNA polynucleotide expression vector encoding a chimeric antigen receptor (CAR), wherein the CAR comprises an antigen-binding molecule that specifically binds to BCMA.

2. The circular RNA polynucleotide expression vector of claim 1, wherein the CAR comprises an amino acid sequence selected from the group consisting of SEQ ID NO: 332-337.

3. The circular RNA polynucleotide expression vector of claims 1 or 2, further comprising a polynucleotide sequence encoding a CAR comprising an antigen binding molecule that specifically binds to CD19.

4. The circular RNA polynucleotide expression vector of any one of claims 1-3, wherein the protein coding or non-coding sequence is codon optimized.

5. The circular RNA polynucleotide expression vector of any one of claims 1-4, optimized to lack at least one microRNA binding site present in an equivalent pre-optimized polynucleotide.

6. The circular RNA polynucleotide expression vector of any one of claims 1-5, optimized to lack at least one RNA-editing susceptible site present in an equivalent pre-optimized polynucleotide.

7. The circular RNA polynucleotide expression vector of any one of claims 1-6, having an in vivo duration of therapeutic effect in humans of at least 20 hours.

8. The circular RNA polynucleotide expression vector of any one of claims 1-7, having a functional half-life of at least 6 hours.

9. The circular RNA polynucleotide expression vector of claims 1-8, having a duration of therapeutic effect in a human cell greater than or equal to that of an equivalent linear RNA polynucleotide comprising the same expression sequence.

10. The circular RNA polynucleotide expression vector of claims 1-9, having an in vivo duration of therapeutic effect in human greater than that of an equivalent linear RNA polynucleotide having the same expression sequence.

11. The circular RNA polynucleotide expression vector of any one of claims 1-10, wherein the precursor RNA polynucleotide is transcribed from a vector or DNA comprising a PCR product, a linearized plasmid, non-linearized plasmid, linearized minicircle, a non-linearized minicircle, viral vector, cosmid, ceDNA, or an artificial chromosome.

12. A pharmaceutical composition comprising a circular RNA polynucleotide expression vector of any one of claims 1-11, a nanoparticle, and optionally, a targeting moiety operably connected to the nanoparticle.

13. The pharmaceutical composition of claim 12, wherein the nanoparticle is a lipid nanoparticle, a core-shell nanoparticle, a biodegradable nanoparticle, a biodegradable lipid nanoparticle, a polymer nanoparticle, a polyplex or a biodegradable polymer nanoparticle.

14. The pharmaceutical composition of claim 12 or 13, comprising a targeting moiety, wherein the targeting moiety mediates receptor-mediated endocytosis, endosome fusion, or direct fusion into selected cells of a selected cell population or tissue in the absence of cell isolation or purification.

15. The pharmaceutical composition of any one of claims 12-13, comprising a targeting moiety operably connected to the nanoparticle.

16. The pharmaceutical composition of any one of claims 12-14, wherein the targeting moiety is a small molecule, scFv, nanobody, peptide, cyclic peptide, di or tri cyclic peptide, minibody, polynucleotide aptamer, engineered scaffold protein, heavy chain variable region, light chain variable region, or a fragment thereof.

17. The pharmaceutical composition of any one of claims 12-15, wherein less than 1%, by weight, of the polynucleotides in the composition are double stranded RNA, DNA splints, DNA template, or triphosphorylated RNA.

18. The pharmaceutical composition of any one of claims 12-16, wherein less than 1%, by weight, of the polynucleotides and proteins in the pharmaceutical composition are double stranded RNA, DNA splints, DNA template, triphosphorylated RNA, phosphatase proteins, protein ligases, RNA polymerases, and capping enzymes.

19. A pharmaceutical composition comprising a circular RNA polynucleotide of any one of claims 11-18 and a pharmaceutical salt, buffer, diluent or combination thereof.

20. An improved expression construct encoding a chimeric antigen receptor (CAR), wherein the CAR comprises an antigen-binding molecule that specifically binds to BCMA, the improvement comprising a circular RNA polynucleotide expression vector.

21. A circular RNA polynucleotide expression vector encoding a chimeric antigen receptor (CAR), wherein the CAR comprises means for specifically binding to BCMA.

22. A recombinant cell, expressing the CAR encoded by the circular RNA polynucleotide expression vector of any one of claims 1-11, 20, 21.

23. The recombinant cell of claim 22, wherein the cell is an immune cell.

24. The recombinant cell of claim 23, wherein the immune cell is a T cell, an NK cell, or a macrophage.

25. A precursor RNA polynucleotide comprising, in the following order:
a. a 5′ enhanced intron element,
b. a 5′ enhanced exon element,
c. a core functional element,
d. a 3′ enhanced exon element, and
e. a 3′ enhanced intron element,
wherein the core functional element comprises, in the following order:
i. a translation initiation element (TIE),
ii. a coding element encoding a CAR that specifically binds to BCMA, and
iii. optionally, a stop codon or a stop cassette.

26. A precursor RNA polynucleotide comprising, in the following order:
a. a 5′ enhanced intron element,
b. a 5′ enhanced exon element,
c. a core functional element,
d. a 3′ enhanced exon element, and
e. a 3′ enhanced intron element
wherein the core functional element comprises, in the following order:
i. a coding region encoding a CAR that specifically binds to BCMA,
ii. optionally, a stop codon or a stop cassette, and
iii. a translation initiation element (TIE).

27. The precursor RNA polynucleotide of claim 26, wherein the core functional element further comprises a noncoding element.

28. The precursor RNA polynucleotide of claim 26 or 27, wherein the TIE comprises an untranslated region (UTR) or a fragment thereof, an aptamer complex or a fragment thereof, or a combination thereof.

29. The precursor RNA polynucleotide of claim 28, wherein the UTR or fragment thereof is derived from a viral or eukaryotic messenger RNA.

30. The precursor RNA polynucleotide of claim 28 or 29, wherein the UTR or fragment thereof comprises a viral internal ribosome entry site (IRES) or eukaryotic IRES.

31. The precursor RNA polynucleotide of any one of claims 28-30, wherein the IRES comprises a sequence selected from Table_A or a fragment thereof.

32. The precursor RNA polynucleotide of any one of claims 28-31, wherein the IRES comprises one or more modified nucleotides compared to the wild-type viral IRES or eukaryotic IRES.

33. The precursor RNA polynucleotide of any one of claims 28-32, wherein the aptamer complex or a fragment thereof comprises a natural or synthetic aptamer sequence.

34. The precursor RNA polynucleotide of any one of claims 28-32, wherein the aptamer complex or a fragment thereof comprises a sequence selected from any of the ASCII tables.

35. The precursor RNA polynucleotide of any one of claims 28-34, wherein the aptamer complex or a fragment thereof comprises more than one aptamer.

36. The precursor RNA polynucleotide of any one of claims 26-35, wherein the TIE comprises an UTR and an aptamer complex.

37. The precursor RNA polynucleotide of claim 36, wherein the UTR is located upstream to the aptamer complex.

38. The precursor RNA polynucleotide of any one of claims 25-37, wherein the TIE further comprises an accessory element.

39. The precursor RNA polynucleotide of claim 38, wherein the accessory element comprises a miRNA binding site or a fragment thereof, a restriction site or a fragment thereof, an RNA editing motif or a fragment thereof, a zip code element or a fragment thereof, an RNA trafficking element or a fragment thereof, or a combination thereof.

40. The precursor RNA polynucleotide of claim 38, wherein the accessory element comprises a binding domain to an IRES transacting factor (ITAF).

41. The precursor RNA polynucleotide of claim 40, wherein the binding domain comprises a polyA region, a polyC region, a poly AC region, a polypyrimidine tract, or a combination or variant thereof.

42. The precursor RNA polynucleotide of claim 40, wherein the ITAF comprises a poly(rC)-binding protein 1 (PCBP1), PCBP2, PCBP3, PCBP4, poly(A)-binding protein 1 (PABP1), polypyrimidine-tract binding protein (PTB), Argonaute protein family member, HNRNPK (heterogeneous nuclear ribonucleoprotein K protein), or La protein, or a fragment or combination thereof.

43. The precursor RNA polynucleotide of any one of claims 27-42, wherein the noncoding element comprises more than one noncoding element.

44. The precursor RNA polynucleotide of any one of claims 27-43, wherein the noncoding element comprises 50 to 15,000 nucleotides in length.

45. The precursor RNA polynucleotide of any one of claims 27-44, wherein the noncoding element sequence comprises or consists of a sequence selected from any of the ASCII tables.

46. The precursor RNA polynucleotide of any one of claims 25-45, wherein the core functional element comprises a termination sequence.

47. The precursor RNA polynucleotide of claim 46, wherein the termination sequence is located at the 5′ end of the 3′ enhanced exon element.

48. The precursor RNA polynucleotide of claim 46, wherein the termination sequence is a stop codon.

49. The precursor RNA polynucleotide of claim 46, wherein the termination sequence is a stop cassette.

50. The precursor RNA polynucleotide of claim 49, wherein the stop cassette comprises one or more stop codons in one or more frames.

51. The precursor RNA polynucleotide of claim 50, wherein each frame comprises a stop codon.

52. The precursor RNA polynucleotide of claim 50, wherein each frame comprises two or more stop codons.

53. The precursor RNA polynucleotide of any one of claims 25-52, wherein the 5′ enhanced intron element comprises a 3′ intron fragment.

54. The precursor RNA polynucleotide of claim 53, wherein the 3′ intron fragment further comprises a first or a first and a second nucleotides of a 3′ group I intron splice site dinucleotide.

55. The precursor RNA polynucleotide of claim 54, wherein the 3′ intron fragment is located at the 3′ end of the 5′ enhanced intron element.

56. The precursor RNA polynucleotide of claim 54, wherein the group I intron comprises is derived from a bacterial phage, viral vector, organelle genome, nuclear rDNA gene.

57. The precursor RNA polynucleotide of claim 56, wherein the nuclear rDNA gene comprises a nuclear rDNA gene derived from a fungi, plant, or algae, or a fragment thereof.

58. The precursor RNA polynucleotide of any one of claims 25-57, wherein the 5′ enhanced intron element comprises a leading untranslated sequence located at the 5′ end.

59. The precursor RNA polynucleotide of claim 58, wherein the leading untranslated sequence comprises a spacer.

60. The precursor RNA polynucleotide of claim 58, wherein the leading untranslated sequence comprises the last nucleotide of a transcription start site.

61. The precursor RNA polynucleotide of claim 60, wherein the leading untranslated sequence comprises 1 to 100 additional nucleotides.

62. The precursor RNA polynucleotide of any one of claims 25-61, wherein the 5′ enhanced intron element comprises a 5′ affinity sequence.

63. The precursor RNA polynucleotide of claim 62, wherein the 5′ affinity sequence comprises a polyA, polyAC, or polypyrimidine sequence.

64. The precursor RNA polynucleotide of claim 63, wherein the 5′ affinity sequence comprises to 100 nucleotides.

65. The precursor RNA polynucleotide of any one of claims 25-64, wherein the 5′ enhanced intron element comprises a 5′ external spacer sequence.

66. The precursor RNA polynucleotide of claim 65, wherein the 5′ external spacer sequence is located between the 5′ affinity sequence and the 3′ intron fragment.

67. The precursor RNA polynucleotide of claim 65, wherein the 5′ external spacer sequence has a length of about 6 to 60 nucleotides.

68. The precursor RNA polynucleotide of claim 65, wherein the 5′ external spacer sequence comprises or consists of a sequence selected from any of the ASCII tables.

69. The precursor RNA polynucleotide of any one of claims 25-68, wherein the 5′ enhanced intron element comprises, in the following order:
a. a leading untranslated sequence;
b. a 5′ affinity sequence;
c. a 5′ external spacer sequence; and
d. a 3′ intron fragment including the first nucleotide of a 3′ Group I intron splice site;
wherein the leading untranslated sequence comprises the last nucleotide of a transcription start site and 1 to 100 nucleotides.

70. The precursor RNA polynucleotide of any one of claims 25-68, wherein the 5′ enhanced intron element comprises, in the following order
a. a leading untranslated sequence;
b. a 5′ external spacer sequence;
c. a 5′ affinity sequence; and
d. a 3′ intron fragment including the first nucleotide of a 3′ group I splice site;
wherein the leading untranslated sequence comprises the last nucleotide of a transcription start site and 1 to 100 nucleotide.

71. The precursor RNA polynucleotide of any one of claims 25-68, wherein the 5′ enhanced intron element comprises, in the following order:
a. a leading untranslated sequence;
b. a 5′ affinity sequence;
c. a 5′ external spacer sequence; and
d. a 3′ intron fragment including the first and second nucleotides of a 3′ Group I intron splice site;
wherein the leading untranslated sequence comprises the last nucleotide of a transcription start site and 1 to 100 nucleotides; and wherein the 5′ enhanced exon element comprises a 3′ exon fragment lacking the second nucleotide of a 3′ group I splice site dinucleotide.

72. The precursor RNA polynucleotide of any one of claims 25-68, wherein the 5′ enhanced intron element comprises, in the following order:
a. a leading untranslated sequence;
b. a 5′ external spacer sequence;
c. a 5′ affinity sequence; and
d. a 3′ intron fragment including the first and second nucleotides of a 3′ Group I splice site;
wherein the leading untranslated sequence comprises the last nucleotide of a transcription start site and 1 to 100 nucleotide; and wherein the 5′ enhanced exon element comprises a 3′ exon fragment lacking the second nucleotide of a 3′ group I splice site dinucleotide.

73. The precursor RNA polynucleotide of any one of claims 25-68, wherein the 5′ enhanced exon element comprises a 3′ exon fragment.

74. The precursor RNA polynucleotide of claim 74, wherein the 3′ exon fragment further comprises the second nucleotide of a 3′ group I intron splice site dinucleotide.

75. The precursor RNA polynucleotide of claim 74, wherein the 3′ exon fragment comprises 1 to 100 natural nucleotides derived from a natural exon.

76. The precursor RNA polynucleotide of claim 75, wherein the natural exon derived from a Group I intron containing gene or a fragment thereof.

77. The precursor RNA polynucleotide of claim 75, wherein the natural exon derived from an Anabaena bacterium, T4 phage virus, twort bacteriophage, tetrahymena, or Azoarcus bacterium.

78. The precursor RNA polynucleotide of any of claims 25-77, wherein the 5′ enhanced exon element comprises a 5′ internal spacer sequence located downstream from the 3′ exon fragment.

79. The precursor RNA polynucleotide of claim 78, wherein the 5′ internal spacer sequence is about 6 to 60 nucleotides in length.

80. The precursor RNA polynucleotide of claim 79, wherein the 5′ internal spacer sequence comprises or consists of a sequence selected from any of the ASCII tables.

81. The precursor RNA polynucleotide of any one of claims 25-80, wherein the 5′ enhanced exon element comprises in the following order:
a. a 3′ exon fragment including the second nucleotide of a 3′ group I intron splice site dinucleotide; and
b. a 5′ internal spacer sequence,
wherein the 3′ exon fragment comprises 1 to 100 natural nucleotides derived from a natural exon.

82. The precursor RNA polynucleotide of any one of claims 25-80, wherein the 5′ enhanced exon element comprises in the following order:
a. a 3′ exon fragment; and
b. a 5′ internal spacer sequence,
wherein the 3′ exon fragment comprises 1 to 100 natural nucleotides derived from a natural exon; and wherein the 5′ enhanced intron element comprises a 3′ intron fragment comprising the first and second nucleotides of a 3′ group I splice site dinucleotide.

83. The precursor RNA polynucleotide of any one of claims 25-80, wherein the 3′ enhanced exon element comprises a 5′ exon fragment.

84. The precursor RNA polynucleotide of claim 83, wherein the 5′ exon fragment comprises the first nucleotide of a 5′ group I intron fragment.

85. The precursor RNA polynucleotide of claim 83, wherein the 5′ exon fragment further comprises 1 to 100 nucleotides derived from a natural exon.

86. The precursor RNA polynucleotide of claim 83, wherein the natural exon is derived from a Group I intron containing gene or a fragment thereof.

87. The precursor RNA polynucleotide of any one of claims 25-86 or 83, wherein the 3′ enhanced exon element comprises a 3′ internal spacer sequence.

88. The precursor RNA polynucleotide of claim 87, wherein the 3′ internal spacer sequence is located between the termination sequence and the 5′ exon fragment.

89. The precursor RNA polynucleotide of claim 87, wherein the 3′ internal spacer is about 6 to 60 nucleotides in length.

90. The precursor RNA polynucleotide of any one of claim 87, wherein the 3′ internal spacer comprises or consists of a sequence selected from any of the ASCII tables.

91. The precursor RNA polynucleotide of any one of claims 25-90, wherein the 3′ enhanced exon element comprises:
a. a 3′ internal spacer sequence; and
b. a 5′ exon fragment including the first nucleotide of a 5′ group I intron splice site dinucleotide,
wherein the 5′ exon fragment comprises 1 to 100 nucleotides derived from a natural exon.

92. The precursor RNA polynucleotide of any one of claims 25-90, wherein the 3′ enhanced exon element comprises:
a. a 3′ internal spacer sequence; and
b. a 5′ exon fragment,
wherein the 5′ exon fragment comprises 1 to 100 nucleotides derived from a natural exon;
wherein the 3′ enhanced intron element comprises a 5′ intron fragment comprising the first and second nucleotide of a 5′ group I intron splice site dinucleotide.

93. The precursor RNA polynucleotide of any one of claims 25-90, wherein the 3′ enhanced intron element comprises a 5′ intron fragment.

94. The precursor RNA polynucleotide of claim 93, wherein the 5′ intron fragment comprises a second nucleotide of a 5′ group I intron splice site dinucleotide.

95. The precursor RNA polynucleotide of any one of claims 25-94, wherein the 3′ enhanced intron element comprises a trailing untranslated sequence located at the 3′ end of the 5′ intron.

96. The precursor RNA polynucleotide of claim 95, wherein the trailing untranslated sequence comprises 3 to 12 nucleotides.

97. The precursor RNA polynucleotide of any of claims 25-96, wherein the 3′ enhanced intron fragment comprises a 3′ external spacer sequence.

98. The precursor RNA polynucleotide of claim 97, wherein the 3′ external spacer sequence is located between the 5′ intron fragment and trailing untranslated sequence.

99. The precursor RNA polynucleotide of claim 97, wherein the 3′ external spacer sequence has a length of 6 to 60 nucleotides in length.

100. The precursor RNA polynucleotide of any of claim 97, wherein the 3′ external spacer sequence comprises or consists of a sequence selected from any of the ASCII tables.

101. The precursor RNA polynucleotide of any of claims 25-100, wherein the 3′ enhanced intron element comprises a 3′ affinity sequence.

102. The precursor RNA polynucleotide of claim 101, wherein the 3′ affinity sequence is located between the 3′ external spacer sequence and the trailing untranslated sequence.

103. The precursor RNA polynucleotide of claim 101, wherein the 3′ affinity sequence comprises a polyA, poly AC, or polypyrimidine sequence.

104. The precursor RNA polynucleotide of claim 101, wherein the affinity sequence comprises to 100 nucleotides.

105. The precursor RNA polynucleotide of any one of claims 25-104, wherein the 5′ enhanced intron element further comprises a 5′ external duplex sequence; wherein the 3′ enhanced intron element further comprises a 3′ external duplex sequence.

106. The precursor RNA polynucleotide of claim 105, wherein the 5′ external duplex sequence and 3′ external duplex sequence are fully or partially complementary to each other.

107. The precursor RNA polynucleotide of claim 105, wherein the 5′ external duplex sequence comprises fully synthetic or partially synthetic nucleotides.

108. The precursor RNA polynucleotide of claim 105, wherein the 3′ external duplex sequence comprises fully synthetic or partially synthetic nucleotides.

109. The precursor RNA polynucleotide of claim 105, wherein the 3′ external duplex sequence is about 6 to about 50 nucleotides.

110. The precursor RNA polynucleotide of claim 105, wherein the 5′ external duplex sequence is about 6 to about 50 nucleotides.

111. The precursor RNA polynucleotide of claim 105, wherein the 3′ external duplex sequence comprises or consists of a sequence selected from any of the ASCII tables.

112. The precursor RNA polynucleotide of claim 105, wherein the 5′ external duplex sequence comprises or consists of a sequence selected from any of the ASCII tables.

113. The precursor RNA polynucleotide of any one of claims 25-112, wherein the 5′ enhanced exon element further comprises a 5′ internal duplex sequence; wherein the 3′ enhanced exon element further comprises a 3′ internal duplex sequence.

114. The precursor RNA polynucleotide of claim 113, wherein the 5′ internal duplex sequence and 3′ internal duplex sequence are fully or partially complementary to each other.

115. The precursor RNA polynucleotide of claim 113, wherein the 5′ internal duplex sequence comprises fully synthetic or partially synthetic nucleotides.

116. The precursor RNA polynucleotide of claim 113, wherein the 3′ internal duplex sequence comprises fully synthetic or partially synthetic nucleotides.

117. The precursor RNA polynucleotide of claim 113, wherein the 3′ internal duplex sequence is about 6 to about 19 nucleotides.

118. The precursor RNA polynucleotide of claim 113, wherein the 5′ internal duplex sequence is about 6 to about 19 nucleotides.

119. The precursor RNA polynucleotide of claim 113, wherein the 3′ internal duplex sequence comprises or consists of a sequence selected from any of the ASCII tables.

120. The precursor RNA polynucleotide of claim 113, wherein the 5′ internal duplex sequence comprises or consists of a sequence selected from any of the ASCII tables.

121. The precursor RNA polynucleotide of any one of claims 25-120, wherein the 3′ enhanced intron fragment comprises in the following order:
a. a 5′ intron fragment including the second nucleotide of a 5′ group I intron splice site dinucleotide;
b. a 3′ external spacer sequence; and
c. a 3′ affinity sequence

122. The precursor RNA polynucleotide of anyone of claims 25-120, wherein the 3′ enhanced intron fragment comprises in the following order:
a. a 5′ intron fragment including the first and second nucleotide of a 5′ group I intron splice site dinucleotide;
b. a 3′ external spacer sequence; and
c. a 3′ affinity sequence wherein the 3′ enhanced exon element comprises a 5′ exon fragment lacking the first nucleotide of a 5′ group I intron splice site dinucleotide.

123. The precursor RNA polynucleotide of any one of claims 25-122, comprising in the following order:
a. a leading untranslated sequence;
b. a 5′ affinity sequence;
c. 5′ external duplex sequence;
d. 5′ spacer sequence;
e. 3′ intron fragment;
f. 3′ exon fragment;
g. 5′ internal duplex sequence
h. 5′ internal spacer sequence;
i. a translation initiation element;
j. a coding element encoding a CAR that specifically binds to BCMA;
k. a termination sequence;
l. a 3′ internal spacer sequence;
m. a 3′ internal duplex sequence;
n. a 5′ exon fragment;
o. a 5′ intron fragment;
p. a 3′ external duplex sequence;
q. a 3′ affinity sequence; and
r. a trailing untranslated sequence.

124. The precursor RNA polynucleotide of 27, comprising in the following order:
a. a leading untranslated sequence;
b. a 5′ affinity sequence;
c. a 5′ external spacer sequence;
d. a 3′ intron fragment;
e. a 3′ exon fragment;
f. a 5′ internal duplex sequence;
g. a 5′ internal spacer sequence;
h. a noncoding element;
i. a 3′ internal spacer sequence;
j. a 3′ internal duplex sequence;
k. a 5′ exon fragment;
l. a 5′ intron fragment;
m. a 3′ external spacer sequence;
n. a 3′ affinity sequence; and
o. a trailing untranslated sequence.

125. The precursor RNA polynucleotide of any one of claims 25-122, comprising in the following order:
a. a leading untranslated sequence;
b. a 5′ affinity sequence;
c. a 5′ external spacer sequence;
d. a 3′ intron fragment;
e. a 3′ exon fragment;
f. a 5′ internal duplex sequence;
g. a 5′ internal spacer sequence;
h. a translation initiation element;
i. a coding element;
j. a termination sequence;
k. a 3′ internal spacer sequence;
l. a 3′ internal duplex sequence;
m. a 5′ exon fragment;
n. a 5′ intron fragment;
o. a 3′ external spacer sequence; and
p. a 3′ affinity sequence.

126. The precursor RNA polynucleotide of any one of claims 25-122, comprising in the following order:
a. a leading untranslated sequence;
b. a 5′ affinity sequence;
c. a 5′ external spacer sequence;
d. a 3′ intron fragment;
e. a 3′ exon fragment;
f. a 5′ internal spacer sequence;
g. a translation initiation element;
h. a coding element;
i. a termination sequence;
j. a 3′ internal spacer sequence;
k. a 5′ exon fragment;
l. a 5′ intron fragment;
m. a 3′ external spacer sequence; and
n. a 3′ affinity sequence.

127. The precursor RNA polynucleotide of 27, comprising in the following order:
a. a leading untranslated sequence;
b. a 5′ affinity sequence;
c. a 5′ external spacer sequence;
d. a 3′ intron fragment;
e. a 3′ exon fragment;
f. a 5′ internal spacer sequence;
g. a noncoding element;
h. a 3′ internal spacer sequence;
i. a 5′ exon fragment;
j. a 5′ intron fragment;
k. a 3′ external spacer sequence;
l. a 3′ affinity sequence; and
m. a trailing untranslated sequence.

128. The precursor RNA polynucleotide of claim 27, comprising the following order:
a. a leading untranslated sequence;
b. a 5′ affinity sequence;
c. 5′ external duplex sequence;
d. 5′ spacer sequence;
e. 3′ intron fragment;
f. 3′ exon fragment;
g. 5′ internal duplex sequence
h. 5′ internal spacer sequence;
i. a termination sequence;
j. a coding element encoding a CAR that specifically binds to BCMA;
k. a translation initiation element;
l. a 3′ internal spacer sequence;
m. a 3′ internal duplex sequence;
n. a 5′ exon fragment;
o. a 5′ intron fragment;
p. a 3′ external duplex sequence;
q. a 3′ affinity sequence; and
r. a trailing untranslated sequence.

129. The precursor RNA polynucleotide of any one of claims 25-128, wherein the coding element comprises two or more protein coding regions.

130. The precursor RNA polynucleotide of claim 129, comprising a polynucleotide sequence encoding a proteolytic cleavage site or a ribosomal stuttering element between the first and second expression sequence.

131. The precursor RNA polynucleotide of claim 130, wherein the ribosomal stuttering element is a self-cleaving spacer.

132. The precursor RNA polynucleotide of claim 129, comprising a polynucleotide sequence encoding 2A ribosomal stuttering peptide.

133. The precursor RNA polynucleotide of any one of claim 25132, wherein the core functional element comprises two or more internal ribosome entry sites (IRESs).

134. The precursor RNA polynucleotide of claim 133, wherein core functional element comprises a TIE, a coding element, a termination sequence, optionally a spacer, a TIE, a coding element, and a termination sequence, wherein the TIE comprises an IRES.

135. A circular RNA polynucleotide produced from the precursor RNA polynucleotide of any one of claims 25-134.

136. The circular RNA polynucleotide of claim 135, consisting of natural nucleotides.

137. The circular RNA polynucleotide of any one of claim 136, wherein the protein coding or non-coding sequence is codon optimized.

138. The circular RNA polynucleotide of any one of claims 135-137, wherein the circular RNA polynucleotide is from about 0.1 to about 15 kilobases in length.

139. The circular RNA polynucleotide of any one of claims 135-138, optimized to lack at least one microRNA binding site present in an equivalent pre-optimized polynucleotide.

140. The circular RNA polynucleotide of any one of claims 135-139, optimized to lack at least one RNA-editing susceptible site present in an equivalent pre-optimized polynucleotide.

141. The circular RNA polynucleotide of any one of claims 135-140, having an in vivo duration of therapeutic effect in humans of at least 20 hours.

142. The circular RNA polynucleotide of any one of claims 135-141, having a functional half-life of at least 6 hours.

143. The circular RNA polynucleotide of claims 135-142, having a duration of therapeutic effect in a human cell greater than or equal to that of an equivalent linear RNA polynucleotide comprising the same expression sequence.

144. The circular RNA polynucleotide of claims 135-143, having an in vivo duration of therapeutic effect in human greater than that of an equivalent linear RNA polynucleotide having the same expression sequence.

145. The circular RNA polynucleotide of any one of claims 135-144, wherein the precursor RNA polynucleotide is transcribed from a vector or DNA comprising a PCR product, a linearized plasmid, non-linearized plasmid, linearized minicircle, a non-linearized minicircle, viral vector, cosmid, ceDNA, or an artificial chromosome.

146. A method of making a translation initiation element (TIE) comprising:
a. obtaining a viral untranslated region (UTR);
b. determining the functional unit of the UTR capable of binding to an initiation factor and/or initiating translation by progressively deleting sequence;
c. removing non-functional units of the UTR; and
d. optionally, modifying the ends of the UTR.

147. The method of claim 146, wherein the modification of the ends of the UTR is about 1 percent to 75% of the viral UTR.

148. The method of claim 146 or 147, wherein the functional unit of UTR is determined by deletion scanning from the 5′ and 3′ ends of the UTR or mutational scanning across the length of the UTR to identify important regions.

149. A pharmaceutical composition comprising a circular RNA polynucleotide of any one of claims 135-145, a nanoparticle, and optionally, a targeting moiety operably connected to the nanoparticle.

150. The pharmaceutical composition of claim 149, wherein the nanoparticle is a lipid nanoparticle, a core-shell nanoparticle, a biodegradable nanoparticle, a biodegradable lipid nanoparticle, a polymer nanoparticle, a polyplex or a biodegradable polymer nanoparticle.

151. The pharmaceutical composition of claim 149 or 150, comprising a targeting moiety, wherein the targeting moiety mediates receptor-mediated endocytosis, endosome fusion, or direct fusion into selected cells of a selected cell population or tissue in the absence of cell isolation or purification.

152. The pharmaceutical composition of any one of claims 149-151, comprising a targeting moiety operably connected to the nanoparticle.

153. The pharmaceutical composition of any one of claims 149-152, wherein the targeting moiety is a small molecule, scFv, nanobody, peptide, cyclic peptide, di or tri cyclic peptide, minibody, polynucleotide aptamer, engineered scaffold protein, heavy chain variable region, light chain variable region, or a fragment thereof.

154. The pharmaceutical composition of any one of claims 149-153, wherein less than 1%, by weight, of the polynucleotides in the composition are double stranded RNA, DNA splints, DNA template, or triphosphorylated RNA.

155. The pharmaceutical composition of any one of claims 149-154, wherein less than 1%, by weight, of the polynucleotides and proteins in the pharmaceutical composition are double stranded RNA, DNA splints, DNA template, triphosphorylated RNA, phosphatase proteins, protein ligases, RNA polymerases, and capping enzymes.

156. A pharmaceutical composition comprising a circular RNA polynucleotide of any one of claims 135-145 and a liposome, dendrimer, carbohydrate carrier, glycan nanomaterial, fusome, exosome, or a combination thereof.

157. A pharmaceutical composition comprising a circular RNA polynucleotide of any one of claims 135-145 and a pharmaceutical salt, buffer, diluent or combination thereof.

158. A method of treating a subject in need thereof comprising administering a therapeutically effective amount of a composition comprising the circular RNA polynucleotide of any one of claims 149-157, a nanoparticle, and optionally, a targeting moiety operably connected to the nanoparticle.

159. The method of claim 158, wherein the targeting moiety is a small molecule, scFv, nanobody, peptide, cyclic peptide, di or tri cyclic peptide, minibody, heavy chain variable region, engineered scaffold protein, light chain variable region or fragment thereof.

160. The method of any one of claims 158-159, wherein the nanoparticle is a lipid nanoparticle, a core-shell nanoparticle, or a biodegradable nanoparticle.

161. The method of any one of claims 158-160, wherein the nanoparticle comprises one or more cationic lipids, ionizable lipids, or poly β-amino esters.

162. The method of any one of claims 158-161, wherein the nanoparticle comprises one or more non-cationic lipids.

163. The method of any one of claims 158-162, wherein the nanoparticle comprises one or more PEG-modified lipids, polyglutamic acid lipids, or hyaluronic acid lipids.

164. The method of any one of claims 158-163, wherein the nanoparticle comprises cholesterol.

165. The method of any one of claims 158-164, wherein the nanoparticle comprises arachidonic acid, leukotriene, or oleic acid.

166. The method of any one of claims 158-165, wherein the composition comprises a targeting moiety, wherein the targeting moiety mediates receptor-mediated endocytosis selectively into cells of a selected cell population in the absence of cell selection or purification.

167. The method of any one of claims 158-166, wherein the nanoparticle comprises more than one circular RNA polynucleotide.

168. The method of any one of claims 158-167, wherein the subject has a cancer selected from the group consisting of: acute myeloid leukemia (AML); alveolar rhabdomyosarcoma; B cell malignancies; bladder cancer (e.g., bladder carcinoma); bone cancer; brain cancer (e.g., medulloblastoma and glioblastoma multiforme); breast cancer; cancer of the anus, anal canal, or anorectum; cancer of the eye; cancer of the intrahepatic bile duct; cancer of the joints; cancer of the neck; gallbladder cancer; cancer of the pleura; cancer of the nose, nasal cavity, or middle ear; cancer of the oral cavity; cancer of the vulva; chronic lymphocytic leukemia; chronic myeloid cancer; colon cancer; esophageal cancer, cervical cancer; fibrosarcoma; gastrointestinal carcinoid tumor; head and neck cancer (e.g., head and neck squamous cell carcinoma); Hodgkin lymphoma; hypopharynx cancer; kidney cancer; larynx cancer; leukemia; liquid tumors; lipoma; liver cancer; lung cancer (e.g., non-small cell lung carcinoma, lung adenocarcinoma, and small cell lung carcinoma); lymphoma; mesothelioma; mastocytoma; melanoma; multiple myeloma; nasopharynx cancer; non-Hodgkin lymphoma; B-chronic lymphocytic leukemia; hairy cell leukemia; Burkitt's lymphoma; ovarian cancer; pancreatic cancer; cancer of the peritoneum; cancer of the omentum; mesentery cancer; pharynx cancer; prostate cancer; rectal cancer; renal cancer; skin cancer; small intestine cancer; soft tissue cancer; solid tumors; synovial sarcoma; gastric cancer; teratoma; testicular cancer; thyroid cancer; and ureter cancer.

169. The method of any one of claims 158-168, wherein the subject has an autoimmune disorder selected from scleroderma, Grave's disease, Crohn's disease, Sjogren's disease, multiple sclerosis, Hashimoto's disease, psoriasis, myasthenia gravis, autoimmune polyendocrinopathy syndromes, Type I diabetes mellitus (TIDM), autoimmune gastritis, autoimmune uveoretinitis, polymyositis, colitis, thyroiditis, and the generalized autoimmune diseases typified by human Lupus.

170. A eukaryotic cell comprising a circular RNA polynucleotide according to any of claims 1-11 or 135-145 or the pharmaceutical composition of any one of claims 149-157.

171. The eukaryotic cell of claim 170, wherein the eukaryotic cell is a human cell.

172. The eukaryotic cell of claim 171, wherein the eukaryotic cell is an immune cell.

173. The eukaryotic cell of claim 172, wherein the eukaryotic cell is a T cell, dendritic cell, macrophage, B cell, neutrophil, or basophil.

174. A prokaryotic cell comprising a circular RNA polynucleotide according to any of claims 135-145.

175. A method of purifying circular RNA, comprising hybridizing an oligonucleotide conjugated to a solid surface with an affinity sequence.

176. The method of claim 175, wherein one or more copies of the affinity sequence is present in a precursor RNA.

177. The method of claim 176, wherein the precursor RNA is the precursor RNA of any one of claims 44-54, 83-86, or 103-110.

178. The method of any one of claims 175-177, wherein the circular RNA is the circular RNA of any one of claims 1-11 or 135-145.

179. The method of any one of claims 175-178, wherein the affinity sequence is removed during formation of the circular RNA.

180. The method of any one of claims 175-179, comprising separating the circular RNA from the precursor RNA.

181. The method of any one of claims 175-181, wherein the affinity sequence comprises a polyA sequence.

182. The method of claim 181, wherein the oligonucleotide that hybridizes to the affinity sequence is a deoxythymidine oligonucleotide.

183. The method of any one of claims 175-182, wherein the affinity sequence comprises a dedicated binding site (DBS).

184. The method of claim 183, wherein the DBS comprises the nucleotide sequence of: TATAATTCTACCCTATTGAGGCATTGACTA.

185. The method of claim 165 or 166, wherein the oligonucleotide that hybridizes to the affinity sequence comprises a sequence complementary to the DBS.

186. A method of purifying circular RNA comprising:
a. contacting a composition comprising linear RNA and circular RNA with a binding agent that preferentially binds to the linear RNA over the circular RNA; and
b. separating RNA bound to the binding agent from RNA that is not bound to the binding agent.

187. The method of claim 186, wherein the binding agent is conjugated to a solid support.

188. The method of claim 187, wherein the solid support comprises agarose, an agarose-derived resin, cellulose, a cellulose fiber, a magnetic bead, a high throughput microtiter plate, a non-agarose resin, a glass surface, a polymer surface, or a combination thereof.

189. The method of claim 187-188, wherein the solid support comprises agarose or cellulose.

190. The method of any one of claims 186-189, wherein the binding agent comprises an oligonucleotide that is complementary to a sequence present in the linear RNA and absent from the circular RNA.

191. The method of any one of claims 186-190, wherein the binding agent comprises an oligonucleotide that is 100% complementary to a sequence present in the linear RNA and absent from the circular RNA.

192. The method of claim 190 or 191, wherein the sequence present in the linear RNA and absent from the circular RNA is an affinity sequence.

193. The method of any one of claims 190-192, wherein the sequence present in the linear RNA and absent from the circular RNA comprises a polyA sequence.

194. The method of any one of claims 186-193, wherein the binding agent comprises an oligonucleotide comprising a poly-deoxythymidine sequence.

195. The method of any one of claims 190-194, wherein the sequence present in the linear RNA and absent from the circular RNA comprises a DBS sequence.

196. The method of claim 195, wherein the DBS sequence comprises the nucleotide sequence of: TATAATTCTACCCTATTGAGGCATTGACTA.

197. The method of any one of claims 190-196, wherein the sequence present in the linear RNA and absent from the circular RNA is 10-150 nucleotides in length.

198. The method of any one of claims 190-196, wherein the sequence present in the linear RNA and absent from the circular RNA is 10-70 nucleotides in length.

199. The method of any one of claims 190-196, wherein the sequence present in the linear RNA and absent from the circular RNA is 20-30 nucleotides in length.

200. The method of any one of claims 190-199, wherein the sequence present in the linear RNA and absent from the circular RNA is present at two locations in the linear RNA.

201. The method of any one of claims 190-200, wherein the sequence present in the linear RNA and absent from the circular RNA is encoded into the linear RNA during transcription of the linear RNA.

202. The method of any one of claims 190-201, wherein the sequence present in the linear RNA and absent from the circular RNA is enzymatically added to the linear RNA.

203. The method of any one of claims 186-202, wherein the linear RNA does not comprise a methylguanylate cap.

204. The method of any one of claims 186-203, wherein the linear RNA comprises a precursor RNA or a fragment thereof.

205. The method of claim 204, wherein the precursor RNA is the precursor RNA of any one of claims 25-134 or a fragment thereof.

206. The method of any one of claims 186-205, wherein the precursor RNA is produced using in vitro transcription (IVT).

207. The method of any one of claims 186-206, wherein the fragment comprises an intron.

208. The method of any one of claims 186-207, wherein the linear RNA comprises a prematurely terminated RNA or RNA formed by abortive transcription.

209. The method of any one of claims 186-208, wherein the circular RNA comprises the circular RNA of any one of claims 1-11, 20, 21, 135-145.

210. The method of any one of claims 175-209, wherein the circular RNA is produced using a method comprising splicing the precursor RNA.

211. The method of claim 210, wherein the sequence present in the linear RNA and absent from the circular RNA is excised during the splicing.

212. The method of any one of claims 175-211, wherein the circular RNA is less than 6 kilobases in size.

213. The method of any one of claims 180-212, wherein the separating comprises removing the unbound RNA from the solid support.

214. The method of claim 2135, wherein the removing comprises eluting the unbound RNA from the solid support.

215. The method of any one of claims 175-214, comprising heating the composition.

216. The method of any one of claims 175-215, comprising buffer exchange.

217. The method of claim 216, wherein buffer exchange is performed before the contacting.

218. The method of claim 216 or 217, wherein buffer exchange is performed after the separating.

219. The method of any one of claims 216-218, wherein buffer exchange is performed before the contacting, and the resulting buffer comprises greater than 1 mM monovalent salt.

220. The method of claim 219, wherein the monovalent salt is NaCl or KCl.

221. The method of claim 219 or 220, wherein the resulting buffer comprises Tris.

222. The method of any one of claims 219-221, wherein the resulting buffer comprises EDTA.

223. The method of any one of claims 216-222, wherein buffer exchange is performed after the separating into storage buffer, wherein the storage buffer comprises 1 mM sodium citrate, pH 6.5.

224. The method of any one of claims 175-223, comprising filtering the circular RNA after the separating.

The application's sequence listing, which the Patent Office published only in electronic form, follows.

SEQUENCE LISTING (3776 sequences)

SEQ ID NO: 1 - DNA, 367 bp, Human parechovirus 4
  misc_feature 1..367: note = strain R12644/1999/HUN 5' UTR; and polyprotein1
  source 1..367: mol_type = genomic DNA
tgaggtgtctgatgaggtgtgggaacttattggaagtgattacttgctgcaaagcatcctattgccagcggatcaacacctggtgacaggtgcccctggggccaaaagccaaggtttaacagaccctctaggattggtttaaacctgagtagtcatggaaaatacttagtacctgccaatttggtaacagtgcaaacactagttgtaaggcccacgaaggatgcccagaaggtacccgtaggtaacaagtgacactgtggatctgatctggggccatctacctctatcttggtgaggtggttaaaaaacgtctagtgggccaaacccaggggggatccctggtttcctttatcataccactatcatt

SEQ ID NO: 2 - DNA, 368 bp, Human parechovirus 1
  misc_feature 1..368: note = strain R2594/1990/HUN 5' UTR; and polyprotein1
  source 1..368: mol_type = genomic DNA
tgagacgtctgatgacgtgtgggaacttattggaagtaacaatttgctgcaaagcatcctattgccagcgggtgaacacctggtaacaggtgcctctggggccaaaagccaaggtttaacagaccctctaggattggttaaaacctgaattgttatggaaaatatttagtacctgccaatttggtagtattgcaaacactagttgtacggcccacgaaggatgcccagaaggtacccgaagttaacaagtgacactatggatctgatctggggccaactacctctatcttggtgagttggttaaaaaacgtctagtgggccaaacctgggggggatccccagtttccttttattttatcattgccact

SEQ ID NO: 3 - DNA, 373 bp, Human parechovirus
  misc_feature 1..373: note = isolate 13-51/BE/DE/2013 polyprotein gene,1
  source 1..373: mol_type = genomic DNA
tttgtaagacgtctggtgacgtgtgggaacttattggaaataacatattgctgcaaagcatcctattgccagcggaacaacacctggtaacaggtgcctctggggccaaaagccaaggtttaacagaccctctaggattggtttaaaacctgatatgttgtggaagatacttagtacctgttgatctggtagtagtgcaggcactagttgtaaggcccacgaaggatgcccagaaggtacccgtaggtaacaagtgccactatggatctgatctggggccaggtacctctatcttggtgacctggttaaaaaacgtctagtgggccaaacccgggggggatccccggtttctttttattttattaatagcatt

SEQ ID NO: 4 - DNA, 389 bp, Bat pegivirus
  misc_feature 1..389: note = isolate PDB-106 polyprotein gene, complete cds.1
  source 1..389: mol_type = genomic DNA
ggcatgggtccactggcgcgctgacgaaggtgcgcgtgctttgtaggcacggtccacaggtgtgcccactaccggtgtgaataagtgggggtctggagcgtcagaccttaaacctagtggtgcctgggatcgcaacgtggctcacgtacgccaacgccgcttaaaaccttcgggacagctatgcgggttgacaatggcagtgaggcgcggcaccgaccgtggatccggaatcggtgtgcgagttccccagtcgctagcccgtaagggcaagcatgggtccccccagctggcgcagcgctacatgcggcaagaggaagaaccttcgggtgacctcggggggaatgtccgttctcaatgagctgaggagcatcgcacggctcgtcgccaag

SEQ ID NO: 5 - DNA, 398 bp, Ferret parechovirus
  misc_feature 1..398: note = isolate MpPeV1 polyprotein gene, complete cds.1
  source 1..398: mol_type = genomic DNA
ctacctatcctacttcttgtatatcattctttgctattaagtagggatcccctgctatttgcaggtgtgcttgcagtggagctacacaactgtggccgaggcacggctcgcccccgtgtattaggactcttttgtgccactgttaagcggacgtatgtcagttgagtgatatctcagtgataaaccatgagtacatggtaatcctggcgtggactcattgggacggtatttcctatcccgtagactccttgtagccaggtgggcatgcccaatcacaatggtagcacctctcatgggagtgagggggcctgagttagtactcagtcacacagcctgatagggtagcggctctgctactgaccagcgtctttaaataactgagagctgtttattaacct

SEQ ID NO: 6 - DNA, 419 bp, Bat pegivirus
  misc_feature 1..419: note = isolate PDB-838 polyprotein gene, complete cds.1
  source 1..419: mol_type = genomic DNA
gtggtaaatcccggctacggtggatccatgaatagcgtagggtgtgccaccactgctgggtgggacgacgcaggatcaaaggggacggcacggtccacaggtgagccaaccggtgtgaatatggcacgtctttgggcatgacgttaaactgagacgccctgcaggatgacaacatggctgagggttgcggaacgccgcttaaaaccattcgtggacagcgatgcgggttgacaatccgtcctcaggcgtggcggccatattggttggtcgtgtcagttcccttcagggtgcgcttcggcgaagcatggccccccccagctggcgcaggcccacatgcggcaagacgaaaaatccttcgggtgacgtcgggggggattttccctttacctacatgcatgttgttccgtttcggcgcaacc

SEQ ID NO: 7 - DNA, 421 bp, Human parechovirus 1
  misc_feature 1..421: note = isolate 37Chzj76, complete genome.1
  source 1..421: mol_type = genomic DNA
tctattagtgagataccacgcttgtggaccttatgctcacacagccatcctctagttagttggtgaggtgtctggtgacgtgtgggaacttaccggaagcattattttgctgtaaggcatccattagccagcggaacaacacctggtaacaggtgcccctggggccaaaagccaaggtttaacagaccctaatggattggttcaaacctggaataatgtggaaggtacttagtacctgccgaactggtagcaatgccaacactagttgtaaggcccacgaaggatgcccagaaggtacccgtaggtaacaagagacactatggatctgatctggggccaactacctctatcttggtgagttggttaaaaaacgtctagtgggccaaacccaggggggatccctggtttcctaatttttact

SEQ ID NO: 8 - DNA, 426 bp, Rodent pestivirus
  misc_feature 1..426: note = isolate RtNn-PestV/HuB2014 polyprotein gene,1
  source 1..426: mol_type = genomic DNA
gtataagggatgggatccttgtacatttcatacctctaccgaacagtatttgggagttctttttacctgccgtacagtattgggatttaaacaactaaatgtttacaaatcacgtgtgtggtggcggggatagaccgtgccagcggttgtgtaccagcaatcacaaacaacacgtggactgcaatccaggagagcacctaggtctgttaagttgtgagtacacgacattcgtcaatgagtcagctggtaaggatcacccacctggatactcatgtggacgagggagtttcccaaacagtaacctactctgggggaggggtcccccagagacaatttgtctcaaatatgggataagttggggtgtgctgcctgacagggtctcggctgatagcctggaaagcagtataatatcagttgaattggcat

SEQ ID NO: 9 - DNA, 436 bp, Human parechovirus 6
  misc_feature 1..436: note = strain BNI-67/03 polyprotein gene, complete1
  source 1..436: mol_type = genomic DNA
ataattctatcagtgggataccacgcttgtggatcttatgcccacacagccatcctctagtaagtttgtaagacgtctgatgacgtgtgggaacttattggaagtgacattttgctgcaaagcatcctattgccagcggaataacacctggtaacaggtgcctctggggccaaaagccaaggtttaacagaccctttaggattggtgttaacctgaagtgttatggaaaatatttagtacctgctgatttggtagtaatgcaaacactagttgtaaggcccacgaaggatgcccagaaggtacccgtaggtaacaagagacactatggatctgatttggggccaactacctctattaaggtgagttggttaaaaaacgtctagtgggccaaacccaggggggatccctggtttccttttattttactacattcaac

SEQ ID NO: 10 - DNA, 439 bp, Human parechovirus 17
  misc_feature 1..439: note = isolate 27Chzj76, complete genome.1
  source 1..439: mol_type = genomic DNA
tgccataactctattagtgagataccatgcttgtggaacttatgctcacacagccatcctctagtaagtttgtaagacgtctggtgacgtgtgggaacttgtgggaatcaatgccttgctgtaaagcatccattagccagcggacaaacacctggtaacaggtgcctctggggccgaaagccaaggtttaacagaccctaatggattggttcaaacctgagacattgtggaacacacttagtacctgctaatctggtagtaatgcaaacactagttgtaaggcccacgaaggatgcccagaaggtacctgtaggtaacaagtgacactatggatctgatctggggccagttacctctatcttggtgaactggttaaaaaacgtctagtgggccaaacccaggggggatccctggtttcctttttattttactagtcatt

SEQ ID NO: 11 - DNA, 441 bp, Human parechovirus 4
  misc_feature 1..441: note = isolate TW-00032-2011 polyprotein gene,1
  source 1..441: mol_type = genomic DNA
cataactctattagtgagataccatgcttgtggaccttatgctcacacagccatcctctagtgagtttgcaagacgtctgatgacgtgtgggaacttaatggaaacaatatcttgctataaagcatcttactgccagcggaacaacacctggtgacaggtgcctctggggccaaaagccaaggtttaacagaccctttaagattggttcaaacctgaggtattgtggaaattatttagtacctgccgatttggtagtagtgcaaacactagttgtaaggcccacgaaggatgcccagaaggtacccgtaggtaacatgtgacactatggatctgatctggggccaactacctctatcaaggtgagttggttaaaaaacgtctagtgggccaaacccaggggggatccctggtttcctttatcttatcacacaattatcatt

SEQ ID NO: 12 - DNA, 471 bp, unidentified
  source 1..471: mol_type = unassigned DNA; note = Kobuvirus cattle/Kagoshima-1 -22-KoV/2014/JPN genomic RNA, nearly 1 sequence
catccccaatatgttcggtgaggaatgctaccacgtaactattagtgaacccattgactgttctgccctggcaaggctatagagtacagtgttccgctgtggatgccgtcctggtaacaggatccccagtgtgtgtagctgtatgttcaacttcggttgttcacagtccttggtctagcttttagtgaaatggtgtgcgccatatccctacatttgggtgccacctctcaacccctaggaatgctaggaaggtaccccaccctccggtgggatctgatcctaggctaattgtctatggggttgtttccttttcttttcaccactcattactggctcacagattgtttgttgtgttccctgctctctctagctcccaacacggcacacagtctcagccacaccgcctttgcaaacgactaccagatttgtttctttgactcctctgattctcacatcttcactgaaccagac

SEQ ID NO: 13 - DNA, 481 bp, Avihepatovirus sp.
  misc_feature 1..481: note = isolate MW24 genomic sequence.1
  source 1..481: mol_type = genomic DNA
gttgggtttacgtaagtattacccaaccctcctttcaacgtctggcccacgatacgggccaccctttcctatctcctctctttccaagtaagatattttattggttaactgacctctgtgcggcacgacaatgatgtggacaagtgttttacttaggtggtttagccagccatttcctcggcaatagcttctaggagaggagaaatggtaggtgcaacctggtaatggttctcctgaaatcgtccagtagggaggatcctcttccagataattgtactgactaggtgaagtagactggactagctgtgaggtccggggccagcattgctataccccctctaatccggcgtggatttccggccattggatagagcttacagctagcagggtattggggtaaccctgttgatccagactcctgataaggggaactgcctgtttcacgacccacctagtataaaatacaggctgtatttatgaa

SEQ ID NO: 14 - DNA, 488 bp, Eel picornavirus 1
  misc_feature 1..488: note = strain F15/05, complete genome.1
  source 1..488: mol_type = genomic DNA
cacatggaaagcttttcgcttccatgtttacgcacacactctctttgacaccctgttgtatggtgttaaactacaacatttgtctgtctataatcgtttattttgtttaccctatatgtacccaagtatttgattgcttgactcacataagcatcggtaacccatactgttttatgagctactacctctgctgtctacatacattttatatgaatggtttgagctctgcctcaggatcaaacatggtaacatgttcctttggtcagttagaatcttattgtataatctaaggtgtctattagtacgtagaaagttgtaacacatatggggcctgatagccgctatctctgatggatgtaaggtaaccttctttaggtctgatacattctgcacaggatccaattttcggtgccctgtacgagtgcactcttatgcacgaggacgagatatgctacaacccactgcaaatttaaacccaaactttaaca

SEQ ID NO: 15 - DNA, 509 bp, Burpengary virus
  misc_feature 1..509: note = isolate 1 polyprotein gene, complete cds.1
  source 1..509: mol_type = genomic DNA
ctccccccccttccccttcccgagtaggagattggcatgtatgctctacatgcccgattctctcttgctcactctcttaaatcctggtggcggtctcggattaaacatttatgtcgtatctgggatcgtcttacttggtggtaattcctctgttgcctagggacctccggactgccggattaaaggtctcaacagagggcaatgtacaaggaagtcattatacgctaattaagtatttgatgaatgactagtgtgacagggctgaggaactccccccgggtaaccggtgcctcagcgtccgaaagacacgtggataggatccaccctgttatacccagcacgatgtaatagtcaaatacctctgatttgtgtaggatgtataaattgtgcattgtaaattttgggcgtagagatgctccgaaggtaccccgttttacgggatctgatcggaggctaattacccaatgcgccctaaataacttcatataatttctttttctttattcaaa

SEQ ID NO: 16 - DNA, 519 bp, Goose megrivirus
  misc_feature 1..519: note = isolate W18, complete genome.1
  source 1..519: mol_type = genomic DNA
ttcgggacactggatgggcgacttggtggggctgccactctatcttgacctttcgttactgactttcggatctctgactcctccttgtctcttgcgtttggtccacggacggactaattggaatgtttactggctaagcctcgttctgaaataccctagccaatgggttgtagtaggatcctggtgtttccattaaacctcttccgaccatagtagctagagttatggctgtgtaggatgtgggtaagaccgctttttgcgtatctcccacaagacaccggattatggatgtgtccgctggataaggctcgaaacctcccaactgaaggtggtgctgaaatattgcaagcctaggttgtgtagaggcaagtagatgcctgccgcgacattcgtcttccgcccttttgggttagtagtgtacctacatggacgtggggctgggaatccccaccttgcataacactggttgatagacctgcggctggtcaagttactatggtataaccagttgaaatggct

SEQ ID NO: 17 - DNA, 519 bp, Ferret kobuvirus
  misc_feature 1..519: note = isolate MpKoV32 polyprotein gene, partial cds.1
  source 1..519: mol_type = genomic DNA
accctcttttccggcggcgcaagttcgcgtcgtcgtaagcctggactcccatggtgtacatcggtttccgggcaaatacaagaaccccagttttcctggtaattccttgactgggtcaaagaaataaggaaccagcccctctaacgccagacgagcggctttaaacttgaacttctggcacaatttcttccactaccctttccccaaactcggactgactcactggattttgaccttccccctttgtctgaccactcttttggatctccctccaatatgccggtggtgcctggcggaaaaagcacaagttgtgtgagcaacacccccacaggtctcacggaacggtctgtgcccgcagatctagtacgtgcggatccctggttgcttccactgctcgcctgtgagtagagtaggtgctgggtgtgatgtgtcttcggacacctcgggcatagcattgctcccccgagaatcaagccatcgagatttctctggcctctgaagtcacgcctggacgcgtag

SEQ ID NO: 18 - DNA, 528 bp, Southwest bike trail virus
  misc_feature 1..528: note = isolate cj1516, complete genome.1
  source 1..528: mol_type = genomic DNA
gtcaggtggaaggcctgaaaccgatcctacaattggagagtaaccaacatgctcattaacacctcgggctggctcgaaagccggtgttgggcagatggcagggttcttagggtaaatcccggtctgtctggatccggtatagagctggcactggaggtccactgttggcttgctgaagtgctcagaagattgatggacacggtacacaggtttggatgcaccggtgtgaatagcgtcccgtcaggagcgtctgacgttaaactgagtccccctcaacgatcgcaacatgggattgcgtacggacacgccgccaaaacccttcggggacagctatgcgggttgacaagtccagcagtcgcgtggggcctatattgtttaggcctgcgagttccggtttgggggagccgaaaggcagccatgggggtaccaaggcggcgtcgcgctacaggcggcaaggggaaaaatccttcgggtgacccctggtaccatttttccttattgggtgttatgggtgtcggaaacgccacc

SEQ ID NO: 19 - DNA, 528 bp, Human parechovirus 19
  misc_feature 1..528: note = isolate 67Chzj11, complete genome.1
  source 1..528: mol_type = genomic DNA
ttgtgtcaaatttgtagtgtttacagtagttgtagcttgcacgacatccttgttctccggttgggctgtggttgcaaaactatttggtcctagtaaattagaagcatcatctgcaactttggttattatttccccgccaacttcattgccagaaataatattattagcttcagtttctacattagacaaggagagagtatccatagcaccagtagcaacattaactaaatccttgatagactccataatggctgtttaaaattaaaagaaaaccagggatcccccttgggattggtttaaacctgaactactatggaagacatttagtacctgccaatttggtagtagtgcaaacactagttgtaaggcccacgaaggatgcccagaaggtacccgtaggtaacaagagacactatggatctgatctggggccaactacctctatcttggtgagttggttagaaaacgtctagtgggccaaacccgggggggatccccggtttcctttatttaataattagattcatt

SEQ ID NO: 20 - DNA, 531 bp, GB virus A
  misc_feature 1..531: note = Hepatitis, strain Alab polyprotein precursor, complete1
  source 1..531: mol_type = genomic DNA
gccgggtggaaggcccggaaccgccccaccacctcaactaggtggtaagggtacgtctatcggtccggctggcccgaaaggcggtggatcctgtgtgttagggttcgtaggtggtaaatcccagcacaggtggtaatcgctatagggcaggcttatcccggtgaccgcttccctggatcctggagcgggtcgtggcggcacggtccacaggagtggggcctccggtgtgaataagccctcgtctggagcatcagacgttaaactgagacgtcccgaagagatcggaacgacgccccacgtatggcaacgccgcttaaaacccttcggggacagctatgcgggttgacaatgccagtggggggccgggcccactattgttgtgggctccgagttcctctagggatggccgaaaggcagccatggggccacccaggcggcgccgtgctacaggcggcaaggggaaaaatccttcgggtgaccccgggtggcattccctcccttagcagcatgagtgtggtggtagctgcaacc

SEQ ID NO: 21 - DNA, 537 bp, Human parechovirus 5
  misc_feature 1..537: note = isolate ETH_P9_2016 polyprotein gene, partial1
  source 1..537: mol_type = genomic DNA
gatatcatcttgcaataagaagagtggggttaagacgcttaaagcatagagacaattttcttttctaacccacatttatgtggggtggcagatggcgtgccatgactctattagtgagataccacgcttgtggaccttatgctcacacagccatcctctagtaagtttgtgagatgtctgatgacgtgtgggaacttattggaagcaacattttgctgtaaagcatcctattgccagcggaacaacacctggtaacaggtgcctctggggccaaaagccaaggtttaacagaccctttaggattggttcaaacctgaaatgctgtggaaaatatttagtacctgccaatttggtagtaatgcaaacactagttgtaaggcccacgaaggatgcccagaaggtacccgtaggtaacaagtgacactatggatctgatctggggccaaatacctctatcttggtgatttggttaaaaaacgtctagtgggccaaacccaggggggatccctggtttccttttattttataatcgctatt

SEQ ID NO: 22 - DNA, 544 bp, Bovine rhinitis B virus
  misc_feature 1..544: note = strain MexB10 polyprotein gene, partial1
  source 1..544: mol_type = genomic DNA
tggcacaccttacctcgaaacaagctcgtccttttgctgtgcaacacagtctgtcctgttacacttgtgacggctcgcgacactgtttgcatagtgaaatcgaccaagacagcaattccaaatggtgaacctcgaacacccaagctggatccgtagctggacatgttagggtaaggaattcctccctggtaacagggaccttactggccaaaagccctgctctttgagcctagcatgttgttgaccccgaactgtccagtttggttagtacagggaattcatttgttgtggttgttcagaactcgacttctagtgagacagcctaaggatgccctccaggtaccctggggtaacaagtgacacccaggatctgaggaggggatcaccctgcgtgatttaaaaaacttctaagctgtcacggtgaccagaggctggcacctttcacttttaccacttctcaattgatcacaaacaaaggaattacgtaattgcagacccacaaactagttacacgagtactgttcttacttttaatacttgttat

SEQ ID NO: 23 - DNA, 546 bp, Human parechovirus 2
  misc_feature 1..546: note = isolate 51Chzj674, complete genome.1
  source 1..546: mol_type = genomic DNA
tgccatagagtggaacgtgtctacattgcgaaaatcaggtgtgaaaggcattgttggagcagaagggtgctgagtcaagttagttgtgttgacagttgttgtagcttgtacgacatccttgttttcaggtgttgaagtcgttgcaaaacaatttggtcccagaacattcgatgcatcatcagccactttggttaacatgtcaccaccagctgcattactggggtttgtgatggtctcattaacagtgttgacagtagagtcaattgtcttagtgattccagtagccatatctgcaacacccttgattgtctccatagctgtgaataaaaataaaaggaaaccagggtcccccctggatttggtaaccgtgcttatactagttgtaaggcccacgaaggatgcccagaaggtacccgtaggtaacaagtgacactatggatctgatctggggccaactacctctatcttggtgagttggttaaaaaacgtctagtgggccaaacccaggggggatccctggtttccttttattttatcataatcact

SEQ ID NO: 24 - DNA, 560 bp, GB virus A
  misc_feature 1..560: note = Hepatitis, complete genome.1
  source 1..560: mol_type = genomic DNA
gccgggtggaaggcccggaaccgaccctagggtggaacctggatgagggtgtggaagagactcccccatcggtccgaaagctggtggatggcgtgcggcagggttccgcaggtgggtaaatcccggcacgcttggatccggtataggataggtgggagccgaccggtcgaccccggtctggaccaccacggaagcacctgagcccggcggaagccccgtgggcacggtacacaggttgggcctaccggtgtgaataaggccccgtctcgagcggagacgttaaactgagaggtcctggtggatgggaacccggccctgcgtgttggaacgtcgctaaaacccttaggggacaatttccgaccgcgagttggcaaacctagcaggggcgggggcagtaggatggatctccgatctgctcccagttcccaccagggtcgccgtaaggcaagcatggggcccccaagctggcgcggcgctacacgcggcaagaggaagaaccttcgggtgacctctgggggcatgttggcttttcatgatgatgtgtggttgcagctgcaatc

SEQ ID NO: 25 - DNA, 563 bp, Rabovirus A
  misc_feature 1..563: note = strain Wencheng-Rn449 polyprotein gene, complete cds.1
  source 1..563: mol_type = genomic DNA
cctcttttcttggcaaataagatggtggaccaaggtcgtctgtagttgtttggaacatttctttctaatgacttatgtcagcggtgaactcacaccgtaactcttctaccctatccccacacttgtggaactaggaggggatgagtgattcaagtaagtactgtcagaatggtgaaaatgatctgattctgaaacatcatggatccatcgtaagatggggctacacgcctgcggaacaacacatggtaacatgtgccccaggggccaaaagccacggtgataggatcacccgtgtagtttgagatcatatcaatgttcatggtctagtaagatgatttgaaatctaactgagctgatggctaactgcttgtcttattgcggcctaaggatgccctgcaggtacctttagataaccttaagagactattgatctgagcaggggccaaggtggtctttcccagccttggttaaaaagcgtctaagccgtggcagggggcgggaggccccctttcctcccaaactttaatattgattgtatggtgacaactgaaagacatagcaca

SEQ ID NO: 26 - DNA, 570 bp, Parechovirus A
  misc_feature 1..570: note = isolate HPeV-1/CMRHP46/CMR/2014 polyprotein gene,1
  source 1..570: mol_type = genomic DNA
ctattaactatagccttgtgcctggtccccactagtcgaaggcatcttgcaataagataagtggaataaggacgcttaaagcacaatgaaagttaacttttctaacccacactatggtgtggggtggcagatggcgtgccataactctattagtgagataccacgcttgtggaccttatgctcacacagccatcctctagtaagtttgtaagacgtctggtgacgtgtgggaacttgtgggaatcaatattttgccgtaaggcatccattagccagcggataaaacacctggtaacaggtgcctctggggccaaaagccaaggtttaacagaccctaatggattggttttgaaacctgaaatattgtggaacacacttagtacctgctgatctggtagttatgcaaacactagttgtagggcccacgaaggatgcccagaaggtacccgtaggtaacaagagaaactatggatctgatctggggctgactactcctatctttgtgagtcagttaaaaaacgtctagtgggccaaacccaggggggatccctggtttcctttaattctatc

SEQ ID NO: 27 - DNA, 589 bp, Bovine rhinitis B virus 2
  misc_feature 1..589: note = isolate BRBV_SWE1 polyprotein gene,1
  source 1..589: mol_type = genomic DNA
cgggtttgctgctttcacatagtaaagcagatagaggttttgtaatggcgcactttacctcgaaacaagctcgttgttttgctgtgtaacacggtctgtcctgtcacacttgtggcggctcgtgacactgtgcgcatagtgaaatcgaccaagacagcaacttcaaatgatgaacctcgaacacccaagctggatccgtagctggacatgttagggtaaggaattcctccctggtaacagggaccttactggccaaaagccctgctctttgagcctagcatgttgttgaccccgaactgtccagtttggttagtacagggaatttatctgttgtggttgttcagaactcgatttctagtgagacagcctaaggatgccctccaggtaccctggggtaacaagcgacacccaggatctgaggaggggatcaccttgcgtgatttaaaaaacttctaagctgtcacggtgaccagaggctggcacctttcacttttatcacttttaaactgaccacaagcaaaggaattacgtgactacaggctctcaaactagttacacgagtactgtttttacttttgacatttgttgt

SEQ ID NO: 28 - DNA, 591 bp, Human parechovirus
  misc_feature 1..591: note = strain MX polyprotein gene, complete cds.1
  source 1..591: mol_type = genomic DNA
caacaaacatctaagacaattacatacaaccttgtacctggtccccaccagtcgaaggcatctagcaataagatgggtggaacaaggatgcttaaagcacaaagacaattaacttttctaacccacaatttattgtggggtggtagatggcgtaccataactctattagtgagataccatgcttgtggatcttatgctcacacagccatcctctagtaagtttgtaaggtgtctgatgatgtgtgggaacttattggaaacaacattctaccgtaaggtatccattagccagcggaacaacacctggtgacaggtgcctctggggccaaaagccaaggtttaacagaccctaatggattggttcaaacctgggatgttgtggaaaatatttagtacctgctgatttggtagcagtgcaaacactagttgtaaggcccacgaaggatgcccagaaggtacccgtaggtaacaagagacactatggatctgatctggggtcaactacctctatcttggtgagttgattaaaaaacgtctagtgggccaaacccaggggggatccctggtttccttttacttatcaaaatgatc

SEQ ID NO: 29 - DNA, 592 bp, Parechovirus A
  misc_feature 1..592: note = isolate LLL, complete genome.1
  source 1..592: mol_type = genomic DNA
aatgtaactaacatctaagacaactattttacaaccttgtacctggtctccactggtcgaaggcaacttgcaataagataagtggaatgaagacgcttaaagtacaatgtaagtaatcttttctaatccacaattctgtggagtggcagatggcgtgccataactctaatagtgagataccatacttgtggacctcatgctcacacagccatcctctagtaagtttgtaagacgtctggtgacgtgtgggaacttatgggaatcaatgttttgctgcaaggcatctattagccagcggataaacacctggtaacaggtgcctctggggccaaaagccaaggtttaacagaccctaatagattggtttatacctgaaacattgtggaacatattcagtacctgccgatctggtagtaatgcaaacactagttgtaaggcccacgaaggatgcccagaaggtacccgtaggttacaagggacactatggatctggtctggggctgagtacctctatcttggtgactcagttaaaaagcgtctagtgggccaaacccgggggggatccctggtttcttttattttaatggtcact

SEQ ID NO: 30 - DNA, 592 bp, Human parechovirus 18
  misc_feature 1..592: note = isolate 11Chzj207, complete genome.1
  source 1..592: mol_type = genomic DNA
cgtaacaaacatctaagattatcatattaaccccatgcctggtctccattagttgaaggcaacttgcaataaaataagtggaaataagacgcttaaagcatggtgtaagttttcttttctaactcacatcttgtgtggggtggcagatggcgtgccataactctattagtgagataccacacttgtggaccttatgctcacacagccatcctctagtaagcttgtaagacgtctggtgacgtgtgggaacttattggaaacatcattttgctgcaaagcatcctattgccagcggaacaacacctggtaacaggtgcccctggggccaaaagccaaggtttaacagaccctttaggattggttctaaacctgaaatgttgtggaagatatttagtacctaccaatctggtagtattgcaagcactagttgtacggcccacgaaggatgcccagaaggtacccgtaggtaacaagtgacactatggatctgatctggggtcaactacctctatctaggtgagttggttaaaaaacgtctagtgggccaaacccaggggggatccctggtttccttttatcttaaatagtgact

SEQ ID NO: 31 - DNA, 592 bp, Human parechovirus 5
  misc_feature 1..592: note = isolate 44Chzj84, complete genome.1
  source 1..592: mol_type = genomic DNA
taacaaacatctaagacaaacaattacgaccttatgcctggtccccaccagtcgaaggcatctagcaataagataggtggaacaaggacgcttaaagcataaagacaataatcttttctaactcacacattggtgtgaggtggcagatggcgtgccataactctaatagtgagataccacgcttgtggaccttatgctcacacagccatcctctagtaagtttgtgaggtgtctgatgacgtgtgggaacttgttggaaatgacagcttgctgcaaagcatcccattgccagcggactaacacctggtaacaggtgcctctggggccaaaagccaaggtttaacagaccctttgggattggttcaaacctgagctgtcatggaagacacttagtacctgctgatttggtagcaatacaaacactagttgtaaggcccacgaaggatgcccagaaggtacccgtaggtaacaagtgacactatagatctgatctggggccggctacctctatcttggtgagtcggttaaaaaacgtctagtgggccaaacccaggggggatccctggtttccttttattttactaatgcaact

SEQ ID NO: 32 - DNA, 593 bp, Parechovirus A
  misc_feature 1..593: note = isolate CSS, complete genome.1
  source 1..593: mol_type = genomic DNA
tgtaataatcttagatgtttgttacattaaccccatgcctggtctccactagttgaaggcagcttgcaataaaatgagtggaagcaagacgcttaaagcatggtgtaaattagcttttccagcccacaccttgtgtggggtggcagatggcgtgccataactctattagtgagataccatgcttatggaccttatgctcacacagccatcctctagtaagtttgtgagacgtctggtgacgtgtgggaacttattggaagcaacattttgctgtaaagcatcctattgccagcggaacaacacctggtaacaggtgcctctggggccaaaagccaaggtttagcagaccctttaggattggtttaaaacctgaaatgttgtggaagatacttagtacctaccgatctggtagtagtgcaaacactagttgtaaggcccacgaaggatgcccagaaggtacccgtaggtaacaagagacactatggatctgatctggggccgggtacctctatcttggtgacctggtttaaaaacgtctagtgggccaaacccgggggggatccccggtttccttttattttatcaatgccact

SEQ ID NO: 33 - DNA, 594 bp, Parechovirus A
  misc_feature 1..594: note = isolate HYRS, complete genome.1
  source 1..594: mol_type = genomic DNA
actgtaactaacatctaagacaactattatacaaccttgtacctggtccccactagtcgaaggctacttgcaataagataagtggactaaggacgcttaaagtacaatgtaaacaatcttttctaatccacaattttgtggagtggcagatggcgtgccataaccctattagtgagataccacgcttgtggaccttatgctcacacagccatcctctagtaagtttgtgagatgtctggtgatgtgtgggaacttatgggaagtaatgtcttgctgtaaagcatccattagccagcgggtaaacacctggtaacaggtgcctctggggccaaaagccaaggtttaacagaccctaatggattggttcaaacctgggacattgtggaacatacttagtacctgctgatctggtagttatgcaaacactagttgtaaggcccacgaaggatgcccagaaggtacccgtaggtaacaagagacactatggatctgatctggggctgagtacttctatcttagtgactcagttaaaaaacgtctagtgggccaaacccgggggggatccccggtttcctttattttacaactaccatc

SEQ ID NO: 34 - DNA, 595 bp, Parechovirus A
  misc_feature 1..595: note = isolate LGSB, complete genome.1
  source 1..595: mol_type = genomic DNA
gcacacacgaaaaggaatgcctgttgcattaaccccatgcctggtctccactagttgaaggcaacttgcaataaaatgagtggaaacaagacgcttaaagcatggtgtaaattaacttttctaacccacaccttgtgtggggtggcagatggcgtgccataactctattagtgagataccacgcttgtggaacttatgctcacacagccatcctctagtaagtttgtgagatgtctggtgacgtgtgggaacttattggaaacaacattttgctgtaaagcatcctattgccagcggaactacacctggtaacaggtgcctctggggccaaaagccaaggtttaacagaccctttaggattggtttaaaacctgaaatgttgtggaagatacttagtacctaccgatctggtagtattgcagacactagttgtaaggcccacgaaggatgcccagaaggtacccgtaggtaacaagagacactatggatctgatctggggccaggtacctctatcttggtgacctggttaaaaaacgtctagtgggccaaacccgggggggatccccggtttcattttgttttaccaatgccact

SEQ ID NO: 35 - DNA, 595 bp, Parechovirus A
  misc_feature 1..595: note = isolate AVSS, complete genome.1
  source 1..595: mol_type = genomic DNA
actgtaacaaacatctaagattattgcatgctttaagcgtcttgtttccactagttgaaggcaacttgcaataaaataagtggaaacaagacgcttaaagcatggtgtaagttaacttttctaacccacatctcatgtggggtggcagatggcgtgccataactctattagtgagataccacgcttgtggaccttatgctcacacagccatcctctagtaagtttgtgagacgtctggtgacgtgtgggaacttattggaaacagcattttgctgtaaagcatcctactgccagcggaacaacacctggtaacaggtgcctctggggccaaaagccaaggtttaacagaccctttaggattggtttaaaacctgaaatgttgtggaagatactcagtacctaccgatctggtagtattgcaaacactagttgtagggcccacaaaggatgcccagaaggtacccgtaggttacaagagacactatggatctggtctggggccaggtacctctatctcggtgacctggttaaaaaacgtctagtgggccaaacccgggggggatccccggtttccttttgttttactaatgccatt

SEQ ID NO: 36 - DNA, 596 bp, Parechovirus A
  misc_feature 1..596: note = isolate CBC, complete genome.1
  source 1..596: mol_type = genomic DNA
actgtaactaacacctaagcttacatcacagataccctatgcctggtccccaccagtcgaaggcatctagcaataagatgggtggagcaaggacgcttaaagcatagtgttattatgcatttctaactcgtgttcaacacgaggtggcagatggcgtgccataactctattagtgagataccacgcttgtggatcttatgctcacacagccatcctctagtaagcttgcaaggcgtctgatgacgtgtgggaacttattggaaataacagtttgctgcaaagcatcctattgccagcggatcaacacctggtaacaggtgcctctggggccaaaagccaaggtttgacagaccctctaggattggttcatacctgaactgttatggaagatacttagtacctaccaatttggtagttaggcaagcactagttgtaaggcccacgaaggatgcccagaaggtacccgtaggtaacaagtggcactatggatctgatctggggccaactacctctatcctggtgagttggttaaggcatccttcgtgggccaaacccaggggggatccctggtttcctttaaatttaatacaatcaat

SEQ ID NO: 37 - DNA, 597 bp, Parechovirus A
  misc_feature 1..597: note = isolate FNMR, complete genome.1
  source 1..597: mol_type = genomic DNA
actgtaactaacatctaagctgatattccagccacctcaaggctggtccccactcgtcgaaggcatctagcaataagataagtggaagaaggatgcttaaagcatagtgttaatatgcatttctaacctgtgattatcacggggtggcagatggcgtgccataactctattagtgagataccacgcttgtggaccttatgctcacacagccatcctctagtaagtttgcaaggcatctgatgacgtgtgggaacttattggaaacaacagtttgctgcaaagcatcctactgccagcggaacaacacctggtaacaggtgcctctggggccaaaagccaaggtttaacagaccctttaggattggttcacacctgaactgttgtgaaagatatttagtacctactgacttggtagttaggcaaacactagttgtaaggcccacgaaggatgcccagaaggtacccgtaggtaacaagagacactatggatctgatctggggccaactaccactatcatggtgagttggttaaaaaacgtcttagtgggccaaacccaggggggatccctggtttccttttactttaatacaatcatt

SEQ ID NO: 38 - DNA, 603 bp, Bovine rhinitis B virus 5
  misc_feature 1..603: note = strain MexB09 polyprotein gene, complete1
  source 1..603: mol_type = genomic DNA
tatcattcgaagatgtgcggttttgctgctttcacagagtaaagcagatagaggttctggactggcaaactttacctcgaaacacgcccgttttcctgctgtgttttacagactgtcctgccacacttgtggcggcttgtgacactgtgaacatagtgagaccgaccaagagaacagttccaagtgatgaacaccgaacacctagactggatccgtagctggacatgttagggcaaggatttcccccctggtaacaggagccttgctggccaaaagccccgctctttgagcctagcatgttgtcgaccccggactgtccagtctagttagtacatgggattcacttgtcatggttcttctaaactcggtctctagtgcggcagcctaaggatgccctccaggtaccccggggtaacaagcgacacccgggatctgaggaggggactactttacgtagtttaaaaaacgtctaagctgttacggtgaccagaggctggcacctttcattttttaaaacaaactactgattacaattgaagtgataacggttttacagactttcaaactagtagcacaagtactgttttccaacgcacacatttt

SEQ ID NO: 39 - DNA, 604 bp, Parechovirus A
  misc_feature 1..604: note = isolate HMS, complete genome.1
  source 1..604: mol_type = genomic DNA
atcataaccaatacgatttctcattccatctcgaccgcttctaccacctctaccgccacgtcctccacgagcatcaagaaattcacgaaattcatcgagaatgcttaaagcatagtgttagtatgcattcttgatgctcgtggaggacgtggcggtagatggcgtgccataactctatcagggtgataccacgcttgtggatcttatgctcacacagccatcctctagtaagcttgcaaggcgtctgatgacgtgtgggaacttattggaaataacagtttgctgcaaagcatcctattgccagcggatcgacacctggtaacaggtgcctctggggccaaaagccaaggtttaacagaccctctaggattggttcacacctgaactgttatggaaaatacttagtacctaccgatttggtagttgtgcaagcactagttgtagggcccatgaaggatgcccagaaggtacccgtaggtaacaagtgacactatggatctgatctggggccaactacctctatcctggtgagttggttaaaaaacgtctaatgggccaaacccaggggggatccctggtttcctttaaatttactacaaccaat

SEQ ID NO: 40 - DNA, 604 bp, Bovine rhinitis B virus
  misc_feature 1..604: note = strain MexB29 polyprotein gene, partial1
  source 1..604: mol_type = genomic DNA
ctgcagatatcaagatgtgcgggtttgctgctttcacagagtaaagcagatagagattttgtattggcacacttaatctcgaaacgcgctcgttctgctgtgtagttcagtctgtcctgtcacacttgtgacggctcgcgacactgtacacatagtgaaaccgaccaagacaaaagcttcaaataatgaacctcgaaatcccaaactggatccgtagctggacatgttagggtaaggaacacccccctggtaacagggaccttactggccaaaagccccgctctttgagcctagcatgttgttgatcccgaactgttcagtttggttagtacagggaatttctttgctgtctttgttcagaactcggtttctagtgagacagcctaaggatgccctccaggtaccccggggtaacaagcgacacccgggatctgaggaggggaccgccccgcgcggtttaaaaaacttctaagctgttgtggtgaccagaggctggcacctttcactttaaaacacttattaactggtcacaaacaaaagaattccgttttacagactttcaaactagttacacaagtactgtttcacttacaacaattgttat

SEQ ID NO: 41 - DNA, 606 bp, Zebrafish picornavirus-1
  misc_feature 1..606: note = strain IDEXX/ZfPV-1/2017/USA, complete1
  source 1..606: mol_type = genomic DNA
aaataccctttcccccggagcctcaccggggaccgcctcatggtgacctgctcggtcactactgtggtggtgaacaaatgtctaggacctttcactccaaatccctttcccctttttctacttcttagtacgcctcggctcgctcatccgttgtgtgctcaaactccccttctcctacacccctttcccccccctcccgagtgactcgcacttagtcgtaggtttggtgtctttcaccatttctgtgcctatctatgtgtcctttggatccgccctcgaatgccctctagggtcttctgcgaaagcttgcaaagccgcgccccccctccactgttcttggggaccgtgcgcagccggaacttttgacatttgactgaacagtacagcaatgtagcatgtctcttgtctttgccggttagccctcgtggtcaaactttgtaagttagtacacttaagcactctcctgtggtttctcttgggaccttccaattgtaggaatccttggtatgccttcgaatagggacggacgctctaaatgccccgttcgcgaagtcgacgcctgaatgaccaaggtttttccacctttcctcaaaacccctcttttta

SEQ ID NO: 42 - DNA, 608 bp, Human rhinovirus 10
  misc_feature 1..608: note = complete genome.1
  source 1..608: mol_type = genomic DNA
ttaaaactggatccagattgttcccatctggatttcccacgtggagttgtacactattattccggtaattttgtacgccagttttatgtacccccccctgtaacttagaagttttgaacaaggaccaataggcagtaaccacccaggttgctaaaggtcaagcacttctgtttccccggtcaaagttgatatgctccaacagggcaaaaacaactgagatcgttacccgcaaggtgcctacgcaaagcctagtaaccccttgaacgatgtgtggttggtcgttcggctgtaccccacagtagacctggcagatgaggctagatgttccccactggcgacagtgttctagcctgcgtggctgcctgcgcactctctgagtgcgaagccatacatttgacaaggtgtgaagagccccgtgtgctcaccttgagtcctccggcccctgaatgtggctaaccttaaccctgcagctagtacatgcaatccagcatgcagctagtcgtaacgagcaattgcgggacgggaccaactactttgggtgtccgtgtttcactttttccttttatatttgcttatggtgacaatatatagatttatatattgtcacc

SEQ ID NO: 43 - DNA, 608 bp, Human rhinovirus 30
  misc_feature 1..608: note = complete genome.1
  source 1..608: mol_type = genomic DNA
ttaaaactggatccaggttgtccccacctggatctcccacagggagtggtactctgttattacggtaactttgtatgccagttttatcctccccacccctatgtaacttagaagttttacataaagaccaataggtagtaatcatccagattacttaaggtcaagcacttctgtttccccggttgatgttgatatgctccaacagggcaaaaacaacagaaatcgttacccgcaaagtgcctacgcaaagcctagtagcactttagaagttgtctggctggtcgctccgccatttcccctggtagacctggcagatgaggctagaaataccccactggcgacagtgttctagcctgcgtggctgcctgcacaccctatgggtgtgaagccatacaatggacaaggtgtgaagagccccgtgtgctcactttgagtcctccggcccctgaatgtggctaaccttaaccctgcagctagggcacacaatccagtgtgtatctagtcgtaatgagcaattgcgggacgggaccaactactttgggtgtccgtgtttctcttttatccttatgtttgcttatggtgacaatatatgaatatatattgacacc

SEQ ID NO: 44 - DNA, 609 bp, Turkey avisivirus
  misc_feature 1..609: note = isolate USA-IN1, complete genome.1
  source 1..609: mol_type = genomic DNA
ttgaaagcgaatgtatggccgcatttccacactagtaactagtagtggtatgcggctgtgcattcgctttccccccctctttataggggcggtctttgtatctttactaatttcctacttttctatcatctctttttaaggtagggactaaggtctcctagcccttccccccctgggctttccaggatcaagggggttctaaagctaggccatgtttcctgagcctcatttagtacggagagttagtagtcataaaacatgccagtaaccttctagtgcccaagggtgacagagtggtaacactctccttggggcccgaaaggctagtgggcatagttgttaccaaggaaggggtccccaccccaacctgaactaacagctagaagctcaccttagaagaagtgctggatcccaacatgtcttataatgaaagctcaatggaaaggtgaggagatggaagcatgggggttcactgagtagatgccctgaaggagaaatctgatcaggggcccgtgactatacattaggtaaaccgggtataaaaaccatgaaaggtgacccacaaattttcctttatttttatgttttgttggtgtgaattcaggcaag

SEQ ID NO: 45 - DNA, 610 bp, Livupivirus A1
  misc_feature 1..610: note = strain newt/II-5-Pilis/2014/HUN, complete genome.1
  source 1..610: mol_type = genomic DNA
tatctacatggggatccaggctgtatggaatgtctgtcttaacaagcactataccagaaagatccacccaaagtggtgggactgggactgtgaggtgagaaatcccgaaaccagccttctcaagcgtcggacgatctttctgttttagtgaacaccttgccttttaaatggatgacaacaccccttcagcaaatcgcaatctgaaatcccaaaagactgtttagccgaactctggtaatcactccggagaagtaggatacgcagcccctgtggactcttgatttcaggactcaaggtagctagagctggaacttcatggaatgacaaaggaatatatgcacattgtgcgctttcctggccttgtagcccgtcgtgaggatatgtcgttgggaatcgacatcttagtccagtactgcttgatagagtgtcggctggcacagttacctgagaataagtcagttgtacttaacatgaacaaaaaaaataactaccacaactaccacaatctaccaatacttgaattatgctgaatctcgtacagtaaaaacgttccgtggaaggacaagtattgaagtgcggttacatcatccgatacgcgctggatccctca

SEQ ID NO: 46 - DNA, 610 bp, Human parechovirus 1
  misc_feature 1..610: note = isolate TW-01319-2010 polyprotein gene,1
  source 1..610: mol_type = genomic DNA
gtcaataaaagcctcaaacgtaacaaacatctaagataactaaacaaaccctatgcctggtctccactattcgaaggcaacttgcaataagaagagtgggcacaagacgcttaaagcatagagagagtttccttttctaacccacgttcgcgtggggtggcagatggcgtgccataactctaatagtgagataccatgcttgtggatcttatgctcacacagccatcctctagtaagtttgtaaggcgtctggtgacgtgtgggaatttattagaagcaacatcgtgctgtaaagcatcctattgccagcggaataacacctggtaacaggtgcctctggggccaaaagccaaggtttaacagaccctctaggattggttttgaacctgcgatgttgtggaaaatatttagtacctgccaatctggtagtcatgcaaacactagttgtaaggcccacgaaggatgcccagaaggtacccgtaggtaacaagagacactatggatctgatctggggccaactacctctatcttggtgagttggttaaaaaacgtctagtgggccaaacccaggggggatccctggtttccttttattttatcaatttcatt

SEQ ID NO: 47 - DNA, 610 bp, Human rhinovirus 32
  misc_feature 1..610: note = strain ATCC VR-1142, complete genome.1
  source 1..610: mol_type = genomic DNA
ttaaaactggatccgggttgttcccacccggatctcccacgtggagttgtacactattattacggtaattttgtacgccagttttatatcccttaccccaagtaacttagaagataaacacacagaccaataggaggtggtcatccagatcactaagggtcaagcacttctgtttccccggtcaaggttgatatgctccaacagggcaaaaacagctgagatcattatccgcaaagtgcctacgcaaagcctagtaactacctcgaaagtacttgactggtcgctccgccataccccatggtagacctggcagatgaggctagaaatcccccactggtgacagtgttctagcctgcgtggctgcctgcacaccctttgggtgtgaagccaagtaatggacagggtgtgaagagtcgagtgtgctcactttgagtcctccggcccctgaatgtggctaaccctaaccctgcagctagggcacacaatccagtgtgtatctagtcgtaatgagcaattgcgggatgggaccaactactttgggtgtccgtgtttcttgtttttcatttataattgcttatggtgacaatatatagtattatatattggcgtc

SEQ ID NO: 48 - DNA, 610 bp, Human rhinovirus 2
  misc_feature 1..610: note = complete sequence.1
  source 1..610: mol_type = genomic DNA
ttaaaactggatccaggttgttcccacctggatttcccacagggagtggtactctgttattacggtaactttgtacgccagttttatctcccttcccccatgtaacttagaagtttttcacaaagaccaatagccggtaatcagccagattactgaaggtcaagcacttctgtttccccggtcaatgttgatatgctccaacagggcaaaaacaactgcgatcgttaaccgcaaagcgcctacgcaaagcttagtagcatctttgaaatcgtttggctggtcgatccgccatttcccctggtagacctggcagatgaggctagaaataccccactggcgacagtgttctagcctgcgtggctgcctgcacaccctatgggtgtgaagccaaacaatggacaaggtgtgaagagccccgtgtgctcgctttgagtcctccggcccctgaatgtggctaaccttaaccctgcagctagagcacgtaacccaatgtgtatctagtcgtaatgagcaattgcgggatgggaccaactactttgggtgtccgtgtttcactttttcctttatatttgcttatggtgacaatatatacaatatatatattggcacc

SEQ ID NO: 49 - DNA, 612 bp, Human rhinovirus A2
  misc_feature 1..612: note = strain 12L4, complete genome.1
  source 1..612: mol_type = genomic DNA
ttaaaactggatccaggttgttcccacctggatctcccatagggagtggtactctgctattacggtagccttgtatgccagttttatctcccctcccccatgtaacttagaagttttacacaaggaccaatagtcggtaatcagccagattactaaaggtcaagcacttctgtttccccggtcaatgctgatatgctccaacagggcaaaaacagcagcgatcgttatccgcaaagcgcctacgcaaagcttagtagcatctccgaaattgtctggttggtcgttccgccattttccccttggtagacctggcagatgaggctagaaataccccactggcgacagtgttctagcctgcgtggctgcctgcacaccctatgggtgtgaagccaaacaatggacaaggtgtgaagagccccgtgtgctcgctttgactcctccggcccctgaatgtggctaaccttaaccctgcagctagagcacgcaaaccagcgtgtttctagtcgtaatgagcaattgcgggatgggaccaactactttgggtgtccgtgtttcactttttctttttatattgcttatggtgacaatatatacatcatatatattgacacc

SEQ ID NO: 50 - DNA, 613 bp, Human rhinovirus 77
  misc_feature 1..613: note = strain ATCC VR-1187, complete genome.1
  source 1..613: mol_type = genomic DNA
ttaaaactggatccaggttgttcccacttggatcccccaagaggggtagtactctattattacggtaattttgtacgccagttttatctcccttaccccctttgtaacttagaagatttaaacacagaccaataggcgacgatcatccagatcgtttaaggtcaagcacttctgtttccccggtcaatgctgatatgctctaccagggcaaaaacagtagagatcgttatccgcaaggtgcctacacaaagcttagtaacattttgaagagcatttggttggtcgctcagctattaccccatagtagacctggcagatgaggctagaagttccccactggcgacagtgttcttgcctgcgtggctgcctgcgcactctcatgagtgcgaagccatatgtttgacaaggtgtgaagagccccgtgtgctcaccttgagtcctccggcccctgaatgtggctaaccttaaccctgcagctagtgcatgaaatccatcatgtaactagtcgtaatgagcaattgcgggatgggaccaactactttgggtgtccgtgtttcactttttccttttatatttgcttatggtgacaatatatatagcatatattgacacc

SEQ ID NO: 51 - DNA, 613 bp, Human rhinovirus A25
  misc_feature 1..613: note = strain SC0881, complete genome.1
  source 1..613: mol_type = genomic DNA
ataaaactggatccaggttgttcccacctggatctcctacgtggagttgtactctattattccggtaatcttgtacgccagttttatatcccctacccctttgtaacttagaagttaaacacacagaccaataggcggtggctatccaagtcactaatggtcaagcacttctgtttccccggtcaagattgatacgctccaacagggcgaaaacagtcaagatcgttaaccgcaaagtgactacgcaaagcttagtaatgccttgaagagtctatggctggtcgttccgctataaccccctagtagacctggcagatgaggctagaaacaccccactggcaacagtgttctagcctgcgtggctgcctgcacaccctttcgggtgtgaagccatatatttgacaaggtgtgaagagccccgtgtgctcactttgagtcctccggcccctgaatgtggctaaccttaaccctgcagctagcgtatgtaatccaacatattgctagtcgtaatgagcaattgcgggatgggaccaactactttgggtgtccgtgtttcacttttttccttttatttgcttatggtgacaatatatatagtatatatattggcatc

SEQ ID NO: 52 - DNA, 614 bp, Human parechovirus 6
  misc_feature 1..614: note = isolate 71Chzj169, complete genome.1
  source 1..614: mol_type = genomic DNA
ggctggttaataaaagcctcaactgtaacaaacatcttaagcaactatagcaaccccatgcctggtctccactagttgaaggcacctagcaataaaatgagtggaaataagacgcttaaagcatggagtaaattttcttttctatcccatattttgtatggggtggcagatggcgtgccataattctattagtgggataccatacttgtggatcttatgcccacacagccatcctctagtaagtttgtaagacgtctggcgatgtgtgggaacttattggaagcaacattttgctgcaaagcatcctactgccagtggaacaacacctggtaacaggtgcccctggggccaaaagccaaggtttaacagaccctttaggattggtattaacctgaaatgttgtggagaatagttagtacctgctgacctggtagtaatgcaaacactagttgtaaggcccacgaaggatgcccagaaggtacccgtaggtaacaagagacactatggatctgatttggggccaactacctctattaaggtgagttggttaaaaaacgtctagtgggccaaacccaggggggatccctggtttcttttattttaccatatctaac

SEQ ID NO: 53 - DNA, 614 bp, Human rhinovirus A21
  misc_feature 1..614: note = isolate rmh001/2013 polyprotein gene, complete1
  source 1..614: mol_type = genomic DNA
taaaactggatccaggttgttcccacctggatctcctattgggagttgtactctattattccggtaattttgtacgccagttttatcttccccctccccaattgtaacttagaaggttatcaatacgaccaataggtggtagttagccaaactaccaaaggtcaagcacttctgtttccccggtcaaagttgatatgctccaacagggcaaaaacaactgagatcgttatccgcaaagtgcctacgcaaagcctagtaacacctttgaagatttatggttggtcgttccgctatttcccatagtagacctggcagatgaggctagaaatcccccactggcgacagtgctctagcctgcgtggctgcctgcgcaccccttgggtgcgaagccatacattggacaaggtgtgaagagccccgtgtgctcactttgagtcctccggcccctgaatgtggctaaccttaaccctgcagctagtgcatgtaatccaacatgttgctagtcgtaatgagtaattgcgggacgggaccaactactttgggtgtccgtgtttcactttttccttttaatattgcttatggtgacaatatatatagctatatatattgacacc

SEQ ID NO: 54 - DNA, 614 bp, Human rhinovirus 85
  misc_feature 1..614: note = strain ATCC VR-1195, complete genome.1
  source 1..614: mol_type = genomic DNA
ttaaaactggatccaggttgttcccacctggatttcctacatggagttgtactctgttattccggtaaccttgtacgccagttttatatcccttcccccttgcaacttagaagttaagcacgcagaccaataggtggtgattatccaaatcactaacggtcaagcacttctgtttccccggtttaaactgatacgctccaacagggcgaaaacagtgcaaatcgttatccgcaaggtgcctacacaaagcttagtagcgctttggagaatgtgtggttggtcgctcagctataccccctagtagacctggcagatgaggctagaagcaccccactggcgacagtgttctagcctgcgtggctgcctgcacacccttatgggtgtgaagccatacatttgacaaggtgtgaagagccccgtgtgctcactttgagtcctccggcccctgaatgtggctaaccttaaccctgcagctggtgcatgtaatccaacatgttgctagtcgtaatgagcaattgcgggatgggaccaactactttgggtgtccgtgtttcactttttaccttttaatttgcttatggtgacaatatatatacaacatatatattggcatc

SEQ ID NO: 55 - DNA, 614 bp, Human rhinovirus 57
  misc_feature 1..614: note = isolate fs ship#1-hrv-57, complete genome.1
  source 1..614: mol_type = genomic DNA
ttaaaactggatccaggttgttcccacctggatctcctacgggagttgtactctgttatttcggtaaccttgtacgccagttttatctcccctcccccaattgtaacttagaagcaatacacaaggaccaataggcagtgattaaccagatcacttaaggtcaagcacttctgtttccccggtctgagttgatatgctctaacagggcaaaaacaagtcagatcgttatccgcaaagtgcctacgcaaagcctagtatcatctttgaaaatgtatggttggtcattccgctgaaccccacagtagacctggcagatgaggctagaaaccccccactggcgacagtgttctagcctgcgtggctgcctgcacacccttatgggtgtgaagccatatatttgacaaggtgtgaagagccccgtgtgctcactttgagtcctccggcccctgaatgtggctaaccctaaccctgcagctagtgcatacaagccagtatgttgctagtcgtaacgagcaattgcgggatgggaccaactactttgggtgtccgtgtttcactttttacctttatactgcttatggtgacaatatatatatagcatatatattgacacc

SEQ ID NO: 56 - DNA, 614 bp, Human rhinovirus 59
  misc_feature 1..614: note = strain 16-J2, complete genome.1
  source 1..614: mol_type = genomic DNA
ttaaaactggatccaggttgttcccacctggatctcccaagtggagtggtacactattatcccggtaattttgtacgccagttttataacccctcccccccttgtaacttagaagatgtaaacacagaccaataggtggtaactaaccaagttactaaaggtcaagcacttctgtttccccggctgatattgatatgctccaccagggcaaaaacaatagaagtcgttatccgcaaagtgcctacgcaaagcctagtagcactttagattgtgtatggttggtcgctcagctattccccctagtagacctggcagatgaggctagaaataccccactggtaacagtgttctagcctgcgtggctgcctgcgcaccctttcgggtgcgaagccatatacatgacaaggtgtgaagagccccgtgtgctcactttgagtcctccggctcctgaatgtggctaaccttaaacctgcagccagtgcacataagccaatgtgtagctggtcgtaatgagtaattgcgggatgggaccaactactttggatgtccgtgtttcttgtttttcctttaattttgcttatggtgacaatatatagataatatatattggcatc

SEQ ID NO: 57 - DNA, 617 bp, Picornaviridae sp.
  misc_feature 1..617: note = isolate thr173pic1 genomic sequence.1
  source 1..617: mol_type = genomic DNA
gggccccctttccgtccaagtcgcggacgttaaatgcggcacggcagtgcctcggtgctgtcctgctgctagtggcggcaaccctctcccttactgtatgaatgagtttgtgtgaatgaaatccgtgtggatccccagcttttgggtctcaaacagaacacacggtggcggcccatgttccaccatagaggctaccttagtagctttaagtggaatctttgagtgagcaggtatcgcagccgttaaagactggtattcccggtgtagaggcgagcgcaggtaactgcggtctacattgtgtgtgagccagtacccgcaaggggtagctcaaagtggaaacttaaggtgaaccggtaagcgctattgtgacgcatgttggtcccaaggtgcgatgatagacatgttgcgcaggtaccccttaaatgggatctgagcgtaagctaattagtcactgtcgtcgcgctgaccttttctctttgtcttaattattgttaacacaatatcattgtttgttgtgtgtttttgctcgcaaggtcactagcagtcttacttaaaacactcaagacggactttttgtataattcaattagtgcttatttcaattctaccttctacag

SEQ ID NO: 58 - DNA, 618 bp, Human parechovirus 1
  misc_feature 1..618: note = isolate 121Chzj091, complete genome.1
  source 1..618: mol_type = genomic DNA
cacgagttagaaatacatactaacactatgctttaagcgtccttgctccactcatcttattgcctggtccccactagtcgaaggtatctagcaataagatgagtggagcaaggacgcttaaagcatagtgttagtatgtatttctaactcgtgttcaacgcgaggtggcagatggcgtgccataactctattagtgagataccacgcttgtggatcttatgctcacacagccatcctctagtaagcttgcaaggcgtctgatgacgtgtgggaacttattggaaataacagtttgctgcaaagcatcctattgccagcggatcaacacctggtaacaggtgcctctggggccaaaagccaaggtttaacagaccctctaggattggttcacacctgaactattatggaagatatttagtacctaccgatttggtagttaggcaagcactagttgtagggcccacgaaggatgcccagaaggtacccgtaggtaacaagtgacactatggatctgatctggggccaactacctctatcctggtgagttggttaaaaaacgtctagtgggccaaacccaggggggatccctggtttccctttaaatttaatacaaccaat

SEQ ID NO: 59 - DNA, 618 bp, Human rhinovirus 11
  misc_feature 1..618: note = complete genome.1
  source 1..618: mol_type = genomic DNA
ttcaaactggatccaggttgttcccacctggatctcccacgtggagttgtactctattattccggtaattttgtatgccagttttatctccccttcccttttgtaacttagaagatgaactcaccgaccaataggtggcatttatccagaatgtcaaaggtcaagcaccttctgtttccccggtcaaagttgatatgctccaacagggcaaaaacatctgcgatcgttatccgcaaagcaactacgcaaagcctagtatcacttttgagagtatgtggttggtcgctccactataaacccaatagtagacctggcagatgaggctagaagtcccccactggtaacagtgttctagcctgcgtggctgcctgcgtgcctctggtaggcacgaagccatatatttgacaaggtgtgaagagccccgtgtgcttgctttgagtcctccggcccctgaatgtggctaaccttaaccctgcagctagtgtgcataatccaatgcatggctagtcgtaatgagcaattgcgggatgggaccaactactttgggtgtccgtgtttctcatttttccttttatttgcttatggtgacaatatatataatacatatatattggcatc

SEQ ID NO: 60 - DNA, 620 bp, Picornavirus HK21
  misc_feature 1..620: note = polyprotein gene, complete cds.1
  source 1..620: mol_type = genomic DNA
aaacgggaggatcggctttggcttatcctcttaatagtctacaaaactgggctgactggtgggggagctactagatccgggagaggactagttaccccgcgtaacttccctttttgtcactccctccacctaccccttccctgtcccttagactcttaagtaggtgtgcaggcctggccccccggaaatgggcaaatcggacgtttgcgtgtagggtcgttctgaaaggtggggcccactccaccgtagtaggatcttcctgtttcacgtttaaacctctccgggcaggtatcgctagacactaggctgtataggatggcacgcacttaggtttcgcaccttcctagtgcgccaagatcccgcttttgagctcaagtacatggttctttgtaagatgtctaaccagaggaggtggtgctgaaatattgcaagccactctggcgaacgtccactgcattgcctggaacaggctctctagcgccctccactggtagcgcggtggtgggttagtaggatacctatatggacaggggatgcgggaatacccctcactagctagtgactggttgatcgactggcggcggatccagtgatacttgcataatccgcagacttgggag

SEQ ID NO: 61 - DNA, 620 bp, Human parechovirus 5
  misc_feature 1..620: note = strain HPeV5-G001-19, complete genome.1
  source 1..620: mol_type = genomic DNA
gggtcggctggtcaataaaagcctcacatataactaacatctaagacaataatgtacaaccttgtgcctggtccccaccggtcgaaggcatctagcagtaagataggtggaacaaggacgcttaaagcacaaagacaacctatttttctaacccgcaaattattgtggggtggtagatggcgtaccataattctactagtgagataccatgcttgtggatcttatgctcacacagccatcctctagtaagtttgcaaggcgtctggtgacgtgtgggaacttattggaaataacatcttgctgcaaggcatccattagccagcggaataacacctggtaacaggtgcctctggggccaaaagccaaggtttagcagaccctaatggattggttcaaacctgggatgttgtggaagatacttagtacctaccgatctggtagcaatgcaaacactagttgtaaggcccacgaaggatgcccagaaggtacccgtaggtaacaagagacactatggatctgatttggggccaactacctctatcctggtgagttggttaaaaaacgtctagtgggccaaacccaggggggatccctggtttcttttacttatcactgtcatt

SEQ ID NO: 62 - DNA, 621 bp, Human rhinovirus 84
  misc_feature 1..621: note = strain ATCC VR-1194, complete genome.1
  source 1..621: mol_type = genomic DNA
ttaaaacagcggatgggtatcccaccatccggcccactgggcgtagtacactggtattctgtacctttgtacgcctgtttgccgcccctcccccttttattaccacatttgtggtcgctgcaacgttagaagattttaaagtagtgcaataggaagcatcacaaccagtggtgttatgcacaaacacttctgtttccccggagcgaggtatagacggtccccactgtcaaaagcctttaaccgttatccgccaaccaactacgagacagctagtaatgccctgttctcctgcaaggcgttcgatcagacagatttcccctctgttagtctggtcgatgaggctagaagtaccccacaggtaactgtgttctagcctgcgtggcggccagcccagcttctgctgggacgcctttcaagagacatggtgtgaagactcaattgtgcttggttgtgagtcctccggcccctgaatgcggctaaccttaaacccggatccatgctatgcaaaccagcatagttatggtcgtaatgggcaactctgggatgggaccgactactttgggtgtccgtgtttccatttttactttttgtgtcatttatggttacaattaagttgtaacc

SEQ ID NO: 63 - DNA, 621 bp, Human rhinovirus 20
  misc_feature 1..621: note = strain ATCC VR-1130, complete genome.1
  source 1..621: mol_type = genomic DNA
ttaaaactggatccaggttgctcccacctggatctcctacatggagttgtactctattattccggtaattttgtacgccagttttatctccccctacccccttacgtaacttagaagttttacacacaccgaccaataggtggtatttacccaaaataccaaaggtcaagcacttctgttaccccggtcaaaattgatatgctccaccagggcaaaaacaattgcgatcgttatccgcaaagcaactacgcaaagcctagtaccatttttgatgatgtgtggttggtcgttccactatgaacccgatagtagacctggcagatgaggctagaaattccccactggcaacagtgttctagcctgcgtggctgcctgcgtaccccctgtgggtacgaagccatacatttgacaaggtgtgaagagccccgtgtgcttgctttgagtcctccggcccctgaatgtggctaaccttaaccctgcagctagtgtgtacaatccagtacatagctagtcgtaatgagcaattgcgggatgggaccaactactttgggtgtccgtgtttcttgtttttctttcatatttgcttatggtgacaatatatataacacatatattggcacc

SEQ ID NO: 64 - DNA, 625 bp, Bovine rhinitis B virus
  misc_feature 1..625: note = isolate TCH8 polyprotein gene, complete1
  source 1..625: mol_type = genomic DNA
gtccagctacggatccagtttagacgttcgaagatgtacggttttgctgctttcacagagtaaagcagatagaggttctggactggcaaactttacctcgaaacacgcccgtttttctgctgtgttttacagactgtcctgccacacttgtggcggcttgtgacactgtgaacatagtgagactgaccaagacaacagtttcaagtggtgaacatcgaacgtctaaactggatccgtagctggacatgttagggcaagggtctcccccctggtaacaggagccttgctggccaaaagccccgctctctgagcctagcatgttgtcgaccccggactgttcagtttagttagtacatgggattcacttgtcatggttcctctgaactcggtctctagtgcggcagcctaaggatgccctccaggtaccccgaggtaacaagcgacactcgggatctgaggaggggactactttacgtggtttaaaaaacgtctaagctgccacggtgaccagaggctggcacctttcactttttaaacacactactgactacaattgaagtgataacggttttacagactttcaaactagttacacaagtactgtttttccaacacacacaatttt

SEQ ID NO: 65 - DNA, 630 bp, Human rhinovirus 37
  misc_feature 1..630: note = complete genome.1
  source 1..630: mol_type = genomic DNA
tttaaacagcggatgggtatcccaccatccgacccactgggtgtagtactctggtattttgtacctttgtacgcctgttgttcctaatgtacccaccctaaaacttcctacccaagtaacgttagaagtttcatcaacaagtacaataggaagcatcacatccagtggtgttttgtacaagcacttctgtttccccggagcgaggtataggctgtacccactgccgaaagcctttaaccgttatccgccaaccaactacgtaaaagctagtatcatcatgttttaaaataggcgttcgatcaggtggatcccccctccactagtttggtcgatgaggctaggaactccccacgggtgaccgtgtcctagcctgcgtggcggccaacccagcttctgctgggacgcctttttatggacatggtgtgaagactcgcatgtgcttggttgtgactcctccggcccctgaatgcggctaaccttaaccccggagccctgtgttgcaatccagtaacattagggtcgtaatgagcaatttcgggacgggaccgactactttgggtgtccgtgtttctcatttttcttattattgtcttatggtcacagcatatatataacgtatatactgtgatc

SEQ ID NO: 66 - DNA, 635 bp, Human enterovirus C105
  misc_feature 1..635: note = strain PER153 polyprotein gene, complete1
  source 1..635: mol_type = genomic DNA
cccctaggatccactggatgttagtacactggtatcgcggtacctttgtacgcctgttttatatccccttccccgcaactttagaagtatcaaaagtaccgctcaatagccgccacgctcccagtgtggtttcgagcaagcacttctgttttcccggttgcgtcccatatgctgtgcaaacggcaaaaagggacaatatcgttacccgcttgtatactacgggaaacctagtaccgccattgattgtattgagggttgcgctcatcacctttcccggtgtagctcaggctgatgaggctcagaatcccccacaggtaactgtgtctgagcctgcgttggcggcctgccctcgccttatggcgtgggacgctcactacatgacatggtgcgaagagtctactgtgctatacaagagtcctccggcccctgaatgtggataatcctaaccactgatcccacgtacgcaaaccagcgtgtagtgggtcgtaacgcgcaagtcggtggcggaaccgactactttgggtgaccgtgtttcctttattacctattgaatgtttatggtgacaattgtttgattcagttgttaccatttgctacattcaataacctagtgtcaaaccgattgaattgctaca

SEQ ID NO: 67 - DNA, 636 bp, Turdivirus 2
  misc_feature 1..636: note = strain 10717, complete genome.1
  source 1..636: mol_type = genomic DNA
cctcggtccctctttccgtcgccgcccacgacgttaaatgcggtgttgtggtgcttaggtgccacaccactgctatttgggtccccctttcccctatatatgtttgtttgtttatttcaatttcttgaggattggcacctccttatgccaaatctaaatcgtggaggatcccaggctttctggtctttaacagaactccacgtccaggtcatagaaactggttggtaggctgcctgagtagtccatttgctagtagtcccttgtgaacagggtggctcccgtttactgctggtattcccggtgtaggtcgccatggtggtaacaccatcctgcattgtgtgtgaaccagtaccgcaaggatagcaaggtatgaacacttgtggacgaaatggtaagtgatcaattcactttcatggccggaaggtcacgtggcaatcatgccacccaggtaccctcctctgggaggatctgagggtgggctaagcagaccctgccatgtggctgaacttttcccttattgttttactttgtaacatttatagttgtgttagtgatttgtgtgttgtgcccttgtgagctatatccagtataagttcgcagctagaagttaatccttcgacatcggctgtattggaa

SEQ ID NO: 68 - DNA, 636 bp, Human parechovirus 1
  misc_feature 1..636: note = strain VEN/2018-23121B, complete genome.1
  source 1..636: mol_type = genomic DNA
ccctttcccagccctgagacggctggctaataaaagtctcacctgtaactaacatctaagacaatcatgtataaccttgtgcctggtccccaccagtcgaaagtatcttgcaataagataggtggatcaaggatgcttaaagcacaaagacaattaacttttctaacccacaagttgttgtggggtggtagatggcgtaccataactctactagtgagataccacgcttgtggaccttatgctcacacagccatcctctagtaagtttacaaggcgtctggtgatgtgtgggaacttattggaagcaatattttgccgaaaggcatccattagccagcggaataacacctggtaacaggtgcctctggggccaaaagccaaggtttagcagaccctaatggattggttcaaacctggaatattgtggaaaatatttagtacctacggatctggtagcagtgtaaacactagttgtaaggcccacgaaggatgcccagaaggtacccgtaggtaacaagagacactatggatctgatctggggccagctacctctatcttggtgagttggttaaaaaacgtctagtgggccaaacccaggggggatccctggtttcctttacttaaccgggatcact

SEQ ID NO: 69 - DNA, 636 bp, Human enterovirus C105
  misc_feature 1..636: note = strain USA/OK/2014-19362 polyprotein gene,1
  source 1..636: mol_type = genomic DNA
cccctaggatccactggatgtcagtacactggtatcgtggtacctttgtacgcctgttttatacccccttccccgcaactttagaagcatcaaaagcaccgctcaatagtcaccacacccccagtgtggtttcgagcaagcacttctgttttcccggttgcgtcccatatgctgtgcaaacggcaaaaagggacaatatcgttacccgcttgtatactacgggaaacctagtaccaccattgattgtgttgagagttgcgctcatcacctttccccggtgtagctcaggccgatgaggctcagaatcccccacaggtgactgtgtctgagcctgcgttggcggcctgccctcgccttatggcgtgggacgcttgatacatgacatggtgcgaagagtctactgtgctatgcaagagtcctccggcccctgaatgtggctaatcctaaccactgatcccacgcacgcaaaccagtgtgtagtgggtcgtaacgcgcaagtcggtggcggaaccaactactttgggtgaccgtgtttcctttattacttattgaatgtttatggtgacaattgtttgattcagttgttgccattctctacattcatttacccagcatcaaaccaattgaactgttaca

SEQ ID NO: 70 - DNA, 637 bp, Turdivirus 2
  misc_feature 1..637: note = strain 007167, complete genome.1
  source 1..637: mol_type = genomic DNA
cctcggtccctctttccgtcgccgcccacgacgttaaatgcggtgctgtggtgcttaggtgccacaccactgcggtttgggttcccctttcccctatatatgtttgtctgtttatttcaaattcttgaggattggcacctccttatgccaaatctaaatcgtggaggatcccaggctttctggtctcaaacagaactccacgtccaggtcataggaactggttagtaggctatttgagtagtccgtttgttagtaatgccttgtgaacagggtggctcccgtttactgctggtattcccggtgcaggttgccgtggtggtgacaccatcctgcattgtgtgtgaaccagtaccgcaaggatagcaaggtatgaacacttatgggtgaaataataagtgactaatccactttcatggccggaaggtcatgtggcaatcatgccacccaggtaccctcttaggaggatctgagggtgggctaagcagaccctgccatgtggctgaaattttctattattttattccataacatttatagctatataggtgttttgtgtgttgtgctctccttttccgagttatttccagtactagttcgcagctagaagtttaactcttcgatatcggctacattggaa

SEQ ID NO: 71 - DNA, 637 bp, Human enterovirus C105
  misc_feature 1..637: note = polyprotein gene, complete cds.1
  source 1..637: mol_type = genomic DNA
ttcccacccctaggatccactggatgttagtacactggtatcacggtacctttgtatgcctgttttataacccctcccctgcaactttagaagtatcaaagacactgctcaatagccgccacacctccagtgtggtttcgagcaagcacttctgttctcccggttgcgtcccatatgctgtgcaaacggcaaaaaggggcaatatcgttacccgcttgtatactacgggaaacctagtaccatcattgattgtgttgagggttgcgctcatcacccttccccggtgtagctcaggtcgatgaggctcagaatcccccacaggtgactgtgtctgagcctgcgctggcggcctgccctcgcctcacggcgtgggacgctcaatacatgacatggtgcgaagagtctactgtgctatacaagagtcctccggcccctgaatgtgtcctaaccactgatcccacgtacgcaaaccagtgtatagtgggtcgtaacgcgcaagtcggtggcggaaccaactactttgggtgaccgtgattcccttattacttattgaatgtttatggtgacaattgtttgattcagttgttaccatttaccacattcatcaacctagtgtcaaaccgattaaactgctaca

SEQ ID NO: 72 - DNA, 638 bp, Human parechovirus 2
  misc_feature 1..638: note = strain LPZ04-2008 polyprotein gene, complete1
  source 1..638: mol_type = genomic DNA
tctaggagagtccctttcccagccagaggtggctggttaaacaatacctaatgtaacaaaacatctaagactttgtaacccatacctggtctccacccgttgaaggcaactagcaataaaataggtgggcttagacgcttaaagtatggtgtaaacaatcttttctagcctgtgcctagcatagggtggcagatggcgtgccataactctattagtgagataccacacttgtggaccttatgctcacacagccatcctctagtaagtttgtgaggcgtctgatgacgtgtgggaacttattggaaataacagtttgctgaaaagcatctcattgccagcggatcaacacctggtaacaggtgcctctggggccaaaagccaaggtttaacagaccctttgagattggttcaaacctgaattgttatggaaaatatttagtacctgctgatttggtagcaatacaaacactagttgtaaggcccacgaaggatgcccagaaggtacccgtaggtaacaagtgacactatggatctgatttggggccaactacctctatcttggtgagttggttaaaaaacgtctagtgggccaaacccaggggggatccctggttttcttttattgtatcactatcact

SEQ ID NO: 73 - DNA, 644 bp, Human parechovirus 4
  misc_feature 1..644: note = clone V2A polyprotein gene, partial cds.1
  source 1..644: mol_type = genomic DNA
ggatagatagtccctttcccagccttgaggcggctggtcaataaaagcctcaaacgtaactaacatctaagaagatttgtaaaccctatgcctggtctccactattcgaaggcaacttgcaataagaagagtggaattaagacgcttaaagcatagtgatagttttcttttctaacccacattcgtgtggggtggcagatggcgtgccataactctaatagtgagataccacacttgtggaccttatgctcacacagccatcctctagtaagtttatgagacgtctggtgacgtgtgggaacttattggaaacaacattttgctgcaaagcatcctattgccagcggaacaacacctggtaacaggtgcctctggggccaaaagccaaggtttgacagaccctttaggattggttctaaacctgaaatgttgtggaaaatatttagtacctgctgatctggtagtaatgtaaacactagttgtaaggcccacgaaggatgcccagaaggtacccgtaggtaacaagtgacactatggatctgatctggggctgactacctctatcttggtgagttggttaaaaaacgtctagtgggccaaacccaggggggatccctggtttcttttattttaacacagctaat

SEQ ID NO: 74 - DNA, 647 bp, Human parechovirus
  misc_feature 1..647: note = strain USA/TN/2015-OB2038, complete genome.1
  source 1..647: mol_type = genomic DNA
cttaggagagtccctttcccagccttgaggcggctggccaataaaagcctcaaatgtaacaaacatctaagaagattgtgtggaaccctatgcctggtctccactattcgaaggcagcttgcaataagaagagtggaattaagacgctcaaagcatagagacaattttcttttctaacccatacttgtatggggtggcagatggcgtgccataactctaatagtgagataccatgcttgtggaccttatgctcacacagccatcctctagtaagtttgtgagacgtctggtgacgtgtgggaacttattggaaacaacattttgctgcaaagcatcctattgccagcggaacaacacctggtaacaggtgcctctggggccaaaagccaaggtttaacagaccctttaggattggttctaaacctgaaatgttgtggaagacacttagtacctgccgatctggtagtaatacaaacactagttgtaaggcccacgaaggatgcccagaaggtacccgtaggtaacaagtgacactatggatctgatctggggccaactacctctatcttggtgagttggttaaaaaacgtctagtgggccaaacccaggggggatccctggtttccttttattttatcattactaat

SEQ ID NO: 75 - DNA, 648 bp, Human parechovirus 14
  misc_feature 1..648: note = clone V10C polyprotein gene, partial cds.1
  source 1..648: mol_type = genomic DNA
ggaggatagagtccctttcccagccttgaggcggctggtcaataaatgcctcaaatgtaactaacatctaagattaacttagacaaccctatgcctggtctccgctagtcgaaggcgccttgcaataagacgagtggaacaaagacgcttaaagcatagtgaaaatatacatttctaacctgtggcctccacagggtggcagatggcgtgccataactctattagtgagataccacacttgtggaccttatgctcacacagccatcctctagtaagtttgtaagacgtctgatgacgtgtgggaagttattggaagtaacaatttgccgtaaggcatcctagagccagtggattaacacctggtaacaggtgcccctggggccaaaagccaaggtttaacagaccctttaggattggttcaaacctgggttgttatggaagatatttagtacctgctgatttggtagtaatacaaacactagttgtaaggcccacgaaggatgcccagaaggtacccgtaggtaacaagtgacactatggatctgatttggggttgactacctctgtcctggtgagtcaattaaaaaacgtctagtgggccaaacccaggggggatccctggtttccttttattttattacaaccatt

SEQ ID NO: 76 - DNA, 649 bp, Human parechovirus 1
  misc_feature 1..649: note = isolate 450343, complete genome.1
  source 1..649: mol_type = genomic DNA
ctctaggagagtccctttcccagccctgaggcggctggtcaataaaagcctcaatcgtaactaacatctaagaatattatttcaaccccatgcctggtctccactagttgaaggcaacttgcaataaaatgagtggaaacaagacgcttaaagcatggtgtaaattaccttttctaacctacactttgtgtggggtggcagatggcgtgccataattctattagtgagataccacgcttgtggaccttatgctcacacagccatcctctagtaagtttgcaagatgtctggtgacgtgtgggaacttattggaaacaacattttgctgcaaagcatcctactgccagcggaataacacctggtgacaggtgcctctggggccaaaagccaaggtttaacagaccctttaggattggttttaaaacctgaaatgttgtggaagatacttagtacctgccgatctggtagtagtgcaaacactagttgtaaggcccacgaaggatgcccagaaggtacccgtaggtaacaagtgacactatggatctgatctggggccaagtacctctatcttggtgacttggttaaaaaacgtctagtgggccaaacccgggggggatccctggtttccttttattttaccaatgccact

SEQ ID NO: 77 - DNA, 651 bp, Human parechovirus 8
  misc_feature 1..651: note = clone V8D polyprotein gene, complete cds.1
  source 1..651: mol_type = genomic DNA
ctggaggatagagtccctttcccagccttgaggcggctggtcaataagagcctcaaatgcaacaaacatctaagactattgagaacaaccctgtacctggtccccactagtcgaaggcatctagcaataagatgagtggaatatgggcgcttaaagtacagagtcaatgatcttttctagcctacgcttatgcgtggggtggcagatggcgtgccataaccctattagtgagataccacacttgtggaccttatgctcacacagccatcctccagttagtttgtaagatgtctggtgatgtgtgggaacttgttggaaataacattttgctgtaaggcattcattagccagcggataaaacacctggtaacaggtgcctctggggccaaaagccaaggtttaacagaccctaatgaattggttcaaacctggaatgttatggaagatacttagtacctgctgatctggtagtaatgcaaacactggttgtaaggcccacgaaggatgcccagaaggtacccgcaggtaacaagagacactgtggatctgatctggggctagttgcctctttaaggtgaactagttaaaaaacgtctagtgggccaaacccaggggggatccctggtttcctttattatttgaatgttcatc

SEQ ID NO: 78 - DNA, 653 bp, Human parechovirus 5
  misc_feature 1..653: note = strain CH-ZJ1, complete genome.1
  source 1..653: mol_type = genomic DNA
atttgctgagtttctctaggagagtccctttcccagccttgaggtggctggttaataaaacctcaagcgtaactaacatctaagacaaatttatcaaccccatgcctggtccccactagtcgaaagcaacttgcaataagatgagtggaacaaggatgcttaaagcatggtgcaaataaacttttctaacccatttacttggggtggcagatggcgtgccataactctattagtgagataccacgcttgtggaccttatgctcacacagccatcctctagtaagtttgtaagacgtctgatgacgtgtgggaacttattggaatctacaatttgccgaaaggcatcctactgccagcggaacaacacctggtaacaggtgcccctggggccaaaagccaaggtttaacagaccctttaggattggtgaaaacctgaattgtagtggaaaatatttagtacctgctaatttggtagtagtgcaaacactagttgtaaggcccacgaaggatgcccagaaggtacccgtaggtaacaagtgacactatggatctgatctggggctggctacctctatcttggtgagtcggttaaaaaacgtctagtgggccaaacccaggggggatccctggtttccctttatatcattatagct

SEQ ID NO: 79 - DNA, 654 bp, Parechovirus A
  misc_feature 1..654: note = isolate HPeV-1/CMRHP48/CMR/2014 polyprotein gene,1
  source 1..654: mol_type = genomic DNA
ttgttacagttgaggcttccctttcccagccctgaggcggctggtcaataaaagcctcaactgtaacaaacacctaagattattacaataaccccatgcctggtctccactagttgaaggcaacttgcaataaaataagtggaaacaagacgcttaaagcatggtgtgaattaacctttctaacctgcactttgtgtggggtggcagatggcgtgccataattctattagtgagataccacgcttgtggaccttatgctcacacagccatcctctagtaagtttgtgagacgtccggtgacgtgtgggaacttattggaaacaacattttgctgcaaagcatcctattgccagcggaataacgcttggtaacaagcgcctctggggccaaaagccaaggtttaacagaccctttaggattggttcggaacctggaatgttgtggaagatacttagtacctgctgatctggtagtaatgcaaacactagttgtaaggcccacgaaggatgcccagaaggtacccgtaggtaacaagtgacactatggatctgatctggggccaggcacctctatcttggtggcctggttaaaaaacgtctagtgggccaaacccgggggggatccccggtttccttttatttgttcaaagtcact

SEQ ID NO: 80 - DNA, 663 bp, Human parechovirus 5
  misc_feature 1..663: note = isolate 174Chzj98, complete genome.1
  source 1..663: mol_type = genomic DNA
gtacattagatgcgtcatctgcaactttagtcaataaattacctccaatgtcattaccaacattccctaccttttcactaacacctaagacaacaagtacctatgcctggtctccactattcgaaggcaacttgcaataagaagagtggaattaagacgcttaaagcatagagctagttatcttttctaacccacaaagttttgtggggtggcagatggcgtgccataactctattagtgagataccatgcttgtggatcttatgctcacacagccatcctctagtaagttgataaggtgtctggtgatatgtgggaactcacatgaaccattaatttaccgtaaggtatcctatagccagcggaatcacatctggtgacagatgcctctggggccgaaagccaaggtttaacagaccctataggattggtttcaaaacctgaattgatgtggattgtgtatagtacctgttgatctggtaacagtgtcaacactagttgtaaggcccacgaaggatgcccagaaggtacccgtaggtaacaagtgacactatggatctgatctggggccagctacctctatcatggtgagttggttaaaaaacgtctagtgggccaaacccaggggggatccctggtttccttttacctaatcaaagccact

SEQ ID NO: 81 - DNA, 664 bp, Human parechovirus 1
  misc_feature 1..664: note = isolate 550163, complete genome.1
  source 1..664: mol_type = genomic DNA
ccgcattgctgagcttctctaggagagtccctttcccagccttgaggcggctggtcaataaaagcctcaattgtaacaaacacctaagcttatcatacaagccccatgcctggtctccactagtcgaaggcaacttgcaataagatgagtggaaacaagacgcttaaagcatggtgtaaattagcttttctaacccacatattgtgtggggtggcagatggcgtgccataattctattagtgagataccacgcttgtggaccttatgctcacacagccatcctctagtaagtttgtgagacgtctggtgacgtgtgggaacttatcggaaacagtattttgctgcaaagcatcctattgccagcgggacaacacctggtaacaggtgcctctggggccaaaagccaaggtttaacagaccctttaggattggtttaaaacctgaaatattgtggaagatacttagtacctactaatctggtagtagtgcaaacactagttgtaaggcccacgaaggatgcccagaaggtacccgtaggtaacaagtgacactatggatctgatctggggccaggtacctctatcttggtgacctggttaaaaaacgtctagtgggccaagcccgggggggatccccggtttccttttattttatcaatgccact

SEQ ID NO: 82 - DNA, 667 bp, Human parechovirus 1
  misc_feature 1..667: note = strain 16-G10, complete genome.1
  source 1..667: mol_type = genomic DNA
gtaataatcttagatgtttgttacagttgaggcttttattgaccagccgcctcagggctgggaaagggactcaactgtaacaaacatctaagattattacattaaccccatgcctggtctccactagttgaaggcaacttgcaataaaatgagtggaaacaagacgcttaaagcatggtgtaaattaattttctaacccacattaagtgtggggtggcagatggcgtgccataactctactagtgagataccatgcttgtggaccttatgctcacacagccatcctctagtaagtttgtgagacgtctggtgacgtgtgggaacttattggaaacaacaccttgctgtaaagcatcctattgccagcggaacaacacctggtaacaggtgcctctggggccaaaagccaaggtttaacagaccctttaggattggttctgaacctgagatgttgcggaagatatttagtacctgccgatctggtagtaatgcaaacactagttgtaaggcccacgaaggatgcccagaaggtacccgtaggtaacaagagacactatggatctgatctggggtcaggtacctctatcttggtgacctggttaaaaaacgtctagtgggccaaacccgggggggatccccggtttccttttactttatcaatgccact

SEQ ID NO: 83 - DNA, 668 bp, Human parechovirus 1
  misc_feature 1..668: note = isolate SH1, complete genome.1
  source 1..668: mol_type = genomic DNA
taccccgacttgctgagctcctctaggagagcccctttcccagccttggggcggctggtcaataaaagcctcaaatgtaactaacatctaagatagattataaccaccctatgcctggtccccactagtcgaaagcacctggcaataagacgagtggaataaggacgcttaaagcatagtgttagcatacacttctaacttgtgattttcacaaggtggcagatggcgtgccataactctatcagtgagataccacgcttgtggaccttatgctcacacagccatcctctaataagtttgtaagacgtctgatgacgtgtgggaacttattggaaacaacaatttgctgcaaagcatcctactgccagtggactaacacctggtaacaggtgcccctggggccaaaagccaaggtttaacagaccctttaggattggtatatacctgagttgttgtggaaaatacttagtacctactgatttggtagccggacaaacactagctgtaaggcccacgaaggatgcccagaaggtacccgtaggtaacaagtgacactatggatctgatctggggtcgaccacccctatccaggtgggtcgattaaaaaacgtctagtgggccaaacccaggggggatccctggtttccttttattttatcacagtcact

SEQ ID NO: 84 - DNA, 669 bp, Human parechovirus 5
  misc_feature 1..669: note = gene for polyprotein, genomic RNA, strain1
  source 1..669: mol_type = genomic DNA
taccccgacttgctgagcttctctaggagagcccctttcccagccctgaggcggctggtcaataaaagcctcacacgtaactaacatctaagacaatcttatacaaccttgtgcctggtccccaccagtcgaaggcatctagcaataagataggtggaacaaggacgcttaaagcacaaagacaattaacttttctaactcacaatttgttgtggggtggtagatggcgtaccataattctattagtgagataccacgcttgtggaccttatgctcatacagccatcctctagtaagtttgtaaggtgtctggtgatgtgtgggaacttattggaaacaacattttgccgcaaggcatccattagccagcggaataacacctggtaacaggtgcctctggggccaaaagccaaggtttaacagaccctaatggattgatttaaatctggaatgttgtggaatatatttagtacctgctgatctggtagcaatacaaacactagttgtaaggcccacgaaggatgcccagaaggtacccgtaggtaacaagtgacactatggatctgatctggggctggatacctctatcttggtgatccagttaaaaaacgtctagtgggccaaacccaggggggatccctggtttccttttattttattactgccatt

SEQ ID NO: 85 - DNA, 672 bp, Human parechovirus 3
  misc_feature 1..672: note = isolate 651689, complete genome.1
  source 1..672: mol_type = genomic DNA
cgtcgggccttataccccgacttgctgagcttctctaggagagtccctttcccagccagaggtggctggtcaaataatacctactgtaactaaacatctaagaaataacaaccacacacctggtctccaccagccgaaagcaactagcaataaggtgggtggatatagacgcttaaagtgtgttgtgcattttcttttctagcctgtgttttacacagggtggcagatggcgtgccataactctaatagtgagataccacgcttgtggaccttatgctcacacagccatcctctagtaagtttgtaagacgtctgatgacgtgtgggaacttgttggaaatagcagtttgctgcaaagcatcccattgccagcggatcaacatctggtgacagatgcctctggggccaaaagccaaggtttaacagaccccttgggattggttcaaacctgaactgctatggaaagcacttagtacctgctgatttggtagtaatgcaaacactagttgtaaggcccacgaaggatgcccagaaggtacccgtaggtaacaagtgacactatggatctgatctggggccaactacttctatctaagtgagttggttaaaaaacgtctagtgggccaaacccaggggggatccctggtttcctctcaattttaaacagtcact

SEQ ID NO: 86 - DNA, 673 bp, Avisivirus AVE052/AsV
  misc_feature 1..673: note = complete genome.1
  source 1..673: mol_type = genomic DNA
gagctaatggggtccctatcttcatagccaagatccatagtggctcaggaaatagaggggggttcccagggtggattttccgaatcttagatttcggatatccgccttgggacaccccctttccccagccatgggttaaatggcccttcaccaggttaggtgctgtctaggcttccagtaaagaagtcactcgagctacgaacaaatcctaagagggaatggtggttagccccgtccactgggtgtctttcacccactttcagtggatcaatccaccccaactcccccctctatttcctgagccactatggatcttggctatgaagatagggaccccattagctccagtgccaagggatctcccccctcgtaagaggtgcccttgggcccaaaaggctagttggcaaggtgaagtgaaggaagctgctaacgtggtgaccttaagcggatcctgaagctgaccttggagtgaaaccctattggatggctgcgtgaagttgtggaggtggaaatggagaaagttggccgcttgtgagtagatgcccagaaggcataaggctgatctggggccagtgactataccgttccggtaaacctggtataaaaaccatgaaagcaaacgggttaaatttctctatttttattttctcttactgcagtgactacaggcaaa

SEQ ID NO: 87 - DNA, 674 bp, Human parechovirus 1
  misc_feature 1..674: note = isolate SH401, complete genome.1
  source 1..674: mol_type = genomic DNA
ggccttataccccgacttgccgagtttctctaggagagtccctttcccagccgtgaggtggctggtcaataaaaacctcaaatgtaactaacatcaaagaaaaatcactcaaccccatgcctggcccccgctagtcgaaagcaacttgcaataagatgagtggaccaagggcgcttaaagcatggtgtcagcaatcttttctaacccatgtttcacatggggtggcagatggcgtgccataactctattagtgggataccacccttgtggaccttatgcccacacagccatcctctagtaagtttgtatgacgtccgatgacgtgtgggaacttattggaagcaacaatttgccgaaaggcatcctattgccagcggattaacacctggtaacaggtgcccctggggccaaaagccaaggtttaacagaccctttaggattggtttaaacctgaattgttgtggaagatatttagtacctgctgatttggtagtaatgcaaacactagttgtaaggcccacgaaggatgcccagaaggtacccgtaggtaacaagtgacactatggatctgatctggggctgactaccactatcctggtgagtcagttaaaaaacgtctagtgggccaaacccaggggggatccctggtttctttttattttataactgtcaat

SEQ ID NO: 88 - DNA, 677 bp, Human parechovirus 3
  misc_feature 1..677: note = isolate CHW014 polyprotein gene, complete cds.1
  source 1..677: mol_type = genomic DNA
ggccgtcgggccttataccccgatttgctgagcttctctaggagagcccttttcccagccagaggtggctggttaaacaatacctattgtaacaaaacatctaagacataacaaccgtacacctggtctccactggccgaaggcaactagcaataaggtaggtgggttcagacgcttaaagtgtgttgtatatattcttttctaacctgtgttttacacagggtggcagatggcgtgccataaccctaatagtgagataccacgcttgtggaccttatgctcacacagccatcctctagtaagtttgtaagacgtctgatgacgtgtgggaacttgttggagataacattttgctgcaaagcatcccattgccagcggatccacatctggtaacagatgcctctggggccaaaagccaaggtttaacagaccctttgggattggttcaaacctgaattgttatggaagacatttagtacctgctgatttggtagtagtgcaaacactagttgtaaggcccacgaaggatgcccagaaggtacccgtaggtaacaagtgacactatggatctgatctggggccaactacctctatctaggtgagttggttaaaaaacgtctagtgggccaaacccaggggggatccctggtttccttttttaaatttgaataatcact

SEQ ID NO: 89 - DNA, 679 bp, Marmot sapelovirus 2
  misc_feature 1..679: note = strain HT6, complete genome.1
  source 1..679: mol_type = genomic DNA
gggaaatacggggggggattacccccctcccgtatttccccctgttgcccgggggtagtgaacgatggatctacggatcctttgttcacagggccaaggttcaagcccacttttgtgagaagcatgctttactaggctatgggttgagtggcccataggcaaccctatgaagaggctacactcactacatccgccaacaggcccaggcgtatgtgggcctataagaaatgtacgttcgtccgcttatggtgcctaatccataggcatctaggacaagtacttctgtttccccggtcacgaggaatatgctgtacccacggcagaagccagacatgatcgttacccgactccgaactgtgcgaaacctagtaccttcaagtgaaacagagatcattgatccggggtgaccctgaccccagaaactcatgatgggtgtcgccgttccgacaggggagaccctgggcgtcgccgcgctggcatgagggcccattagggcatgatcaatgcggaccttgaggcgaagagtctagtgcgcttcggtttattcctccaggcccctgaatgcggctaatcctaaccccggagcgtatcacaccaatccaggtgctggtgcgtcgtaatgcgtaagtctgggatggaaccgactactttgggtgtcctgtgtttctaatttctcttg

SEQ ID NO: 90 - DNA, 680 bp, Human parechovirus 1
  misc_feature 1..680: note = isolate K150-93, complete genome.1
  source 1..680: mol_type = genomic DNA
cgtcgggccttacaccccgacttgctggacttctctaggagagtccctttcccagccctgaggcggctggtcaataaaagcctcaattgtaacaaacatctaagcttattacaataaccccatgcctggtctccactagttgaaggcaacttgcaataaaatgagtggaaatgagacgcttaaagcatggtgtaaactaacttttctagcccacactttgtgtggggtggcagatggcgtgccataattctaatagtgggataccacgcttgtggaccttatgctcacacagccatcctctagtaagtttgtgtgacgtctggtgacgtgtgggaacttattggaaacaacattttgctgtaaagcatcctattgccagcggaacaacgcctggtaacaggtgcctctggggccaaaagccaaggtttagcagaccctctaggattggtttaaaacctgaaatgttgtggaagatacttagtacctaccgatctggtagtaatgcagacactagttgtaaggcccacgaaggatgcccagaaggtacctgtaggtaacaagcgacactatggatctgatctggggccaggtacctctatcttggtgacctggttaaaaaacgtctagtgggccaaacccgggggggatccccggtttccttttattttatcaatgccact

SEQ ID NO: 91 - DNA, 680 bp, Parechovirus A
  misc_feature 1..680: note = strain NIG13194, complete genome.1
  source 1..680: mol_type = genomic DNA
cgtcgggccttataccccgacttgctgagcttctcgaggagagtcccttttccagccctgaggcggctggtcaataagagcctcaatcgtaacgaacatctaagactgtcaaatcaaccctatgcctggtctccactattcgaaggcaactagcaataagaagagtggatcaatagacgcttaaagcatagtgtacgtaaacctttctaacttgtgttatacacaaggtggcagatggcgtgccataattctattagtgagataccacgcttgtggaccttatgctcacacagccatcctctagtaagtttgtaaggtgtctgatgacgtgtgggaacttattggaaataatagtttgctgcaaagcatcctactgccagcggattaacatctggtaacaggtgcctctggggccaaaagccaaggtttaacagaccctttaggattggttcaaacctgaactattatggaagatacttagtacctgctgatttggtaacagtgcaaacactagttgtaaggcccacgaaggatgcccagaaggtacccgtaggtaacaagtgacactatggatctgatctggggctgactacctctatcttggtgagtcagtcaaaaaacgtctagtgggccaaacccaggggggatccctggttttcttttattttatctcttgcaat

SEQ ID NO: 92 - DNA, 681 bp, Human parechovirus 1
  misc_feature 1..681: note = strain KVP6 polyprotein gene, complete cds.1
  source 1..681: mol_type = genomic DNA
cgtcgggccttataccccgacttgctgagcttctccaggagagcccctttcccagccctgaggcggctggtcaataaaagcctcatctgtaacaaacatctaagattatgacattaaccccatgcctggtctccactagttgaaggcaacttgcaataaaatgagtgggaacaagacgcttaaagcatggtgtaaatttgcttttctaacccacactttgtgtggggtggcagatggcgtgccataattctattagtgagataccacgcttgtggaccttatgctcacacagccatcctctagtaagttcgtgagatgtctggtgacgtgtgggaacttattggaaacaacattttgctgaaaagcatcctatcgccagcggaacaacacctggtaacaggtgcctctggggccaaaagccaaggtttaacagaccctttaggattggtttaaaacctggaatgttgttgaagatacttagtacctgccgatctggtaatagcacaagcactagttgtaaggcccacgaaggatgcccagaaggtacccgtaggtaacaagtgacactatggacctgatctggggctaggtacctctatcttggtgacctggttaaaaaacgtctagtgggccaaacccgggggggatccccggtttccttttaatttcatcaatgccatt

SEQ ID NO: 93 - DNA, 683 bp, Human parechovirus 5
  misc_feature 1..683: note = strain BR/53/2006 polyprotein gene, complete1
  source 1..683: mol_type = genomic DNA
tggccgtcgggccttataccccgacttgctgagtttctctaggagagtccctttcccagccttgaggtggctggtcaataaaaacctcaactgtaactaacatctaagctgattttatagataccccatgcctggtccccactagtcgaaagcacctggcaataagatgagtggaaaagggcgcttaaagcatggtgttagtatacatttctaacctgtgactatcacggggtggcagatggcgtgccataactctattagtgagataccacgcttgtggaccttatgctcacgcagccatcctctagtaagcttgcaaggcgtctgatgacgtgtgggaactaattggaaatgacagtttgctgctaagcatcctattgccagcggatcaacacctggtaacaggtgcctctggggccaaaagccaaggtttaacagaccctttaggattggttcaaacctgaactgttgtggaagattctcagtacctgctaatttggtagttaggcaagcactagttgtaaggcccacgaaggatgcccagaaggtacccgtaggtaacaagtgacactatggatctgatctggggccagctacctctttcatggtgagttggtcaaaaaacgtctagtgggccaaacccaggggggatccctggtttcctttattttatcatagtcatt

SEQ ID NO: 94 - DNA, 692 bp, Human parechovirus 1
  misc_feature 1..692: note = strain 2-B9-TW, complete genome.1
  source 1..692: mol_type = genomic DNA
agagcttggccgtcgggccttataccccgacttgctgagcttctctaggagagtccctttcccagccctgaggcggctggtcaataaaagcctcaattgtaacgaacacctaagacgataatgataaccctatgcctggtctccactattcgaaggcaccttgcaataagaagagtgggctcaagacgcttgaagcatagagtgcgttttcttttctaatccacacccatgtggagtggcagatggcgtgccataactctattagtgagataccatgcttgtggaccttatgctcacacagccatcctctagtaagtttgtaagacgtctggtgacgtgtgggaacttattggaaacaacattttgctgtaaagcatcctactgccagcggaacaacacctggtaacaggtgcctctggggccaaaagccaaggtttaatagaccctttaggattggtttaaaacctgaaatgttgtggaaaatatttagtacctgccaatctggtagtaatgcaaacactagttgtaaggcccacgaaggatgcccagaaggtacccgtaggtaacaagagacactatggatctgatctggggccagctacctctatcttggtgagttggttaaaaaacatctagtgggccaaacccaggggggatccctggtttccttttattttacctcaaatactatc

SEQ ID NO: 95 - DNA, 695 bp, Parechovirus A
  misc_feature 1..695: note = strain HPeV-1/RUS/Novosibirsk/NS12-N3567/2012,1
  source 1..695: mol_type = genomic DNA
tctcctagagagcttggccgtcgggccttataccccgacttgctgagtttctctaggagagtccctttcccagccttgaggcggctggtcaataaaagcctcaaatataacgaacatctaagacaattaaacataccctatgcctggtctccactattcgaaggcaacttgcaataaggagagtggaattaagacgcttaaagcatggagacagtttccttttctaacccacattagtgtggggtggcagatggcgtgccataactctaatagtgagataccacgcttgtggaccttatgctcacacagccatcctctagtaagtttgcaagacgtctggtgacgtgtgggaacttattggaaacaacattctgctgtaaagcatcctaatgccagcggaacaacacctggtaacaggtgcctctggggccaaaagccaaggtttaacagaccctttgggattggttcaaacctggaatgttgtggaaaatacttagtacctgccgatctggtagtagtgcaaacactagttgtaaggcccacgaaggatgcccagaaggtacccgtaggtaacaagtgacactatggatctgatctggggctggatacctctatcttggtgattcagttaaaaaacgtctagtgggccaaacccaggggggatccctggtttctttttattttataatgtcact

SEQ ID NO: 96 - DNA, 696 bp, Human parechovirus 1
  misc_feature 1..696: note = isolate 164Chzj909, complete genome.1
  source 1..696: mol_type = genomic DNA
gaaccattctacaacttctttagcggctttccgtgtttggtttgcaaccttagttgcaaaacatttgaaaacacttggccttgggtcaataaaagcctcaactgtaacaaacatctaagattattacattaaccccatgcctggtctccactagttgaaggcaacttgcaataaaatgagtggaaacaagacgcttaaagcatggtgtaaattaacttttctaacccacattttgtgtggggtggcagatggcgtgccataattctactagtgagataccacgcttgtggaccttatgctcacacagccatcctctagtaagtttgtgagatgtctggtgacgtgtgggaacttattggaaacaacattttgctgtaaagcatcctatcgccagcggaacaacacctggcaacaggtgcctctggggccaaaagccaaggtttaacagaccctttaggattggttttaaaacctgaaatgttgtggaagatacttagtacctgccgatctggtagtaatgcaaacactagttgtaaggcccacgaaggatgtccagaaggtacccgtaggtaacaagtgacactatggatctgatctggagctaggtacctctatcttggtgacctggttaaaaaacgtctagtgggccaaacccgggggggatccccggtttccttttattttatcaatgccaat

SEQ ID NO: 97 - DNA, 696 bp, Human parechovirus 5
  misc_feature 1..696: note = strain CT86-6760, complete genome.1
  source 1..696: mol_type = genomic DNA
tcctagagagcttggccgtcgggccttatacccgacttgctgagtttctctaggagagtccctttcccagccctgaggcggctggtcaataaaagcctcaaatgtaactaacatctaagacatttatgattcaaccccatgcctggtccccactagtcgaaagcatctagccataagatgagtggactaaggacgcttaaagcatggagccaacaaccatttctaacccatgttttgcatggggtggcagatggcgtgccataactctactagtgggataccacgcttgtggaccttatgcccacacagccatcctctagtaagtttgtaagacgtctgatgacgtgtgggaaaacactagaaatattaacttgctgtaaagcatcctactgccagcggaatcacatctggtaacagatgcctctggggccaaaagccaaggtttagcagaccctttaggattggttcaatacctgagttaatatggaaagtgcttagtacctgctgacttggtagtagtgcaaacactagttgtatggcccgcgaaggatgcccagaaggtacccgtaggtaacaagtgacactatggatctgatctggggctggatacctctatcttggtgatccagttaaaaaacgtctagcgggccaagcccaggggggatccctggtttccctatttttattattatcact

SEQ ID NO: 98 - DNA, 697 bp, Parechovirus A
  misc_feature 1..697: note = strain HPeV-5/RUS/Novosibirsk/NS12-N3863/2012,1
  source 1..697: mol_type = genomic DNA
tctcctagagagcttggccgtcgggccttataccccgacttgctgagcttctctaggagagcccctttcccagccttgaggcggctggtcaataaaagcctcaaacgtaactaacacctaagataaatctcataaccctatgcctggtccccactagtcgaaagcacctagcaataagatgagtggaccatggacgcttaaagcatagtgccaatatacatttctaacctgtggattcccatggggtggcagatggcgtgccataattctattagtgggataccacgcttgtggatcttatgcccacacagccatcctctagtaagtttgtaaggcgtctgatgacgtgtgggaacttatcggaaacaacaatttgctgcaaagcatcctattgccagcggacaaacacctggtaacaggtgcctctggggccaaaagccaaggtttaacagaccctttaggattggttcttacctggattgttgtggaaggtacttagtacctgctgatttggtagttggacaaacactagttgtaaggcccacgaaggatgcccagaaggtacccgtaggtaacaagggacactatggatctgatttggggtcacctacctctatcttggtgaggtgattaaaaagcgtctagtgggccaaacccaggggggatccctggtttccttttattttacacagacact

SEQ ID NO: 99 - DNA, 701 bp, Human parechovirus 3
  misc_feature 1..701: note = strain VGHKS 080217-2013, complete genome.1
  source 1..701: mol_type = genomic DNA
ttttgaaaggggtctcctagagagcttggccgtcgggccttataccccgatttgctgagcttctctaggagagcccctttcccagccagaggtggctggcaaaataatacctactgtaacaaaacatctaagatgcaataaccacacacctggtttccactggccgaaggcaactagcaataaggcaggtgggttcagacgcttaaagtgtgttgtaaatattcttttctaacctgtgttctacacagggtggcagatggcgtgccataactctaatagtgagataccacgcttgtggaccttatgctcacacagccatcctctagtaagtttgtaagacgtctgatgacgtgtgggaacttgttggaaataacagtttgctgcaaagcatcccactgccagtggattcacatctggtaacagatgcctctggggccaaaagccaaggtttaacagaccctttgggattggttcaaacctgaactgttatggaagacacttagtacctgctgatttggtagtaatgcaaacactagttgtaaggcccacgaaggatgcccagaaggtacccgtaggtaacaagtgacactatggatctgatctggggccggctacctctatctaggtgagttggttaaaaaacgtctagtgggccaaacccaggggggatccctggtttctttttactttgagtagtcatt

SEQ ID NO: 100 - DNA, 702 bp, Human parechovirus 2
  misc_feature 1..702: note = complete genome.1
  source 1..702: mol_type = genomic DNA
tttgaaaggggtctcctagagagcttggccgtcgggccttacaccccgacttgctgagtttctctaggagagtccctttcccagccagaggtggctggtcaaacaataccaaacgtaactaaacatctaagataacatagccctatgcctggtctccaccagttgaaggcatcttgcaataaaatgggtggattaagacgcttaaagcatggagtcaattatcttttctaactagtgatcttcactgggtggcagatggcgtgccataactctattagtgggataccacgctcgtggatcttatgcccacacagccatcctctagtaagtttgcaaggtgtctgatgaggcgtgggaacttattggaaataattacttgctgcgaagcatcctactgccagcggatcaacacctggtaacaggtgcccctggggccaaaagccacggtttaacagaccctttaggattggttaaaacctgagtaattatggaagatacttagtacctaccaacttggtaacagtgcaaacactagttgtaaggcccacgaaggatgcccagaaggtacccgcaggtaacaagagacactgtggatctgatctggggccacctacctctatcctggtgaggtggttaaaaaacgtctagtgggccaaacccaggggggatccctggtttccttattttagtgtaaatgtcatt

SEQ ID NO: 101 - DNA, 705 bp, Human parechovirus 8
  misc_feature 1..705: note = isolate BR/217/2006, complete genome.1
  source 1..705: mol_type = genomic DNA
gaaaggggtctcctagagagcttggccgtcgggccttataccccgacttgctgagtttctctaggagagtccctttcccagccctgaggcggctggataataaaggcctcacatgtaacaaacatctaagacaaaataatttgccttgcacctggtccccactagttgaaggcatctagcaataagatgagtggaacaaggacgcttaaagtgcaatgatagttatcttttctaacccactatttatagtggggtggtggatggcgcaccataattctaatagtgagataccacgcttgtggaccttatgctcacacagccatcctctagtaagtttgtgagacgtctggtgacgtgtgggaacttactggaaacaatgctttgccgtaaggctttcattagccagcggaccaccacctggtaacaggtgcctctggggccaaaagccaaggtttaatagaccctaatggaatggttcaaacctggagcattgtggaaagtacttagtacctgctgatctggtagtaatgcaaacactagttgtacggcccacgaaggatgcccagaaggtacccgtaggtaacaagtgacactatggatctgatctggggccaactacctctatcttggtgagttggttaaaaaacgtctagtgggccaaacccaggggggatccctggtttccttttattttactttgtcaat

SEQ ID NO: 102 - DNA, 706 bp, Potamipivirus A
  misc_feature 1..706: note = isolate TSPV, complete genome.1
  source 1..706: mol_type = genomic DNA
cttattttataagtttcttgcagttggcctttttcaacgtcgtggctgacgttaaaaagccacaattccacttaccttttaccttttatgtttaatgtttgttagttttgtgatctttaacaaatagatctaaataatttgttggtaaccaatctcggatgtttcggctgcattgtagtttatttatttcattttagttgtaggtggccactacgtcctggaatcatacatggtaacatgtacctcggcggttatccactattacgctaatctaagaatatttaaatgaaaatgtaagtgttacggctgactttgggcctgatagttaaatgctcgcactgacagatagtaccctcctttaggatcgattctgttacatgggatccattttggtgccccactgattcaacctctttgttgaaaaagagttagcatactacaaattttccaaacaaaaaccctttttaatgactacaacttatgattttatgaattttactgctcttgaaaaagatattttgacattgatcgctgtactgtttcagacattcattgcatccatttttgttggctactcctcacaaactcaaaacttttccacacgagaaaccttgtttattgaattttgcctttatattttggaacttgttgttggatttattgtttgcttaattattgacctcacacctgttttaaacactacaat

SEQ ID NO: 103 - DNA, 707 bp, Hepatovirus A
  misc_feature 1..707: note = isolate HAV/Human/CMRHP6/CMR/2014 polyprotein gene,1
  source 1..707: mol_type = genomic DNA
ggtctctggagagttccggagtccctcttggaggtccatggtgaggggacctgatacctcaccgccgtttgcctaggctataggctatttttccctttcccttttccctgttttgtgtaaatattaattcctgcaggctcagggttctttaatctgtttctctataagaacactcattttcacgctttctgtctgctttcttccagggctctccccttgccctaggctctggccgttgcgcccggcggggtcaactccatgattagcatggagctgtaggagtctaaattggggacgcagatgtttgggacgtcaccttgcagtgttaacttggctctcatgaagctctttgatcttccacaagaggtaggctacgggtgaaacctcttaagctaatacttctatgaagagatgctttggatagggtaacagcggcggatattggtgagttgttaagacaaaaacctttcaacgccggaggactggctctcatccagtggatgcattgagtggattgtttgtcagggctgtctctaggcttaatctcagacctctctgcgcttagggcaaacattacttggccttaaatgggattctgtgagaggggatccctccattgactgctggacttttctttggggccttaggtagtgtttgcctctgaggtactcaggggcatttaggtttttcctcactctcaaataatt

SEQ ID NO: 104 - DNA, 707 bp, Human parechovirus 3
  misc_feature 1..707: note = strain BJ-C3174, complete genome.1
  source 1..707: mol_type = genomic DNA
tttgaaaggggtctcctagagagcttggccgtcgggccttataccccgacttgctgagtctctctaggagagtccctttcccagccttgaggcggctggacaataaaagcctcaactgtaacaaacacctaagattattatattaaccccatgcctggtctccactggttgaaggcaacttgcaataaaatgagtggaaattagacgcttaaagtgtgttgtacatattcttttctaacctgtgttctacacagggtggcagatggcgtgccataactctaatagtgagataccacgcttgtggaccttatgctcacacagccatcctctagtaagtttgtaagacgtctgatgacgtgtgggaacttgttggaaataacagtttgctgcaaggcatcccactgccagcgggttcacatctggtaacagatgcctctggggccaaaagccaaggtttaatagaccctttgggattggttcaaacctgaactgttatggaagacatttagtacctgctgatttggtagtaatgcaaatactagttgtaaggcccacgaaggatgcccagaaggtacccgtaggtaacaagtgacactatggatctgatctggggccggctacctctatctaggtgagttggttaaaaaacgtctagtgggccaaacccaggggggatccctggtttctttttaatttgagtagtcact

SEQ ID NO: 105 - DNA, 708 bp, Human parechovirus 1
  misc_feature 1..708: note = complete genome.1
  source 1..708: mol_type = genomic DNA
tttgaaaggggtctcctagagagcttggccgtcgggccttataccccgacttgctgagtttctctaggagagcccttttcccagccctgaggcggctggtcaataaaagcctcaaacgtaactaacacctaagaagatcatgtaaaccctatgcctggtctccactattcgaaggcaacttgcaataagaagagtgggatcaagacgcttaaagcatagagacagttttcttttctaacccacatttgtgtggggtggcagatggcgtgccataactctaatagtgagataccacgcttgtggaccttatgctcacacagccatcctctagtaagtttgtgagacgtctggtgacgtgtgggaacttattggaaacaacattttgctgcaaagcatcctactgccagcggaaaaacacctggtaacaggtgcctctggggccaaaagccaaggtttaacagaccctttaggattggttctaaacctgagatgttgtggaagatatttagtacctgctgatctggtagttatgcaaacactagttgtaaggcccatgaaggatgcccagaaggtacccgtaggtaacaagtgacactatggatctgatttggggccagatacctctatcttggtgatctggttaaaaaacatctaatgggccaaacccgggggggatccccggtttcctcttattctatcaatgccact

SEQ ID NO: 106 - DNA, 708 bp, Human parechovirus 4
  misc_feature 1..708: note = isolate K251176-02, complete genome.1
  source 1..708: mol_type = genomic DNA
tttgaaaggggtctcctagagagcttggccgtcgggccttataccccgacttgctgagcttctctaggagagtccctttcccagccctgaggcggctggttaataatagcctcaagcgtaactaatatctaagaagattgtgcaaaccctatgcctggtctccactattcgaaggcaacttgcaataagaagagtggaatcaagacgcttaaagcatagagacagtattcttttctaacccacattactgtggggtggcagatggcgtgccataattctaatagtgagataccacgcttgtggaccttatgctcacacagccatcctctagtaagtttgtgagacgtctggtgacgtgtgggaacttattggaaacaacattttgctgcaaagcatcctactgccagcggaacaacacctggtaacaggtgcctctggggccaaaagccaaggtttaatagaccctttaggattggttctaaacctgagatgttgtggaaaatatttagtacctgctgacctggtagtaatacaaacactagttgtaaggcccacgaaggatgcccagaaggtacccgtaggtaacaagtgacactatggatctgatctggggccaaccacctctatcttggtgggttggttaaaaaacgtctagtgggccaaacccaggggggatccctggtttccttttattttatcatatttaat

SEQ ID NO: 107 - DNA, 708 bp, Human parechovirus 4
  misc_feature 1..708: note = complete genome, genomic RNA, strain T75-4077.1
  source 1..708: mol_type = genomic DNA
tttgaaaggggtctcctagagagcttggccgtcgggccttataccccgacttgccgagtttctctaagagagtccctttcccagccttgaggcggctggtcaataaatgccttaaatgtaactaacacctaagattgctttaacaaccctatgcctggtctccactagttgaaggcatctagcaataaaatgagtggaatcaagacgcttaaagcatagtgccagcatgcatttctaacctgcagtttttgcagggtggcagatggcgtgccataattctattagtgagatactacgcttgtagatcttatgctcacacagccatcctctagtaagtttgtaagatgtctgatgacgtgtgggaacttattggaaataacaccttgctgtaaagcatcttattgccagcggaacaacacctggtaacaggtgcctctggggccaaaagccaaggtttaacagaccctttaagattggttcaaacctgaggtgttatggaaaatattcagtacctgctgatttggtagtaatgcaaacactagttgtaaggcccacgaaggatgcccagaaggtacccgtaggtaacaagtgacactatggatctgatctggggccaactacctctatcttggtgagttggttaaaaaacgtctagtgggccacacccaggggggatccctggttttcttttattacacaattgtcatt

SEQ ID NO: 108 - DNA, 709 bp, Human parechovirus 1
  misc_feature 1..709: note = isolate BNI-788St, complete genome.1
  source 1..709: mol_type = genomic DNA
tttgaaaggggtctcctagagagcttggccgtcgggccttataccccgacttgctgagctcctctaggagagtccctttcccagccttgaggcggctggtcaataaaagcctcaattgtaacaaacatctaagattattatattaaccccatgcctggtctccgttagttgaaggcaacttgcaataaaatgagcggaaacaagacgcttaaagcatggtgtaaattaacttttctaacccacatcttgtgtggggtggcagatggcgtgccataactctattagtgagataccacgcttgtggaccttatgctcacacagccatcctctagtaagtttgtgagacgtctggtgacgtgtgggaacttattggaaacaacattttgctgtaaagcatcctattgccagcggaacaacacctggtaacaggtgcctctggggccaaaagccaaggtttaacaaaccctttaggattggttctaaacctgagatgttgtggaagatacttagtacctaccgatccggtagtagtgcaaacactagttgtaaggcccacgaaggatgcccagaaggtacccgtaggtaacaagcgacactatggatctgatctggggccaggtacctctatcttggtgatctggttaaaaaacgtctagtgggccaaatccgggggggatccccggtttccttttattttatcaatgccact

SEQ ID NO: 109 - DNA, 709 bp, Human parechovirus 1
  misc_feature 1..709: note = strain BJ-37359, complete genome.1
  source 1..709: mol_type = genomic DNA
tttgaaaggggtctcctagagagcttggccgtcgggccttataccccgacttgctgagtctctctaggagagtccctttcccagccttgaggcggctggacaataaaagcctcaactgtaacaaacacctaagattattatattaaccccatgcctggtctccactggttgaaggcaacttgcaataaaatgagtggaaataagacgcttgaagcatggtgcaaatctacttttctaacccacactttgtgtggggtggcagatggcgtgccataattctattagtgagataccacgcttgtggaccttatgctcacacagccatcctctagtaagtttgtgaggcgtctggtgacgtgtgggaacttattggaagcaacattttgctgtaaagcatcctatcgccagcggaacaacgcctggtaacaggtgcctctggggccaaaagccaaggtttaacagaccctttaggattggtttaaaacctgaaatgttgtggaaaatacttagtacctaccgacctggtagtaatgcaaacactagttgtaaggcccacgaaggatgcccagaaggtacccgtaggtaacaagtgacactatggatctgatctggggccaggtacttctatcctagtgacctggttaaaaaacgtctagtgggccaaacccgggggggatccccggtttccttttattttactaatgctatt

SEQ ID NO: 110 - DNA, 709 bp, Human parechovirus 4
  misc_feature 1..709: note = genomic RNA, complete genome, strain:1
  source 1..709: mol_type = genomic DNA
tttgaaaggggctctcctagagagcttggccgtcgggccttacaccccgacttgctgagcttctctaggagagcccctttcccagccttgaggcggctggtcaataaaagcctcacatataaataacatctaagaatagcttcataaccctacacctggtccccactagtcgaagacaacttgtaataagatgagtggaacaaggacgcttaaagtgtagtgaaaatattcctttctaacccatgcacctcatggggtggcagatggcgtgccataactctaatagtgagataccatgcttgtggaccttatgctcacacagccatcctctagtaagtttgtgagatgtccgatgacgtgtgggaacttattggaaacaacaatttgccgtaaggcatcctaatgccagcggattcacacctggtaacaggtgcccctggggccaaaagccaaggtttaacagacccgttaggattggtttaaacctgaattgttgtgaaagatactcagtacctgctgatttggtagtaatacaaacactagttgtaaggcccacgaaggatgcccagaaggtacccgtaggtaacaagtgacactatggatctgatctggggccaactacctctatcttggtgagttggttaaaaaacgtctagtgggccaaacccgagggggatcctcggtttctatttattttatatttgctaac

SEQ ID NO: 111 - DNA, 709 bp, Human parechovirus 6
  misc_feature 1..709: note = genomic RNA, complete genome,strain:1
  source 1..709: mol_type = genomic DNA
tttgaaaggggtctcctagaaagcttggccgtcgggccttataccccgacttgccgagtttctctaggagagtccctttcccagccctgaggcggctggtcaataaaagcctcaaacgtaactaacatctaagattgatttaataacaccatgcctgatccccaccagtcgaagacaactagtaataagacgggtggaataaggatgcttaaagcatggcgtaaatattcttttctaacccatgatttcatggggtggcagatggcgtgccataactctattagtgagataccacgcttgtggaacttatgctcacacagccatcctctagtaagtttgtgagatgtctaatgacgtgtgggaacttattggaagcaacaatttgccgtacggcatcctactgccagcggattcacacctggtaacaggtgcccctggggccaaaagccaaggtttaacagaccctttaggattggttaaaacctgaattgttgtggaagatactcagtacctgctgatttggtagtaatgcaaacactagttgtaaggcccacgaaggatgcccagaaggtacccgtaggtaacaagtgacactatggatctgatctggggccaactacttctatcatggtgagttggttaaaaaacgtctagtgggccagacccaggggggatccctggtttccttttttatttcactacagccaat

SEQ ID NO: 112 - DNA, 709 bp, unidentified
  source 1..709: mol_type = unassigned DNA; note = polyprotein [echovirus 22 EV22, Harris, Genomic RNA Complete, 73391 sequence
tttgaaaggggtctcctagagagcttgcctagggccttataacccgacttgctgagcttctataggaaaaaaccctttcccagccttggggtggctggtcaataaaaacccccatagtaaccaacacctaagacaatttgatcaaccctatgcctggtccccactattcgaaggcaacttgcaataagaagagtggaacaaggatgcttaaagcatagtgtaaatgatcttttctaacctgtattatgtacagggtggcagatggcgtgccataaatctattagtgggataccacgcttgtggaccttatgcccacacagccatcctctagtaagtttgtaaaatgtctggtgagatgtgggaacttattggaaacaacaatttgcttaatagcatcctagtgccagcggaacaacatctggtaacagatgcctctggggccaaaagccaaggtttgacagacccattaggattggtttcaaaacctgaattgttgtggaagatattcagtacctatcaatctggtagtggtgcaaacactagttgtaaggcccacgaaggatgcccagaaggtacccgcaggtaacaagagacactgtggatctgatctggggccaactacctctatcaggtgagttagttaaaaaacgtctagtgggccaaacccaggggggatccctggtttccttttattgttaatattgacatt

SEQ ID NO: 113 - DNA, 712 bp, Human parechovirus 1
  misc_feature 1..712: note = strain USA/TN/2016-23032, complete genome.1
  source 1..712: mol_type = genomic DNA
cacatgagttatctgatgtcctctagcccatgttggtgtccactcatgtgtttccaatctaaccagtctaggagagtccctttcccagccttgaggcggctggtcaataaaaacctcaattgtaacaaacatctaagattattacattaaccccatgcctggtctccactagttgaaggcaacttgcaataaaatgagtgggaacaagacgcttaaagcatggtgtgaattaattttctaacccacatcgagtgtggggtggcagatggcgtgccataactctactagtgagataccatgcttatggaccttatgctcacacagccatcctctagtaagtttgtgaggcgtctggtgacgtgtgggaacttattggaaacaacaccttgctgtaaagcatcctattgccagcggaacaacacctggtaacaggtgcctctggggccaaaagccaaggtttaacagaccctttaggattggttttgaacctgagatgttgcggaagatatttagtacctgccgatctggtagtaatgcaaacactagttgtaaggcccacgaaggatgcccagaaggtacccataggtaacaagtgacactatggatctgatctggggccaggtacctctatcttggtgacctggttaaaaaacgtctagtgggccaaacccgggggggatccccggtttccttttactttattaatgccact

SEQ ID NO: 114 - DNA, 713 bp, Rosavirus C
  misc_feature 1..713: note = strain NCGX12IN polyprotein gene, complete cds.1
  source 1..713: mol_type = genomic DNA
ggaccggcgctcacccgtttcgacgagtgaccgcctaggattctctctgcccttgctttggacgcccgccacggcgttaaactggcacttcccctcacccctaccctgtaactaagtttgcacctcgcccagacaggctgctaagacgcttgttgctacagtatgtctggatccgcgagttctccttaagaaatcttttccacctccgccggtgcctatgccggtcgagacgggttaggaccccgttggctcaggccagagacaatcggtagtagtctttctactctcgcccatgccggttgtcacaccctcactagtcttaccaaggttgtaaattgtctgtgaaagctttacatgaactctgctgtgttgtagcgatggatgtgttgtgagcggatttccccacgtggtaacacgtgcctctcagaccaaaagtcacggtgttaacagcacccgcacatctggctgccttcccccgcagcccacagctttgtgattgtttagttagtaacggaacatttggcaatcctgaactaaggttagtgcaacggctaaggatgccctgaaggtacccgcaggtaacgttaagacactgtggatctgatcaggggccctcggtgcgcgtgctttacacgcgtagccagggttaaaaaacgtctatgccgtttcccccccgggagggggggttccttacccccatcacaattggcatt

SEQ ID NO: 115 - DNA, 717 bp, Penguin megrivirus
  misc_feature 1..717: note = isolate KGI-Bel-P5/2015, complete genome.1
  source 1..717: mol_type = genomic DNA
gtttgggggggcgttcccccaggggctcctttccggtgtgaggcttggcaacctcatatcgttactctgccgaccagtctgggtcgtgtggccacacaatgggattcgttctgttgtgtagagtcacatggcattactgggctgatcggtggggatccgttgccacccctaaacccttacatttactggactgcttttcttggccccggaatgattcgctcacccgcgatgaggactgttgttcttattatggcaggattacgcgtctggtccgcgtaaggactaattcctatgtttatacgttactaccttgttctgaacggtgggcgccaccccgcctagtaggatcctggcttatcgtgtagacctctagggaccacattagctagagtgtaggctgctatggatggagtagtgacccctttttgggtatcactctctaagactccggaatgtgtcatagtacgctggaaatccttacttgtttttccatgagggggaggtggtgctgaaatattgcaagccacccctcggttaaaacagtttggtgccgcttatgccatattaccgccccttgtagttgggctgtttttgcagctccgggttagtagagtaccatagtggacgcggtgttgggaatcaccgccttggctgcacactgcttgatagagctgcggctggtcaagctaattgtggtataaccagttgatttggcat

SEQ ID NO: 116 - DNA, 736 bp, Hepatitis A virus
  misc_feature 1..736: note = polyprotein gene, complete cds.1
  source 1..736: mol_type = genomic DNA
ttcaagaggggtctccggggatttccggagtccctcttggaagtccatggtgaggggacttgatacctcaccgccgtttgcctaggctataggctaaattttccctttccccttccccttccttgttttgattgtaaatatcaattcctgcaggttcagggttcttaaattggcattaaatttgtttctctataagaacactcaattttcacgctttctgtcttctttcttccagggctctccccttgccctaggctctggccgttgcgcccggcggggtcaactccatgattagcatggagctgtaggagtctaaattggggacacagatgtttggaacgtcaccttgcagtgttaacttggctttcatgaatctctttgatcttccacaagaggtaggctacgggtgaaacctcttaggctaatacttctatgaagagatgctttggatagggtaacagcggcggatattggtgagttgttaagacaaaaaccattcaacgccggaggactgactctcatccagtggatgcattgagtggattgactgtcagggctgtctctaggcttaattccagacctctctgtgcttggggcaaacatcatttggccttaaaaggggttctgtgagaggggatccctccattaacagctggactgttctttggggccttatgtggtgtttgccgctgaggtactcaggggcatttaggtttttcctcattctcaaataata

SEQ ID NO: 117 - DNA, 737 bp, Hepatitis A virus
  misc_feature 1..737: note = strain HAS-15, complete genome.1
  source 1..737: mol_type = genomic DNA
cttcaagaggggtctccggaggtttccggagcccctcttggaagtccatggtgaggggacttgatacctcaccgccgtttgcctaggctataggctaaatttccctttccctgtccttcccttatttccctttgttttgcttgtaaatattgattcctgcaggttcagggttctttaatcatgtttccctataagaacactcaattttcacgctttctgtcttctttcttccagggctctccccttgccctaggctctggccgttgcgcccggcggggtcaactccatgattagcatggagctgtaggagtctaaattggggacgcagatgtttgggacgtcaccttgcagtgttaacttggctctcatgaacctctttgatcttccacaaggggtaggctacgggtgaaacctcttaggctaatacttctatgaagagatgctttggatagggtaacagcggcggatattggtgagttgttaagacaaaaaccattcaacgccggaggactggctctcatccagtggatgcattgagtggattgattgtcagggctgtctctaggtttaatctcaagacctctctgtgcttagggcaaacaccatttggccttaaatgggatcctgtgagagggggtcccctccattgacagctggactgttctttggggccttatgtggtgtttgcctctgaggtactcaggggcatttaggtttttcctcattcttaaacaata

SEQ ID NO: 118 - DNA, 742 bp, Enterovirus C
  misc_feature 1..742: note = strain WIV14, complete genome.1
  source 1..742: mol_type = genomic DNA
ttaaaacagctctggggttgcacccaccccagaggcccacgtggcggctagtactccggtaccacggtacccttgtacgcctgttttatactcccttcctccgcaatttagaagctcatgatcaagttcaataggagggggtacaaaccagtaccaccacgaacaagcacttctgtttccccggtgatgttgtatagactgctcgcgcggttaaaagcgacggatccgttatccgctcatgtacttcgagaagcctagtattacctcgggatcttcgacgcgttgcgctcagcactcaaccccagagtgtagcttaggtcgatgagtctggacattcctcaccggcgacggtggtccaggctgcgttggcggcctatctatggctaacgccataggacgctagttgtgaacaaggtgtgaagagcctattgagctacatgagagtcctccggcccctgaatgcggctaatcccaacctcggagcaggcgatcacaagccagtgattggcctgtcgtaatgcgtaagtccgagacggaaccgactactttgggtgtccgtgtttccttttatttttatcatggctgcttatggtgacaatcagtgattgttgtcatagagcgaattggattggccatccggtgaaaacaaagtcaattactttctcacttgttggacctacacccgatacgctttacccccaagctaattaaaattattagaagttaggactacggtgtcaca

SEQ ID NO: 119 - DNA, 743 bp, Enterovirus C96
  misc_feature 1..743: note = isolate 184C5/SD/CHN/2009, complete genome.1
  source 1..743: mol_type = genomic DNA
ttaaaacagcctgtgggttgttcccaccccagaggcccacgtggcggctagtacaccggtatcacggtacccttgtacgcctgttttatactccctaccccgtaacttagaagcaataatccaagttcaatagtaggggtacaaaccagtaccaccacgaacaagcacttctgtttccccggtgatatcgtatagactgtacccacggtcgaaaatggtggatccgttatccgcttttgtacttcgagaagcccagtaccatcttggaatcttcgatgcgttgcgctcagcactcgaacccggagtgtagcttaggccgatgagtctggacaatccccaccggcgacggtggtccaggctgcgttggcggcctacctgtggcccaaagccacaggacgctagttgtgaacaaggtgcgaagagcctattgagctacaaaagagtcctccggcccctgaatgcggctaatcccaaccatggagcaggtgatcacaaaccagtggtaagcctgtcgtaacgcgcaagtccgtggcggaaccgactactttgggtgtccgtgtttccttttatttttgtatggctgcttatggtgacaatcaaagattgttatcataaagcgaattggattggccatccagtgagagtaaagcacattatttacttgcttgttgggtttgcccctttgatttgtaacactctttatctaccttatattgtacttttggttagacaacagtatcacg

SEQ ID NO: 120 - DNA, 743 bp, Human poliovirus 1
  misc_feature 1..743: note = isolate HAI00003, complete genome.1
  source 1..743: mol_type = genomic DNA
ttaaaacagctctggggttgcacccaccccagaggcccacgtggcggctagtactccggtattgcggtacccttgtacgcctgttttatactcccttcccgtaacttagacgcacgacaccaagttcaatagaagggggtgcaaaccagtaccaccacgaacaagcacttctgtttccccggtgatgttgtatagactgcttgcgtggtcgaaagcgacggatccgttacccgcttatgtacttcgagaagcccagtaccacctcggaatcttcgacgcgttgcgctcagcactcaaccccagagtgtagcttaggctgatgagtctggacgtcccccaccggtgacggtggtccaggctgcgttggcggcctacctatggcttacgccatgggacgctagttgtgaacaaggtgtgaagagcctattgagctacataagaatcctccggcccctgaatgcggctaatcccaacctcggagcaggtggtcacaaaccagtgattggcctgtcgtaacgcgcaagtccgtggcggaaccgactactttgggtgtccgtgtttccttttattttattatggctgcttatggtgacaatcacagattgttatcataaagcgaattggattagccatccggtgaaagtgagactcattatctacctgttcgctggattcgctccattgagtgtgtttactctaagtacaatttcaacagttatttttaatcagacaattgtaccata

SEQ ID NO: 121 - DNA, 744 bp, Human enterovirus C96
  misc_feature 1..744: note = isolate AFP809/GD/CHN/2011, complete genome.1
  source 1..744: mol_type = genomic DNA
ttaaaacaagtctggggttgttcccaccccagaggcccacgtggcggccagtacaccggtatcacggtacccttgtacgcctgttttatactccctaccccgtaacttagaagcaacaatccaagttcaatagtaggggtacaaaccagtaccaccacgaacaagcacttctgtttccccggtgataccatatagactgtacccacggtcaaaaatggtggatccgttacccgcttttgtacttcgagaagcccagtatcatcttggaatcttcgatgcgttgcgttcagcactcgaacccggagtgtagcttaggtcgatgagtctggacaatcctcaccggcgacggtggtccaggctgcgttggcggcctacctgtggcccaaagccacaggacgctagttgtgaacaaggtgtgaagagcctattgagctacaaaagagtcctccggcccctgaatgcggctaatcccaaccatggagcaggtggtcacaaaccagtgactagcctgtcgtaacgcgcaagtccgtggcggaaccgactactttgggtgtccgtgtttccttttattttatgtatggctgcttatggtgacaatcaaagattgttatcataaagcaaattggattggccatccagtgagagtaaaacacattatctacttatttgttggatttgtccctttaattcatcacactcttcatctaatttacattgtggttctaattagacagcagtatcaca

SEQ ID NO: 122 - DNA, 744 bp, unidentified
  source 1..744: mol_type = unassigned DNA; note = Human coxsackievirus A20strain IH35, complete genome.1
ttaaaacagctctggggttgtacccaccccagaggcccacgtggcggctagtactccggtattacggtacccttgtacgcctgttttatactccctccctcgtaacttagaagcacaaaaccaagttcaatagaagggggtgcaaaccagtaccaccacgaacaagcatttctgtttccccggtgatgttgtatagactgcccgcgcggttgaaagcaacggatccgttacccgctcaagtacttcgagaagcctagtattaccttggaatcttcgatgcgttgcgttcagcactcgaccctggagtgtagcttaggctgatgagtctggacgtccctcaccggtgacggtggtccaggctgcgttggcggcctacctatggctaacgccataggacgctagttgtgaacaaggtgtgaagagcctattgagctacttgagagtcctccggcccctgaatgcggctaatcctaaccatggagcaggcggtcacagaccagtgactagcttgtcgtaatgcgcaagtctatggcggaaccgactactttgggtgtccgtgtttccttttatttttattatggctgcttatggtgacaatcattgattgttatcataaagcgaattggattggccatccggtgaaagcgagacttactatttacttacttgttggacttaccacacttaatacatttattctaggtgtcacttgtatagcaattagaatcaaacagttgcatcata

SEQ ID NO: 123 - DNA, 744 bp, Poliovirus type 3
  misc_feature 1..744: note = mRNA (vaccine strain Sabin 3 (Leon 12a1b)).1
  source 1..744: mol_type = genomic DNA
ttaaaacagctctggggttgttcccaccccagaggcccacgtggcggctagtacactggtatcacggtacctttgtacgcctgttttatactccctcccccgcaacttagaagcatacaattcaagttcaataggagggggtgcaagccagcgcctccgtgggcaagcactactgtttccccggtgaggccgcatagactgttcccacggttgaaagtgtccgatccgttatccgaccatgtacttcgagaagcctagtaccgctctggaatcttcgacgcgttgcgctcagcactcaaccccggagtgtagcttgggccgatgagtctggacagtccccactggcgacagtggctccagctgcgctggcggccgcgacctgtggcccaaagccacgggacgctagttgtgaacagggtgtgaagagcctattgagctacatgaagagcctccggcccctgaatgcggctaattctaaccatggagcaggcagctgcaacccagcagccagcctgtcgtaacgcgcaagtccgtggcggaaccgactactttgggtgtccgtgtttccttttattcttgaatggctgcttatggtgacaatcatagattgttatcataaagcgagttggattggccatccagtgtgaatcagattaattactcccttgtttgttggatccactcccgaaacgttttactccttaacttattgaaattgtttgaagacaggatttcagtgtcaca

SEQ ID NO: 124 - DNA, 746 bp, Human enterovirus 96
  misc_feature 1..746: note = isolate FIN05-2, complete genome.1
  source 1..746: mol_type = genomic DNA
ttaaaacagcctgtgggttgtacccaccccagaggcccacgtggcggccagtacaccggtattacggtacccttgtacgcctgttttatactccctaccccgtaacttagaagcaataacttaagttcaatagtagggggtacaaaccagtaccaccacgaacaagcacttctgtttccccggtgacattgtatagactgtgcccacggttgaaaacgatggatccgttatccgctcttgtacttcgagaagcctagtaatactttggaatcttcgatgcgttgcgctcagcactcatccccagagtgtagcttaggccgatgagtctggacattcctcaccggcgacggtggtccaggctgcgttggcggcctacctgtggcccaaagccacaggacgctagttgtgaacaaggtgtgaagagcctattgagctacaagagagtcctccggcccctgaatgcggctaatcccaaccatggagcaggtgatcgcaaaccagcggttagcctgtcgtaacgcgcaagtctgtggcggaaccgactactttgggagtccgtgtttctctttatttttacttatggctgcttatggtgacaatcatagattgttatcataacgcgaattggattggccatccggtgatatacaaacacattgtttacctatttattgggtttacacctttaagttctttcactctacaccttactcgtgttgtgttattaaccagacagtggtgccaac

SEQ ID NO: 125 - DNA, 748 bp, Rabovirus A
  misc_feature 1..748: note = strain Wencheng-Rt38-1 polyprotein gene, complete cds.1
  source 1..748: mol_type = genomic DNA
ggagttttagtggtgttccaacactatgcgccatgatgtgttctacggaacatgttatgacgtatctttcatctaccccaacccttgtgtcaaccgatacgcctacacaggtgggtaaagcaccggcccactgaatggaacaaaatgctaggtgcaaagtcaggcccataggccatcggtcgaagcccgcttgggaataagactgatggattaccctattctggcgcctgaccacttgtttcttttctgaatcacacacctgtgtgaacggtggacctgcaccgtaactcttctagcctactaccacacttgtggaactataggggcacaggaacttcaaccaagtgctgttggaatggagaaaataatccaatcctgaaacgtcatggatccacactctgtgtggggctactagcctgcggaacaacacatggtaacatgtgccccaggggccgaaagccacggtgataagatcaccctagtagtttgagattgtatcaatgttcatgtcttagtaaggggaggtgaaatctatctgtgacaccggattactggttgtcgtatagcggctgaaggatgtcctgctggtacctttagggaaccttaagagactattgatcgaagcaggagcctggttggtctctcccactccaggttaaaaaacgtctaggccgtggaaccgggcgggaggcccggttttcctcccaaaattataatattgtgtatggtgacaactgaaggcttaaca

SEQ ID NO: 126 - DNA, 751 bp, Rabbit kobuvirus
  misc_feature 1..751: note = isolate Berlin/Jan2011/0572, complete genome.1
  source 1..751: mol_type = genomic DNA
ttgaaagaaactccgggtattaaccatacccggagttttggcagggtgttccaacctgtcctggccatgcatttatctacggatatttgcatgacccgctttctatcgccccaacaatcccctttgtaaccacaagctttactcaggctagcagcccgactagctgtttggaagaaaaggctagggcacacaccaacaacaccgaccccactggtcgaaggccgcttggcaataagactggtggaacagggtcgcctgtagttgtttggaacattctttctaatgactttgtcagcggtgctactcacaccgtaactcttctaccctatccccacgcttgtggaactaggaggggatgagtgattcaagtaagtactgtcagaatggtgaaaatgatctgattctgaaacgctatggatccatcgaaagatggggctacacgcctgcggaacaacacatggtaacatgtgccccaggggccgaaagccacggtgataggatcacccgtgtagtttgagatcatatcaatgttcatagtctagtaagatgatttgaaatctaactgagctgatggctaactgcttgtcttattgcggcctaaggatgtcctgcaggtacctttagataaccttaagagactattgatctgagcaggagccaaagtggtctttcccagctttggttaaaaaacgtctaagccgcggcagggggcgggaggccccctttcctcccaaaacttaatattgattgt

SEQ ID NO: 127 - DNA, 751 bp, Coxsackievirus
  misc_feature 1..751: note = A24 genomic RNA, complete genome, strain:1
  source 1..751: mol_type = genomic DNA
gaaattaaaacagctctggggttgttcccaccccagaggcccacgtggcggctagtacactggtattacggtacccttgtacgcctgttttacacccctttcccccgtaacttagaagcttttaaattcaagttcaacagtgagtggtacaacccagtactactatgaacaagcacttctgttaccccggtgagattgcataagctgtccccacggctaaaagcgattgatccgttatccgctcttgtacttcgagaagcccagtaaaaccttgggatcctcgatgcgttgcgctcaacactcaaccccagagtgtagcttgggctgatgagtctgggcattcctcaccggcgacggtggtccaggctgcgttggcggcctacctgtggcccaaagccacaggacgctagttgtgaacaaggtgtgaagagcctattgagctacaagagagtcctccggcccctgaatgcggctaatcccaaccacggagcaggtgattgcaacccagcaactagcctgtcgtaacgcgcaagtctgtggcggaaccgactactttgggtgtccgtgtttccttttattacataatggctgcttatggtgacaatcatagattgttgtcataaagcgagttggattggccatccggtgagaattaaaacaattatttacttgtttgttggatttgttcctatacacacccatacaccttgcttgattgaagtaattctgttgataagacaacactattacg

SEQ ID NO: 128 - DNA, 752 bp, Salivirus A
  misc_feature 1..752: note = isolate BN-5, complete genome.1
  source 1..752: mol_type = genomic DNA
tttcctcctttcgaccgccttacggcaggcgggtccgcggacggcttcggcctacccgcgacaagaatgccgtcatctgtccttatcacccatattctttcccttcccccgcaaccatcacgcttactcgcgcacgtgttgagtggcacgtgcgttgtccaaacagttacactcacacccttggggcgggtttgtcccgccctcgggttcctcgcggaaccctccctcttctctctccctttctatccgccttcactttccataactacagtgctttggtaggtaagcatcctgaccccccgcggaagctgccaacgtggcaactgtggggatccaggcaggttatcaaaggcacccggtctttccgccttcaggagtatccctgccggtgaattccgacagggctctgcttggtgccaacctcccccaaatgcgcgctgcgggagtgctcttccccaactcatcttagtaacctctcatgtgtgtgcttggtcagcatatctgaggcgacgttccgctgtcccagaccagtccagcaatggacgggccagtgtgcgtagtcgctttccggtttcccggcgcatgtttggcgaaacgctgaggtaaggttggtgtgcccaatgcccgtaatttggtgacacctcaagaccacccaggaatgccagggaggtaccccacttcggtgggatctgaccctgggctaattgtctacggtggttcttcttgcttccacttctcttttttctggcatg

SEQ ID NO: 129 - DNA, 754 bp, Sebokele virus 1
  misc_feature 1..754: note = ORF1 gene for polyprotein, genomic RNA, strain 1.1
  source 1..754: mol_type = genomic DNA
gaaagggggccaccctgcccatagggcagggtccttcttggctgggtggctcgtatccactccatgggttgtgcctatccggtcatccccctttccccacagccggtgtgggttctaatcggctcctactaaacacctaagcatcactgcgcctctatctctcctatccacaggtctaagacgcttggaataagacatgtgggtgcaataggaagattagctagtccaatctctccttccagctacgcttctcccttcgatgagcgtagggggggcccccacctccctcatctctggatagggctcttgctacggggctttcccgtctggaccagcaggcccactggtgcgcttccattcaagtttagtgtgcattactgtctgaaatattgctttgctaggatctagtgtagcgacctgcatattgccagcggacttccccacatggtaacatgtgcctctgggcccaaaaggcatgtctttgaccgtatgcagtacaaccccagtataggtcctttctatggcagtatggatctcagtgatgagtctatacagaatatggaagtggttcggatatgtcagcccgaaggatgcccagaaggtacccgcagataaccttaagagactgtggatctgatctggggcccaccaccttcgggtgggtagaagctaaccatgccttgggttaaaaaacgtctaagggctgaccagacccgggggatccgggttttccctatcttgacctactctaatc

SEQ ID NO: 130 - DNA, 762 bp, Hepatovirus A
  misc_feature 1..762: note = isolate 18f.1, complete genome.1
  source 1..762: mol_type = genomic DNA
tttccctttcccttttttcaagaagggtctccgggaatttccggagtccctcttggaagtccatggtgaggggacttgatacctcaccgccgtttgcctaggctataggctaaattttccctttcccttttccctttcctattccctttgttttgcttgtaaatattgatttgtaaatattgattcctgcaggttcagggttcttaaatctgtttctctataagaacactcatttcacgctttctgtcttctttcttccagggctctccccttgccctaggctctggccgttgcgcccggcggggtcaactccatgattagcatggagctgtaggagtctaaattggggacacagatgtttggaacgtcaccttgcagtgttaacttggctttcatgaatctctttgatcttccacaaggggtaggctacgggtgaaacctcttaggctaatacttctatgaagagatgccttggatagggtaacagcggcggatattggtgagttgttaagacaaaaaccattcaacgccggaggactgactctcatccagtggatgcattgagtggattgactgtcggggctgtctttaggcttaattccagacctctctgtgcttggggcaaacatcatttggccttaaatgggattctgtgagaggggatccctccattgccagctggactgttctttggggccttatgtggtgtttgccgctgaggtactcaggggcatttaggtttttcctcattcttaaataata

SEQ ID NO: 131 - DNA, 788 bp, Poecivirus BCCH-449
  misc_feature 1..788: note = polyprotein gene, complete cds.1
  source 1..788: mol_type = genomic DNA
aggtcggtgctgtgacttttgtagttggattggatcctcactttgggtgaggttccactccaagtttgagtgttttgtgtgtgtgtgggcataattaattgtttattatgggaactacacaatcgcaacacgcgcaagtttgtagtttgattggcgtgcaaatgtcaaatcaagcatataacacaatttggtggctgttggtgtttgttataggaattttggttgtgttgaaattgtggatgtgtaggaaatatgcacaattacgtcagcgtcaggagttttataacctggcgcaacaccaaaatggtcttcgcgctttaacatcaccagcgaggtgtaaacaaattgaagttgaattagatcgtgtataggccagggaaccatccctcccaacgccacatcttgtggggaagttgggataatggtgggtctatatgaattggtctgtagacccacagtgaagagtgaatagtatgcttgcggttccatttgttaatggtctagcatgggtgggggcggcaaccccgtgaggggttccccactggccaaaagcccaggggttagtcatttcaaccaaggaagctggtaacctggtgacctgaacttgagtggtgagacccccttgctagagtgtgtaaaccgattgtaagcattttgtttgcttagtatctgtggtataagcagtcaattttgtataggctcaaggctgtggtagttagtagatgcccggaaggttattactgatccggggaccgtgactatacattaggtaaaccggtttaaaaacc

SEQ ID NO: 132 - DNA, 816 bp, Picornaviridae sp.
  misc_feature 1..816: note = isolate dwb062pic1nc genomic sequence.1
  source 1..816: mol_type = genomic DNA
gttcagttgccatccccgttcgggtggtttctcacggctaggcggaagtccagcccattcaacgtgagtccgggagttgggatatccaaaaaggagtcccgttttacttacacaccctcatgtctagccacagagggactgtgcggtagccactccgcacaaacggaaaagaggccagaggggatactcccccctggaccccttttccgtttgtgcggagtggcgaccgcacaggcgttaggctgctaagtagtctgcaagtagcttgcccactctctggggacaaagttctctggattggggtaagtgaagtgcgtgggctaacttggtggctgtagcccggatctggccggcctatgaaaccacggatccgcttcttttccctataccttttcccgagtgtttgtctgcaacttgttaagtgatttcttggtttgtttgacacaatcgctttggattttgttcttattttggtattttgaccactctagtatttgtgttctacctgaaattcccttgcaaggggtgtagtagggtgttgctcgtactagttgtggactccctctgtggctagacatgagggtgtgtaagtaaaacgggactcctttttggatatcccaactcccggactcacgttgaatgggctggacttccgcctagccgtgagaaaccacccgaacggggatggcaactgaacctagtagggctcgtaggaggcttgcacatacaccagattgggaattctggtcttgctcatgactgggtgatagccttgcggcggatcaagtcacagttgtaatccgttgatttgcaccc

SEQ ID NO: 133 - DNA, 833 bp, Harrier picornavirus 1
  misc_feature 1..833: note = strain harrier/MR-01/HUN/2014, complete1
  source 1..833: mol_type = genomic DNA
tttgacaacctggcaaccctatctctaggtaggatgctgtctttggcccccgcctcccccatcctcccgaccatatctctattgggatgtgttcgggtcgtcacggatccgacattcctaccggggtccttctggctacggctggtctgactttggtggatgtgtgacggtgtaattactttccggatcccactttcctattataactctttcatcccaaggttagggaaagaacctggctcggtaccaccagaccctccgccacgctagtggactctccggagataacggtaccccctttgtagtcacctgtgctggtgaagaaccacctagtattgcttgggtgcgtgccgcctagcttccatttcttctggagcactgtgcaatgaggtttccccacttggtaacaagtgcctcaggtcccgcaaggatactgtggggtggtgtgaccgcagggagctgtctccacggctcctctaatgttacgccgctatccacaggccagtgcgtgtcatcgatcccggatgacagagctagtattgcgaacccccaagtaagaaaagtggctagtaacctgatagctggtgaagagggtgggtcagttgagtagatgccctagaggtacccgaaaggatctgactagggacccgtgactatacattaggtaaaccgggtataaaaaccatgaaaaactgaccacttttcttttaacctcttctttctttttatgtgtgttaagtgttttgagtttggactgtaccttgcccgcctttcttggattttctctatcgctcttcttacacctactgttatcaaggcactctttagagata

SEQ ID NO: 134 - DNA, 894 bp, Equine Rhinovirus type 2
  misc_feature 1..894: note = genomic sequence.1
  source 1..894: mol_type = genomic DNA
ttttgtaactgaggttttgacatctcattgtttttgagccccaacgtcttggtggatgctcaaagaagattactcttgatgcttggctctcagaaagaatggcacctcaatgttttgagacccgattcttttgagtcgagaccatttccccttccctgaagattgcttttcttccaactaaacccctattgatgtgttggtcgtttgccaatcggagggcgacaggcacaggtcgctccgagttctagtagtgtgggaacttgttactactgatgaaacgaggtagtgacactcagtacctgcgaacgaggtcggggccctcccttcttccttcacccaactttcacttttcgttccactttagcaggggtcttctttctatccccctggcggcattggaactagccgtcgcgtcttaacgcgcagccctgaaggccccacaccttgtggatcttgccgtgggtatgtttctggcatgtgtttctcaagcctgcaaccgaagccgaacagccacatgaacagtttgagcgtggtagcgctgtgtgagttggcggtggatccccctcgtggtaacacgagcccccgtggccaaaagcccagtgtttacagcacctctcacatccaggacgaccccatcctggcgctcactcttagtagtatggcttagtacgcattaggtggtaagccgagctctccctcggccttgttctgaatgcacacatgtctaggggctaaggatgtcctacaggtacccgcacgtaaccttcagagagtgcggatctgagtaggagaccgtggtgcactgctttacagatgcagcccggtttaaaaagcgtctatgcccctacagggtagcggtgggccgcgccctttccttttaaaactacttgttct

SEQ ID NO: 135 - DNA, 897 bp, Equine rhinitis B virus
  misc_feature 1..897: note = strain 303, complete genome.1
  source 1..897: mol_type = genomic DNA
ttttgtaactgaggttttaacatctcattgtttttgagccccaacgtcttggtggatgctcaaagaagattactcttgatgcttggctctcagaaagaatggtacctcaacgtgttgagacccgattcttttgagtcgagaccactcccccttccccttgaaagattgcttttcttccaactaaacccctatcgatgtgttggtcgtttgccaatcggagggcgataggcacaggtcgccctacggtctagtagtgtgggaacttgccgctactgatgaaacgaggtagtgacacttagtacctgcgaacaaccctagggcaactcccttcttccttcacctacttttcctttccgttctgctttagcaggggtcttctttctatccccctggcggcattggaactagccgttgcgccttagcgcacagccctgaaggccccacaccttgtggatcttgccgtgggcatgtttctggcgtgtgtttctcaagcctgcaaccaaatgccgaacgggcacgtgaacagtttgagcgtggtagcgctgtgtgagttggcggtggatccccctcgtggcaacacgagcccccgcggccaaaagcccagtgttagcagcacctctcacatccagggaaaccccaccctggcgctcactcttagtaatgtgtcttagtacgcactaggtggtaagccgagctctccctcggtcttgtactgaatgcacacacgtctaggggctaaggatgccctacaggtacccgtacgtaaccttcagagagtatggatctgagcaggagaccgtggtgcgctgctttacagtcgtagcccggtttaaaaaacgtctatgcccctacagggtagcggtgggccgcgccctttcccttttaaaacttggtttc

SEQ ID NO: 136 - DNA, 1000 bp, Sicinivirus sp.
  misc_feature 1..1000: note = strain RS/BR/2015/5R polyprotein gene, complete1
  source 1..1000: mol_type = genomic DNA
gggtgggatggatcccgttgcgtgcctgcagccgctcggtgtccatccttcctgttacccaccatgtctggtggtaccccccggtcccttccctatccccccatacagccgggacggaccacttacctccgggtctgtggcccaaccccgactcggggttgtggcggtggtcacagctccggctgtgacctcctaaccactcccttcacctactcccttatatagaaacttaagtttgactccccctatcccaaggtcttggctcatgccctttaaggctatctagcacaaacactctttgtttggcgtctggagacccactgagctaccactcatccgcgctcaatgtaacccccattagtattcgtgcaattttaatagtagttctgctccggcagcatctaagtgcccagggagcccaactggtgacagttgccctggggcccgaaaggctaggtggcaggggcccggtcaagcaaggggttcccaccctgagctgatcccgcggtcccgaagccaccctttggatggaggttccacacccgactgctatttcttttgcccggtgaacctggctggaaacatttagtttatggatttgttggtctgtggtgattagtagaccccctggaggtacccgtttggatctgaccagggacccgtgactatgccgttccggtaatccgggtttaaaaccatgaacgtcaccactcgctttcttttccttgttcttatttcttttatattgcaaactattagtgagaattcgtgttccctgacctctgcgtttggtctgcattctcagttattcagtttggctggtctggattgtttgtttagatgctcctagagcttctgctggttgttgtcacacttgttatagtcgttgcttctcccggcgagttttaccagttgcttgctatctgcacctacaacttcctgttgatctttctctggctagttggcttgattgaactttccaactatcctaccattcaac

SEQ ID NO: 137 - DNA, 1000 bp, Sicinivirus A
  misc_feature 1..1000: note = isolate UT-G-Khajehnasiri, complete genome.1
  source 1..1000: mol_type = genomic DNA
atacctttaccttcccccactcactgatcggtgccaaccccaactccccagtgtcagatgcttttacaaactttatgctatggcgcgctggagtggcagtccacatttccacgtcggccagccccgctatggcaggagcgctactcgtggtggcatcacccgagggctttgaggacgtgcaacagcgcccatggaatgcgcaagttagcgggctaactacaatcccatatgtacttcttaacctgtgccaatccaattcagccactgtaatcctccctccttgtacagtcactccgtttgatgatgcccgctcccatacatcttggtctgtgcgcgtgtatgtcttcacacagctaaatgtccctaccggcgttgcaaatcaaatcacaattcaattgatgtttgctccccttgcttcccggtttttgtttgcatgtgttcccataaagcaccacctgcgcacccgcatactacccggttccggggatggctattcatttaacatcccccagaaccagggcgtccctatggctcaatatcttcctgaacatgagtccgcagactacatccctgggcattttgataattttgcacggtttgctaacgcccccgggctcttgcgcactgtgcgttggctctctgagtatactcccaacacacctcttcttcggcttaatttgaattctattagtctcggtcccgatacccacacccccttatcctatgtacttagtgcttttgctcaacaacgtgggtctctctcttttgatttggtgtttgttggggcccaggtccaatctgggcgcctgctcatatctataacccccccctcgcaggcccctcctgccagtgtcgaggaagccctccgtggccattccctgacctgggacgtgactgtgtcttgctgcagctcatttcacgcccccttcttctctgcgactgcctggcgatctctagctattgatggatccgctacaaaaactctctacaattcgtgggg

SEQ ID NO: 138 - DNA, 1000 bp, Cardiovirus B
  misc_feature 1..1000: note = strain rat08/rCaB/HUN, complete genome.1
  source 1..1000: mol_type = genomic DNA
ccccacggtaaccccctttggacgcgggacctgcgatagtgccaaccccagcctttcctacacccgactcccgaccctaacccagggtcctcggaagaggatcatacatctcatcccctgaatgctgactaatcagaggaaagttagcattttccggcccaggctaagagaagtagataagttagattcaaattgatacaacatccccttgacgaattcgcaacgaaaagtcgtccctcacttgccgcttgatcacacccacgaactcacaattcggcccctcgtgacaagccccttgttgaaacgacctctttcaatgcgacgtggttggagatttgtcatcttacgactccgacgtaactaccgtcatgcctccccgattatgtgatgctatccgccctgctgggtggagcattctcgggttgagtaacctacatcctttactccttggactccggtcccccggtctaagccgcttggaatatgacagggttattttccaaacatcttctttctactcttaagtgttctatacttaagaagggtatgtgttgccccttccttcttggagaacgtgcgcggcggtctttccgtctctcgaaaagcgtgcgtgcaacatgcagagacctgtgaagaaagcagtctttgaactagccttagtgcagacaagaaactggctgtagcgacctcacactagcagcggacacccctcctggtaacaggagcccctgcggccaaaagccacgtggataggatccactggtgtgagcggtgcatccccagcaccctggtttcttggttgtactctggtgaacccagagatggcaatcttaagcaactctgtagagaagccaagaatgtccggaaggtaccccgcttcggtgggatctgatccggagactcgtccacagtgctctacactgtggctcgggtttaaaaactgtcacagcttctccaaaccaagtggtcttggttttccctttttactcattgtgtcacg

SEQ ID NO: 139 - DNA, 1000 bp, African bat icavirus A
  misc_feature 1..1000: note = isolate PREDICT-06105, complete genome.1
  source 1..1000: mol_type = genomic DNA
aagcttgcttcaccagaattgctaggggcgaaccgacaacaccttgttgagtttccgtcccgagacaattcatacaagttccaagactcatgaagcaattggtgcgtactgacgattggtttggctcgagcacgtgttccgtccttgggataatacacaacgctaagtatccaagaaaggccttgtgtagtccctcacgattatgtcatgtctcgatgtcactccacgtggagtacaaacctctttccatctgtctaagcttttatggagtctcccacgattatgtgctctcaatcgtggttgtcgcgcggtctagttctcagcgcgaagtttaagctaagcaccctcgggcgttcccggattatgtgatcacatcaatttgatggctggtcaccacgcaacgcctggagagatactcttacttttctcttaagatccccggtcatttgacgcttgtaggatgatagggttattttccactataaatactttcatactcttggatgttctatatccaagacgggaggacctaccccgtaccccttagaggtgagatgccaagaacaggccctttctgttctctcgacaatggcatcataggcaacaagcatcacaccaagattgctaagttttgttaagagttcttcaagctatagggtggctgtagcgaccttctgatgcctgcggatttccccacggagcgatccgtgccacaggggccaaaagccacggctaacgcccatcaggagcggcacttaccccgtgccccacccttgaaacttgaatgttcacactggcttctctcggctttctgaactgtctgcttgttggggccccgaaggatgccctggaggtaccccattttatgggatctgaccaggggacacctcagctctctaagttgctggtgtttaaaaaacgtctaagggcccccaccccttaggtggagggatccacctttcctttattttttaaaactcttttatggtcacaattgttt

SEQ ID NO: 140 - DNA, 1000 bp, Aimelvirus 3
  misc_feature 1..1000: note = strain gpai003, complete genome.1
  source 1..1000: mol_type = genomic DNA
actaacaggtgaaccctgtgagtttccggcccaggatttaggatgacatgttccaagtcagatgccaacgacttggtaaggacgaatttgcccgcattatgctacagttcccgcccgggacaactgacaccccattaagctacaacatggctgaaaagggtgttgggtccccccggattgtgtctgttcatagtgtgtgtaacgtggtttaccatctccactaacattggactaagcatttcatctttcctccccgattgtgtactcacttggctaacgctgggtggtcgcggttgggtccttgatttactttttctcgtctaagcattccaactgtcctccccgattatgtgctcattcagttaactgctgggtggtcatgactaacatcgaggaatcttctgtctacgcttactttgagctccggtcgcttgacgcttgtagggcgatagggttatcttcctgacaacatctttattctacctccataggctctatctatggagacggagtgtggcacccgtcccttctttgggagcttcggtagtgacgccctttgtcactctcgccagccgaggcatgcctggtgccaggtagcaaagaaagtatatgcttaaggacttgactgatttagcgcaagagtttgtagtgatgtccatagtgtctgcggatcccccacacggcgacgtgtgccgcggaggccaaaagccacggtgttcacagcacccctatggatgcccacagaccccagtgggcactcttgttgccggactttcaggaaattaggtataggctcttctcaaactcctggcattggactaggtaagaatgccccggaggtaccccagtactccttcgggagtctgggatctgaccgggggccccacaaacatgctttacgtgtttcgtgcggtcaaaaattgtctaactagtcccaaccttgaacaagggattgttctttccttttattactgagactggcctatggtgacaacagaga

SEQ ID NO: 141 - DNA, 1000 bp, Picornaviridae sp.
  misc_feature 1..1000: note = rodent/CK/PicoV/Tibet2014 polyprotein gene,1
  source 1..1000: mol_type = genomic DNA
aatagagttttgccattctctaacttgtcaagatgggcacaatgatgctttgtttaacaaggctgatttttccttttgtaatatgagtggaattgtgttccactctattcttcttttatatacatcttatgtatgagactgactgcgtgtataagagaggtaagcaactaagacttgtaaccctcggagtgggttggaatgctgagctctacgcatgtggcgtagagacgatctcgggaatctgtctaaaagttgacataccgacctgtcgagactaataactcgattccattttaaatttccttcgtgttttagtcactttgtacacctaaaggggagtggcagtgggtctggatcctcattgttctgcaatgggttgtatcgctggtttaccacgtaagtccgcaaaaataggatcccatgttagagtgggaggaaggagcagtattagggctcctggccaaccctaaacaaagtgaatacattgtaaggtatgagtcatattactcaaccctttaaaggtgtaagtgttgatcttgtttcctggtaggctacgggtgaaaccaggagcgtagggagaccgtgaataatggtctttctgcaggggagacggaaatggtgtgaggtattccagtcatcgtttagatgccgtgtctaaatcactgtgccccatctgtaatcccaacatgcgacacccaaacttttaattgaatgggtagtttgatgagtgccccaaggtgtataggtcttgtgattgataaaaatgctatgcaggtaccaaatgctttcgcatgcgatctgagcataggtgggtgatcctgacccgtaattgttccctgtcaatcacgattcctctttctagtctaagctaggtttatggcacaatgtctaactatatgagattataagatattaacttacagaaatttagcagtcttattgtattttgttgctaacatactttcatttactgtctataattaatttagttctctttaaa

SEQ ID NO: 142 - DNA, 1000 bp, Picornaviridae sp.
  misc_feature 1..1000: note = rodent/Rn/PicoV/SX2015_1 polyprotein gene,1
  source 1..1000: mol_type = genomic DNA
cacatcttatgatgataggtctgcacctctcataagtaagtgtgtgtgtgtataatacagggtaagcaactgagacttgtaatcctgtaggagtgagttggagtgctgggcctgttccatgtgggttcaggacgatctcgggaatctgcataacagttcgcataccgacctgccgagactaataactcggttccaattgtttgttatttttatcctttgggttttagtcgctttgtactcctagaggggagtggccgcgggtctgctccgcctttcgcctgagtgacaggcactggcgttggatgctggtttaccgcgtaagtccgcaaaaataggatcccatgttagagtgggaagaagaggaagtcttaggtcctctgcccaaccctaaacaaagcgaactacacgtaaggacagcggtagcgtggtaaccctatacacacgtaacgtttgatcttgccaaccagtaggctacgggtgaaactggttgcgactggccactgctaacgtggtgtctgggcaagggggaacggtaacgaagcaagatattccagaaccttagggtccgagtctaaattgctgtgccacggctgtaaccccggcatgcgaacgccaagtgtgtgtttgaatatcacgttatttaaatccccaagtgtagtagggattgattggtgataaaaatgctgcgaaggtaccaaggcaactaaaatggtaacccgggaggaatcttaggacgaattggctgagtcctaagtggaccgggttccaatttaggggcacctcagggtgcctgctgcgatctgatcgcaggtgagtgaacccgactcgtaattgttccctatcaccatcatctctctttctagtctaagtaggtttatggcacaataaaagctacatgaaagagatttaattgttgttgttgagttgttattactttcaaaataaccaattggcttttatttgttttctctgctgtttaatttgctgcaattagtttaca

SEQ ID NO: 143 - DNA, 1000 bp, Picornaviridae sp.
  misc_feature 1..1000: note = rodent/Ds/PicoV/IM2014 polyprotein gene,1
  source 1..1000: mol_type = genomic DNA
ggccatggtaggtctgcacctcatggttcacaaaagtatggacatacaaatttagtataacaaaattgtgtgtgtgtataattgtaggtaagcaactaagacttgtaccttcaaggagtgagttggaatgctggcaccctgtcatgtgggcaggggtcgatctcgggaatctgcataagtgtttgcataccgacctgccagatttagtagtctggttcccaccggtttgttattttcttccttcgtgttttagtcgctttgtacacctaaaggggagtggcagcgggtctgctccgcttcggcgttggatgctggtttaccgcgtaagtccgcagaaataggatcccatgctagagtgggaggaaggagaagttttaggtctcctggccaaccctaaacaaagcgaacattgtgtaagtatgtaggctgcatgctaaccctttgtatgtgtaagtagtgatcttgtcaaccagtaggctacgggtgaaactggttgcgtttggcagctgtatccacggcatgccgagcaagggaaatggtaacggtgtgaggtattccatgacttcggtccgtgtctaaatcacagtgccccggctgtattcccgacatgcgctacccaagcatgcaattgaatagtatgtagttgaaatacccaaacaacgtagagtctagtgttgaataaaaatgctgcgaaggtaccaaagcggctcccaaaaattgaagccgggaggaagctagtggcaaatctggccccacgctgctagtggatcggcttctgggagtgtgaggggaaaccctcacggctgcgatctgatcgcaggtgaacaaacccagttcgtaattattccctgttcaacctaactctctttcttgtctaggctaggtctggcacaatgaaatgctatatgaaaagagttttataagagattttgtgttttgtgcgctttgtctgattctttcaggtttttactattaaagctagttataaagtaaatttgaa

SEQ ID NO: 144 - DNA, 1000 bp, Picornaviridae sp.
  misc_feature 1..1000: note = isolate ybw202pic01nc genomic sequence.1
  source 1..1000: mol_type = genomic DNA
taacatttccaagtcagaccgtgaaatccatctcagtgggatgttttaggtctatcccaaagaccaaatgcagtttaacgacttgcaggtcggaaagagggatgcacgtacagggaacatagccctgaaaacgtgcaccccgctttccgacctgcaagtcgttaaactgcatttggtctttgggatagacctaaaacatcccactgagatggatttcacggtctgacttggaaatgttaacctggacttgagtttggattgtgattccccgggaatgtggagtacccggttaggcaggacttatttttactgcctctccaccttagtttatcacctccttatgaaggatccattagtactattatgatgaaaatggatgaatgggctagcgccagttagattgcctagagactacctccctggtaacagggactctagggcccaaaaggctaggtggtcggattagcaaccaagaaagggtttatgattaacccaatctgaacttgcgtcctaagccacccgtctaacccctgaccccgaggcattcatccactagtagttgtaatgtggaaagtgttggtcttttgtaaggatagtttaagctaagaaatcttggacccgtgggagtagatgccctggaggttattactgaccaggggaccgtgactatagcgttccgctaaaccggtttaaaaaccatgaaactatgggtccaagtgcttttcttaatcttattttactttaatggattgcattgacgaagttgattgtgcacagtgtgatcaaccatcgattaccttgagagtggtattgaaagtgattcaattttttgagtgtgcttttgaatgggtgcatcacctaccaaagactccagagatagtggaagaagtcaaagaagccaattgccatcagctagagaattcagaggattgagttgggaagaaaaaccttgcacacagttgacaaccaattgttgtaagggaggtcaattgattggaaa

SEQ ID NO: 145 - DNA, 1000 bp, Picornaviridae sp.
  misc_feature 1..1000: note = isolate bs219upi03 genomic sequence.1
  source 1..1000: mol_type = genomic DNA
agaccgttgttcactctaaaccttctaaagccacaatgcggttggacaaacatggcaatctcggtcttccgggaaaacctaaactatctggcatacaacagatcgctgtaccgccatctcgcccgaaagctggttcaattcttgatgaacttttctctaaaggtcatccaggaattgtcaccaaaccacgtcctaccgggccaaatgctgttactgcggggtcatataaccctgcgcctgcacctgagtcctatgaagacttggctgctcgggctgctcgatatgccgctagtcgtatcggatcctgggcatctactcaatcccaggtacctaccagctgggacgaagatttggctaccgacgtcaccgacccctgcacatctgggcccggtgacctatctgtcaaatcagaacaagcaaatgatggtgatacagggtcgcacgtatctgtcggatcgaaaggatcagctgatgatctgccagaggatcaagtcatcctggtatcagacccacaaaccacgtgtctggaccaggttgactcctgctaatttgtcccgcccacccttctcctaccagggagtctacggtgccttcctcgccgtggatgacaccatatgggcagggccccaaatggtgccggtaccacacaagcttgtgatgtacctccttggaatgagtcaatctccccccaaccacctgaggcttgcacaaaccatcttagcctcagttcctttaacggaacgagctggtctcacccccgaaagcttgctggaatttgcagtggcctacctaaagcacctcaaggctgttccagtaaatctacgacacgaggatgatacaattgcacgccctgataactggctagctcctgacgtcccagtacccatggcagaaggggtgggtctctgggaagggcccgactttgccaatcggcccttttcgtcatagggggacggttctctgtcccccgctcataactggcttcactcccggtttattc

SEQ ID NO: 146 - DNA, 1000 bp, Enterovirus E3
  misc_feature 1..1000: note = strain Papa, complete genome.1
  source 1..1000: mol_type = genomic DNA
ggtctggggcaaacattatcggtactgacaactctgttgtgctgtcgcggaaatatacatctttcccatggctgctaggttgtgctgccaactggatcctgcgcgggacgtcctttgtttacgtcccgtcggcgctgaatcccgcggacgacccttcccggggtcgattggggctctaccgcccccttctctgtctgccgttccggccgaccacggggcgcacctctctttacgcggtctccccgtctgtgccttctcatctgccggtccgtgtgcacttcgcttcacctctgcacgttgcatggagaccaccgtgaacgccccccggaacttgccaaaggtcttgcataagaggactcttggactgtcaacaatgtcaacgaccaggattgagacatacttcaaagactgtgtgttcaaagactgggaggagctaggggaggagattaggttaaaggtctttgtattaggaggctgtaggcataaattggtctgttcaccagcaccatgcaactttttcacctctgcctaatcatctcatgttcatgtcctactgttcaagcctccaagctgtgccttgggtggcttttgggcatggacattgacccttataaagaatttggagctactgtggagttactctcttttttgccttcggacttctttccgtctgtcagagatctacttgacaccgcatcagccctgtatcgggaagccctagaatcgccagaacattgttcacctaaccacacagcactcaggcaagctgttctgtgctggggtgagttaatgactctggcttcctgggtgggtaataatttggaggacccagcatctagggagttagtagttaactatgtcaataacaatatgggtctaaaaattagacaactgctgtggtttcacatttcctgtcttacttttggaagagaaacagttttagaatatttggtgtctttcggagtgtggattcgcactcctccagcttacagaccaccaa

SEQ ID NO: 147 - DNA, 301 bp, Daeseongdong virus 1
  misc_feature 1..301: note = isolate FTA2-2, complete genome.1
  source 1..301: mol_type = genomic DNA
gtcatctataaggatgtcggtggtaaccccacaacggatgaccactgcaatcagtggcacgtgtaaagtcgagataaaataaacaaataagtgaaactctgctggatcctcacccgatccactaccgtaccactttcccaaatcttcagacgaaagaaatttttgtctgttcgctctgctcatcctaatccggtgagaataaacctgctcctcctaactcggggagtactaaactcgtcataatccgacgagaactgtcacttttaaccaaagtggtcaactgaattttcgcaaattcaaa

SEQ ID NO: 148 - DNA, 308 bp, Solemoviridae sp.
  misc_feature 1..308: note = isolate bsk136shi11 genomic sequence.1
  source 1..308: mol_type = genomic DNA
gtaaatggttcaatgaatcatttaattctgcgcttttagatttagaccttgcttctgtacccggcgtaactaccttaagtcggtatggtaccacattaggagagatcttaggttttgacggtcaaacgttggatcctgagagagtggccatactgcgtcactatgtggtggacaggattcaggatcttttgcatgggaaacatgtagctgatcctattaaactgttcataaagcaggaacctcataaactgtcaaaaattgaagagggccgtttgcggttaatcagtgcagtatcagtagtcgatact

SEQ ID NO: 149 - DNA, 321 bp, Wenzhou tombus-like virus 17
  misc_feature 1..321: note = strain WZFSL82820 hypothetical protein1
  source 1..321: mol_type = genomic DNA
aacaacaacaacaacaacaaccgcaacaagaaaccgcgtgcccctaggcgtggtaaccgcaacttggttgctgatcaggctatcaaggatgtccaacgtctccagggtgagttggacgcattaagggacgaaaaatcccaaaaagagcgagctcgagaacagaaggaacaggaacatgaagagctccgcgatgaaattaaagcgcgcttatctggcggctttaatattaaatgggatccacaagttcatcgtgtggaccgtagtcgtgtgtggcgagcgttagcttactgcatttgggtgcttgcaatcaccagtattgca

SEQ ID NO: 150 - DNA, 326 bp, Xingshan cricket virus
  misc_feature 1..326: note = strain XSXS-2 polyprotein gene, complete1
  source 1..326: mol_type = genomic DNA
ctcaggtttagtgcttgcctccgctgcttttagcttgcttgtaggctgtttctttggacctgagtagcttatttgctaggcgatagttcgtgcttacttcttcggaagttactcttatttgatttctttcttcgcgacgagaggacggagccttgtctttcccttggaaagtttgcgtgtggtaacgcccacctgtaatcaaggacgctgctcccggctagggatccccgaccgtttaaaggttctacacattgctccgggtgtagaggtaggaagaaataaattttttcaaattaattcttgtttaagacttgaaaccggtaaaa

SEQ ID NO: 151 - DNA, 333 bp, Persimmon latent virus
  misc_feature 1..333: note = genomic RNA, complete genome, clone:1
  source 1..333: mol_type = genomic DNA
gatttaaaccctggttttcttcatctttttgaaggagattttttagggttttaaatccctttctcagttgggtgttcgcactcgattgtttgagaccttcgggcggcctacgtcactacccattcgggtaggtacaggtttctgatctcttgaacttttgagtgcgttccatcaacccgagaaactggggacttgacccggatcctgatgcgtggcggtaaagaccgaagcaggattcggaccccaaggccctgagggagtggtagggaagaggtccggtgctctaaataaaaccctacgctcaacacccctcagggtgacgagcactgagcc

SEQ ID NO: 152 - DNA, 341 bp, Hubei sobemo-like virus 3
  misc_feature 1..341: note = strain WHBL72900 hypothetical protein 1,1
  source 1..341: mol_type = genomic DNA
gagatgtttgcgtgggccgttgcgctgcgggcggcccacctccctacggggaccgtgagacaccgctggggaaggcccccacccccggccaaggggatcctgccgagaggcaggagaaagaggcccagccctctggggcgcctttaggggcgcctgggagggaagtacccgagccgggcggccggtcgggtgcggctgtgcagttcgaggctaaccgtaaggaaggcctgagctgcctcggcttgtcggaaaggaagacgaaggcacttatcaaggctttcaggaagcaggagcgcaattacagcgcgcgccgtgcggcctggattaaccgcatttggccg

SEQ ID NO: 153 - DNA, 346 bp, Arenavirus sp.
  misc_feature 1..346: note = isolate RtRe-AreV/Cs2008, partial genome.1R
  source 1..346: mol_type = genomic DNA
tgttacagaactgtgtcccaaaatagataaccactatgcctaggatccccggtgcgcagccaaacacccttatttgtggattaaggtcaatgcttaacaaagtcaagtcaatgaaggtcctaaatactagaaggaagatgctcctactatttgatacatttatcctgatggctcatgtaagattcttcaaagaagagtcattgtatgcagaaacagagtggttaggttcatccttttgcagcgtcaatgataggctggtctccttagatgaaacggtgcagtctttgactaagtgggttagggccagacagagaaattactctaagaaagtgcctgagtgtgtgac

SEQ ID NO: 154 - DNA, 348 bp, Beet necrotic yellow vein virus
  misc_feature 1..348: note = isolate F72 RNA 4 segment, partial1
  source 1..348: mol_type = genomic DNA
agttgattgtctgtaaaacaattccagttgtttgtctgtaaaacaaacatatatgcttgatcagctttgtagatccttgactatcaattttatttctatcattgaattcgaattgtttctgttgagattctctttacgatttgtgtcgtcatttcgtatattggaagacgggcctgattccagtattaattggtcagtttgtaggtgcagaacgcttttaagtgagacctaagactgcgtcggaaccttagattcacgagccgcgtgattaattgggtttgtcactgggatccagtctatcagtaaggggtaggttttttgttgagacttatctgattagtaacattt

SEQ ID NO: 155 - DNA, 362 bp, Wenling picorna-like virus 5
  misc_feature 1..362: note = strain WLJQ102796 hypothetical protein1
  source 1..362: mol_type = genomic DNA
actgtgtagttgatttctagcacagcggtattaaaatttatcattgaatatatcataactatatttcggttttcactgagtataggatcctttactaggactcggggtgtcattgacgctttcgtaggtggatcacttgatagacgtcaatataaagttatcaatacagagaatcatttatgcgctgatttgtaatcggttcatatagcaatttatttatgcatagatctgtgatcagtgtatatagcacaatagggataatttgtgtacttttctgtgattagtacgcatagcaaaatttatagtattttgtgggattttctgtgattataccacatagcaaaatagttaagtatttgaac

SEQ ID NO: 156 - DNA, 367 bp, Yongsan picorna-like virus 3
  misc_feature 1..367: note = strain YPLV3/16-0052/ROK/20162
  source 1..367: mol_type = genomic DNA
aacatgacccgatcgcacagttgaaacaatacaatgatgtcgtccagcgcccaaacggggggagagtaaaccggatgaaaacgaatgataccctatttgaagagctttggatcctgaagaacagcatggataagggagcacgatgaggaataagatccagtgcttcatccaataacaatgtcgggaacaggggagaagtttaaactctttggtagggtagatatgtctaattggaaggtgagtctccctagactagttgattgcggagacaatctaggataacggcaacggtagaataataaatgtagcgtgtccttaaggagcgcttgtatcgtccccaaatcagaaacataaacataaaacaaac

SEQ ID NO: 157 - DNA, 370 bp, Charcot virus
  misc_feature 1..370: note = isolate Antarctic66 maturation protein and1
  source 1..370: mol_type = genomic DNA
gcctgaagaaaacgtcgggaaccccgacatccgtcaactatgcggatccttctaacctaaatactacggttaaggtccgtgcccgtatacagcccgttaacaaacgggatgggaagtacaatcatgttcgccaagaaattcgcgtcggtttcgaaacgaaacctcctcgcgcttgcgaacagagttgtgccacctctccagttgtgctcacccttgtttggagcgcgccggaaggtgtccaggccgatgtccctaaagcagtgttggacaaagtcctcgagcatatcgctcttggtactgctttcttggctggacctgatacacttgacgttgatacaacgctaactactaactaaatggagtaatactc

SEQ ID NO: 158 - DNA, 373 bp, Sanxia picorna-like virus 11
  misc_feature 1..373: note = strain SXXX37695 hypothetical protein2
  source 1..373: mol_type = genomic DNA
aagcattgacacatatgtcattgccccggttatatgcttaagtgagtctactactcagactttaagagagaggagggcgatgcggtgtgcttgtttgagcgacagcacacatgaaatttagcttacaagtgatataacaattaaagagcaagagtgctcatcgtttgaaggtttagcgttaaaaccggatccagaagtgattggagtttcatcttttagtaatgaggcaggacaatgtgttgaagttaaggcttcggatagcttttattctgttaatcaggttgctgatttgcagtctgttaaggagtatttagctagacctaggctttttgacacttttgtgtttggtactagtcctggtgtggttacgacg

SEQ ID NO: 159 - DNA, 379 bp, Hubei sobemo-like virus 12
  misc_feature 1..379: note = strain spider127544 hypothetical protein1
  source 1..379: mol_type = genomic DNA
ggcggtgtttgattacatcgtagcctcggcggagtttgtgagacagaagttgcagttgtcaccttatacttggtttcaactcatcctctgtttcttagtgctcctcccggcagttgccttttaccttagggtattttggtggctgttgagaacctcttggagattctcttgcggattgggacgttggttttgttacgttggatcatgcttgaaatggaatgttaagaaggtttttagggttttccggaaaactcccttacagtatgaaccggaggcctatgtcgctggatccgaatatgagcaagtgaaagaactgccagcttgtcagtttttgatcttaggaaatttggaatgcggtgacgttttgactccggttggt

SEQ ID NO: 160 - DNA, 384 bp, Picornavirales sp.
  misc_feature 1..384: note = isolate H1_Rhizo_26_FD_scaffold_168 hypothetical1R
  source 1..384: mol_type = genomic DNA
tcatgaacccacagctcccgtattacggagctatataagtagttttactatgcgttagaaaacgacttaatgtattagttacaggattggtaactcgaagactatgagagtttaccgattatcggatacattattaaaagttctgcttaggtgcaaactaatcagatggaactataaaacgtcagattgatagtctatatccctaatctttaacgcgagcatgggatgaatataagcgttgctgaatcaaataatttaaaaataaatcagtcggaaaccactagcgagactattggaatcgtagactttaaacaggatggagaaattcatgaagcagaaatcaagaatgagattatgttggatcctactttaggacagactatt

SEQ ID NO: 161 - DNA, 386 bp, Beihai narna-like virus 19
  misc_feature 1..386: note = strain BHNXC41285 RNA-dependent RNA1
  source 1..386: mol_type = genomic DNA
gtttgggctcagttttccctatttagggaagtgtacacggtgaggattcactgcgtagacaggatccactgcggcctggaccaccgtagttcctgtctacgatccttgaatcggatctgatgtgcacgtacgtctcagaggttttgcctaaaacgctctgatgcgcagtctgggttagctgcgcactcgaattatgacctgctaaccaaaaaggaaagcatgatcatgcggacggcgtgagcctgtccattgatcgagggcaactaaactgtttggaggacgttctctattcctatgagaacgtggttccaaacggcaggcgaccacccaatatcgacaagttaaaagaatgtcttgtcgatctccggaccctcagggtcaacggc

SEQ ID NO: 162 - DNA, 389 bp, Andean potato mild mosaic virus
  misc_feature 1..389: note = coat protein gene, complete cds.1
  source 1..389: mol_type = genomic DNA
ttcgccaagctcatgatctgcgttgatgatggaagccttgaggacaaaaaactgtcttacttgtctgaattctcagtaggtcatctctccggcgactgcatccaagccatcttacctccatcgctcatcaagtatcagtcagcatgtcatgacttcttctgccacaattgcaccccatcccaaaaaatccttctcagcctggatcccatccctgagaacaagatccttcaactcctcctcaaagttcgttgggcttcacaggccttcttttcttaccttccccaaaaagccagagagttgctaatctctcgctccagccttccttcccttcactctgatcccaaaatctccctactagagtctgaattgcttccctttttcaattaatt

SEQ ID NO: 163 - DNA, 390 bp, Mossman virus
  misc_feature 1..390: note = complete genome.3
  source 1..390: mol_type = genomic DNA
gacaaagggggcatgactgaccagtgctagtatacttatcccctgttcacaaatatggagtcagcagaatattcttttaaagaacagatcatgcaaacatcagccatctacttccatgataaatccagataatacagtgtgtatgtgtgtaaaagaccccccaaatcctatctgtacccttcacaagatgaatataatcctttcttcagccatatattctctatgcctaatagttgatctccatgaagtacaagatttagaccgtaatgtaatactgtcctttgtcatttttgttcccacagaatcccagtaagttactctagtgttagtggtgatgactaaagaaaaacgtaggatccaggatcctaaagccaacttttggggttcaaa

SEQ ID NO: 164 - DNA, 393 bp, Scaphoideus titanus reo-like virus 1
  misc_feature 1..393: note = isolate St_USA segment 5,1
  source 1..393: mol_type = genomic DNA
tttaattgcaattctagtattgcaattctctagggaaagccaatcttatttttattcattctcaaattattaagatttatgatttaattcagatttaacaatttataaaaccccagtaaccaaattttgaaagcaagatgggctttccctagagaactgtaatacctttcatttgacactaaaatcaatttttttcgacaattgatggctaccagtgatgactcttaagcactcttgactgattcacacttgttagtatggatccaaacttcgtatggatttagtaaattgagcatgtcaagactacttttcacaggatttaacactaaatagacccccccctctcttaaacaggtgcttctccaattggctgggtgggttcatgtacaaaaa

SEQ ID NO: 165 - DNA, 400 bp, Hubei hepe-like virus 1
  misc_feature 1..400: note = strain WHCC116187 replicase and1
  source 1..400: mol_type = genomic DNA
tagagggtatttacatcctgcgatcttgaactttacttaacagttatacaagtttggtcgtcggatgtacggttgttgactcgctgagaactctcttttgaaatctatccagacattcttagagatcgatctcgcctctcgacaatcacatactggatcctccggaagagattccgttagaggaactggtccaaccagattttcggatctttgctggtaatcctcttcgtttcgtggagttttatcgcatactaaattttctcagtttttctttattgttattttttattttatatttagattattacgcggtctattataataccttctacttttatcattctccttatttttctcttccttattcaccttatccttatcctgtttctttcgcttgggt

SEQ ID NO: 166 - DNA, 411 bp, unidentified
  source 1..411: mol_type = unassigned DNA; note = Diatom colony associated virus-Like RNA Segment 3, genomic RNA,1 sequence
tgataagcatccagctaactatcgtatcgcgttagtgctagtaggttgcttatactcggagtgtgttctccgatccctttttagggaaacccggagtcaatatgacttcaaggtcgattttatcggcctattcagtgtggccgcaggaactctaaccgctacctccgcgaagcgattacgtgggaccgatgaggagcgaggacgagtcagcgttgcactagtacgaccagggagggttccgttgatctgagcttgtgctaatttcaccggatccccctgagcaaaatttcgattctcttcgttcttctgttctccctagtcgttactagtgtaacgctcgcctacggcctcactcactcagttttcatttatcgtctcggtttcccctccccctacccgatccgaccaaag

SEQ ID NO: 167 - DNA, 411 bp, Mossman virus
  misc_feature 1..411: note = complete genome.4
  source 1..411: mol_type = genomic DNA
gcagcagtaaattgtttctaatgaactcagtttataatccatgctatataagagtccataggttgaacccctgcagacttacaacacccttttggctctgtcttagagaattatctacaatcagtattgcagtggattccttaatacttgggcattatatttcctccaacacatatcatggtctgtataatgcttatcagattgtaagacacctagggtatgagaactaaaaatggtactcagtaagagaatagattaaaactactagatattaagcctcatcagtatagacttaatagtgttttaacaattatgttaatttgatatttcggtcagtagtattaactaacctcatttgttagaatattacaaaaaacttaggatccaagaggagctccgtaagctccaata

SEQ ID NO: 168 - DNA, 412 bp, unidentified
  source 1..412: mol_type = unassigned DNA; note = Uncultured virusisolate acc_7.3 hypothetical protein gene, sequence
ggccaattgcctacttctatacattttatgtgtccccgtttcaattgaaaaattgaattgaactcaggaagactagggaccgtgcctgagttggatcctagatccatgtgcgtgaagcatacatagtaaatgtaagaaatataattaatattcttcttttttaaagattaaaaggtattttatattgtccgagcatttacgacctagtttttactaggaacgcccctttgacaacttggggcaaacccgcggcggtctgctattgcgacacgtcgaaatggtcactgttagaattgtataggtggcctgttaaccatatatggggtaactgtaaaaatagttatggccaaaatcgtcttaatagcctacagggaggcaacagggcgtgctaagtggtaatttatttacctaa

SEQ ID NO: 169 - DNA, 413 bp, Lonestar tick chuvirus 1
  misc_feature 1..413: note = isolate RTS21, complete genome.2
  source 1..413: mol_type = genomic DNA
atttaaggggatccctggaaaacatatgtattattgaatgcggcccatatagcccttattgccgcaaactttccaggtagttatataacccattttactatgagcccagtaggaatataacctctcactgtgggcatattgtatgtttgtttgagctgtattaaaaaccatcttgggccatagagccattttgctagacagctgatccggagagaccagattccgttcatacagtgcgattgtgagttttcaccattgcgtttcttgctttgcttgtggagtttaatcaagtgtttcgtgaaatacttgacttctccaccgaagtagagacctcccgtgacatcctagtcgctatcgacctgctcgagagagcacacgaacttagtgaagacatacttgatctttacacaaca

SEQ ID NO: 170 - DNA, 414 bp, Thrips tabaci associated dimarhabdovirus 1
  misc_feature 1..414: note = isolate Tamono1 RNA1R
  source 1..414: mol_type = genomic DNA
aggaagaagaattctcagtagtttgattgttttttagacctgcttggcataacgggacaagaaattgtgatgactccctatacatatcgctttgccaaattaatcttaagtcccggtacagagctggtctctgaatcggatcctatatatccttatatataaaggcctaatactgctaagtactgacatttactagtttgtaagaatcaacccagggggaaatgttggacggatacagattaagtgcaaggttcttgtacttaaggatgggaatctcagggttttgcattagaatcgtctccaataagggatggattacatcagggggttggagtgttttatcaattacttaaatttaagccggatgttaattaagatgtataaattgttctgaaaaaaactaacagacgtaat

SEQ ID NO: 171 - DNA, 429 bp, Ying Kou virus
  misc_feature 1..429: note = strain YK1714, complete genome.1
  source 1..429: mol_type = genomic DNA
gaaaataaaaccaatacaatccacttttctcagttattccctgacccggaataaccccgaaaaacaaaaattccctggtaccctaacccggtatcacgaaatcgcttaccctgacccggtaagtccaaatccgctggctaacccccagttaactggtacgcgagtaattcccgtactttgctcccttcgcttaccacgaaggtaactgcccaactaacccttgggataaattctggttgacttaccctcaacttttctcgcacggctcacccccgtgttatctgttctcgctaaccccgagaaacttctcagaaccctcacccggttccaactgatccgctaaacccggaatcaattctcaggatcctaacccgatcctcttcttctacaggaccctcacccggccctctaatccacatcggattaaca

SEQ ID NO: 172 - DNA, 440 bp, Lunk virus NKS-1
  misc_feature 1..440: note = RNA, segment L, complete sequence.1R
  source 1..440: mol_type = genomic DNA
cgcaccgaggatcctaggctattttgatgcgcatttttggtatctggaatggaagacattattggagagataaggcatctgtgtttaagttacatgagtcaagatgagcgtctgtccaggcaaaattaaacttcttaagtcagtcagagccgaagctgactttgatagaagggttgaagttgttatcaaggtgcatagagatagacagtgctgacaagaatggctgtgttcacaatcatgaagacaaatcagtggagaccatcttgattgaggctggtgtcatctgccccgggttacccctgattattccagatggttataaactgattgacaacaccttaatcttgttagaatgctttgtgaggagttccccggctgggtttgaggcaaaattcatagaggacactaataagctttcaagcatcaaagacgatttggca

SEQ ID NO: 173 - DNA, 464 bp, Beihai hermit crab virus 3
  misc_feature 1..464: note = strain BHJJX21702 putative glycoprotein,2
  source 1..464: mol_type = genomic DNA
aatccttctccaacaatctccctccctctcctcaagagtatcctattattagggatcctcattcctcttgcatgctgtaaatagttctcagtatagtagtggacccatatattcttgccatagtattttccatgcttttcatacaatattagtatagcccaatgctcttgtccatgtctgcctgtatatttgcttatgtcgtgtgctgctttaaaaaacaatcaacaacctcgagtagacccttaaaaaaagtgtcctaaacaatttagttaaaaattagaattgatcctttaattcttgctagtcttcattacccagtgaattttcgattactcagtttttgttttttgtggatcggaagattaattctctaatttgatcggaacacagagtctatcaacctgtctccctgggaaaagacagccctggttgttggtggtttgggtcttgtggcgtgttggagg

SEQ ID NO: 174 - DNA, 468 bp, Elephantopus scaber closterovirus
  misc_feature 1..468: note = strain pt171-clo-1, complete2
  source 1..468: mol_type = genomic DNA
acacgaagtgaccgttcggatttaattgctgcgatgagtattcgacgcgtgtggttaaaggttatagctgtaattacagtgttgtggtacggtaaggaaccttccattagtgaaggttacaatgctcttatgaacgatgactttaagtttatcgatacacacttctcaaacgtttcttatgctaagaaatgttatgatttggctaatttcgatttggactttctgcgcatcgttattattcctttgagtggtggtacggtaaacgaatcgcgtgccgatcgcactaacgtttcagagattgtcgaatcgcacatgagcgaccgagacagaatgaatatcttgttgcgtaataagcggatccagattccttcgctcttaccttgcgataactagagtctactcagtagtgcgtctactagtataacgtattaaacactttagtaaagagttttgtttaagttaaacaat

SEQ ID NO: 175 - DNA, 471 bp, Lake Sinai virus
  misc_feature 1..471: note = isolate LSV3/PNG_Ac-b putative capsid protein1
  source 1..471: mol_type = genomic DNA
ccgttgcgcaccctctctaagattcacgtgtgttgcgccgatggatcccccaataacctcattgttgctaaggcccttagtgttctgaatctcaatccctccacacccattatcacagccttttgtcgacatatacttaatgtcgttcgttccaggttgctgaatccgcgaaatcgtaacagacttgctgctgccgttaagcgtgtcgcaccttggatggtttacatgccttttcgttacacgccttattatgctgagccatgtcctgccactcgcgccgcgtttgctgtgcgcacaggcatttcccctgccttgcagatcgagtacgagaagtacttgctttctctaacgtttgtaccatctaggtatgtcctgcttaagcgcgatgttgagctcgatggcctcagtactgtcctacttggcgacttccggtctgtcctttacgcgtagaatcaagaaatttactacgcc

SEQ ID NO: 176 - DNA, 473 bp, Fusariviridae sp.
  misc_feature 1..473: note = isolate H3_Rhizo_Litter_15_scaffold_562
  source 1..473: mol_type = genomic DNA
tgggctctggggctggcaacatttctgcatctgcaaatcaagatcgtgcagatttggtcacaaaatgcacaaatttgatttctgccagtcttgaagctgcatcctctggtgacccttcattgttgaatgggatggaggaattagcctattttaacggcgcaactggtattgtgttgaaaatgtctaatttcctttttaaacttgtgtcagacccagttggtgaggtgtctgaaatgttcaatccaaacaatagggatccaactggtacactacgggacgtagcaaacgtgttttctatccttacaagcctggcttcaatcagtaatgattaagcattggcaaaaatcttatgatcctgaagagtctgttttacagcgaaaccgtcaaggtaggtcaacatgagtaccaaaaattcaaaagcccctagtgtggcatcgaatgagtcagctggtcaatcgttagttcgagagatc

SEQ ID NO: 177 - DNA, 475 bp, Fusarium langsethiae hypovirus 1
  misc_feature 1..475: note = isolate FlHV1/AH32, complete1
  source 1..475: mol_type = genomic DNA
gggggtgtgaaaacctacacctattcacaatgttttcattatgaatcgtaggttcgcttcgttgcacagggttaaaatcccgcgctattttgtccgttacagacgcatagcagtgcaagcatacttagtcttaggagtatgcatcctggaagtttgaccggccctcatgggttagtcttttaaaatctcgggagagatctttgtggatcctagcgagcatcaatcgtggtaagacaattttaaaattggtgcgtgttaagacacacttgttagaaatttcattcagaaaccgttggcagttagcgaataactgtgatttgactgaaccccattatcagaacggcaagaaagatgaatctgtggagtagtgccctagaagattcaatcctctttctcgttaatggcttgtcacccaggccctggccgctaaaccagtttatatttcatcctagtttcttttaggattattagctca

SEQ ID NO: 178 - DNA, 483 bp, Wenzhou yanvirus-like virus 2
  misc_feature 1..483: note = strain beimix74779 RNA-dependent RNA1
  source 1..483: mol_type = genomic DNA
ctggtgtaaactactttgctccccgggtagcttacggtcgagtcgaacggcattgaaaatgccttacgactcgatcagatgacggggagcgccccccccaggtgtttggtcgcacctggggggaatgacggtaattcacagaatagcgccgagctggaactggtgaattggtggacgtggatctaggtcttttgggttgacttaggtgtgagtgtaaagtgggtgaaaccgcagcccgaataagctcgcacgacggatccatgtatcaatactattactcgaacgcccaaaacacaggccgtgtaataggaacctgcgaaagcagtgcaattgggagaagcccaccgttgcatcaccaatcacctccaggcagttctgtggagggcccgatatgtcgacctcactcggcacgcgcgctcagcgtcaggcacgccacggtgcctgacgtttacacacacaacacacacacagcactttccttat

SEQ ID NO: 179 - DNA, 500 bp, Picornavirales sp.
  misc_feature 1..500: note = isolate H2_Rhizo_32_scaffold_97 hypothetical2
  source 1..500: mol_type = genomic DNA
acgtacgcactctattaactaaaaggtatgcccgaagttcctaaatattcgggggtttactctttccacaaaaagagattaacatggttgacttgctccataatgcaagcgcttgagaacaagctatagttctgatggtaataccccttgaggaatccatatttctaggatccgttcaagtccgaagaattgcgcctcattgaattgagcataatatcgcgcgtgtcgtaggtgggccaccacgcgtatgatttaagtccactgctgattcaggtaatgaattaaaacttgggaatgaaacccaaacaaaaacagaaatcgactctggtttagtaacttttgaaatcaaggaagaagagataatttcggttagtcccgaaattgtaccaagcttcccggttcaaaatccttaccagaatcaaacagcctctcagatattatctaggtggcgagcaataggttcccaatcactgggtttaacgactcagtttgggacaaaa

SEQ ID NO: 180 - DNA, 504 bp, Diatom colony associated dsRNA virus 7
  misc_feature 1..504: note = genomic RNA, complete1
  source 1..504: mol_type = genomic DNA
tgaatatgagcgagagcaccccataggtacccttctcatacaccaggtagtcctgggggtgacacttcgcctagctatgcaagagctttgaaagtgttcacctgagcacgcggcctcgtcagacaaggttagcgccgaaccccactagctaagttgatgctcaatcgtagtgtgtgtgttttctagcattcacgccgaaggttactgagctctgtaagattcacgtctgcggagtagtgattcaccgttaagtcgggatagcttcctgtttggaaacactcaggatcagggctaagaccccgtagaacagtagccgagtagtacaaactcaaagttagtcttgtcgagtctttcgcgcagtacaatcagggtaagaagccattggtaattgatggtggatcctatgaagttgtagctagctgagattctcatatatcttagttctagtaacaaaatcataggcgtgctgcacgaagcagaaggttttaagtgatattatcgctg

SEQ ID NO: 181 - DNA, 508 bp, Wenzhou picorna-like virus 51
  misc_feature 1..508: note = strain WZSBei69571 hypothetical2
  source 1..508: mol_type = genomic DNA
tccatttggagcgtgggtgcgctccttaaatatacgcccttttaagtggctggcaccacagacggatcctctggattgtctaaacgccctttttcattcgcgatccgcttagttttcctgttcttagttttgcgtgaatggaatcgtattaggaaatgttgtgctagtgcgagatattcggtctgatctcgtaccttattttagacctgcaagtttatcagaaacacaaactactgctgatgttcagattcagcaaacttttgcctttgacgatagtgaaaagcaatttatacaaactgtccgggagggggaggatccttcccatgattgggggtcatattcggatgttgatttagctaattggcttcagcgtcccatattggccaccacaaagatttggaacgtaggtgagggttttcctgaaatttatttcaacccttggtctgcttttttggacagccctagtgtagctcagaaattgtcaaatttttatctccttagatgcaag

SEQ ID NO: 182 - DNA, 515 bp, Rhizoctonia solani mitovirus 25
  misc_feature 1..515: note = putative RNA-dependent RNA1
  source 1..515: mol_type = genomic DNA
ctcctttacagagcatacctggctgaatcgtagtcacgacccaacctatggccttatatggctgtactcgggttcccgaaacgcgaagtaacgttcggtgtttgcaatagttctactattaataatactgaatgcgggtggagtctcaagtgagttagactaacggggtaaggtacctttacaggtaagaatccttattcctaggtctttctcatcctgagaatgtccacatatgcgtaagcataagagaattactctctggctgcagcccggggcctcattgaggatccggaaactgaagtttaaaccgctttactttgtacaacaacctattgcctcttatggtgatactaggatcagatataactagacggggttaccccctagcgacttgagtgtcgtcgtgtagtgagatgataaaacaaacagtgtttggttaccacttaaaactcgtgacctcatcgaaatctccctagtccctcccataggaaccgacaggcggatatttacctaaa

SEQ ID NO: 183 - DNA, 523 bp, Caledonia beadlet anemone dicistro-like virus 2
  misc_feature 1..523: note = isolate I38,1
  source 1..523: mol_type = genomic DNA
cgatctatatttttcatacacaatttggcccacagttaagatggactctgtaacagacaaaatatcgaccgatttgcagcaatcaaatgaagcatatttcgacagaaaacatgaaccatgcggacgatatattcttaatagttatatcttacttgaacctttgagtacgttgattatggaacacacatggaactgattaggtcgatacgattttaacacaaactttttgcaagtataaagcaatgactagttttcaaaaagaaaaccggtatttacaccgtaagtaaaaaataattttttccagccttcctgaatatagtaaggaaaggtattggcgaaatggaaaattttattttatttaaacatagtttgttgaaaactattcaaaatttcattatgcgatttttaattgagacgtcttattaatagactaggtactaattaatctaacgcatagttttacaaggcagcaacaccgcatcaatggatcctaaccatagatgaaaagaagaaaaaacaaatc

SEQ ID NO: 184 - DNA, 528 bp, Wenzhou picorna-like virus 6
  misc_feature 1..528: note = strain WZSBei69574 hypothetical2
  source 1..528: mol_type = genomic DNA
gtaaatcaaggcgtcgtgtatgcctattgtaaaagcacaccccgttttgccgatggggttccagagtaaagttgaacaggcatgtgtgtatatggttacatatggtgaaaatgttttatatattttgtattttcgttagaatgctttgcacataaataatatcctacagaaagggtacccgtatttacgggatgtgggattggatcccatatcaagatatgtacttctgcaggtttaatcgggcctgtagtcgcaaacaaatagattggtaattgtataaaagaattgtgttttgataataactgtaataaattagtttgtatatttggtaagagttcagcaattgttaacgctgaacctagtgctcacatttcatgtgggcgagaagaagacgctggccatcccggggccagcgcagtgcaactacgatccatagatgagatcgaggaagcacttggaattgtggagagcgatgctgacagcatatgcaccatattcgagcctcattccgggacaacggatgacaac

SEQ ID NO: 185 - DNA, 530 bp, Marmot picobirnavirus
  misc_feature 1..530: note = clone c293452_g2_i1_libraryA_2678 segment I1
  source 1..530: mol_type = genomic DNA
tagatttacaaataaaatataggaggaagtgctatgaataacatgcattttaaagtagtttcagcgctactgaagttggcgcgacgtgttaagtacgttgtgtcgttattgctgacagccatctctgctgtaaaagagaaaattaattcatcaaaggaggttaatgatgatgaaaacaagtaacaataacaattcccagcggtcgggccgcactgcagtcaaatgtgatgtaagttttgaagagcttatagctgatttggatccaagtgacatccaatcccttgtgtctcagcctaagtgtcgcattctgtctcacgatcaactttcatcatatttgggtactttatgttctaatcattcaatggttgaaaatctcaaaattaagcaccaggaattttcttcaagaggatatcatggagtagtaactacagtcagttattacaagagatttaaatacagatatgtgtatgagcgcatatatacaattgaatatgttagtatttctgaaatggttatgggggtagaaaata

SEQ ID NO: 186 - DNA, 535 bp, Wenzhou picorna-like virus 51
  misc_feature 1..535: note = strain WZSBei69571 hypothetical1
  source 1..535: mol_type = genomic DNA
tttatgcccccccttctttcgagaattcataccgtgtagatcgctaactaattttgtaagcaactaactttaggtcaatgactgtgcgacctattgtaagtatatctactgccaacttccatgagatggtttgttgtggtatgccgagctgatattacgttgtcagcttggatttagcggaaacgttacaccccttcctcctgcaacatggcgtcttgttgctttagtgtagtgtccgcgtcttagtattatgaatgacgcccttatatatattatatgttcgtaagactgaaattgtactcccgaagctatcacggagacgcatctatcacagtcggatttagatagatgtaggcaatagccccatgcaccacgggttgctatatacccctaaggcgtctaattcgtttaggcgtctcattgaacctggttaagaatctttaggtgcaacgggtgcgaaggcacccaatctgcccgtgtggatcccgtcctaacacgacgtttaggtcccgaaacggattctttgtccgtaagc

SEQ ID NO: 187 - DNA, 560 bp, Linepithema humile picorna-like virus 1
  misc_feature 1..560: note = putative RdRp and putative1
  source 1..560: mol_type = genomic DNA
ggtaggattatagatggacggaacatcttaaaaattctgttatgtcctgattatgacagcactaagtgacaataaactaatcacccaaatttaaaactttgatttgatattcaagttgacgattataggcattcttaaaggaattgatttcgatttataaatggaaatatgttaatacatcaatataggactaagcgattgaaatgaatcaggaatttatttatggcgacagatcttaattacttgaatgacatatcctgtctcttatcatgtgttctcctatggatcccggtggagaacaagcacgacatgatttatattattgtatttcggtatgcacatagcaagtagtgcgtagccttcagtgatcagttagaaatttggtatatggtgactaattgtcaagtatattaaataacgttgttctgatcaatactgattgagcgtaaccttgttctattagcgctaggagtacaattttatagaagcttgcttcagagaagtcccggaagttatttatttaattaaatatttcatataggctaattctaacgatattg

SEQ ID NO: 188 - DNA, 562 bp, Yado-kari virus 4
  misc_feature 1..562: note = genes for RNA-dependent RNA polymerase,1
  source 1..562: mol_type = genomic DNA
cgttaataaattcaaggatttattagctattttatttgatagttttgcttctgttcagaagtgtgccctgcatgcaatacatgcaaataggttaggcagtagaaatacagatcgccggggaccagcattcattctttacgaatcactgggttacagctactttgactagatcatatactgtatttatcattcgcgttggttggacctgtaatagcagggttccggtcttggaaatcaaaacgagggcactcgccaagatgcgttacgtcgtaacaacctgaaaaagtgggcttgacaacctggcctatcatacactggcaagtgatatgagaggtgatcaaatataccgagtagcatgaatatcgctacacgtagtcacaatttaaaaaaaaagcattctgacactgggaaagactagaaacaatcgtgggatccaacgatggtaaaatgacgcttgggaatcaacgtgcccaataccgaatcgatcacagttagtcaccaaagaaggtgcaattaaaagaacacatagttagtatcctgaacacgactcgtacaataactc

SEQ ID NO: 189 - DNA, 569 bp, Wendell virus
  misc_feature 1..569: note = isolate Antarctic4 polyprotein gene, complete cds.1
  source 1..569: mol_type = genomic DNA
ggtggggatgcgcgcatcatacgtgatgtgtgcatccacccccccttttctcccctccccctccaactaccctttccccctcgttcggatgggttcttggttaacgtgaagtttggacgacgatacggcccttacacctcacgggctattggcacgctcgtgttgtattgcaagttgctcctaagtatgtacactggaaacgcacttggcacgtgcgcggaatgtcgtaccaatgttaggatctaagcagcgaaccttcgtagctagacatactactgcgtaggatgatgatgaccagttttctgtatctgattcaaggcactccacaagatcattgtacgccggatacggttctgacactgcgccctaacctggtgctgaaatattgcaagggcactggggcgttgttgttggttcccgccgctggtgatcgagtgggccccacatttgtgagtgcagttgttctgccgggtaaatgtgcacctacgtggatccgcagttgggaatctgcggttttaagtatgactgggtgatagccttgcggctggccaagttacgattgtagccag

SEQ ID NO: 190 - DNA, 572 bp, Spissistilus festinus virus 1
  misc_feature 1..572: note = complete genome.1
  source 1..572: mol_type = genomic DNA
gtcacacacccacccgtgtgtgttcggcttgcggggaaacttactgcttgcaggaacgaaaaacaagagcagcacaaccgaacacacacgagtgtcccgtagggaccgagtcgggtgtgttgatgcaaagaagagagaagccgacagctctctactaggctgggggatagctctagcgggatgtatccgctttgggattttctgcccagtgcccaaaatcagggccgccaattcgacttaaaagggattggatggcgcctgtgccaagggtgctaccaagcacctggagtgccgatcgactacaacgggtcataggcatggccagctcaggctgggcccagcctgctagtaggggggatagtcacctgggggatccagggtatcgccaagtcaggtatccactgttctttgcttttgccaggtgctcagccgtttaactgagcaaattgctaggtcccagccgtatctggatttattatcttcgctgttgtttgacagtgctataaccctgctactctccttactctaccctctccttttgattcccattctggattcgactggagatagac

SEQ ID NO: 191 - DNA, 572 bp, Shahe tombus-like virus 1
  misc_feature 1..572: note = strain SHWC0209c12685 hypothetical1
  source 1..572: mol_type = genomic DNA
attcaatggtatcggcggcattggcacagatggtttcgtctgtgctcgacgaggggcccaggatcctcctattcctggtggtgtgggttgttgtgcgtagggtgtggcgctggtttcggccgggccccactgctggcgcgcaactggtggccgagctggatgctggcccagactgggacaccgtgggtcacaccacgcgttaccagcgggagctggcgtatcggttcaaggcggagtttggcgagttgcgctataacaaggctaaccgcattgtcgcatcggcctgggtcctcaagaccatggccgctgatgacgtgcggtacgtggaccgtgttatgctcgagccattggcagtgcagttatgcctgctgcccacacgggctgcagtcctcgccgcggcgtttgcaaagacccatgaggtcaatgcgcgccgcgacgaggctgagctcgttaaatagggatgccctgctgaggtgcctggagtaaccacgtctgtcgaccgtcgtggtgaagcatgcttgcgtgtccgggcaagtgtcggcaagggtataaggtccggtgttgaccgtaca

SEQ ID NO: 192 - DNA, 580 bp, Partitiviridae sp.
  misc_feature 1..580: note = isolate H4_Rhizo_Litter_19_scaffold_21291
  source 1..580: mol_type = genomic DNA
cgccacgtcgctcgtggattgctcgacagtggctggctcagtacgatgagtctcggcctcggatggtggcgcagcaaccttttctagggcgtgctctgcgcgccgcagcgattaagtcggcgcgttctgtggctacagtgcgtactggtgtctctactggtaaggatactttggtgacgacccttcgagccctgcattttggggtcgttaaagccgtcgagcgcgtcgactctgttccaggagcacagcttcgcaatccatcacctttcacccgaacgcgtaaattgcctctcccacagaccaaggtatgtactttcttgggaacatggccgtttaaagttggaagtcaaccagctatcgtgcgacgtacgacaaagtccctctttaagtggtggtctagtccggccggtgcaccgtaccgtgcgacatgtccggatccacgtaactattttcttgtcaacgggtcttggctgcgaatatgcatgtacttcgcgcgtttgcgacaccttctgatgcgaccgttactcgtgcggagctattacggtgtctctctttcgtacacacattgaacatccctttt

SEQ ID NO: 193 - DNA, 583 bp, Korle-bu Aedes virus
  misc_feature 1..583: note = 16GH61 genes for hypothetical protein 1,1
  source 1..583: mol_type = genomic DNA
gaaggttaaaggagacaagttatacgcgaatggagttcgaaagaacgccaccgtggatccccctccgtatgcaggcaaatcacttcaggcggctgcacttaagggccaggtagtgaccaacagtcggcccccattctgcgctacagaaaccatactggtcaagcgccccatttctaccagtaccaagagcaaagtgtgttctgaatctgccgatgagattaaatgcgatgccacgttgtactattatctcatcgacaagtttgcttacatgccacgcgacaaccgcatcatggggttgatgcataatgccctaacccgttacctaactgattatgactgttctaattattcgattggacagatttatcggttaaagattgacgctgttagggcagcattgtttccgcccagagaggagcaggaaacacgggtgttgttgcgtgattacgatcctaaggttttggagaagcacgcccagtggactggagagggcattttaggacgtaattcttggtggcaatcttccgaaaggaggatgcctaaggttaagaagtaggggtcgctagtttcaccctctatttgc

SEQ ID NO: 194 - DNA, 595 bp, unidentified
  source 1..595: mol_type = unassigned DNA; note = Picornavirales N_OV_001 putative structural protein1, sequence
gtaacacgtcgaacctgttatggcttatcgtatgccctgctatggcgaaaatgctactatgcgatgggagactcctatgtctcaaactaggaaatccaatttcttttggattgccatttgtttgttcatttggccgctctagctccgagtgcgttgcacttgtaacttcgtgcgtaacgaagatagttgcttatttcgagaagcaacacttccgcctatatggctgaacctggattggatccctgttctggaaaaggaaagatcccctcccctctggttacccaagacactataccacgtagtgtcctatggcttaggggttgatgtgtgtccctcatggggatacccctttttaggggagacagcactgtcagtgggaccctgctttcaatcaaaaaagtgtagattgttagctgatacgtcacttactgaaaatacgaataataaaactaactcgtctgattcacatcaggcgttcgacaatgaccaatcggtaacctctactagcaacgttgtttctgctgatcataccactgacgtggtggtggttagtggacatggccacgctgatggaggtacaaccgatgattcctta

SEQ ID NO: 195 - DNA, 600 bp, Hubei myriapoda virus 2
  misc_feature 1..600: note = strain WGML147749 hypothetical protein 1,1
  source 1..600: mol_type = genomic DNA
tggcgtttttggcagctatgctcggtggtgaagttttgaatatggggggtagtttaattggcgcaaaagtaaattatgattataattctatgttattaaatcaacaattggcaaatgctgaaaagtttcagcaatttaatgcaaatttaatgcaacagcaaggtttaccgtatttggctaacggtggccaaggatataatcctcaaatttctaatatgtacaatgccggaacgtctaatggatttaataatattataccattaatggctggagcgtctgccggaattttcggtggacgtggttcaaactttttcggatcccaaactagaagttcctccacacaaactggacagtcgacctccaattccttttcacagacaggacagtttacttccaattcttttgcgcaaacttatgcatcagcttatgaacagccttatacaggggcagatacggacttttacatctctccgccacccctaactggtactgctgtaaatactatggcagatgcagcaactgatgcgggtgccatgatggctgcgtagtcctgatttcatcttactacgtgataggataggcgctttgtatactgtaaag

SEQ ID NO: 196 - DNA, 600 bp, Hubei tombus-like virus 9
  misc_feature 1..600: note = strain WHBL63242 hypothetical protein 11
  source 1..600: mol_type = genomic DNA
ggaccatccaggcaggtgtaggctagtaccctcacctgacctgtcgcgatgtttggctttgtgaggcttgtgggaggatcccttggcccatgcattgctgctgtcatcgtgaaaaatgttgtatgctcgcacctggcgtggaggaaacggcatttgacggatgctaaggaggatttgaaggtcctcaactcccatgccttattacaagtcccctttccttcaagcttcgagcccacgtctgtgacgagcagaggtgaggttggagtcaagaggagtcctattcaagctgttcgcagcaagaaccataaaactttcattgctcaatgggcaagagcggctaaggctcggttctcgtttgcacgacagtgtgagcggagccctgtaaatgtcgcggcccttcatcggtggtttgcatcggagtttaagaaaattggcatgaacttgctccaggtttcgtacgtgatcgatgaggttgttgaacttagtttggaaccaacgtatgagcgtatggtgtccgaaactaagaagcaattccgtcatcgggcacgtatggaatactacaacgagaaaaaatgccttgaaaagatccactaggaacgc

SEQ ID NO: 197 - DNA, 608 bp, Santeuil nodavirus
  misc_feature 1..608: note = RNA 1, complete genome.1
  source 1..608: mol_type = genomic DNA
tattatcatactgacaatggtaatatgcgagagcgatagcaagcactagaaacgagttacgcaaccacagacagcaagcccggaaggcgcgcagagactgaacacctctgtgtggctgaaggctccccactaaccctggagagaagtggcagaaccacagcctagtactagccgcaaggcttaagaaactaggtgtagctgagtcctttcccttaaacaaggattggaccacttgtaggatccgtgtattcaaacgatctggcagcactatggctcggacaggtacaaccaataaacacaagcgttttgagaaaccggcgtgattgtaccgcagttttaaaggagcttcaaaccctcccagccgaaagatcaaacgaagtcgtagttgaactaacgtagtaggggagcggcgtttgaggatgttcacgggtcagtaacgtgaatagcttcattcgtgacgtgctcaaaccaccgtataggttcgccttagtcattagcagggatggctaggttcagctgcgcatgcacaaaccacaacaataaactaaactttattcgcgtatttgtgcattcccgttgcccacccacactcctaacaaatttcaagt

SEQ ID NO: 198 - DNA, 619 bp, Osta virus
  misc_feature 1..619: note = isolate OTU55 hypothetical protein gene, complete cds;1
  source 1..619: mol_type = genomic DNA
caacaaccgacgctccccacgtccgggtcgagcgtcggttgcagggttttaaaccagttctagccggtaacggctagaatgtgattcatcacacttggggagacccgagtgtgttgttctcgtcatttctcaattggctctcggacatcaatgcaccgagttacccaactaacataaaacacgagagttgagataatgaagaactaaacaaaaagcacttcgaacactttaatacaaacctagggatatgacaatctttgcttgaggcttggttataccagccggacaacaaatgttggagtctcactacgcctacctgattatggtcggtggccaaaacgttagccctatgttgagagggtgcgggcgtgctaagtttcccgagaagggatcccaaatgccgaacgactggaacggccgcaatgtagtggggggacagtctattccgcgcaccccaagttagcgcggagtgctcaaattcagctccagggacagctcaacagacaaccagttagtatcgaaagtcgaccacagacgaaatcttattactaggtgttatacatccggatatacaaacagtctttttcaagactagggatttcagtgcataggacttgta

SEQ ID NO: 199 - DNA, 628 bp, Wenzhou picorna-like virus 3
  misc_feature 1..628: note = strain WZSBei69560 hypothetical1
  source 1..628: mol_type = genomic DNA
cgtgtagcacgattattagttggatgcttatatggtatatgttgcgcaaacgctcatatgccatgtaggcactgattataagagtctacccagttttaactaaactctgcttctagttcctttagaagccacctaccgcgaggtagtttgtataatagtgtgtatatgtaagacctatttaataaaaattattcatatcttataaagaaaaaacttaggtctgtgatttgtataatatagtccatcagaaggatccctgaattactactagtcatgtagtaaggttgaaaatggaaatcctgcttgttgaatgcttagggtgcgattcactcactgtgtgttgtgatagtacttggataagtatttagtgacgcttgaatggtcactattgtcgcattcggaattgtgtgcgactgattcaagaggatatggtggaaaaagatcactggcgtaaggcaatccagtgaacactccaaagggaggagttagttcaagtttctccgtgtcaggctcaggaaagccgggtgtggacatccacctactgaaccggttttgtctatttccaataaaatagtcactcccaattcgcgcgttcctaacccgtccccgcaaaattaaagaattaatc

SEQ ID NO: 200 - DNA, 630 bp, Myrmica scabrinodis virus 2
  misc_feature 1..630: note = complete genome.1
  source 1..630: mol_type = genomic DNA
gggaatccctatgcgcaattatttgcaactccgacgtggctgagtataaacgatcccgtatgtcctgaacatgacagcttagtcaataaaccgttcaccccaaactcatcaaatttacagtatttagatgtaactaaaatctttcactggattaacccaattaagaaagatgattagtataagttagttttaattattagtggaaatctatttcttttcccgtgtataagagagacctatttgcacgttaaatatttaaatggaatacatgatggtgtcatgttaaaaacactcttactactggcgtaagtattctcgcttttagtatcgtattaaagaaataccgtataaaagattgtgtatcgcgattgcgaaagctaagacaatgggtgtaacccaggtcgataaccattagcacgcggcatttgcagcaagcaaagcacttcccttttatattgcctcatactcgcgaggttcgactatgagtgtatggagcatgaaattgaattatctttcatgttctgtaaccttcgcttgggaaggacggatcctttctatttttattaatgacaactaaatcttttgttcagttgttatcaaagctatcaaagtttaaacaaataaattaaa

SEQ ID NO: 201 - DNA, 647 bp, Bat Paramyxovirus
  misc_feature 1..647: note = Eid_hel/GH-M74a/GHA/2009, complete genome.5
  source 1..647: mol_type = genomic DNA
ttgtatgtaatcagttaaaggaatctattatttctcttctccattatctgattatatcctaagaaaaacttaggaattcagggtactgcccttaatgacttgcactaatatcaaaatttcaatatacgacgaatgtgattggcttgtattatcatcataactacctccagccgtatcactgacaaaagatttataagcactggatcacggagtcagagttcaaagcttactaacgtcaacctcattatatctagttggtgttacagggttacttcgagtcatatatgtaattgcacctgataatacctctctcatctagtacattacctcaacagtatgatctcggggatccaactacacctcgacaactcataacaatcaactaaatctgcctcacaattgaccattgccattctctcagtcataaaaaggatcatcccaactgattgattatttctttaaaccctaaacgtaaattattcaatcatgtaaaataaacataatactttcagatctacagtgatagagttcttaaatttattccaatataatcctattaattagcattgagagatctcccatgacatcacttttccagtcagttaaatctcagaaatccactaactgagctaccgtcgaagtcaagc

SEQ ID NO: 202 - DNA, 655 bp, Riboviria sp.
  misc_feature 1..655: note = isolate rfb198shi4 genomic sequence.2
  source 1..655: mol_type = genomic DNA
gaggtgttattcaaggcgaatacaacaaaagcatcaacaactccaccaatgaatccaatcaaaagatcgctaagatgaacaatgacacctggacccttacaacagacaaaaacatccagggccagaaagacatccaaaagcatacagaggaccaattcacaaacaatggccttccatcttacatggcatatcaaaacaatgggggaaacgacaaattaccacatcagcaataccatctggggggaaacaactattatcaatctggaaactatggctcttcacagccatccatttcaaataattaccagcaatttaatcacgtgggagtcccttcaaaatttgaaaacaaaactgggaaacaaaaatttgttccgggtggaacactacaaccgaaagaacctactgccgttccgaatactatggtaaaaacaccattccctacttcaactggtactcaaaccagccgttcaggactcggatcccgtgttccttcaacttccaattttcaattttccaatatggacccaaaattttcttcaatgcttaataatcaggtttcaaaaagcaataaggccttcataccttccgataaagcaaaatttaaggatacctggactcagacaaaacaatcaagtactgccacttccatgatccc

SEQ ID NO: 203 - DNA, 660 bp, Changjiang tombus-like virus 21
  misc_feature 1..660: note = strain CJLX8746 hypothetical1
  source 1..660: mol_type = genomic DNA
cctaaaggtaaacaaaaaccaacggcttgtcccgtaaggacgcaggaaactgcgagacaagaaaagaaaccacgagtgattaacacttgtaaacttaaggatgttcctttgtcggaactccaaattttcataaggaattatgaaaatgctaaggcgactgggattgagcctgatttaaaattcctttcaagacagaaagaaattttgacaaaacacaatcccaacagaaaagtgaagacattaggacccgacaagaatattgccaagttgttagctgataagagaactagatcagctgccttggattatgtagcgcaaacatcttcacttgacaccgatctttatggatcctatttagaagatgaggaatttccaacttatttggataactgtaaagatcgccagtatagacttaagaccgagccatgtcgatcgtcttatattgagaacttcaatgaaccttccacattggtaccacccaaagatttggttaatgaagttttcgaacagcctaaaataaaagattacactttaatagaagtggcttcatttaagtacgtccgagagaacgtcctaacagaagtatgttttaataacactattgagatcagaaatagtgttgaagattctaggttagatgttttgactaatactgatttg

SEQ ID NO: 204 - DNA, 667 bp, unidentified
  source 1..667: mol_type = unassigned DNA; note = Armigeres iflavirus gene for polyprotein, complete cds,, strain:1 sequence
ataacttttaaaattgcacgtaatgtgcactgcaattttaaaagttatttttctagtaacagtacaatgcacaatctaggcaattcatgtctcttatggcatgctttgtttggatgagttagtcctctgttgtactgggaaagctttagcatcccaaggaaatttagcgaaaccccaaacctgtctcctcgacacaaaattggaaaacaaacattatcgaaagataataaggtgattccgtattaatccaagagtagactccatcacaactcttgtaaataaaattgtgaattttatctatatttgtacccgcaatagcgctgacgcctataaattgaatttataagtatgcatttgaatttctatttcctattccatacgttttggataggacacacccctctaacaccacctcagacgtggcgcattgagtgtgtaacgaatagaaactattttgcatcttgtttaggaaatttgtagaaacgaaccgcgacagtatagtaaccttactgtataaagacaaggtttatcaagtatttcacacttgagatgtctgatgtaaattccagactatgtactatagtgatctaaattgatgttttacaaggtatgtttcttccgcttcaaaggatcctaaccttagaagaaatcgaaacaaaatgaaaat

SEQ ID NO: 205 - DNA, 667 bp, Bremia lactucae
  misc_feature 1..667: note = associated ssRNA 2, isolate DML-A_DN40638 coat1
  source 1..667: mol_type = genomic DNA
gcgtccggttatttcacccacctcttatatctggccgaccaggatatctgaggtagcaatataatggccagaaggttgtgaaagcttatttctaacggcgcaatcgggaaagttaattcttagcccgtaagcctaggatatcaacctggacagaacgagccatagcataggcatggtgagcgagattccacagcaacatttagagaatgagagacaaaaaccccataaaaataaatataactctcttatctaggtgaccgtaaatgtattgcactttttgtttaaatcgcgggaattgcggcatatgccgtcgctcttgacagcgtcctccggagattgttcttactccgagtgcgttaatgtgtagtctcacttcggtgccactactgggcccacagacgagaagagatcactcttggtgcaaattggaagtgcgtacaactgtacgaacggtggccgaaacctagtgccacagcatcgagagtaaagatttcttgtggatccacgttgtcaatagagttgcgtaggtagtctgtgtgtgagcgcgactggttatgatcgaaagctatccattagcttccgaaactgttagttcaggattaggctgagtagcatcttgaaagaggtgtgcggggactcgggcagtggactttcataatcactactt

SEQ ID NO: 206 - DNA, 667 bp, Beihai weivirus-like virus 7
  misc_feature 1..667: note = strain BHZY60887 RNA-dependent RNA1
  source 1..667: mol_type = genomic DNA
ttcacaccctgcattaatttgtgaacactttaaagggggggtcaggaggaaatgcctgactcgagatggcgtgtgggtcatgcaaacacccgttcccaggccgggccgggacccacgcaggtgagatgggacacctgtttgaatcgacgcgcataagttgttgtcgatcgggcgccagccttgttcttcttcactctgattccggagcttcagagtggcgagcctgtgcgatacgtaccggcgtatctgaggtgaggctgacaggggatccagaaagtagcgtcctggatggtttggccacctataaactccctgcccccgagtccaccgtccctgggcacggttaaaccgtgtcaacactggtcactgcgcggcgacgcgttgttggttggttagtggatctgagggaatggttgcggtccgctaccgggggcgttatcccgggcccctattttagggaaggactggtgcaccattttggaaagccagtcgacgctagtctccgtgagttgttcagtttttcgttgcttaaagtgacctaattaaggtgttcacagaccgttacttcagcttgactttgccgccaaacgtgcggccacatacatcccaatagggaacttttgtctgcacgagactgagcccagctcaacttgtccgttaaaccgag

SEQ ID NO: 207 - DNA, 674 bp, Neofusicoccum parvum ourmia-like virus 1
  misc_feature 1..674: note = isolate CREA-VE-26SY1,1
  source 1..674: mol_type = genomic DNA
gcggtttttggccgccctcccggaatttgtggctttcctaaccgtgtgaaggtcatgtggtgttcgcgtgagtgtgtctagcggccctctaagggagcggtgggggttaaagcccgaccactagctgcacgtgtaaccatatgacatgtaacatccagccaccttccggcggtgaactggcgcgtctgagaacgctccggattctccggcccccagagggtccatcgtaaacggtgcggtaactcaaagtacgaaattgaggggtctcagccccataaaacaaaggaaatgagttataaagagggtagcgtgcggcaatcgcgcgtccataccgctaaaccggatgggttctcggcagggagtgtgtgcgacagtaacgagtagtgtcgactgcgcgggatttggccgctgtgaaatgcggtctgtaaaaagggatgttggggccttaccggtgattgagcttagtaactcttcccagtaccaggactccgtgactgtgcctcgcgcgcgacggagcttacgcaagtgtgtcttcggatcctgggaccggttcggttgacatggtggttcccattccctatcctattctcgctggcgaaacaccgcgtctccggagacgctgatgtgtataaaggcgaattgaaatttggaccaaaacaaaagaaaacgatcga

SEQ ID NO: 208 - DNA, 679 bp, Changjiang tombus-like virus 2
  misc_feature 1..679: note = strain CJLX30692 hypothetical1
  source 1..679: mol_type = genomic DNA
gcgccaactgttcgtcgtattatccaacgtcatggattccacaagctccgcagttcaagcagcttttgtggcctgcaccatcgggaaaatcggtttaactctgtataaaaaatggatggcaccccggtgggctgctgaccgctatctggctaaagctgatgctacaacccgtgtgatcatggaagaggttgagaatggacatgactttgaagtccatcaactcacagtcgacatatcctctcagaccatggacactccggaaaatagcaccaccaaacgtcgggttcggtctaaagccccctttcgtgcttaccttgtgaggtctggcaaggctaaatttggtctcatgaagcgaacacccgccaacgtcatgtgcgttcgcaaatacttgtacgacctatgtgttgtgcatggggtgatagcacgacatatttgtgagaacgtagacattgcttcagagcttgtcttcattcccaccgctcatgagttagaaacacttgctatgcagtctagccgatatggaaaacgtcagcatacagttaagaacatcctctctgaggatgcctctgactgttgatggggccctgctaagttggagggggtagacactgatccaagcgactaccccggactcactccaacctacgctgggatcccaaaacgacgaaagtgtttgtat

SEQ ID NO: 209 - DNA, 681 bp, Hubei tombus-like virus 36
  misc_feature 1..681: note = strain WGML125257 hypothetical protein 11
  source 1..681: mol_type = genomic DNA
cagttctcaacacagaacaacgggtcatttgtcgaatgatgggatgcgacagttcccattttcccttgacactggaaatattatttcgttagataattactcatgtgtcagttgccttgccggagatccgcttagcaacactttacatcttcccctgtgccattttctggatggcctgcaaagccttacggggccgagctcgagtttcgtttatgcgttacgacaagtttacgattcaggttggaataccgccgtgatttcacgtatgccaagtgcgggtgtgcgtgccctctaagttagaggggttaagcagggatagggatgtttagtgtgtgttttgggatgtgaaggaagaaacagctgatatgtggggagctaaggagcgttttagttttattccagcgggtggatgagaagttgggagagaaatcgaccgcactggggcctgaacttgccctataccaacctcaccaaacccccctggggaaatgtccacggtgccaccttacggtggttccactcttttcatcgtgagtgcaacgacggtacttccatttaatattgccgagcggatccatgaaaccgctgagcgattgcgagtgacaaattgcgactgtgcctaacggcattggcgcgacggttaaaattgcacaacaataaagtaatccaggcctgaggcca

SEQ ID NO: 210 - DNA, 687 bp, Lasius niger virus 1
  misc_feature 1..687: note = isolate Cambridge-Lni, complete genome.2
  source 1..687: mol_type = genomic DNA
aaagttgtggtcttttgctccacatcacgtctaagcgtgagcaatcaacgtgattaaataaatgaatgcatagcgttttgtgtatacgtttacggactgtaaccctgaatacacaccttaataaaggcgaaaccctaatcgtctctattattgtagtcctccttgtcacgggacaaatgcagggcgttcacgcatcaaacctacgagcgttcaagagccttactccaatattgtttgaggttaaggcagccaccccatagaggcttaattcggcatttagagtccaaggttggagcacatgaatcaagtaatgtgtaattcgaagatggcgattaagtttaatcattctgaagtcctagcaagatggaagaaagatgtggatccgtgtggccgttagctttgatgtaatgtgaattgctgtccacccgtgtgggtcggctggacagaaaggggtacgacttggtccgcgcactctacggagggcataccctgtacccattctggcgatggatacaccgtctcaaacttttaaatacaacttatgtgctattatttttgctgctttatacgctgccctcaacctgctattttatatgctacaatattgatactgctatatttgctaacaattatattgctatatttcttataagttgaaaagtaagagacgctatatcctgagataaa

SEQ ID NO: 211 - DNA, 724 bp, Rhizoctonia solani mitovirus 31
  misc_feature 1..724: note = putative RNA-dependent RNA1
  source 1..724: mol_type = genomic DNA
gggacctgatggtcctcgacggcggagaagagctttcgccctctcgccttcaacggttagttccgtgtaactcaacattacagttgaggtgcattgcgctgccttagaggggagacccccaaagccttaagtggtggataagtgttggacattatttgtttaacggctgtccgccgtaggttattaactctgtgtttaaaccttcgaagtatggaggatctgaagaacggtaatttattactgtaactttgggttagtacatacgaggaggtacatatgatttatgtccctacaatactaacgtatagcttactaaagctggctgcggcccaactgctgtaatggcggttggaaaccgaaggttagtgttcttaaattactttacaaacctatatatggacagtataccaggcactgattagttcataatcaggaaggagtaccggaaccctgtgcgaagaaaacctcgaaagaggcatgttttcacctgaaatcctcatagcagtaccttagacagtactcactagatggataggcagtcactggaaaccatgcatggtgctaacgggaaatgaccaaaaagtctagttatccgagagctacatatatagtaacccgagctgagtaacactcagaaggagggtagtgaaccatattggattggtccgtaacgttagaagtgatactaacaggatccctttgtggagctccagatattaatact

SEQ ID NO: 212 - DNA, 741 bp, Hubei picorna-like virus 6
  misc_feature 1..741: note = strain WHBL73048 hypothetical protein 11
  source 1..741: mol_type = genomic DNA
atgcactagtgcataactaagtgaagtttcagtgagcttttgtggattacccgctattagctcatatagctattagactgtgattttcgaaagcgaacgaaatggatctaagttttgtgttattgtgttgcgagtttttgcccctcctcgggttaccaggaaaacaagaaaaagctacgaaggccggctaagtgccttcaatttcgttttcgttttagggcgttgtctgaagtaggttcccaatctatttcagcctagtttatggtgcaaaagttattgctgagtgattaggataaatgagcctaaacgttatccgccttgacaaccgtttggtttatgcggaaatcatggatccccgtgggtgaagtgatattccggtaattgttaacggctcaagccagggtgcggtatgcgagtcagatccgaaatccataaatattcttccggtccaatattccgatacataatgtagagcaagaggccaaaggttaattatgaatgaatgatcgtgattcataatgtccccccttttcgttcccgtaattatgtattagctactggcccatcacaggatgatgggacactagtgaaagcgtgctcttctgggaggttgagcggcgctaggcgggcgacctgaacgcatatatggcaagtttgttctaatcacaaagataacaataagcgtgctgcataattaagctagttttgggagtcagcgggctactgaagtccgcacaccca

SEQ ID NO: 213 - DNA, 743 bp, Plasmopara viticola lesion associated mitovirus 32
  misc_feature 1..743: note = isolate1
  source 1..743: mol_type = genomic DNA
gggcgcgagcccacagtttcactaaataaccttgtgaaatggttatctttgtgacctgccttaattggcggcgcgcactggtaatttccctataggaaaattcctttaacgtggatttagtttcgtagttgttggtcataaggccgcctttcgcgagggcagcagttgacttgggtttgcaccccatttcactgtggtataaagccaacagttactttctatataaagcgttattgaagggtagttatcctgcctttctttttagtcggaaacagcgaaagatcaccgatctcgggtttgaaatagaacaccgatcacggaattgagctgcccggtagtaatactggggggtccgaggaaaagagggtaaggctaatttagccctatctgtacgatcagaaccttgaataaggcggctgcagcccgtagtgatacggaaactgaagtctttactcgatacacaataaagaactaaagcaacacaaacatataatttaaataaaatattgttcgcgactgccactaggtctttaaagtcactgtcaaagtgaagtgccgggatccaagtaaaattgggtcgcccgttgctgggtctcttattgagattcattcccgcaacgggtattaagatcgacagaggtcgggttaaggtaacgttatccttcctagcgacgtgtcataatcttttcaagtcaaatggtttaccttttttggttaaatcattgaaagcttgatctgttatt

SEQ ID NO: 214 - DNA, 748 bp, Fer-de-lance virus
  misc_feature 1..748: note = complete genome.1
  source 1..748: mol_type = genomic DNA
gcaggttggcgagatatccatggcagtttcggatctaggtgtcattgttagaaaagtcataatgggcaattccgagagggacgaaaacttaacagcactaatgatgaagatgcaaaaacagcttgcaatccaggagggaaagctggaaactctgcaatccactgttgggaaaatctatgctaaagttgacctgatcaaggatcatgtctcgaagtacatgatattaacaagagaaggaggtaaagacagtcaagaacatgaacctaggagattgatacagtcttacacaggcccagggaaacccgaagccgtgatcaatgagcatggccaaatcaggctcaaaggaacgaccaggagtggcaccagttggaacacgaccccacatgatttggtggatcccacaagactgacgatgtccagagatgaatcaaatgctacaaggtttatacccaagcttgatgatgcttctagggcaactctcctcagcctcctaaccatgtccggcctggacaatgacactcaaagcacacttgaaggaataattatgagtgccacaagagtagatcagctaattgaggttcatgagatactcttggaaccataacaaccccatatatgatagacccagtatatctgtgcaatgtcgactctccaacctgacatctgagccacaccgccatagaacaaattccatccagtcatcaccttattaagaaaaacctaggaacaaagttccactggttccaga

SEQ ID NO: 215 - DNA, 752 bp, Picornavirales sp.
  misc_feature 1..752: note = isolate war204pic2 genomic sequence.1
  source 1..752: mol_type = genomic DNA
attggatatcctgacggatccagtccaaattttctttaatagaataacaaccatgagaatgcatgggcgcatactgttggatatatctagtttcgtaagatatatggtatttacagttttaacctaattgacgccatttttagataaatggtaactagtttcaaaaccctcgagattcgaaagaactcacccttccgtttgcgaaggcaaagaagttccgaaaatcccgtaacccccccaagatcggggatgaagggagaaggaaatctaatccttgtaattattattattttaagcgtctttctatatgtagttgtagagagagagtagagtagagagagagagaagaagagtaccaacagagaagtactattaacgaaagactcttaatttaatataatgaaaaggtcattacgatgaattccccagaagtgaatctaacatcaaaagttcatttcgaaggttttgaaactagttaccatttatctaaaaatggcgtcaattaggttaaaactgtaaataccatatatcttacgaaactagatatatccaacagtatgcgcccatgcattctcatggttgttattctattaaagaaaatttggactggatccgtcaggatatccaatactatttattagttaacatgttagtgacaggccttgtagccctaactatcgcatctgagtaaacagattagacaaatccaacgaatttattaggctttatcgccaatcttctacgtgtaacca

SEQ ID NO: 216 - DNA, 760 bp, Crab spider picornavirus
  misc_feature 1..760: note = strain J1 polyprotein gene, partial cds.1
  source 1..760: mol_type = genomic DNA
ggctcgtgaggctggttactagctgagacgctagcaagcacacggcacagaagggatccctcgtcgtcacaatatcaacttgaatttctgtttggttgataaacccattccattggtcagttaaaatcgttggtcataactctcgcggtcaagatctctgggatagaaaatccatcatttataaccgccctcacttgtcggatatgtctcattcttttgattgaatcctcttccttgtaaactgacctagtcctttacattgcggaccgattcctcaaatttatgactcagatgtgaaacccccttttctcaaaaaccccacttttctttgacttggcatgaatttggattattctgactatcgattttaggtttaaggcaattttggtaaatgagtgttgtggcttgtaaaccgcagctcatatgtttgacagaaagatcttgagaaacatgatactatttagtaggacctccgaacaatagtccctcatgactactcttgagatgaagttgtttattatatcttgttatattgatttagttcggtatactgagagcattcatctaacccacatcagtcccctaagttttcggacgacaaggctgattggagtatttgtctaaggtaataaatgatggattttctatcccagagatcttgaccgcgagagttatgaccaacgattttaactgaccaatggaatgggtttatcaaccaaacagaaattcaagttgatattgtgacgacgagggatccctt

SEQ ID NO: 217 - DNA, 762 bp, Soybean dwarf virus
  misc_feature 1..762: note = isolate IA-2016, complete genome.1
  source 1..762: mol_type = genomic DNA
tagacgtaggcaagtttaatcttgcaccaatatagaagtagttagcgctttccattgttacttataggagccaaatttggtgagtcccgatcgatggatcctgggaaacaggttcggtgaacaaaaagccggtaatctcggggagatgtcagctcccgtcgtatcactttcggttgcatatccaaagaataaccctatatttgacaactaaaaaatagatagtttccgcctctcttgtaaaccacatacaagatgcgagcttgtggagagtaccttcccttgaataaggagggttgaaagtttctggttcccaaaccattgatcaaaattggctctgcttctggtgattacactgccgctgaatcaacagcgtaaacaaattcctattggccgctccgtgaaaagagagtggctaatacgcccctttgatggcgttaaatgaaagcgtaggtcgtacgacaccccctgtcaaggacagccaaccttgcgaagtcgggagaatacccgatagactgtggtctagtattaaaatgactcgagggctcttcctcgttaaaaagggggcgacggcaggcaactgctgtcattaggcgaaagcctctttgttgttaaggtggccatcgggtccacctgccccgtaaagttgacacctttacagaagtgttcttgctagtaagagttatttccttgtgaagtaatacaagaacctcctcccggcatcttcgtatcgtgtttgaggaatctctagtgttattgttagtt

SEQ ID NO: 218 - DNA, 773 bp, Mumps virus
  misc_feature 1..773: note = complete genome.1
  source 1..773: mol_type = genomic DNA
acgggaatggagcctcagctgggtccaaggagaggtccgggtctttgagtggtgcaaccctatatgctcacctatcactgccgcagcaagattccactcctgcaaatgtgggaattgccccgcaaagtgcgatcagtgcgaacgagattatggacctccttagggggatggatgctcgcctgcaacatcttgaacaaaaggtggacaaggtgcttgcacagggcagcatggtgacccaaataaagaatgaattatcaacagtaaagacaacattagcaacaattgaagggatgatggcaacagtaaagatcatggatcctggaaatccgacaggggtcccagttgatgagcttagaagaagttttagtgatcacgtgacaattgttagtggaccaggagatgtgtcgttcagctccagtgaaaaacccacactgtatttggatgagctggcgaggcccgtctccaagcctcgtcctgcaaagcagacaaaatcccaaccagtaaaggatttagcaggacagaaagtgatgattaccaaaatgatcactgattgtgtggctaatcctcaaatgaagcaggcgttcgagcaacgattggcaaaggccagcaccgaggatgctctgaacgatatcaagagagacatcatacgaagcgccatatgaattcaccaggagcaccagactcaaggaaaaatctatgaactgagagccacaatgattccctattaaataaaaaataagcacgaacacaagtcaaatccaaccatagcagaa

SEQ ID NO: 219 - DNA, 774 bp, Wenzhou weivirus-like virus 1
  misc_feature 1..774: note = strain beimix75799 RNA-dependent RNA1
  source 1..774: mol_type = genomic DNA
agaacccctcgcgggtcttgcatgcaattaacgactcctctaattagaaggggtgtcacggggaagacaacgccccgtggcgagaaacgcacgactacatttctttgaccggtttacctgccgccgcccggtagtcgcacctgtagaaggacccaggtgttagcagagtgcgccgaagcgtgcacaatgctggtgcgtgccttattcttttgccgagtccgcccacggatcggtggaagcctggtggaggggacgggaccctcctgaggtgaaggcctgtggaaggggggggataggcacccctaaggattggcctcctgtacttccatgctacgagtcggcccggtccggggcttcattgtcaaccgtggcccacacgctggtaacggcggtgggttgctagccgaccttgcaaatggctacgaacccgaggtgtggcggatccacatcggcctattgctatttcgtgcgaattactgcccctgaggggaggtgacaaggctagagccagccgttggtagcttgccctctcaggcccagtaaggaatgcccgttgggacgcacgtaacagtagggtcgcctttgtacatagtgggacatgcatgccacctgatcaacgctggaagtacttccggtcccagtagttgtttcttgtccgggttacctacggtgcaaatcgtggatgccccgtatgagaaatgaccattgggaccgaaagcgcgaaaccaacgttagcaggccaaagggaatccccttgagcgaaattagcttgca

SEQ ID NO: 220 - DNA, 779 bp, Rhizophagus diaphanum mitovirus 2
  misc_feature 1..779: note = RNA-dependent RNA polymerase1
  source 1..779: mol_type = genomic DNA
ggggggggtcccccgcgcaagcggtgtgggctcttcattgagcggtagctaccaactactctccacatgatggaaggaccttggttattccagatttactctggaccctggcttggttaagactgcaaacgccactaggcagttctataaaacggacatcagtgccccctatgctgttacttggtaaggaagaagaacccttcttcatcccgtcagcatctccatggctggagtataacaaaacgggtgagtgcacgacctgggtaaggacccagtgaggctccgaaagtaaggcttcgttgattgtagcgtaggtaacggtctatcactagacaagtgccccttaactctggaatctcgctaatcagagatcaacgaaataaccaaagataatcaggaacaccggacttatacctctgtatgtcgggggggagagactccccacctagtacttggacgacttcctcggaaggagtctaaggaacggtcaagggaatctcctacggtagagctggccaagtcagtttaagattatagtgatatagtcttcagagcaagtagatccttcccttcagaaaggaaggactctcctgatgatcctcgtgagaggagtcacctcacttcagacctcgtacgtgtggtacggaaggatccccagacggggagaaatctgtatctgtcggcgacaactcccaccatgccctcttgggggggattgaaaacccttttaacccttgagagtaaggaagcccttctctgaaaccccacttaacttcgtc

SEQ ID NO: 221 - DNA, 781 bp, Rhizophagus diaphanum mitovirus 4
  misc_feature 1..781: note = RNA-dependent RNA polymerase1
  source 1..781: mol_type = genomic DNA
cttcgccaacaattacggtggcttccgatgatctgcgccagtaaggtagacgtaccccagaggatccttttaaaggcagtcatcttctccttgcacttgcagtgctggccacattgtaatggaacgtaaggaataccttaatatactactggccatagttatattccatcctgagggtaacctcttgtatatccagggtgccgccttttactaaaatatatacttcaaaactgttacctgtccgctaaaacctattggtaatctcaactacacataaagcaaggtttacgccgtctagttctattgtaccactgagaggctatctgtaacgggccccctgccgccagaggtagtacgatatgggttaaaggacccaatgttccccatcaagatataccatcgtcactggtagttcatcacactagctcacctagctctcccgaagattggtcgcttctgggtcttggggtgcctgagataggtacaggcataaatacaccacttacccgtgcagggtaccataccaaaactccccttaaatagcttccacatggttactgtccctaaactctctgagaaggaagtcgttaccagagggcatacgtgctcagtaataacaatggcgaccgaggagggtggtttactaactatagtacgtatttggagatactacgtgtgcgagatctccggccgacctaccccatggtagattgtgcccccctgctctgcagacgaaacacatgggacactgtataggaaacaaaacatatgcgaaattgtt

SEQ ID NO: 222 - DNA, 807 bp, Cryphonectria nitschkei chrysovirus 1
  misc_feature 1..807: note = RepAsoc gene for replicase1
  source 1..807: mol_type = genomic DNA
tgataaaaaacaaaaaaccgctttttgccattatcactcaatcaactactagatatgaataaattagacgattttagcgatgaaggcggtgcccccgcgctaccggggggatggcgcagaacggaggtaggcaagactataactggctacctacgtgataacaatttaggcccatggaataagttaactcacggacaaactaaccaggtcagacggatgttctcagcccttactgttagcagtttagaaagcgtgtcatcgcctggcccaccaaggaggcggttaggatacattgtactgccgcctggtcacggtaaaagctatatactgaagataccaccgcgacctgtccaattggttgaagctgatcaggtgatggattaccacctggatcccaccctggcacggttgcgtaagaacgcaaaagctagtgggtattggcaagaatacgatactaactatgctcagaggttggattcacgattgccgttcggcgattgggtaatcatgctacctagcgatgagttgggagtaacgatggggtggagtagacttgggacttatatattggctctggacgcgtgggcaaataatctcaagggacgtaaaggctcgatatctgagtatagtactgtatatagtagggctcagctgattgaaggtgttaaatgtttcggtacaaacgcagaactacaggcagctgtattaagggatgttaacaagttcctgaccgcctgaagtacctgatgagtctcccccaggggaacgaaacgctgtcgcgtcgtaccaggggcaacgcaacgaaca

SEQ ID NO: 223 - DNA, 808 bp, Human rubulavirus 2
  misc_feature 1..808: note = complete genome.1
  source 1..808: mol_type = genomic DNA
gctcttaaagggacttgatcttcgccttcagactgtagaagggaaagtagataaaattcttgcaacttctgcaactataatcaatcttaaaaatgaaatgactagtctcaaggcgagtgttgcaactatggaaggtatgataacaacaattaaaatcatggatcccagtacaccaactaatgtccctgtagaggagatcagaaagagtttacacaatgttccagtagtaattgccggtccaactagtggaggcttcacagccgaacaggtgatattgatttcaatggatgaactagctagacctacactctcatcaacaaaaaggatcacacgaaagcctgaatccaagaaagatttaacaggcataaaactaactttgatgcagcttgcaaatgactgcatctcgcgtccagataccaagactgagttcgtgactaagattcaggcagcaaccacagaatcacagcttaacgaaattaaacggtcaataatacgctctgcaatataaaatgaggtgcagtcacacaagagacactcaacatgcatccaatcaagatccagactccatccatccaaaaacacgcccacaattgtcaacaccaagaaacaaccacagccgaaccatgctcaaccaaaagacccaaacaacacctcacatcaatagaaggctggacatgataaatttaataaaaaaagaaaagaagttaagtaaaatttaaaggacacaatagagaaaatctaggtccgaaagcttgcctctcagacagatcccaaaatcatagtccaaaccccaaacacagcagcagac

SEQ ID NO: 224 - DNA, 812 bp, Dicistroviridae sp.
  misc_feature 1..812: note = isolate rbu035shi1 genomic sequence.1
  source 1..812: mol_type = genomic DNA
actggcctcccttattattaggagacttcaaaatgcgtacggggttaaacccgtacgcaattttgaagtctcctaataataagggaggccagtccgtctaggtagactcgtcatatatacatttattgttacggcaattaatttatatatttgaagaggcctattccggctgcccatagtgttattgtatccctctgatagattcaccgtttctaacactccaaaccaatgcaaaactgactttgtcgacattgatcgttaagagagaaacaaagatgttcaaggtactagctatggcgtcttaggagggcgtaaaactcccgcagtgacaggcgtatctgtctaccccttgactgtaatataagttgtatgaatgagtgcgtgctcccgcaagtaataatagtgagcaaaattaattttaagttagttttaagtctttcatatatatttatttcattggcatgtcacaaatcgtgcagtttattagtacctatacgaatcactgacttatgaaaatattatttcgatatctctaagatatagttttgcccagtgggagtctatatgatttcctgcgtgcttcggctgaggcaaaatttaagatttaatatgagtagtggaatatgtgaggatcatgtgggaaaatttaccggtgctggatctttcatttttattataggtccttccgcacggacaggttaaccgaatttggcacttcggatccctggataataattgccccctttccacctcagcaaagtttttgggttaataaagcttggatttgaggatcaaaatatttttctctcatc

SEQ ID NO: 225 - DNA, 814 bp, Picornavirales sp.
  misc_feature 1..814: note = isolate H4_Rhizo_43_scaffold_235 hypothetical1R
  source 1..814: mol_type = genomic DNA
cattgctacagcccttagagaatttactttacatggtaaaaacacgtataaatactggtattctgaattaatcaaactaaaagaagattattacgaaggatatgaatttgaatgtcttgttcaccgtgattaccacatggctctcaccgaaactcttggtggagatcatgtttggtacatgtaaagtccaaaactaaaactgtaaatatgtaaatacttttaaaatacgcccgtaatggcgttaaactattttggaaacattatatttaatggatccatgccccaaaggcaaatttgatgtgtgatcttgctcccttataggctcatcattataatctagtagtgctgcatcaaataatctcaggactttttagtcactacgcccaaactgagagttggcaatcccaatgaacaaaagttagatgaaccctgatttagtgttaattgaaactaaattgggttaaataaaccaattgctaacactaactcaaatcaaactaccactagtgttactagtggaatcctcaatattggagattcaacccccactcccgtccaaggtacacccgaggacgctcacactgaagctgctgttaatcaagtttttcagcatgctactaccaaattcatcgatgataatgataccgttaacagagatgaatccaccgtcgaacatatcaactctagttggttatcactcaacgacacacaatccactgagcaaactattattgattttctttcgaaacctatcattcttaattcaggtactttttccatttctgatacttattcttttcttaactactatact

SEQ ID NO: 226 - DNA, 827 bp, unidentified
  source 1..827: mol_type = unassigned DNA; note = Fesavirus 1 polyprotein gene, complete cds.1R, sequence
gttttcatcaaagttgaagctcctgaaattgacagaagtgatagaagatttcaggagcttcaactttgatgaaaacattaatacgccttttgagtgcttcaggatccgtcatacgagactggagctccgcttgttgagcatcgatgtcgaaatttgaagttagaacgacgaatggggaagagaaatacacattgcctttgcctgaacactcagcaatattgagtggatagggagactcgtctgtcatttggataagattgaatatttcattatttcgatactctggatctttcatttgaaaaacgtcgttacacactgcgaatctctgataggcgtactggtcatggtatggggtgtttgacatgactgcgtatatatcccgggatttgtcaaagtcaggctctccaaggacagcacacaagtcatgtgccaattgtggaaccatgactgtcttcccaatacctgggacgccataaatatagattgtgtaaggtttcattttaccctcacagccgacgaatgatgctaagtttccagatatgattttttcgagcttacgaacccgatcctggattggtttaacttggtcagttggaatttcgtgcttctcggactttcgcacaaactgtcttccctgagacagcagggacaaaacctggagacgagaaactcgtgatttagttagttcagccaatacattccaggatcagcaggctcaggctgttgattggtggggtttggtgcgccttctccgccttgatatcattcaaacattctcgctatctgatgctatatcgaaaattggagttaaccagcaggaggaggaa

SEQ ID NO: 227 - DNA, 834 bp, Marnaviridae sp.
  misc_feature 1..834: note = isolate brb141urn1 genomic sequence.1
  source 1..834: mol_type = genomic DNA
tcaagcacgtaaacgtgacataggaaaatctgtttttgagcagaatttttcctatatcacgtttacgtgcttgacaatgtcaagtgtaatccgattgaggtgcaaggcctcatctgccgcgttagcggcgcgctaggaccgaaaaagcaaaccctatgtattctgctatttcgattcgtatacattgggcgttgtgatcgacccaaagcgcgctgcttacgcggcatagggcggtgtcgcaagacaccgcccgttgggggtgtaatccccccctttggagggttgaaccctccaccttagtcccagtaggttcccactgagcaaacccagcaatggatcccgtggaccattcggccagaccaacactctccggagttagtaattcatccgtttggacacgctacacatcgtcgactgctaatcacttcgtgcgtgctattgtgggccgtccgcgtccactctaagactttgtgctatatatttcaggggggggcccctgcctcccccactgcatatacattgacggaacccaccgtcgttaaacaagtggagaaaaacagcgagaactgaaactcgcagaaaccattgtgtcgctaaggctgccagaataggcttgcctggtgcagaaaggaacccataacctccgacctctccgttccgataaaggacgacgtcgaaggcgaaactgtaagttgatacttttgtgtatttgccaaacgagctcgtcgtaagaccctacgctcgtgtaacatttgcacaattgagatactgattggaccctctatgccctgatagctagatcgatacatttactcatcacagtaaaaggctgag

SEQ ID NO: 228 - DNA, 855 bp, Perth bee virus 4
  misc_feature 1..855: note = isolate WA2-63 nonstructural polyprotein gene,1
  source 1..855: mol_type = genomic DNA
ggtgcaagccctccctcccacttggtggttggaggtgcacgttcaattccaaggcgtcctgcgcagtcgtcatgctgtgcggtgtacgtggtaccggctagtagatccgagagtgtacctggtgcgcagcccgttcctgatactcactagtggcaacccctgtatgaatgagccgtcttcagggttagttagtggcttaccgaatctatttctacctttcaacgcaccgacttaggtgtatacaatcaggacgttagtggtccttctgtaagtagtggcacaacttcttttgtggcagaccccgtggctgccatccagccggtcggccggtccgaccaggttgaagagttgtttgccccgaattccgttagttctattagtgactatttagctaagccgtatcaagtatttcaaggccctttcactgttgtggatccaattggtgccattttgtattccgccgacacttttacttattacactaacttgttaaaaataaacaagcttagaggtttctatggtctgcgggcaacgctgtgcgttcgccttgatctcaatggcactccttatcacgctggtcgtttgaggttgtgttattatccttgttattctgagaatccaaggaaggggtctgcccatgttcaaaatgttatttctatttctcagttgcctggtgttgacatcgaggcaaacgagacttctgttttacttcgcatcccttatgttgctactactcacttcattgaacttactgctggccctgttgattggggtcgtgtttacgtttctgttatttctcctttgcgtacggggcctgacaaccaacagcagatcaattatagggtctggacttgg

SEQ ID NO: 229 - DNA, 859 bp, Lothians earthworm bunya/orthobunya-like virus 1
  misc_feature 1..859: note = isolate L381R
  source 1..859: mol_type = genomic DNA
gtttgaaataagctgtatgtgtgattgagatattgctattccgtcacatagaatttctgtgaatccactcttatctgatgtgaatgatgattcaaccactaatccactttcacatttgaaacaaccgtggcatgctgttagtttgaaatttgttattgctgccttttcaattagtgtttcaggttttttacctttgatagtgaaaatgaagtttagatcattcattacttctccaactttgtaaattttgtcagcaacatgtctgagattgtgctcagaatgcaaatttctaatcaatttgaagttatttttgcagcaagatttgaaagtgaaaaatcgatttcttgaaaagaaacaattatgtttgtaatcagcatcatcagaatcacaatcaaaatatggagtcattccgtcaacatgttgcagtgtgccaaatctatttgaaaattcagacctatcattaattgggccagaatacaaatggcctttgtaagatgcaaatatcttaccaacatcatctttggaatctccatcgaatgtgaatccatatttcttctgtgcaattagttctgttgaagatatatttctgcagaaggcttttgattgaaataatacacataattcaattgatttcttctctcctgttatcttgtagacatcagcacaatcacctaattttggttccatccagcaggttccacatgtgcaaccggtacctattgagaaacatccggatccgtcacaagaccaactacttgtatcttctgacgaaattattttgttgttcacagtttttgaaccaagtttgtctttacacttgtcacaattttctgtacaagtatcggtgctttcatatttc

SEQ ID NO: 230 - DNA, 861 bp, Colobopsis shohki virus 1
  misc_feature 1..861: note = Kumejima-Csh RNA, complete genome.2
  source 1..861: mol_type = genomic DNA
aagaccaataagagctctatggaatgaacatgtagagcaatgtccaaattgcaaatatgtttattctgttttacgcagaccatatatagttccttcagttccttatttcagcactccaaaattccaaacttcagaaacctcatttccttttcctgaattcactaaacccataagaaaagaagaaaaatcgtcttctggtgaagatactgttgatgattaagtattctttatgagttgcagtctcttactctgcactgtgtctaggtggaaactatcagcacagtaaataagtgaatgtaacaagtttggtggatacttgtcggactgacgttataattcaccctgtatgtttggcgaaaaccctatcgtcttcatatggaagttctccttgtcacagaacaaatatgggttgcccccagcattaaccactaagcgtttaagagctcatgtctctctttagagatttgatgtatgagcaactctcccggggaggagaatttaggctgactcctaccaaggttggatcttgtgatacgtagcaagtataggatgatggctaattcttttattaaattcagaaggactagcaatctggatgaatttaccggatccgtagagtcatgtgtttaatgtaatgggggttactgtatactcgtgtgggtcgactatgcagaaagggggatctcgccatagagatgtcctgtacccattcttgcggtggacacatcgtacttaaattttaaatgtatttaatgctattattttgctgctttttgctagttatttgcttattttattgctattaataaccattttgctgactaagttgctttcgttaagttatattgctattcaactacg

SEQ ID NO: 231 - DNA, 863 bp, Culex mononega like virus 2
  misc_feature 1..863: note = isolate OTU6 RNA-dependent RNA1
  source 1..863: mol_type = genomic DNA
ggatcgatgaaggagatcctgggaattagtcttagaaaaacccgacagttactagtcaagcaatcatgaactatataacgccgacgattttggttgccgtcattgtgatcgcccatacagtggccattcggtcactgtcttacgacatgacggacagggtacctgtgatcgccctcatcaatgaccacgcttcgtggtttatgaaattgaccgtcagcccggtgactatcaatttttacgcgacgctgacctccttcttcgccaccttagccctgatgggtgtggtggtcaaaaattggcgggcgtatgtccgggacatacaacgaggggtggtgagggcggaagtgttgatgaggtcagcgtgactgcgctggtctgcttctagtttctccctgagagagttaatctgtggaacccgggatctcctgaggcggacacacgacagcattgtgcagcttacatcttgcataagatgctgtcgtgcttattttgagcgaattaaactcctcaattctgccgaagcagggggatcctagatttcaactagttattctctcagaggaatagtttggtttattttgttagtttcattgtttttttatgcatagttctatgtgtgtttgtttgttacacatattttgttttatatatatacacatgtatttttgatgttggtcatgtttgtctagcaattcggagccctatacactcatcttccctgattctaaattctctgtagaaattcacatatatgtgtatatgtatatatattttgatactgacctgctctacaaggagcttataacaaattgagaagtggcatatcttcttagaaaaacccgctagttactattcaaatcaaa

SEQ ID NO: 232 - DNA, 867 bp, Dicistroviridae sp.
  misc_feature 1..867: note = isolate wwb174dic01 genomic sequence.1
  source 1..867: mol_type = genomic DNA
ttaaatagaatccagatcaattcgaagctttttaagtagccgatgtgtagaattttagtattgtccattttatagggtacagatcaattcgaaactataattgtaggtggccgtcacaagagcaaacaaaggtagatttattagagtccagatcaattcgaagctaataagtcaaaattataacaagttgaataactttaaaatattcaaaatcaaatttatttaaagaatagtactctctttttcgatagaatgttttaggaaaagagctcaatattactttattgttttcaaattattatgttttaacacaaaatatatttttgatagtagtgacagtctatttctctgtctaatgtcgatttcccgttatatgtggatcctagtgtgaattactagtaaaattttattccgtgtgcattcgtataatgtacttattgtttcaggcgatttagtaatgctgtttcaataatattaagaactaagattatttctatattctaatcaaagataaaatatagactcttgttatgaggaaagttttcccctctttcaagttttaataacgaaacaaatatagcaggttatttgttgaacgatcggtagttactccgatgattcgattacttccccttgacccaactttggttgaacttttagttcaggtatatgttgcattttccacgtgtgagaagcgtgttcttaagtgaaaggtaagttaggaaagaatttagtgttgcaaataatatagtgttatgtttcctcaaaccaggtgtgttcccctcgtttgttgtatttttagggcatccgtaattaaaggattttaattaattaaataagtacaccattaatgtaaatttttgttgt

SEQ ID NO: 233 - DNA, 892 bp, Achimota virus 1
  misc_feature 1..892: note = complete genome.1
  source 1..892: mol_type = genomic DNA
caggagttcagcaacaagttcagaactcaagagacgccatcggagagagtttgatcttagatggactggaagaagaccccatgtcagtgaatggtgcaaccccatatgtgccccaatcactccaatcccacggagatttacatgccgctgtggagactgccctgatgtctgccccatgtgtgagggagattttaaggtacttaaaattgctggagaaccgttttaatcaaatggattggaagttggacaagctgattggacaacagagtacaataacccaaattaggaatgaacagatgggactaaaagctaatatggctatgatagaggggttgattacctctatcaaaatcatggatcctggggttggtactggagcaaacgccgcacaggccaaaaaattgttcaaagaagtgccggttgttattagtggtcctgttgtgggagagaacccattggtgacagctactgagcttgagatccaagatcttggcaaaccagcaataccatctaaagggagttcgaaaaaggctggactgactgaagcagatttggctgggtacaagatgaccctgatgacattgatcaaggattgcattcccaatgcttcgatgcaacaagagtttgagaggagagtaaatcaaatcaagaatgaagttgatttcaaggcgctcaagagagagatattaagagctgctgtctaagaagaatccaaattatgcttagtacccatactgcaaggctttcaaggaatcatgctgcttaaatagtgcacataatcaatacattccatgcaaacaaatgacatcctgattagtagatatagttaatttgcaatttaagaaaaaaccaaaagtgggcccggacccatcaagcccaggagccctcaacc

SEQ ID NO: 234 - DNA, 898 bp, Norway nairovirus 1
  misc_feature 1..898: note = isolate NOR/A2/Bronnoya/2014 nucleocapsid1
  source 1..898: mol_type = genomic DNA
ctcgaagatatctaacccccgagaattacaaaccattcaaccaagagaacgggaagtggcatctgcctcggggacacttccttgtgaagtttagattcagagattcaaccttagtcatctcaagggattcacctctttctcaaaccctcttacagagaagttggctcactgtagaccaagtggagagtgaccaaccgtggatcccaacttaattgctctagtcatttaccttttgagcttgatctccattacagtttatcacctgtcaggtcccaactggccaagaataactgagaaagaagaggggccaagagacatacccaggcttctacaggagaatccctgccaactagtctctttccagaagctagtcactccaggaagaagtgtctgtgtaacctcacagaaaacaaagccaggaaacaggagtccagcagaaactctgggtgaggtccaggctgatgaagctgacgaactgatctgtgtagttgaacaacaactgcaagacttgggtgccaatgctgtcgctttggtagatcagaaagcaaaaggactccaggaaagactagtaagcacgtggaactacagcgaagataacctctcaacatcgccagtgttctggctggttatacttgtgttggctggttttctggtgctccgcagttctaatccaaggtacatccctagctgtccgagctgctgtaacaagtcagcaggtgaaagaaaagtagtgtacctagagtctgtacacactcagacgggaagaccaagaaggaaaagctcgagtactcaaaccgaagcagtccctgagaggataagccggtcatctcaaacagaaggaccactgacaaatccagtgcgagaaagtctacagctgctggaaatctgaccaatcaca

SEQ ID NO: 235 - DNA, 908 bp, Shahe picorna-like virus 3
  misc_feature 1..908: note = strain SHWC13623 hypothetical protein 11
  source 1..908: mol_type = genomic DNA
cgcggcaacgcgtacgtagagtctgtctcgatttggggtttaaccacccctggttcttctgatcaatatatatatgtagcaatggttttccttgtgttattttacgaatgatcacaagatttaaaacccctacatgtatgcatatcgagcagacaggttttttgagcgctagcagtcgatctactgccaccaacggattttaccaattcaatcctaacagcaattggaccgcgccccccttcgggggggcgcattcaggcactttgtgccgccgctttatgcggtttaagatgcatttgcatctggaatatcccgggattccactagaacaccgatttaacggtaccggggaccccccgcttatgcggggggtctcggcccatctgggccaaagatcttacgtcgatctcaacagcacgtaaacacgctctcccatcaacgggattgagcacttcttatacctttgaagtaaatttgggaacctttctacttccagtgatagtgaatcacaggacaatctgttcacggaacagggtacttacggatccaccgtaagcgtgaaattagtttggggagcgaaataccccatttgaccgtagttacgcactcgcgaagatgcacttacgtgcgtcttgcgaggaaaaaaatatctcgtgtggttacgcggtttgatgtaaaccacctgttgagagtctcatgatactcgtccggtacgccgggtagacaggacaggtccctgcaagccataaccttaaactggtaggttgcctcacatggtttttgaaatacatgctgtggaggctttccctattggataataaagcacgtgaccgacaattgataccaccttcgcggtggtatcaatcgtcggaaaatttcctccaagaagttttccggtgattgatatc

SEQ ID NO: 236 - DNA, 909 bp, Hubei picorna-like virus 2
  misc_feature 1..909: note = strain WHBL73152 hypothetical protein 11
  source 1..909: mol_type = genomic DNA
tgcaggtttccttttataggagacctgcacgtgtttttgtcgagatgaagagtagctgctcttctcagtattattgtatgatattttcattcatattctgcgttattttggataactaagaattggtgtaatttcacagtagtactgtgatttgcacttttttcttaccaatctgcgtatgaatccctgtttgggtttacatacacattttatttgaattcgacaatgaagtttagcaacttctttctgaaaactagctagagttcgacgatctctctggctaatgacaaataaccaatcaaaaagtcaaatgttcatgtatatatatatttagtagtgacctttatttagaaaaactttagatgatttatcgtcaagttgccctttgtgaagcgatcagctttttatatcgtttcatttttgtatacgtcttaattgacgttgtaagtacgttttgcatacctcacattgaggatagtatcgtttcctgactaagaagttaaactagtctaccaatagcaaccatataggatatagctttgtttttaacaaggtttaatctgatcttatgctcttgcttacggtgttttatgtatagaaaaatttttataaaaactacataattgtcaaaagaaaaagcgttacgtactgacgcatttatgttcacagtgtgacacaaaccttctatattttgattgtaaaataggctttgcctgaccatttatcaaatacaaactgtttcaaacgcctctccgagccatattggccgacgcgaatcgacataacagggtgagtttacagctgcagttgcagccgaggatccacttatttgagagagaattactcttaacgaaattttgaagtcacttctacacagttaagtctgagtaggcgttatccaaacgtaaa

SEQ ID NO: 237 - DNA, 911 bp, Changjiang polero-like virus 1
  misc_feature 1..911: note = strain CJLX30310 hypothetical2
  source 1..911: mol_type = genomic DNA
aggaagctccacacaccctagccagtaacagttgttgcaatagctggaagggtaaagccaacgaaagcacaaactggacacacatttcttaatcggggttctgtccgggataatcgtaaccacccccgtcatcgcgtttgtgctatatagatttgtctaccttcctatccaggccaatatcagaggtcttgtcaacgaatatggccgtggctaggactaataggagaagacgtatgcggcgacttcgtcgcccccaaagagcgcgaccacccgttgtggtcgtagcggcgccacctggccgccggcgccggcaggcaccggctcagcgcccaggtgctagtagtatgtcccaagaaacctttgtgttttccaaggacagcctggctgggaacgcttcaggcgttctcacctttggaccgagcctcactgattgtgcagccttttcctcgggaatcctaaaggcttaccatgagtatcgtattaccatggtgcttctggagtacatcacagaagcctctagcaccgcttatgggtccatagcatacgagctggatccacattgtaagattaccagcctctcatccaccgtcaacaaattcggagtcacgaagaacggtcggaggagcttctcccggcgccaaattaatggcaccgagtggcacgatgcaacggaggaccaattccggatcctttataagggtaatggcgattcgaagatcgccgggtcttttcgtgtcacgattcgggttgagactcaaaacccgaaataggtagacgagagctcgcctcccactcccacaccagagccgactccggctccacctcaaccagaacccaccccctgcccccctgctaaacaagacagattttggggttatgagggtgtaccacaatcgaaaatttcctcgggc

SEQ ID NO: 238 - DNA, 930 bp, Solanum nodiflorum mottle virus
  misc_feature 1..930: note = culture-collection ATCC:PV-491,1
  source 1..930: mol_type = genomic DNA
ctgcttgggatccgaccgatctcctaatgctaaaaccctccgctatggtccgtatgggcctggtagacccggccagagtgttcgtgaaacaagaaccccacaccaacaagaagctgagtgaaggtcgctataggctgatctcctcggtttccatcgtggaccagatcatcgaaagattgttatttggtccacagaaccagcttgagatagctacttggtcgaccataccgtctaaacccggtatgggcctaagtttgcggtcacaagctgagttgttgtggaatgatttgaagcataagcaccgactgagtcccgcgtctgaggcagacatttctggatttgattggtcggttcaagagtgggagctttggtctgatttaagcatgagggtaaatttgtgtgatgatatgcatgagggccttaagagattaatgatcaacaggtttaggtgctttatgttttcagttttccagttatccaacggagagctactagagcagacctcacctggaattatgaaatcaggttcttattgcacgtcctcgactaactccagaatcagatgcctcatgggcgtcctcattggctctccttggattgtagctatgggtgatgattctgtggaaggttgggtgaccggagctaaagagaagtacctcgagttaggtcatgtatgtaaggagtatagaccttgtgagaccaccagagatggtgagctatccaaggttaatttctgttcgcatgaactctctgagggaagattctggctcactagttgggccaagactctctataagttcctggactcacctaatgaatctcatgttgagttggagagagagctgagttctgggcccatgtggccccgcgtaaaacgttacttgtgtcaggtaggactgatccctgacaaaacattagaggaaaggaaag

SEQ ID NO: 239 - DNA, 936 bp, Red clover carlavirus A
  misc_feature 1..936: note = isolate B46, complete genome.2
  source 1..936: mol_type = genomic DNA
gtttacaggcttgaaattgatatagtaagatacaggacaaatggccgatcaagatcaacgcaaacgcgagcaggaaatgaaagagagggcggcggaggagcaagctcgtcggaaggctcaagaaagcaagttgaaatcaccagaagcaaccggtagtggattgggtcattccatgatccaaacgcaacaacgattaactactctggaaggtctactgagggaggataggtctggcttgcaaatcacaaatgctagctttgaaaccgggagaccaccgttgcaaccaactgaagacatgagaggtgatccacaaaatatctacaacaggccatcaacagactttctgtgggaactgaaaccaaaacctgtttcaaacaatatggcaaattccgaagaaatgtcaaagatcaaagttaggctggaaggactgggtgtacccacagagtatgtatattcagtcattcttcaactggtgttcaagtgtgcaagtactagtagttcctcctatcaggatcctcaagggaccttcgaattcccaggtggtgctatcatggctgatgatgtggtgggaacagtgcaggagattgctggactccgtcgagtctgccgactctatgcgcccgtgacatggaattacatgcacctgcataataaaccaccttctgactgggcggctctgggttttcaatccagcactagatatgctgcatttgactgctttgactatgttgaaaatgaagcagctatcaaaccaagtggtggaatttcccctagacctagcagagctgaatatgtggcatacaacacgtataagcgacttgcgttggatcaagcgaataacaatgatacatatgcaaataatgattcggcaattactggtggtagaatgggtcctgaaattactaggaatttcaataatgcgaataataagaaact

SEQ ID NO: 240 - DNA, 942 bp, Dicistroviridae sp.
  misc_feature 1..942: note = isolate rfb199dic1 genomic sequence.1
  source 1..942: mol_type = genomic DNA
ttataattatatcgtattaaaggattttcattagttgtcatggttaaatcataaatacttggctaaaatggtttcttcgacaagtatcgtgtaaagttcttaaaactaataatcgtccagatcaacggtcagtgtacaggcgtgacatcctaatctcggccttacattctccactccatacgggggaatgacgcccctctcctaagagtgccgagagcgccacatgtatgtcttaagtttcttaaactctcttcaattgtacgtagggtatgtccctacgtacaattgaagagagtttaagaaacttaagacatacatgtggcgctctcggcactcttaggagaggggcgtcattcccccgtatggagtggagaatgtaaggccgagattaggatgtcacgcctgtacactgaccgttgatctggacgattattagttttaagaactttacacgatacttgtcgaagaaaccattttagccaagtatttatgatttaaccatgacaactaatgaaaatcctttaatacgatataattataacctgacctttacttagtgatttcacaaacggatcccgggtgatttcacgcacgactaagttttataatttgataaagattatgcgagtaataggctcttttgtagcttttagtgcatgtttagaaatttatttgttagcgaccattgaaaagcgaccctcgatgattacgatcacagaggttagcctgtcaagacatttaaataacgaaccagcatgctatactaattgagcaataccctagtttatcagcgattgatatcaaaatataagattcctcggaatcaaggtagtcccggtaaattatatttgtagcgaagacccccggaactgtaagcgatacacgaatgaagacgacgattcaagacggaatcagaatgcctcgtgggcgtaaacacaaacc

SEQ ID NO: 241 - DNA, 943 bp, Changping Tick Virus 3
  misc_feature 1..943: note = strain CP1-3, complete genome.1
  source 1..943: mol_type = genomic DNA
cgctgatagactcttagttttcgaccacatgcgcgcaacggaggttggtcgtgttctgttttaaaaacaaatcatgccggaaggcacagttttcagagatctcgttgttcgtttgcgctctattagtctccgctttgctagcctgaggcgttccgagccactgtgtacttccggtaccatcagtcaatcttgacgggcattcccctgagagattgaccagccagggggtaaccccggcagcgcgaggcgtcagccttcggcccgccgtcgcgctccaacgagatctccacgttcaccaggtcatccccatcgaccttccccccactctgacagctccccggaaagaggtgatctttccgtagaagatcggttgagcttgtcgacgacccaacgacgtcccagacctgtgttaggtgcagctggagtgtcttttgcaaaggccttgctctcaccgccccctggtcgccacgagccttgcccgccacccgctcgtcgtgtctcctcccctgagccacagccaggtccttccggctatctgagacacagcccgcgagaggttgccactccaggatccccacctgagtcaccctatctgaccccccgatcctctcctgaaccagacccggctggtctcttagccgaggaaggtcagggtgatcaggatcctgtggaagatcctgcgcttgtacagcacctcgccaggcttctcgagctaagcctagacctggagggagggatagaaggcggtgtgcaagctctgtttgcacaacaggaaggtgatcaagccgcaggaccagcccagccaccagcacccgaggccccccaagcggttgcagccccaccacctccgccgcggcccgatcgacgacagccagcggttcccgtcgcagttgcagcacctgctccaccagcccccgcagcagaaccggtcatccggccagcg

SEQ ID NO: 242 - DNA, 945 bp, Entoleuca hypovirus 1
  misc_feature 1..945: note = isolate 97-14, complete genome.1
  source 1..945: mol_type = genomic DNA
tccgaattcccgggatccgcctttgagatcttcctaggaaggccacctaaggaacttgccatagcccgtgtgagtgcttttatgcattctcatcacagttttctctcttggagaactatggttaagtttaggatttcattggtgaggccagtgggtctcggtcaaggcacagtgagggcctgtgcgtggttgtctccctcctctcccgcaggggaagtaaaacatacttgcaccgggacgcgatgacgtccgttatgtggataaaccatctctttaattaaaactcatcaaccgggggttgcacccgattgcaagtcaccactagaaatgacgacgaaagtagaagggtggcagagaagatgaaaaggtcggcggctaagatggtgtcttcttagtttgctttaagcgcggcaattcaacattgtcccgtcagattggccgcaatgcctcaaccttcaatcgcttcgggtactgagctcgcggtaaaccattgtaaacggtaacgcgtaggagtatagcactcttgcgtagtccctagtcattaaggaattactgtctctttacactacaccaagtggtcgggtccgtagggcctgatctttagcctctccggctatcgctgcgtatactgcagtctgttagtaggagtcatttcgaaatggtgatcccattcatacgaccgtgacgaactgaagtcactgatgtctctaaaagctaactaaaatttagtctgcggggtcgcagtacggctccctcatcgatctttttctggatgtaaaactccgcgtctcatcgctcaagagtataaaaggaaattgaatggtgacagctggaaagacagcaccccaattcttcaagtggtcacaaacatcgagctttagtttgcaaccaccaccgtttcaagaatatcgccgtttcgcaataccgtaaattgccattttcaac

SEQ ID NO: 243 - DNA, 946 bp, Kummerowia striata marnavirus
  misc_feature 1..946: note = strain pt119-mar-10, complete genome.1
  source 1..946: mol_type = genomic DNA
gctaactgtttgccctatatagacaagtgtttagccctttaccgagaactggactgcacggagaggtagtcctagctcgttacgttggtcttccttggtataggtcatcaatggttatttgatgagagctttgatgtaattggatagagacgttttactcagataggtgatttctgtccgacacgcatgtcggtaaatatcaccaactttcgggataaccggatcctttgttatttgggattgttatattcttttgctccggagcatttgatattttataacaatttgcaggtggcgctgcatttacccgtagccatataaatagttgtaattatattgtatatatatacaactggtcgtcacttaatttgatctgtagataattttgatacacaattttgtttacaggtctttactgatcagtctctctgcctaaagaggcagaactaaccgtaattaacggacgacccctatgagtggaggatccacttggcgcgacattagttcatggtcatggcgcattatatgacccccgaagggtggctcccgaaacagccttttttgatggtcggaaatgtacatgaatttatttatgtgctgagtacggacatcgcaccctccaggagtattggattattcgagctacctgacttagtatggtcacctctttctcaatagaaattgcatacaagagggtaagggttcatgacctacattatgttttgcataatgataccgttccgataccaaggcattatttggtggcaacatcattagtgctaatgattacctgtgccacaccgtcgaacgtgtgaaattatcaggaggaatctggggggacctgctgtgacaagatagttggggcgactttcccccgactcttcttgttactgcaggtgcttcaattcgttgaagcatttgcggtaacaaccatctctattatttc

SEQ ID NO: 244 - DNA, 956 bp, Garlic yellow virus
  misc_feature 1..956: note = isolate G83, complete genome.1
  source 1..956: mol_type = genomic DNA
gtttacagtgtggtatattgataacaatgggaaacgagaatgaacaagacacagatccaaaacttgcagggcgaaaaggcactagaactgatgtaaacagccttgtccacacagaggagcaactcagggatccaaactacggccgtagacaagtgaatgacgttaatgtctctgaacacgattcttactctgaacttatgaagaagtacgaagatagattcaacaaactcaaagaaagctgcttcagggatctttcaagcgtgtcgatttcaaacagtggttgggaaactgggaggcccaaggctgtcattgctgacaatctaaaaggcgatgctgctaatatcttcacaaggccttcgatcgatgcattgctcgttcgtaatacagtacccgagtcaaataacatggccacagctgaagaattggccagaatatcagctaaggttcaagcactgggagctcctgaagaacatttggcagaggtcttttgggacgtggctaagtattgcgcaacagctggcagctcgccagctgtcaatccccagggtactattcagcttggtgggaggacaattacaagagacatggtgttcgctgttattaaagagtattcaacactccgtagagtttgcaggagttatgcacctattacttggaacaacatgcttttaaacaaccaacctccagcgaactgggatgctaaaggtttcactgaagacaccaagtttgcagcatttgacgtttttgatgccgttactaataaagctgctattcagcctctggaaggtctaattaggcacccgactcaggctgagcggattgcatatgccacccataagaagttggctctggaaaagagcgcacaaaatagcaggtatgccaacacttcggctgaagttactgggggcttgttcggctgttcccctcgcaacaatttccgtgagagtcgatgttaa

SEQ ID NO: 245 - DNA, 959 bp, Trichoderma harzianum hypovirus 1
  misc_feature 1..959: note = isolate THHV1.T-70, complete1
  source 1..959: mol_type = genomic DNA
ttccaaaggatccactttgggaccccgcgttaaggtactatgattttgtacttacgtctcttggacgaccttaacatggtttatactctgtcgagttgctggtttcagtaattcagccacacattgtggttggccagcaggcggagtgtgatccagcttgggtgcaaccttcgttagctaatcgcagtagctaacctggggtgccctaaggccggaggaactcgttggttaagaataacccatttatcggtttcacaagctatgtagcctagatgatgttctcatcctacgtaaaactatgaaacgcgcagcttctcccacccctttagagagaggggaattggttgggtgcctagatcccaggagcactgagtagtgcactgtagctgatgttagacgttggtgtgaccatctgacattgtctctagccatgtccatcgaggttggcaacctaatgaggcctgggatgccttgtttcgcttctgacttcgcgatcagatcgttgactgagaacagtcgattaaacagcatgcattcttttgggtagatgtatgaaggtaaaagccgtaaagcgaccctcctcgactgatgcctttgtgccagcttgagagaactgaggacctggcgaagccagtgggtcaccttcaataggttcatggtgtgtgagttcatctcaccacaaacgttttccctctgtttagagattctggaatcgctagccgagaacggctgcccttgtattgctttggttctggtttatacgcttgagatcgtggaagttctcaaatccgaaatcaacgtgtgtagcacgaagacgtggtgtgcttgcacaagtcttcattctcaaggatagctgggttctttactagggcaaccccctagagccagccggttcggcacaagaacggtggaagatgtgggatgaaaactcctagcatcagaagtgcacttccatagat

SEQ ID NO: 246 - DNA, 993 bp, Beihai picorna-like virus 48
  misc_feature 1..993: note = strain BHZC37443 hypothetical protein1
  source 1..993: mol_type = genomic DNA
atgcagtgtgttttacacactgcatgttatgttttggagagaaagtatttacgatatacttggatcctccgcttgattgcgtcggatcctttcatggtacattcactgcgagacataatgtaccataggaaggaattcgcaacatgacgaaggaagagtcaatttcgtggaatgccaattgatattacaattattttcatacgtctgtaacacgatacgtacaacccctaacttaatcgtaggttaccaacgcctacttcactgaatttatccacaataattcagtatttgtttagagtacctcaacactctatgtgtcgaagttgagacaggtttttaagtttgctctctgtatggttatttccgacagatgagcttacaatgcgttatgaagatgctatttttcctggagtcaatagtcgatgtcatttagacgtcgtgagatttataataaaaatgttagtcgtagctgctatgtgaaggcgtacgaccgaatgtttgaacgagattatcaggtttacttgatttatctacacttttgggcaactttgttgccatagcctcattttgattgtcgaattttgagtttgatctaaagattagacattgggactgattagtaaagaaaagacaagagttgatgggaattaactcgggacacgtcatacggtggacgtgaacgagttgcagggttctcatgatgtagagatacgtcataaaagggtgtggcacctcaaccacacttcgaaagctatcccctaagtgcatgggatgatatatttaagctgtttatgtttgcgccattgccatcgcttttgagccattggtggtaattcgcacattcctctatacagtggagattatttgaacttgtacattgagaagcgttacatactgtttgttggtcacggcagatgtatactcaaactttgattgaacattggaagaattgtcgaaatttcggtgataactcatgatttttggtgcttggaa

SEQ ID NO: 247 - DNA, 1000 bp, Papaya mottle associated virus
  misc_feature 1..1000: note = isolate KE-Mer-04, complete genome.1
  source 1..1000: mol_type = genomic DNA
tttgacaaaaaaacctcaaaaagtgcagctactattgaaaatcataatatacgctcttgcagggattggcttctggatatgactcaagtgttttcaaagagccaattatgcactaaatttgacaaccgatttaggtcggcaaaggcagcgcaaacaattgtttgctttcagcacgcagtgctgtgtagatttgcgccttatatgaggtacatcgagatgaagttgaaggaatccttgccgaaaaagtattatatacattcaggcaagggcctagatgagctgaacgattgggtcatcaagaacaagtttgacggcacttgcaccgaatcagattatgaggcctttgatgcttcacaagatcagtacattgtcgccttcgaattagagctaatgaggtacctcggtttacccaacgatttgatcgctgactatgaattcatcaagctgcacttgggatccaaacttggatcattcgcaattatgagattcacaggggaagcaagcactttcctattcaacactatggcaaacatgctctttacttttttgaggtatgacattaagggcaacgagagcatatgttttgctggtgatgatatgtgttcatcaaagcggctaacagtcaaaagagaattcgaaagcttcctatctatgatcaaactgaaggctaaagtgcaacatactaaaaatcccactttttgtggttggcacttgtgtccagaagggatttacaaaaaaccgcaattggtcttcgaaaggatgtgcatagctagggaaaccaacaatttacacaattgcattgacaattatgctattgaggtttcctacgcttatcggaagggtgaactgattacagcaagaatggatgaggaggagctgggggcatattatggctgtgttcgaactataatcaaacacaagcacctcttaaaatcagatgtcaagaagttattcgaaggtgcaacgatgtgatcttaggttgtagatatttaaattgaat

SEQ ID NO: 248 - DNA, 1000 bp, Sclerotium rolfsii mycovirus dsRNA 1
  misc_feature 1..1000: note = strain BLH-1-16 hypothetical1
  source 1..1000: mol_type = genomic DNA
ttttcgtttgaggtacgaaagacgatgcgagccgaaagcgtcacttagaaccttgtccgttagattgattttgataacccagaaaaaacgtgccacgggtaacaacacgctaaacaactggaatctgctttacagtcaaagcagcaaagaccagcgacctaacacctttaagaaagaccgacttgtgctggggaaccgcctactcagcttttcaccggaacccgaagccttagcgattttacgaatcgaacgcgctactgaacgatagtgctcttttccaactgcgtatgagcataatgacgcatgccccaaagcgtcaatctcgtatcgaaacaaatgactcgagacgggttatcaccaaagtgacactaccacttttgccttagatgtcccaacagagaaagatagcgtgtaaggggcggctaccaccacaggatatagcagccgcaggtgttcgtcgccgggagacgcgccttgctgaggaccgaacgacgaaataaagtaggacctgactcgtctcgcaatgactgttttcagatgccgtggacttttgacgagtctcgcgcgtatggtccgaacgcggggatcgaaaggagccacacgtatcttgcattggtcttacgcatacacgtaatactaccatctattggtcttacgcatggagatcacacgtaacaccgcatgttgccgaggcgtaactctcggtgcaaggcgtgggtgagtggccggccgaagcctcatcagtctcgctgcgctaaggcaaacgacggactggtgtgagaaagggaggagagagggatcctgagtaacgacagactacggtaggaaggaatgtaagggtggggcttaggaacgaatcgaaagcccgcggtgtggaaacttggaggaaagaataggacttaggacgaatcgaaagcccagggtgtggagttactcactacctccccgctactacaccgccaaggatgttggatcgttcctgcctcaggcaaggatcggt

SEQ ID NO: 249 - DNA, 1000 bp, Rosellinia necatrix fusagravirus 1
  misc_feature 1..1000: note = genes for hypothetical protein,1
  source 1..1000: mol_type = genomic DNA
aagaaaatgaagactgtggtcattttcttccaccaacctcactctccctacggggagtgttcaggctggtgttcaaaatcacagtacacacatgcttgaagtgtgacaagggcgggctccggtccgcggctaaactttggccgtactctgtattacagtttgcctaagtatgctgatagctcaaatcgggaagtggtttggtggaccagagcccgttattcacacaccacacgatccaggacggctctggctaaggcgatccaggatgcgtataaacccactgccaattagctgaaccgccgactaggggatccgcgacatcgtctgggcctgtagcgtaccgtcatcactcttttaaggtacgcgcctgtgtctgggccgtcaactgcggggctggagcttagcgtctagctgcggcgttagtctgttttactgtttacgttgtaggcagtactaagacacacctcctaattttacacttttccaacctactcagcttgccgctttggttgggaagttcttaaaatgagctcctattttatagagctcaagtaacttttgtgcttataatccatcaatgtctcaggctgacaataaacgcggctccggtacatcggcggcgtgtgctcccggaatcataattagccgcaaatccttcctgtttggtcattgtgaccatccattggggtaactctcttttgaggggtgtggtcaaggcgaactcggatagctgaagactgctaacgtagtgcacatcaccgacttgaagatgtgttcgaacgtgccagggcacagcagcttaggctggcttccttggtggacagactgacacccattggggacctcttcctcacggtaagcgctcacgctcaacttccttcgacctgctatgcattcacatttatgtgaaataagtctccgctaactgaacgaaaccgagatagacgaaacttatttggtaagtccgcagcaaacagtcgcacgggttttaggcccgtgg

SEQ ID NO: 250 - DNA, 1000 bp, Fusarium virguliforme dsRNA mycovirus 2
  misc_feature 1..1000: note = putative structural/gag1
  source 1..1000: mol_type = genomic DNA
ggccaaccattgatatcttctttaactcccttggctgggttacagctgggatatctaagtgctacccaccatacaagcatgccctcactgcgggagcagtgcttcagctagttggccgcctaactggagtagttacaggccctttaaggagtcgggtcaccccttatagtatacagacccgtgccaggtttaacgagcctggctactactagttgtgtgcatggacctccgcaatcaatgcattctatttcctgcggctctaatcggtgtgactaaccgttggagtataaaagtcgggtcacatagtactacatctggccgcggcgcggtatcttgccccacacttattatttaccgccgtgcttcggaattacagatcggagaggcttctgcgctcttctgtgcccctcaggagtgagatctaactatgtctcatgtgtagttaactactccgcgtactctcattttccacctctgcaagaaaactaccagcggagggagcagtgaataaattgagctgcacgtctcgaggaaagccgggacgttaaactaggcccgcgcatcgaaggcgctcaacatgaggctagcttcggcaaaggcttaaccgttgcaatcaccccgtcgcggcctgggccccgggtcgcgattcgccagctgctggttcatcatgcagttaggggccccatggaatagtctatgcgttagcatgcggagcacttagtcccggtacagttgacagtaagtcaaagggattgctcttagcatgtggctggaacgggttttatgtccgtgcgaggagtgggaggatccccacccgagtgtaacgactgcgaagtcttaactagcgtgtaggaacagtctctctcgaagtgatgactcgaggggtaggccaccgttccaatcttcagtggtgtccttgcttataggcgtcactttaatcccaaaaatttctaagcagagagtagtgttagtagcattattctcgaaaccaaatttaaaa

SEQ ID NO: 251 - DNA, 1000 bp, Rosellinia necatrix fusagravirus 3
  misc_feature 1..1000: note = genes for putative structural1
  source 1..1000: mol_type = genomic DNA
gcggtttaaggagaagtgccagactctggacgtttcctcacacgcacgacaggctcggctgttgtgcgtgcttatcaaaccgagactctggtgcaagagggcttcttgtagcaccagcgaacgctagtggtggtgaagccagttcttatttgaatggttggctgacgagatgagaccggcgtacttgaagcttggacctctggtaagaggtgataaataactactcgcagatccctggcgtcagttcagtgggcaggaaggctggaaggccttgtggggtttatcgtcacgcagagcggtttggctcgctgtggccccacactacgcactctaaggtctcaataccgcgtggcgtaggccagcttttatagcgatttatctcctgaatactccgagcttcgagtttcggaggttggagtaaatttagcgttacctccgcgggcggcacgcggtttagcaaatatgcctaaaactggacctcgcattcaatcaggtgcttgcgagtcgcctaacacgtgggttgaaccttcgggatcccctttaccgccgcgaggtggagtgtaaccctgcgccatagtgactcagagacagaccctgccccttcaccctcaaaagtgataccgcgggattctggtgagtggaacgggaggtggaatccgcaaggcccaccacgcttgtccgtgcaagggaacacgcttgcaacttggagtgccaccgcgtaggcggcagacaggaatttattctctgtcgttcggcgatatcctaatacagttgtaatgcagtttccgagtgtaacgactgcgaactccttattctgagtaactgaacagtctctgacccaggcctcaagtgggcatacagtggggagggtgctatcatggctttcctttgcggatcgtcgatttcttcggttatttattagccgtcgtacaactcagaatcgtcctctttagagacggggtagcaacctagatagctatatattttctaactcacaaaa

SEQ ID NO: 252 - DNA, 1000 bp, Sclerotinia sclerotiorum dsRNA mycovirus-L
  misc_feature 1..1000: note = RdRp gene for RNA1
  source 1..1000: mol_type = genomic DNA
acgcttatgctggcatgtccctagtgccggtagatttctcaccagttagcatggcagattacaaacccgctagcaacctcactttcccatccctcactcgtccgagcgcagtggatacaagcgacgtcgctaggaacccgcgagtagctagctctaaacgagctcctcgcgctgcagcttctgatattttaaacaggtttaaagagtttaacgcaccaccaccacccgaacccgcgcccgcacagtatgataatgacgcgccggctgcccagctgagctacgaggctaaataccccgttgaacaggcccaggttccaggtgatttcaaatattaccaacctgtggtggcagaagaccgagtacatgtggaacctgctgcagcgcctgatgcttacgatcgcttatctaagcaacaactgaaattagcgatcgaaaacaacatgcaactcttggctaagattcaaaactcacctattctaggtgagttagatttagatgctgaacgtaaacgccaggatgagttccgtcagcttgaagccacgcgtaatgcgcgaattcaacgcaggtctagctacgtaccttttggtcctgctcgtccacgcccggtgctcagccctcgctctacgccgaacaaacctcctgtcgtgcatggcaaactctctgaaaacgaagttaaccatgcacctgtagaggttaacgatgctgctgctgaacaggttcagcgtgaagttcgatctctaggtcgaccgataccaccgcctactaccgcggatccttttgccactctcgctagtgataagcgccgcccaggcacttattatcagaagaatgaggctactctcaatttcgatgacttggtaaaggagcagctcccagcaactaactttggacatactggcgcggacgttaacgtgcaggatgggatggcaactgactcactagcgaaaaactagtgtggaacgttgcttattaccgctctgcgcgtaacgttctcgccagt

SEQ ID NO: 253 - DNA, 1000 bp, Sclerotinia sclerotiorum hypovirus 6
  misc_feature 1..1000: note = strain BLH-1-1 polyprotein1
  source 1..1000: mol_type = genomic DNA
ggcgacctccttccggcacgtcgtagacggcgaccggattaatcaatacagctagtacttctcagcacgctatagcgcagagaacaccaggggacgtcagggagaacgaagcacgtcgcgacctcgcgaggtttctacctccaaggggggctgcaggctaaggccgtatgaacgttgtactcccgcattttggatagatactgatcacgtgcgtccagcgaatcacgagatccctcgtccctgtagacgttaaatggcagcgcaggcggcgacaccgccctttcggttcttactaatcaccgcatccataaaagcggagataggcatgggtgtccaattaatcagtatgagatgggcagtgccgatcgctagcggcccacgggtctgacgatagcgttccgaaaggaaaagggctgatatcagatatcagatatataggccggcccacgtccgtagttccggctgtgtgcaaaccggtggcctagcttgggacttcgatcaccccaatgacgccatgaaaacgattcatccaattcttgctgtgttaacggtttatcttgggcgatagagccaactagctaagatcgtggtgaaatggttcgccttcgtggatcctcccgacactgtggtttcgacaccacaggtgctttcgaacttgaacttttatgcaattaccggcgcgggagcgccacattttggagtcgagactaagattacatcagttctatatgacgtagccacagagagcttgcgcctctcgcgttggacagcttatgccagtgactaacgatatcagatgaagctctgcgggatcttcggtgaaccaacttctttacctgtacgaaataaagggatctgtacctcgtcttgcgtgtctgaacgggaccgaaaatcgacttctaatgtagcagtttgcgtatggaagggatggcttgatagtgcggtttggaggtggtagcgtaggttgaaagagttctagggaacaaaacctccatacaat

SEQ ID NO: 254 - DNA, 1000 bp, Nodaviridae sp.
  misc_feature 1..1000: note = isolate dwb062nod1 genomic sequence.1
  source 1..1000: mol_type = genomic DNA
taagttgggcgctggaatagcgaaatccattaaagaaacttatggtgctcctaaatgtagagcgccggttggttacgcagcagtgcaatctactgaagacggccgtatattgcacttggttaccaaagctgtgagtagtgttccagctattaaacagaggaatgcatatactaagttcacggctgccctcttgcatgcttgtgaattatctatttctaaggaaataggtgtgccgaacggaataggttgtggcttagacaaattagatgcgaatatagttcggaatatactcgctgaagttggtcacatgaggggtaaggtctttgtaatttacaataatgcttaagtcagctattgatgtagcatttaaagctgtccgtgcttcagctaaaagtgcgttgacggcttggagagtgacgcctaatccaacgatggttgttgctaaaacaaaggtcggatccttggtccaaaccgttgccttagaactaagacaaagagcaatcaggcgcgaacatctaaacttatggaagcatcgcccagttcagccggttggttatataactgccatggtgcccaggcccaccctgcttaatagatttgttgaacatgtcttaagtaagttaatgtctgctataagggttattaaaacctatacatttaggttggtagcattaacagggacgggactttactggctcttttcaaccctcattcaggggccagcagttgtagttggtggcacctgtagtagaatatggcaagcaattgtcaggttctattataggcttaaagcccgatttaaaaggagtaagattaaaggaaccaatcggttcagaaaattagcgtcgaaggctgattataggataagagcagcatatatactctatcgagttaccaaacatagagttgctgatgcagttcaattctactccaagaaactggcgcgtatggcttgggacaagcaagcatacttttggtggacagctctgggagcagaaac

SEQ ID NO: 255 - DNA, 1000 bp, Heracleum latent virus
  misc_feature 1..1000: note = RNA binding protein gene.1
  source 1..1000: mol_type = genomic DNA
gtcctgagattcttcttgtggcctgaggagttaatacaagagtacaaaacactgaaactcatgatgggttgctccatgggagatctggcaataatgcgattctctggggagttcgggacattcttcttcaacactatctgcaacatggccttcacctgcctgacatacaacatcaggagggagacccccatttgttatgcaggggatgatatgtatgcgcctggagcacttgtggttagaaaggattatgagaaggtgctgggtgaactacagttgaaggccaaagtgaatgtcagttgttcaccacttttttgcggatggcggatgagtccctacggcattgtgaaggatccgaatctcttgttggatagatggaagatagccaagttctccggaaacctcgagaactgttttgtgaattacgcggtcgaggccatctatggatacaggttaggcgagatcctctatgacatcaatatcgatatcgatgcgcagcaagaattggtgagagagattgtgctggttaaacacaagctgccagcggccatagctaagtatttctctagcgacgtcaatgaagcgcattccgacggagaggaggtagatctacatctgagccctgaaggtgaactacttgattacactgatgccagagggagaggtggcactttttctaagtgggtcaaaggaaaagggaagatcaggtgaggaaaaaataaattaaaaccgaataaaaatagaggtgtgtagaaggttacttagctacggggtaactgctgacctctttaagttaggtgtgaataaaaacctaataatatagaaaccatcttacgtgtttgtgacttgttactgtctgattacggattgaatagagagagcgtagtgaggttactctcagaagtggacgcgaaggaagcggggaaaccggctctgagtttcaagagcctgatttgcaatctttgccgtggggtatcgccttccaacctgagtttacgaacga

SEQ ID NO: 256 - DNA, 1000 bp, Pepper vein yellows virus
  misc_feature 1..1000: note = genomic RNA, complete genome.1
  source 1..1000: mol_type = genomic DNA
ctagtagatcaattggtagcccgggttctgttccaaaaccagaacaagcgagaaatcgctctttggagggcaaatccctcaaaacccggttttggcttatctacggatgagcaagtgctggagtttgtacaggctctggccgcacaagtggaagtctcaccagaagaaatgattacctcgtgggagaagtaccttgtgccaactgattgctccggctttgactggagcgttgcggaatggatgctacatgacgatatggtcgtccgcaataaactcacactggacttaaatcctacaacggagaagttacgatctgcgtggctaaaatgcatctgcaatagtgtcctgtgtttgagcgatggcactctcctcgcccaaagggtccccggcgttcagaagtctggtagctacaacacaagtagttcaaattcaaggatccgagttatggccgcctaccactgtggggctgactgggccatggcgatgggagatgatgcccttgaatcagtcaacaccaacctagaggtgtataaaagtctaggtttcaaagtcgaggtttcaggacaactggaattctgctctcacatttttagagcgcctgacctcgcccttcccgtgaatgagcgcaaaatgctgtataagctcatcttcggatacaatccgggaagtgggaatctggaagtagtcgcgaactacattgccgcctgcgtatcagttctgaatgaactgcggcatgacccagatttagttgctctccttcactcgtggctagtctctccagtgctgccacaaaataattgaagagagagccgataactagccaagcatacatcagttgcaagcgttggaaagttttagtctgattaccaacagcctgacataatagattataaatttttagcaggatttgcgtttggattcttatccgcaatcccaatttctgtagcaggcatatacctagtctaccttaagatctcagcccacgttcgcgcaatcgtta

SEQ ID NO: 257 - DNA, 1000 bp, Avian avulavirus 20
  misc_feature 1..1000: note = isolate AAvV-20/great black headed1
  source 1..1000: mol_type = genomic DNA
ccccagattatgttggcagcacaggcaaccaaagtgcagtgaatgtccatctggatcattctggattcctgggcacagaagagaatatgcattttccacaaataatggcctcacatacctctccagctggtgtaacccagtctgttctccagtcagaacaaatccaagagtcgagcaatgcagatgcggctattgtccatcagtctgcatcctatgcagagacgattcttcatagtgattccatggtgctgggtcggcttgcgaaaattgatgaaaaattatcagagattatgaagataataggaattataccatctatcaagaatgatattaatcagctcaaagctacaactgcccttcttagcaaccaacttgcagctattcaaatattggacccagggaatgctcagtgcaaatcactgaatgagatgcgagctgcatcaaggagtgctactgttgttgtatcaggcccaggagaactatctccacagttagtgagtgataaacttatatgtaaaaatgagctgggccaaccaattcccagagaggaatatagagccagtcaaccgaccaaatcatcgcccaatatggttacagatgctgagctagagagtttacaagcactcattgagacactggtagaacctgggaaaaagagggatagactagtctcacagctcaccaaagttaagactaaagatgattggaatagacttaaacgcgcaatctacaattcataactgtgaattcacgcctgcaactggaacattataaatgcctgacttaacacattaatccctataatcaccttacgctttaagttagctagataggatccttttcttgataccatttttctctctattactctctgaccttaccaaattataaatgtctctgagttacacgcctaatctcctgtacaattaataaaaaagaataacttgggggcgaccctatccacaccggcccagagaccccacagactcccaaactcacc

SEQ ID NO: 258 - DNA, 1000 bp, Mossman virus
  misc_feature 1..1000: note = complete genome.1
  source 1..1000: mol_type = genomic DNA
ataatggataagctcaagatcctagatgagatcaagcatgatgtagagagcatcaggaagacagttatgaagcatagtctgtctctcgcaactctggaagggcagttgagctcggtaatgattgcagtcccttcaactgggtcccaaccacatcaagtagaggtgaatcaggaccttaggcccctgcttgggcgagacaagggaagagggatccctgaagttggaaaaatgaaagtccaaacagtttcgtttgatgagcccaatcaatcaaggagtagtcgtgctcaactgccgaagattagagttgagcttgataagaagatactccctcctccaattgactcaagcaaaactaatgcaacaggatacaaacctgctcctactctaatctcaaaggaagtgatcatagcactgattgattctcggattaaggacaaggatatgaacactagaatgaggaggctacttaatacagccaagacacagagagaactagtggagatacataaggcaatcatcagtgctttaaagaatcaaggcagctaagcaacagtcagtttccattgggtatcaggtaaatttgatacgacattgcttgatacaaaactaaaaagtcaaatttagaatattcatcttagactacattagccctataaagtcagtagctcccttaatagattattggatacactccttagggtgatatcagttcaagataagcttcaaactaactcaggggtttatagaaaaatcggctggtattgacttgaatatttaaagatttctcaacatgttttcggtaataaagtatagtcaaccagcaccacaagtatcgtacttttagaggggatgatctttacacttatcaaagaccagaatactaatattaatctagtattgcttagctaaattagaccttaagatacatgcaacttactggccgctaatagcatattacaaaaaacttaggacgcaggtccatccctttactccagcaacc

SEQ ID NO: 259 - DNA, 1000 bp, Rinderpest virus
  misc_feature 1..1000: note = (strain Kabete O), complete genome.1
  source 1..1000: mol_type = genomic DNA
tggtgccgccgatcccctctcaggagaggccaactgcatcagagaaacccattaaaaagggcacagacgtgaaatcgacctcatctggaacgatggccgagtcttcatcgacaggtggtgcaacccgacctgctctaaagtcacagtggggaccgtcagggccaaatgcatctgcggagaatgccctcgcgtctgcgagcaatgtatcaccgactcagggatcgaaaacagaatctggtaccacaacctcgcggatatcccagagtaacattgagcctgaggatgattacgatgatgagctgttctcggatatccaagacatcaaaacagctctagctaaattgcatgatgaccagcaaattataattaccaggttagagtcactgctttcgctcaagggagagattgattcgatcaagaagcaaatcagtaagcagaacattagcatctctaccatagaaggccatctctccagcgtcatgatcgcaatcccgggatttggcaaggatcccaacgatcccactgccgatgtcgacatcaaccctgatctgagacccataattggtcgggactccgggagagcccttgctgaagtactcaaaaagccggcctcagaaaggcaatccaaggacactggcaaattagggatcgagtccaaaggcctgttgaagaaagagttccaactgaaaccaatagaaaagaaatctagttcggctatcagattcgtcccggacggcagtgttgcatctcgcagtgtgatccgttcaatcatcaagtcaagtcatctcggggaggatcgcaaggattacctgatgagtctcttgaatgacattcagggctccaaggatcttgctcagttccatcagatgctggtcaaaattctaaagaactagactcggcacaacatagctgatctcctcgcttcccctcagcttagctacagcttgcatgctcattataaaaaacttaggagcaaagcataacgcctcgcactcccaac

SEQ ID NO: 260 - DNA, 1000 bp, Measles morbillivirus
  misc_feature 1..1000: note = IC323-EGFP viral cRNA, complete genome.1
  source 1..1000: mol_type = genomic DNA
atgttcctccgcccccgaaccccagtagggccagcacttccgagacacccattaaaaagggcacagacgcgagattggcctcatttggaacggagatcgcgtctttattgacaggtggtgcaacccaatgtgctcgaaagtcaccctcggaaccatcagggccaggtgcacctgcggggaatgtccccgagtgtgtgagcaatgccgcactgatacaggagtggacacccgaatctggtaccacaatctccccgagatcccagaataatgaagaagggggagactattatgatgatgagctgttctccgatgtccaagacatcaaaacagccttggccaaaatacacgaggataatcagaagataatctccaagctagaatcattgctgttattgaagggagaagttgagtcaattaagaagcagatcaacaggcaaaatatcagcatatccaccctggaaggacacctctcaagcatcatgattgccattcctggacttgggaaggatcccaacgaccccactgcagatgtcgaactcaatcccgacctgaaacccatcataggcagagattcaggccgagcactggccgaagttctcaagaagcccgttgccagccgacaactccagggaatgactaatggacggaccagttccagaggacagctgctgaaggaatttcaactaaagccgatcgggaaaaaggtgagctcagccgtcgggtttgttcctgacaccggccctgcatcacgcagtgtaatccgctccattataaaatccagccggctagaggaggatcggaagcgttacctgatgactctccttgatgatatcaaaggagccaacgatcttgccaagttccaccagatgctgatgaagataataatgaagtagctacagctcaacttacctgccaaccccatgccagtcgacctaattagtacaacctaaatccattataaaaaacttaggagcaaagtgattgcctcctaagttccaca

SEQ ID NO: 261 - DNA, 1000 bp, Carpet python nidovirus 1
  misc_feature 1..1000: note = strain F17-605-7, complete genome.1
  source 1..1000: mol_type = genomic DNA
tattgaaaaactctctctttttcaaccaacttaaccagttgtttgaccgcctgcacagtgggcacttgagtatatttttcatatccccaaacagtttagatccgtccaattattaaacaaacaaaacaattgaaatattttatttttattggcagagtagttaactgcttgtttgtcaattgtgtaccagcacaccaaccccttgccaacctccactcagagcccaggatatccccgaaaggggcttcctgctggtgtgagctcttggccccacccctctcaagactcgtaaaacagtctctacccagatattctgcgaaagtagaaatcactcaatctttctcccatagctacaccgagaacaggataaccccgaaaggggcatcctgcgggtagctctctgagcgtgccagtagatatcttcaccgactctgctgggcgtatcggaaccagtccgtcccaaagtccgcaaccatccaagtagctcgaacgagcgaaaggatagggagtacctccttagtaggcctcagccgaaaagggtgggaaacagcggcgaggcccttgtggcctgaccgcagaaacgacctggtagtcgcttctcaacaacagacccgactggatgtgaaaacgtccgatgtggtcagcttgtaactagctatatacttggatatccctcacaaggggactccaggggggaggaactgacccctcccctaggtatatagtaagcaaaaccaggggcgatctgcgaagacacccttcaccacacagccggagaacgctgagtgaagccaagaatcctgtccagcgtaagcacacagggacacattcttgaagaatacctcataactagcttaaggcggttatttggatccgaaagctgaccaccgtcactttcgtggaattctatctgacaccaacacagtcggaaggaattattacatttcaacccccaaaagggaaggtgcaagaacacagcacgaacaaaaattaactaact

SEQ ID NO: 262 - DNA, 1000 bp, Renmark bee virus 4
  misc_feature 1..1000: note = isolate SA-10 polyprotein gene, complete cds.1
  source 1..1000: mol_type = genomic DNA
aaatccagcatcccccctgtggccccgcgcaggaaaggggataaagcgttagaaagtccgctttgttgacacacgtggataggttgagtggagagatatagccacttgatcgaatgtgttgaaagacacgctatgtatcactgacccccctaaggaatccagccgagaaactggatatcagtacgctcttttcaaaaaagagcaagaaagagagaagaagcacagacaatttgttaatagcagacccgctaaggttttcacaaaaacaaatttgaagtccgctaactctaaatcagccccggttaccaaagatccagctgttaccgttttgaataagaaaaagaaacacaagtttgatgataaagttgtcaaaactgtggatccttttgatatacaggatgaatcagaggttcccgtgattaatcctaatgagaattatgaagaattaggtcttgaaattcccagtcgccaagaggtcgttcccgaagaggtcatagctcaagaagcatttgaaaccctagatcaaggatcttgggatattgtacaagagtataccaaaactcaagaagatcttgatgatgagaaagtttttcttgaaagtttagccacagttcctcttacacctgttgaagaagataagaattatgaacctgaaccttttgaatatcaccctaactggagtgatcagtctcctgaagaggcgccaaagaaaccaaagttttcttttgagcctgagaccgtttcagattctgaagtcaaagaagagcttttaactgttaagaaaaagtctaatcctggactcgtagcttatagaaagaaagttgaagctcagcgcaaacaggttagagatgatcgccgtgaagagagagctcgtgccactgaatcagatattcgcaaaagtcgtgataacaagtacttaggagatcgcgagaatgctgaattcaatttccgtaacctgaagacaaagaagatacggtctaggacaaagaacacgactctt

SEQ ID NO: 263 - DNA, 1000 bp, Picornavirales sp.
  misc_feature 1..1000: note = isolate H4_Bulk_46_scaffold_10 hypothetical2R
  source 1..1000: mol_type = genomic DNA
tttccagagatttgatgccctttggtctaatttgagtattgatttgtacctgcattcgcagggtgggtttatcccatgcaccccgggttcattgagttgatttatcctcattgttcccacccgtttttgttgacccgtctgattttgattagttagcattgccacccttgccagaggttttctggtatttctgcactattgtatcattcatgctagtttgatagtagtgccccctgattgaggaatgatcttattcctaccttcaggttcacaccgcctagtaataggcctattgactcactgtaaaaggaaatgtcgtacataccttgtgatattactgattaagaagctgcgttttggacacgcgagaaagtccagaattagtttttgaccattgttttgtatggggaaatgaccccctaggatccgccataataaagtgacgattattttaaaggagttgtttgaagcctcagtttaactgatagctgataatgacaccatcctgtataacttaaagaatatatagcgccccgtgaaactactcgaatggtgaatcgagaacgtaccgggggttagtattaacgccttattccttgagatgtgtcaggtagtgtttccgtctgccgcccgctataggaacgcgaggttaatcccttgcatacattgccccactactcaactcatagagtaagaaaaagacgtgagtccgtgtttttactatgtctatctaggttattcggtacttgatacgaggcaagagaggcacaggccccgagtatcaagtataaagctaaagtcctgttataccataatggatgcggcagacggctcagctgttgaccaagtagggttaccaattgagattactgaaattaacatatttgtagaagaattacattattcagtaccgtccccttcacaggagttccgatctttgtatcggcctgtgttggaagaagtgagatttgtgtctcgcttacacgtggaaagagacagc

SEQ ID NO: 264 - DNA, 1000 bp, Picornavirales sp.
  misc_feature 1..1000: note = isolate RtRn-PicoV/YN2014 polyprotein gene,1
  source 1..1000: mol_type = genomic DNA
tggtaagatcagtggaaagcacaacaccgcttcccccgattatgtgacatctggcaagtgggcggatgggagcccctcagaatccctgtctctcttgacaggttgatttttaaatttcccatgccggacgaaggcgcttgcaataagtcaggcttattttcaggattctctttcttctcattcacgcgcgtcctatgcgtagtgagcggtttcgtgaggacccgttctcaggtgaccaccagacgcttgtttggaactatggcaccacctcaggtgtagactagtgaagacagtgtatctctacaggaaacctttggaggaaaagatttgtagtgcacctcttggaatagactgtgaaaacggttgagaccaagagctctgctatgtaaagaggctgtggagcaacgtgtggtaacacacgccacagtggccaaaagccaagtgggcagaaactctcttctaatatgctgtacccacggcagaagattggagagcaacgagttcaccctttacctccgcttcggcggctgcaatcctagtaacccaattgtggaatgtaccgacgaactgcctcaagctgtctgcattggtttgtgtaggaatgctatgcaggtaccctggttacaggatctgagcataggctaattgtctaagcaaacccaaaccaatttccccttttcttttccattggtgacgaactgcggatgtcgatatggcttcccaggcaattcacggtgttttcaacctcccaatggatcccctagaaggttttcagatgattagagtcttttattcccaaaataatttaaattttgatgagtattgcgcatctgttgtgcgcacttatccagctgttttgcaagaattggctccttttgttagagaaccggatcgtttcgtactcttttgtgctctttggtggcaagccaatcacgatgagggttatgagactgatccagaacccgaaccagaacaacagagttcggatgaagaagaacca

SEQ ID NO: 265 - DNA, 1000 bp, Picoa juniperi mycovirus 2
  misc_feature 1..1000: note = isolate ANK_VIR-90 hypothetical protein1
  source 1..1000: mol_type = genomic DNA
tcgcgttacagccttccagctccgccgaataacactcattataagattcctcccccggcttatcctagttctggggttgtcctattccttttgtttttccttatcactgccatcccagtggtactttacttgtgatacatcattatgtctatcctgtaggagaatttccgaaatcattcacaattggagaaactgcatatacactttttcatccatcgttgaagattacgatgtttcatcctcgtcggtttttctaagtaggagatactctcaattagatcatcatccactggtaagaatgcatatacactttcttgccttctgttggagatgaagggtttatcatcctcatgaaagtgacttttagagatgttcactggtatttgtattccgtggaagacactgattgtctttcctttctctggacaacccctagcactacttttaccggtgcggaggagttagaggttaattcgaggcgtttattattgtccgcaatgacgttaaactattaatgattcttatattaacgatttataatacttaatactgtaatacatttaacactacaaccgataactatcggtgatgggaattagagtcaacttcgatcttgaattgaagctctgttatctattccaatgccgctactctcccggcacgtaggagaaacacgggcgcatggctgcggctcggatcactattcactttggattttgatttaatacatgatttgctgttcccctgggtagttcccagtagcggagttggcaatgataacagccttagatggagcagggatgtagggaatatgttcgggtgaacctcaaaaggggaatctcatttaactaggttaaaatgacgtgtgggataacaacgtgcccactaaccattatagttatctaaataaccactatcccgtgcaattagcgcatgccctaaacgacgttttccatccgtgtatagagtggatcccttggattgagatctcaacaatctc

SEQ ID NO: 266 - DNA, 1000 bp, Shahe heteroptera virus 1
  misc_feature 1..1000: note = strain SHWC13624 hypothetical protein1
  source 1..1000: mol_type = genomic DNA
agttccggagaaggagcactgtcggaacattatataataccacgcttcacgtggtcttgtataccggcattgtgaataccgtaaacctcttcaaggtacctcagtgtttgaattatttagctgaggataaattttcttaaatgagttgtcactgtacataatactcttcaagtagtacatacctcacgtaatttagaaaaggtgtttgaattctttaaccttttcaccttgaatttggcttaatcaatcatgtggatcttatgagcacggatcctgatgctgaaaagtgagcctagacgtggaggaacctgcaaggcgggtgttctttaaggctgtcgtaccctagctgagacagggggggtcccaatactgtcgaagccagacttttagaacatgtgccgctatcgaagggtagcacgcgggcgcgccctcctagagcgaagttcagccagtaagtatcgattgattaatcgacggtggacatgagcacccatcagtcaataaacaccccgttgggagagagaaacgaacgaggaatggcacacctcacaataaaaagccgttgtattctctttccggcctgggagtctcaaaccttcgaaccaattggttccgctacatatattggggacaattatgtggtgctacatccctcggacctaaggtagatcgtgtttatctacttgatagaacctcctgcacctcagagtgcggtccgtagtagaggcaagagaatagtatagcggtcagaaacaaactggattcttcaaaggtacgatttctcagactgagcagactgggtaaacctgctcctaaaaagcataaggggaaacccactgcaggcgtgaggcatttttcaaatgcctttttcgctaaatgggccatcgacccaactaagtccctcctagaggagctcctcggaacgcccgtaactgaggaggaattccggactttcgagcggggtttgtggaggcggccagtgattgtgccggcgcggtgt

SEQ ID NO: 267 - DNA, 1000 bp, Beihai picorna-like virus 53
  misc_feature 1..1000: note = strain BHNXC41443 hypothetical protein1
  source 1..1000: mol_type = genomic DNA
cgggatcccgatcccggtgtagttttattctgttatgtggcgaacgataacggatgtataaactttgactcgatatcaaaatagactagatgcctatactcgataattgtcctaacggacattgtttcacccagaagtggtgttatgcagtgtcctattaggacctgcatagagatagtatgttgtaagctccaacctctttgtcttaacgcatattgtttatgaagttcatgctaaaactcaatacgcaaaagatgccttcctttgttgggctgtaaatacgatgaaggaccattcctctttaaaaagtcaaaacgacggtatattctgtacgtttgaataacccgtgtctcacggaaatgtgaggaatgttttctggtgtgacatttaaaaagcacaccagtgcaagatgttaatgatatattgagtggtgtatcatatacttgtatagcttaaagccttcacacgatggagtagaattcgtacgtgtgtcgtataattccagtacattccatattgagcgctccgctcttatggaagtgattagattaggagaactctctacgtggtacggtgcagtactttaaagcacttaatacacggagaactgtatgttcgtgtacgatcttactataggatagtaattgtctcgaaacaaacgacatttttgttgaagattagtatgtgcagattgctttagaatggcgctgccgattggaaaagaaatctgaattgaaacttttgtatgataatgccaaattaacttttggatggctctgcaactggaaaagatgtttagacgacaacttcggttagataatgtctaattacgatctgagaacactattattttggatgcattgtgttgcgcgtttctctgagcgctaccaaagtagtaattgaaacctccttttggagggtagtagagcacggatgtcgcaatgaataacaaaccaaaactttttggtttgagttcattgcgtcaagttctgttattaac

SEQ ID NO: 268 - DNA, 1000 bp, Beihai hermit crab virus 1
  misc_feature 1..1000: note = strain BHJJX25619 hypothetical protein 11
  source 1..1000: mol_type = genomic DNA
aaagggcaacaacaatgtttatgcttatcacaaaagcaattaaggaacgtgtgttatagttcccactttatgtgacctaatgacggtgagcttccgtaagcaagtccgtacatactgaagaatactttgaaagaatctgcaacatggttctctctcgatagtatatatcaggtgacaaacacacactcaacccgattatttcgcgagttctcgataagagaccgcaccaggtcgagctggaggggtgtaccaatccccgcctaacgttgaacttataacgtctgttagtattgttgtaacaaaacaatcctagatgattttggatcctcaatgtatagattgatcacaagagtagtatggtattgattgaaattgaggctatatttaattcgaagattgtagagttcaatatgaaagcattccaagcaggggaccctgtgttagtacgttagaaattggaatcccccgttcagaggtttctgacaaataggatggttgacacatatgtgaatgttattcagttagagtagatttaattttggtacgtgagcagccaactcatgtacaaactgggtcagttaattggaaaacgcaaggagagttttcactgcaatgcagtctagctttagcaggaccaaaattaagttgtagaagactgaatatttacataggaggacgtacactgatggatttaactcgacctctgtgtcgagacggtgaggattaggaaagttccctactacttctcctaggacgccggtgcgactgtgtacgagtcgtacggaaagtgtgatctttagagagcacgaagtttaagtggggcctgacatggtaaagagtctgaaacagttcactgtaaaggtgaaccttggcaagctcgtgatcgatacgagattataaagcaagttcgatgtttccagatttcccttccccgcgccccaccccagaacactcacactttagtcttgtaaattttgaacaagactaaagattattgaaa

SEQ ID NO: 269 - DNA, 1000 bp, Beihai sipunculid worm virus 2
  misc_feature 1..1000: note = strain BHNXC41483 hypothetical1
  source 1..1000: mol_type = genomic DNA
tttgttaccaaaatatttattcgtgtgttttatttgagcgattcgttagagtggctttcctagaacgccaccctatccggattcgtaaaacctcctagcaggtttcctcgaaccctgttagttatttgtttttacattgcatttattctcgttgatagagaactatcactttgctcgctccacagcgatacgtggatccccgcgcattacgcgcaagggaactttcacttgagtacggaaactttgtattcagatctattagattaattatgctacctatagcttgactataggtgttaaagtcccttcaagaaaactttagcagacgtgtgagactagaggacttcggtctagcgtctattagattctgtcatgaattggaaaagaactacttcttgtttttgattcccgaccccggttgtgttaagtaagatatcatctagcacccatgagtggttaaccccacatagatacagatattaaaattagccggcgaaagccttgagggtttgcacccctctctaagcctccatcaccgcttcatcgcggcgggggttactttttatttgcttctgaaagtctaacttttatttacgctctacttgaagagaaactagcgttcaaggcggtcgtcacccagactgtgactagcattgagagtgcgaatactctctcgtttattacttaccttgcttttgctttgcttattggctacattgttggcctatgggcttggcacgagagcattgtcccttcccaatctggtaaggctgagcgtaaagctcagtgggataaaaaacaaaagaacaagcgtaaggccgctgagaagcgtgccaaagcgcaacaagccaaagagaaacgtgaacttgagtctaagaagaaagtgactttcgagtcatctggacccaagtacgaatctcagtcaggcttttggtttggtgattccaaatggactaagtaccattggaccaaatttttcctgattggcacctacacgttc

SEQ ID NO: 270 - DNA, 1000 bp, Beihai picorna-like virus 42
  misc_feature 1..1000: note = strain SCJXSX39263 hypothetical1
  source 1..1000: mol_type = genomic DNA
ctttataatatgtttttcgtgtatacgtcgtttagatgtgcgtcggcagcgattgtcccgtcgcatttataacatgacggtgtagatttactgcaatatttctacatgcggtgtgcaggaccctggagtagtgtatgttctcctttagacctgtgactacgtgagcgtgctaggttctcccttggaattacggttgcgtggttccttgggcgtgcttagccttgtccattggaggctgtacatatcctgttgagttgtggctctcattcaaaagccccggtgttgtgtgttgtttgctcacccggaagccttttgcagaaggcacgtcttcccacagacttgtaaatagtgggcggtgcttcctgtcgtaaccaggatccccctttccttgccttgagggtatcaaggcgaattgtgttgagatccccggatgggtctcctcactcttatgctaccatccaatcccttactgccgcgaggattatgtgcggtagactgggtcctactcctcgggtggggtagttcccttttatattaccacccaaacagttattttgatcttaactccttatttatatatccatttatgatttttatcaattgtgttaatggtttgccgcaattgagttttttgtattctagtggagttttgtgataaatggctgccatcgacggacgtcgatttgaacattaatgatatagtagtgaaaaatagaagtacattgatgttcttgtgtcggacagcaatatttgaccagtatgaaaaatattgtaaataacctttctttctgattggttctgtccggctgcgatacggtgagaaaacctgttccacagcgttgacatcgtctggtgttaagtttttgccatttgactgatagccatctcaattgagatgttgccctactaaactcttttggtcttaatacctggtgtcactgtgagttctgcgagtcaattctcacttacatccccggcccaaccctcctttccatcaaaa

SEQ ID NO: 271 - DNA, 1000 bp, Penicillium cairnsense negative-stranded RNA virus 1
  misc_feature 1..1000: note = isolate1R
  source 1..1000: mol_type = genomic DNA
cgctcctcacctaccgctttcttgagagtttgttgagccttgttagccgcttcaagctcaggtcgtagttccgggaactcactcagaatccatttgttcttgatcaccgcctctttaattatgcgaagcgctcccatcccgaagtcggcgagaaggaggaacatattcatgaaagataaggcggatcccatccacggccgaccgatcatctgcaccactttgcttgtcatctgagaccggacaggctgatacgataaaaaagacgcgtagaccttcttcaagactgagtcagcaaggaatacagagtcggatacaaaaatctttggttcaccaatcactgaggcaagtgctgcaccttgacgtcgttcattgaacgcagaacgattcttgtcggtaactggtttattaccggctaggtaaagaagaccaaagtaggctccaagctcatcaacatccgtatccagaagagtaagaagctcctctgcagtgacgtcctctgcatcttcgaagttcgttttgagaacagattgttcttctgcctgactcagatcatctctaccaagacctgttatgtcgataggagtagcgcttgatccagtgaagttgaccctagcgttcagtaagattgctgtggcagatgcaagcgctctaatgatgaccgctttatctttactcttcaaaatttgaagcgcaaggaaggcaagagtctcatgacctcctccgtagaccacgttgatagtcacatcaattttcggcagatccggaatttcatatctaacgcgctgatcattcagttcgacagatgagtcgtcccacatactcaattgacccggagtgggtgggatgactttaggcaagtttccagtgttagcggaagacatagttgttcttaggattgaagtagatgaataagattatcgtttctcctagtttctttaaatgtacagaacgacctattctacaggatctgtaggtcctccgtgataagcatactaccaag

SEQ ID NO: 272 - DNA, 1000 bp, Changjiang astro-like virus
  misc_feature 1..1000: note = strain CJLX30757 putative protease,1
  source 1..1000: mol_type = genomic DNA
acctgaatgtgccaaagaaatggtctgggcttaaatccattaaaccacatggatccccaaccactatcaagaaggggtatttgtggctggtgcgtgacgaccagccaaccctggttgcagtgaagttggggtggatgccaggcataattgcacatgatggatccactatccctggggatagtggcgcaccaatcactgatgagcatggcaacattttagccatacacaatgggtatttgcgtgacagtcaggttaatgccgcgttggcgcccccacaagtagttgttggtgggggtgttcaggacgaactggtcaatcttcgtgctacgaaccgtagaaatgaggagaagatgactgagatgttcgagcaaatgcggcagcttaagttgttgtgcgaaaagcatggtatcatgggtgaggttgaacaggaagcgcgtggtgcgagaaagcgaatggtcaatcatcagcggaagccattgcgcatatggagtgaccaagaatatgagaaattattggatgatggattcacacgagacgaacttaaggcgatagccacaaagcgccgtaaggaatatgattactatgaggatgttgagcctgagggttatgccaaagttcaggttaattcacgcgatgataaagttgacaacatgaaatccagttgtgtcagtgagacaacgactgaaaagcatgatcagaaacttgctaaagcgattacgaagtttgagcaagctgttgatggactcaagactgatgtgatagacgagacctaccctgacaaacaagttgaggtcgcgattgatctacacacggggcttgaccacaaacatgttagcgtgactaagacattgggcgatgcaggcaaacaggatttacgggaagccctggctaccattcagaactttatggttcagtggtcagctggggccaaccagcctcgagaggagatcgaactggaaacacggagagtaaaagagcactgccccctatatcaaatggg

SEQ ID NO: 273 - DNA, 1000 bp, Rhizoctonia solani ambivirus 1
  misc_feature 1..1000: note = strain AG2-2 LP, complete genome.1R
  source 1..1000: mol_type = genomic DNA
cggcaggggatgtgagggacagacagtttcgtcaacttcgtgactactctatctcgtccggtcactgggtagtccacatgagatttgaaagaatctaagtgtacgcctttgatccactctctgccattcaaggtgaattgctccgcgtttccctctggagagcccttgcgctgatgacccaatctacggtgcctgcgttcccattatagcttatttgatatgtcgaccacaacgatcccccaatccgagattgatgcggctcttgtcgtactcgccgagtccccctctgagcgccaggaagtagcacccgaaatcgccgaacttgggcttaacgcgatccgtactgcaacaagcgatattgcctggaatggtgctccgctctggatccaacccaattacgccttgtatcgcgatcacatcgcacaattcatctatggagggaagaataaggttcctatcgtgttagcgggttcaacattctgtgatgttgcctatactggggagaaattgcccattcctcttccgattctcgtcattggctgggggaagacgcgcgttgccgaagaagttgcagaacagttcaggaattctggctttaaagattcgatgatccgctccgtcccggtccttgttaaggcgaatccaaccatcgaggacgctcgtcaggctattaatgccaaagcttcccttacctccccctgctctgccgagcatatgaacgtcttcgccttccgccagctaaacacgatcctaaacttggcctcttgtttcttgaagatccaccaatatcccgctttccttgacgaagatgccgtgtccgacttttgcatggctgattggcaacaggttgatcccgatgctgacaaacacaccactcatatggacgttgatgatgagaatgttcgagataagaagacttcaggctggaaggtacctagagattagtacaatggagtttccgaaccgtgctgacctttttgtaattcgctagggattgaag

SEQ ID NO: 274 - DNA, 1000 bp, Beihai weivirus-like virus 5
  misc_feature 1..1000: note = strain BHZY60693 RNA-dependent RNA1
  source 1..1000: mol_type = genomic DNA
ttgcaagcatgcaattcgctctcctcttaattagaaggggtgctccggggaagacaacgccccggggtgagaaactcgtgtcccataattcaatccggtctgcctgccgccgcccgtgggacgtacctgtagaaggacccaggtattggacagtttgcagcgtggtttttactgagtggcgacgtcgaaaaatgaaaactaaaaatgctccctgcggtgtgtcgtcacctcggatggggcctgtcgtcacttgggggtcgcgcatcacttataagtgcgtggctttgttcgtttgctgcagtccggcgagtgccttattcttttgcctgtccggcctgtgacaggtggaagcctggtgtgcggggacgggacccgcctgaggtgaaggccggtgtggggggggagataggcaccctaagctcgccaagctgaaccccacacactacgagtcggcccggtccggggctgccccatctgcataggggttagtcaacagtggtcacgcgctggtaacggcgtgtggttgcaagccgaccttgtgaatggttgcggagccgagtcgcagcggtactgcgatgacagtcgtctgtggtgtggtgctctcgtgctgcccgtggaggaggtgaagaggtttgagccagccgcaagtagcttgccctcttaccggtggtgcggaaatttcccccttggggccgcccccgcggatgctgtcgcctttgtacataacaggtagcatgcgtatcccatacattacgtgtacgttaatatacccaccccgctggccggattcgtgcgagctgttggccgtagtgcccttgggccgtgcctggcttgtcgtcgcggattccgccagccacggggggctttacgtcgtctctgctaggagaggcggcgtctaaagggatccccttgagtcgaattcgtcagcttacctagccgtggcgtcgccaccgctagcgtgtgtttgcgcacggttcaccgtgcgtgtggtgttcgggtg

SEQ ID NO: 275 - DNA, 1000 bp, Dryglaski virus
  misc_feature 1..1000: note = isolate Antarctic82 RNA-dependent RNA polymerase1
  source 1..1000: mol_type = genomic DNA
ttgccgatgttcaagcgtgggaacgctgggctaatgacccgactatcgatgccgcgcaaaaatggcgtgagcatcagccgtggtcgcggaagtcaggatcgcacacgtgcggtggatccaacgaggtttggtttgcaaccgaccatcgagacagagtcatgactttccttcgttatgattatactgtcacttccagcgcgacagtttggattaaagaacccagacctacgctttcgcgtagtatggggcttgacctccaaggtgtcatcccagccgcttgggatttgactgcgttttcctgggcggccgattggtttgggaattgctctcaagttatcaaggctgcaaattgccttttacttgggcccgagccaatgggtggatgggttacgactgtagttcgtggtaaagttaccgtgaagaaaagtccacacccacaagataaacagacagaagtccgtcaccatgagacctttaatgttaagtggaagaagcgtaggcccctagctttttgggaccgcttcccctcgttagagtataggcctaatctcgacccgtggagggtcgttgacatggcttctcttggtataatattctctaaagggcacaaagtgccaggagttatcaaacatggataagagtgcttacaagctctataccattggtcgggacgaggtagtttatgccacgcctgaccacacagtgtcaaattcagacactctcactatgcgacgtacgtcttccaaaaaacgtacagtcaagggaggtaatgttgaacttacgccacagcgcgtaaattacaactttaccaagactattgacgggaacttgatcacgctgtccgtcacaagtacaattgtacctgggactgatacagctcaggcgaagaccttctttagtgacgcgcttaccgcgttcgcagaggaatttgccggatctgcaatctccggtgacatcactcggactccctttaactaactttttataaggaacaattttt

SEQ ID NO: 276 - DNA, 1000 bp, Chronic bee paralysis virus
  misc_feature 1..1000: note = isolate 3657 segment RNA1, partial1
  source 1..1000: mol_type = genomic DNA
tcatccgacatactccgggacgccaagaaccctgagccgccattctcatcctgcggcggtcgtggcgaggtctgtccctcccgtcatgatttccccggagccttgctctgtcactccgattactacctctacgacgagctctcttatgtcattcgtgggcacacttttatcatcaatcactcgtttcttgaagagaataagcacttccacaatgaagcgttcatcacgaagaaaggcgacggagtaatcatgtccacccctgacggcactgaatatcagcacccatacaacatctggaaagccgaaggttgtatcataggatccggtggtgctgccgtctatgcccgagtctatcgtgggccctcaatggatgtttactacgcctatcccgcttctggcacttatcatagtgatgatccacaccgcttaaaacgctcagaccaattcgagaatctccgccttagtagtggcaacattgccagactctctttcaaatccgtcaagattcaaaccacctccggtgacaccatcctcgattgccctcgcgatccctttgaaagagcagttgccaaatgcggtagcggtgtccgtgatctgaagttcttacccacgctatcttcatatatcatatccaaattaaccatgcacgatttagagattaataacgcacaagacatcttagaattagcaaacatcatgtgtgagcgcttcgcttttgacttctactcccactcccatcttgagtatgatcccaccaacataaacatcttcactaggtgtcgtcgtcatgctatgctgctggcccgcgctattcgccacaccctagcacgcaatataacatgttcgattattaatcgtcccatcttacggcaatttacaccttgggcatttaaaagcatcaccatgcctgcttacatcaagcaccgacgtgcacgtcacatcgacttaagacttgcgtctgacaggcctaagccctttcgtgacgggcgcccgatacttg

SEQ ID NO: 277 - DNA, 1000 bp, Carrot red leaf luteovirus associated RNA
  misc_feature 1..1000: note = clone sigma RNA-dependent1
  source 1..1000: mol_type = genomic DNA
gggcacataccgttatgagaaaacggggggcagatgttccggcgatagtgacacatcgttaggcaacgtgagcatcatgctggcgattacgagggtggtttgtgagaggctaaaaggcatacacgtcgagatagcaaacgacggagacgatcaggtactgatggttgaggaaaaccacctcaacagcctggtcgaggagctcagccccacattcatgcggtttggtttccgcgtgaaagtagaggacccggtttgggaattcgagagaatagatttttgccaaaccagaccgatcttcctgtcacccaacgcgccaattatgtgccggtacccaatgcaatctatgtctaaagatgtagcgtcgttcctcaatatagaaagatctgagggatggaaatacatgctgcgagcgataggagcttgcgggtcttctagtttctcacaagtaccagtacttgggaagttctacagagcgttaagttccacatcaaacaagtcagaacacacatggtggaaacgcactggggtagatcttggattcaaacaactcacgaccaacgtgggcccggtccaatatgacgaaataacggcacgaagctccttctataaggctttcggcatactacctgacacccaaatggccctagagagggcaatagacgaatggtacataagccccacaccaccaattgagcacgtccataagttctcgagtgagtacccagtggttgaaggttgggcctaattgtagggtagcaataggtatagctagcctgcccccccccgcttgctgggccggtgggggcagcaccgcagacaacgtggttgagtttgggaacatagatccgaacaccacgtcacgggtaggccacacccgcggagtcaggctgattgccataattggcaggtggggccacgccgtttggccaaaccacccgggtcaccggtagggagaggtctctagggatccgagtgctgccctgttgtaggggcacgctca

SEQ ID NO: 278 - DNA, 1000 bp, Carrot red leaf luteovirus associated RNA
  misc_feature 1..1000: note = clone a25 putative RNA1
  source 1..1000: mol_type = genomic DNA
tacacattgaagtagccaatgatggagatgaccaggtgttgatggtcgagacaaaccaactcgacaacctggtcaaggagcttagtcccacattcgcgcgatttggttttcgcgtgaaagtagaggatcctgtctgggaattcgagagaatagatttttgccaaaccagaccgatcttcctatcaccaggtgagcccataatgtgccgatacccaatgcagtctatgtccaaagacgttgcgtccttcctcaatatagaaagatcagagggatggaaatacatgctcagagctataggagcatgtgggtcttctagtttctctcaagttccagtgcttggtgagttttatagtgcgctcagctccacatcaaacaaagatgaaaccaaatggtggaggcgcacgggagttgatttggggtttaaacagcttaccaacaatgtaggcacgatcccttacgacgaggtcacggcacgaagctccttctataaggccttcggaatcctcccagacacccaagcagcactcgaaagcaaaatacgcaactggaatatgagctccgtaccacacatcgagcaagtccacaaattctcgagtgagtttcccgtggttgacggatgggcctaacttagggaatacagttaggttaagttagtcggcccctcctcttgctggctgggtgagagggggggccagcgcagactggttggataggtttgggaacatagatccgaactccaatcaacgggtaggtcgcacccgcgtagtcgagaatgattaccataattggtaggtgaggtcacgccgtatggccaagtcacccgagctttcggtagggggtctagttgttgagtgccattatgacataaccaactagacaccccacatttggagaagcggcttgcccacgctccaacattccatggatagattgaacgacgaaatgtcattgtcttgccgtcagaggcgttcccctctccaaggctagcccgacgtgcgcc

SEQ ID NO: 279 - DNA, 300 bp, Bovine viral diarrhea virus 1
  misc_feature 1..300: note = clone SWU-Z6, complete genome.1
  source 1..300: mol_type = genomic DNA
gcgaaggccgaaaagaggctagccatgcccttagtaggactagcataaagaggggggtagcaacagtggtgagttcgttggatggcttaagccctagtacagggtagtcgtcagtggttcgacgccttggcataaaggtctcgagatgccacgtggacgagggcacgcccaaagcacatcttaacctgagcgggggtcgctcaggcgaaaacagtttgatcaactgctacgaatacagcataataggttaggccagaggcccactgttctgctactaaaaatctctgctgtacatggcac

SEQ ID NO: 280 - DNA, 301 bp, Sicinivirus sp.
  misc_feature 1..301: note = strain RS/BR/2015/2S-1 polyprotein gene, partial1
  source 1..301: mol_type = genomic DNA
tgtggtgattagtagaccccctggaggtacccgttttggatctgaccagggacccgtgactataccgttccggtaattcgggtttaaaacaatgaacgtcaccacacactttctttttccctttattttatttgtttgttcagtatgttttatgagttgctcattattgctgcccttgtcgtgattcttgtttcaccgcatgatacccagtgtcttattgtcgtctgtttggtcaattttcttgtatactttctttggacaattccagggttagaccttccattatacccagcaatacaac

SEQ ID NO: 281 - DNA, 303 bp, Feline picornavirus
  misc_feature 1..303: note = strain 661F, complete genome.1
  source 1..303: mol_type = genomic DNA
tggccaccggggaaaaacggctactgtgcaccacctctgcaccccacgccgaccacgcctaaccatggcgttagtaggagtggaggaccactgcagagggtcctggtgtgcgacagtcagtggtagagtagacagtcctgactgggcaatgggaccgcgttgcgtatccctaggtggcattgagatttctctgccacccaccagcatggattcctgtggggggggccccatgggctaggtctatactgcctgatagggtcgcggctggtcgactgctgactgtataaccagttgtaacttact

SEQ ID NO: 282 - DNA, 304 bp, Swine vesicular disease virus
  misc_feature 1..304: note = isolate ITL/16/2006, partial genome.1
  source 1..304: mol_type = genomic DNA
tagttggtagtcctccggcccctgaatgcggctaatcccaactgtggagcagatacccacgcaccagtgggcagtctgtcgtaatgggcaactctacagcggaaccgactactttgggtgtccgtgtttcttttatttattcctacgctggctacttatggtgacaattgagagactgtagttatattgccatcagattggtcatccggtggagaataaaacagttgctcacctgtttgtcagtcctgcaccgtcgtgccatagagtcttaactgcccctcaacatcgtcgtaaacacgctgga

SEQ ID NO: 283 - DNA, 305 bp, Bat picornavirus 1
  misc_feature 1..305: note = strain LMH22A, complete genome.1
  source 1..305: mol_type = genomic DNA
gtggctggccaccacggaataacggcaattgtttgtatgtgggaggtcaagcctgcctagccgataacctttgaccgggtgtgtaggatagaacaggaacccactacaggcgacaggttatggtagagtggatacctagccaggggcaatgggactgcgttgcatatccctaatgagccatcgagatttctctggccattacccggtgatggttgtgtggggggggccccacacactagatccatactgcctgatagggtcgcggctggccgaccataacctgtatagtcagttgactttgaatc

SEQ ID NO: 284 - DNA, 306 bp, Coxsackievirus B5
  misc_feature 1..306: note = isolate 028/Pakistan/91, partial genome.1
  source 1..306: mol_type = genomic DNA
taactggtagtcctccggcccctgaatgcggctaatcctaactgcggagcagatacccacatgccagtgggcagtctgtcgtaacgggcaactctgcagcggaaccgactactttgggtgtccgtgtttccttttattcttatactggctgcttatggtgacagttgaaagattgttaccatatagctattggattggccatccggtgacgaacagagcaattatttacctatttgttggttttgtaccattaaatcacaaagttttaaaaacattgaaccttgttttagcatttaatacagcaaa

SEQ ID NO: 285 - DNA, 306 bp, Swine vesicular disease virus
  misc_feature 1..306: note = isolate TAW/119/97, partial genome.1
  source 1..306: mol_type = genomic DNA
tagtcggtagtcctccggcccctgaatgcggctaatcctaactgtggagcagatacccacgcaccagtgggcagtctgtcgtaatgggcaactccgcagcggaaccgactactttgggtgtccgtgtttcatttgttcctacactgactatttatggtgacaattgagagactgtaactatactactatcagattgaccacctggtataaaataaaacagttgttcacctgtttatcagcctcgcaccgttgtactgtaaagcctcagacaccccccaacactatcataacacgtagatcattaaa

SEQ ID NO: 286 - DNA, 306 bp, unidentified
  source 1..306: mol_type = unassigned DNA; note = Human coxsackievirus B4isolate CB4_Cph1 polyprotein gene, complete1 sequence
tagttggtgatcctccggcccctgaatgcggctaatcctaactgcggagcacatgctcacaaaccagtgggtggtgtgtcgtaacgggcaactctgcagcggaaccgactactttgggtgtccgtgtttctttttattcctatactggctgcttatggtgacaattgagagattgttgccatatagctattggattggccatccggtgtcgaacagagcgatcatttatctgtttgttgggtttgtacccttaaatcttagagttttcaaaactctcaacctcgtactacaactaaactcagcaaa

SEQ ID NO: 287 - DNA, 306 bp, unidentified
  source 1..306: mol_type = unassigned DNA; note = Human coxsackievirus B4, isolate CB4_Cph2 polyprotein gene, complete1 sequence
tggttggtagtcctccggcccctgaatgcggctaatcctaactgcggagcacatgcccacaaaccagtgggtggtgtgtcgtaacgggcaactctgcagcggaaccgactactttgggtgtccgtgtttctctttatccctatactggctgcttatggtgacaattgagagattgttgccatatagctattggattggccatccggtgtcaaatagagcgattatctacctatttgttggatttatacctttgaattttgaagtatttaagaccctcaaccttatattacaactcaattcggtaaa

SEQ ID NO: 288 - DNA, 306 bp, unidentified
  source 1..306: mol_type = unassigned DNA; note = Human coxsackievirus B4isolate CB4_Cph10 polyprotein gene,1 sequence
tagttagtagtcctccggcccctgaatgcggctaatcctaactgcggagcacatgcccacaaaccagtgggtggtgtgtcgtaacgggtaactctgcagcggaaccgactactttgggtgtccgtgtttctctttattccaatactggctgcatatggtgacaattgagagattgttgccatatagctattggattggccatccggtgtcgaacagagcgatcatctacctatttgttggatttgtgcctttgaattttgaagtattcaagactctcaaccttgtactacaactcaattcggcaaa

SEQ ID NO: 289 - DNA, 307 bp, Swine vesicular disease virus
  misc_feature 1..307: note = isolate HKN/4/89, partial genome.1
  source 1..307: mol_type = genomic DNA
taattggtagtcctccggcccctgaatgcggctaatcctaactgcggagcagatacccacgcaccagtgggcagtctgtcgtaatgggcaactctgcagcggaaccgactactttgggtgtccgtgtttccttccgttcttatattggctgcttatggtgacaattggaagattgttaccatatcgctattggattggccatccggtgacgattagaacacttgtatacctatttgttagctttgcaccgctgaactacagagccttaagcaccctttgatcacattacaacacccaacacgtcaaa

SEQ ID NO: 290 - DNA, 307 bp, Swine vesicular disease virus
  misc_feature 1..307: note = isolate HKN-8-73 polyprotein gene,1
  source 1..307: mol_type = genomic DNA
taattggtagtcctccggcccctgaatgcggctaatcctaactgcggagcagatacccacgcaccagtgggcagtctgtcgtaatgggcaactctgcagcggaaccgactactttgggtgtccgtgtttccttttattcttatactggctgcttatggtgacaattgagagattgttaccatattgctattggattgtccacccggtgacaaatagaacagttgcttacctgattattagtttcgcaccactgaactacaaaaccttaaacaccctttaatttcatcacaacgcacaatacgttaaa

SEQ ID NO: 291 - DNA, 307 bp, Swine vesicular disease virus
  misc_feature 1..307: note = isolate HKN/7/81, partial genome.1
  source 1..307: mol_type = genomic DNA
tagttggtagtcctccggcccctgaatgcggctaatcctaactgcggagcagatacccacgcaccagtgggcagtctgtcgtaatgggcaactctgcagcggaaccgactactttgggtgtccgtgtttccttttactctcatactggctacttatggttacaattgagagattgtgaccatattgctattggattggccatccagcgacgaatagaatagttgcttacctgtttgttaacctcgtatcactgaactacaaagccttgaataccctttaacttcatcataacgctcagtacgctaaa

SEQ ID NO: 292 - DNA, 307 bp, Swine vesicular disease virus
  misc_feature 1..307: note = isolate FRA/1/73, partial genome.1
  source 1..307: mol_type = genomic DNA
tagttggtagtcctccggcccctgaatgcggctaatcctaactgcggagcagatacccacgcaccagtgggcagtctgtcgtaacgggcaactctgcagcggaaccgactactttgggtgtccgtgtttccttttattcttatactggctgcttatggtgacaattgaaagattgttaccatattgctattggtttggccacccggtgacgaatagaacagttgtttacctaattgttagtttcgtaccactgaactacaaagccttaaacaccctttaatttcatcataacactcaacacgttgaa

SEQ ID NO: 293 - DNA, 308 bp, Swine vesicular disease virus
  misc_feature 1..308: note = isolate HKN/19/70, partial genome.1
  source 1..308: mol_type = genomic DNA
taattggtagtcctccggcccctgaatgcggctaatcctaactgcggagcagatacccacgcaccagtgggcagtctgtcgtaatgggcaactctgcagtggaaccgactactttgggtgtccgtgtttccttttgttcttatactggctgcttatggtgacaattgagagattgttaccatattgctattggattggccatccggtgacgaatagaacaattgtttaactatttgttggttttgtaccgctgaaccacaaagccttaaacaccctttaatttcatcataacgctcaatacgttagaa

SEQ ID NO: 294 - DNA, 308 bp, Swine vesicular disease virus
  misc_feature 1..308: note = isolate ITL/5/77, partial genome.1
  source 1..308: mol_type = genomic DNA
tagttggtagtcctccggcccctgaatgcggctaatcctaactgcggagcagatacccacgcaccagtgggcagtctgtcgtaatgggcaactctgcagcggaaccgactactttgggtgtccgtgtttccttttgttcttatactagccacttatggtgacaattgagagattgtaaccatattgctattggattggccacccggcgacgaatagaacagttacttacctgtttgctatcctcgtatcgccgaactacaaatccttaaacaccctttaatttcgtcacaacgctcaatacgttaaaa

SEQ ID NO: 295 - DNA, 308 bp, Swine vesicular disease virus
  misc_feature 1..308: note = isolate HKN/3/91, partial genome.1
  source 1..308: mol_type = genomic DNA
tagttggtagtcctccggcccctgaatgcggctaatcctaactgtggagcagatacccacgcaccagtgggcagtctgtcgtaatgggcaactccgcagcggaaccgactactttgggtgtccgtgtttcttttttgttcctacactggctacttatggtgacaattgagagactgtaaccatattgctaacggattggccacctggtatagaatagaacaattgcttacctgtctggcagtctcacaccgttgtaccataaagcctctgacacccctcaacaccgtcataacacttaacacgttgaa

SEQ ID NO: 296 - DNA, 308 bp, Human rhinovirus B
  misc_feature 1..308: note = strain HRV-B06_p1159_sR2067_2009 polyprotein1
  source 1..308: mol_type = genomic DNA
gctgtgaccataagacaataatgagtaaaaagagaaacacggacacccaaagtagtcggtcccgtcccggaattgctcattacgaccttaatatcactggtttgtaatacaaggctccagggttaaggttagccgcattcaggggccggaggaatcacaaccaagcacatgcgagtcttcacaccatgtctataaaagggcgtaatgagcaattccgggacgggaccgactactttgggtgtccgtgtttctctttttactcattattgtcttatggtcacagcatatttgttaaatatactgtgatc

SEQ ID NO: 297 - DNA, 310 bp, Bovine viral diarrhea virus 2
  misc_feature 1..310: note = strain AU501 structural polyprotein1
  source 1..310: mol_type = genomic DNA
gcagccccggacatctaagggcatggctagccatgcccttagtaggactagcaaaaggaggggactagcagtagcagtgagttcattggatggccgaatccctgagtacagggaagtcgtcaatggttcgacactccattaaccgaggagtctcgagatgccatgtggacgagggcatgcccacggcacttcttaacctatgcgggggttgcatgggtgaaagcaccattcgtggtgttatggacacagcctgatagggtgtagcagagacctgctattctgctagtaaaaactctgctgtacatggcac

SEQ ID NO: 298 - DNA, 310 bp, Human rhinovirus B
  misc_feature 1..310: note = strain HRV-B06_p1220_sR1439_2009 polyprotein1
  source 1..310: mol_type = genomic DNA
atgctgtgaccataagacaataataagtaaaataagaaacacggacacccaaagtagtcggtcccgtcccggaattgctcattacgcccttttatagacatggtgtgaagactcgcatgtgcttggttgtgattcctccggcccctgaatgcggctaaccttaaccctggagccttgtattacaaaccagtaatattaaggtcgtaatgagcaattccgggacgggaccgactactttgggtgtccgtgtttcttattttacttattattgtcttatggtcacagcatatttgttaaatatactgtgatc

SEQ ID NO: 299 - DNA, 315 bp, Fur seal picorna-like virus
  misc_feature 1..315: note = isolate KGI-Bel-22, complete genome.1
  source 1..315: mol_type = genomic DNA
ttctgcttgctctacgtgcggcgcacgttaaaacgtcccggtggtgtctgtgagcatcatcgttactcttaggagaaacaattatcacaacatgttagtgcggcgcacttcaaacgtcccggggacattcgtgaatgtcatcgtaactccatggagaaatcaaaatcacgatagaagtactgattacggcagcctacaaaggcttgaagtttaccatgtacctgacgcttgcttctatttggacttacaactcttcagttgtgcggcaaccaccgcagaaaaacttagacagggtcctaccatgatgttggtagg

SEQ ID NO: 300 - DNA, 315 bp, Human cosavirus E/D
  misc_feature 1..315: note = strain NG385 polyprotein gene, complete cds.1
  source 1..315: mol_type = genomic DNA
ctacaagctttgtgtaaacaaacttttgtttggcttttctcaagcttctctcacatcaggccccaaagatgtcctgaaggtaccccgtgtatctgaggatgagcaccatcgactacccggacctgcaaaattttgcaaacgcatgtggtatcccagccccctcctctcggggagggggctttgctcactcagcacaggatctgatcaggagatccacctccggtgctttacaccggggcgtggatttaaaaattgcccaaggcctggcgcacaacctaggggactaggttttccttatattttaaagctgtcaat

SEQ ID NO: 301 - DNA, 316 bp, Feline picornavirus
  misc_feature 1..316: note = strain 127F, complete genome.1
  source 1..316: mol_type = genomic DNA
gatgtcggatgacggctggccaccggggaaaaacggcaaatgtgcaccacctctgcaacccacgccgaccacgtttaaccatggcgttagtaggagtggaccactgcagtgggctctggtgtgcgacagtcagtggtagagtagacagtcctgactgggcaatgggaccgcgttgcgtatccctaggtggcatcgagattcctctgctacccaccagcgtggactcctatggggggggccccataggctaggtctatactgcctgatagggtcgcggctggtcgaccactgactgtataaccagttgtaactcact

SEQ ID NO: 302 - DNA, 317 bp, Antarctic picorna-like virus 2
  misc_feature 1..317: note = nonstructural protein and structural2
  source 1..317: mol_type = genomic DNA
atcctcggctccgtcccggaaagacttaaaacttgtccctctgagcgcactagcgtgctcactaaaccaaagacagtattctgccatggataccataccggacacacactctttattgtcccaaaaggcttggcattgtaggcttgaaggctatttagccttggattcaccatccaagagaaccccacgtgcgtagcttgagtcagctagcacatagtggtccccgacttacttcaaaacttacaacaatcagctctgctcctaacgatcataaggagtatagcgtgaaatttcatgatcaaacccctgactgggtt

SEQ ID NO: 303 - DNA, 318 bp, Bovine viral diarrhea virus 1
  misc_feature 1..318: note = genome assembly, complete genome:1
  source 1..318: mol_type = genomic DNA
ggaacaaatcctcctcagcgaaggccgaagagaggctaaccatgcccttagtaggactagcatatagaggggggtagcaacagtggtgagttcgttggatggctgaagccctgagtacagggtagtcgtcagtggttcgacgctccagaatgcgagcctcgagatgccacgtggacgagggcatgcccacagcacatcttaacctaggcaggggtcgcctaggtgaaagcgggtggaccaaccgttacggacacagcctgatagggtgctgcagaggcccactggactgctactaaaaatctctgctgtacatggcac

SEQ ID NO: 304 - DNA, 319 bp, Parechovirus-like virus PLV-CHN
  misc_feature 1..319: note = complete genome.1
  source 1..319: mol_type = genomic DNA
acatggggtatgttgtctgtcctgttttgttgaaacaatatataagatcctttccgccgatatagacctcgacagtctagtgtaggaggattggtgatagtaacttgccccagaagagtgaccgtgacacatagaaaccatgagtacatgtgtatccgtggaggatcgcccgggactggattccatatcccattgccatcccaacaaacggagggtatacccactatgtgcgcgtttgcagtgggagcctgcaaatttagtcatactgcctgatagggtgtgggcctgcactctggggtactcaggctgtttatataat

SEQ ID NO: 305 - DNA, 319 bp, Enterovirus sp.
  misc_feature 1..319: note = isolate PoEV_VIRES_YN01_C1 polyprotein gene,1
  source 1..319: mol_type = genomic DNA
gaatgcggctaatcctaaccacggagcacccaccagtaaaccagctgggagggtgtcgtaacgggtaactctgtggcggaaccgactactttgggtgtccgtgtttccttttgatcctattttggctgcttatggtgacaacgataagttgttatcataaagcttttgggttggccacctggaaaaagttatcagtgtttgatattgctcggctttcacgcctaccaataaaacaagctttatattacttaatttccttttacccaaaggaagaaatctctgaatttcatcttcaactgctcttaacattatcagcaag

SEQ ID NO: 306 - DNA, 321 bp, Echovirus E6
  misc_feature 1..321: note = isolate ETH_P17/E6_2016 polyprotein gene, partial cds.1
  source 1..321: mol_type = genomic DNA
agagtctattgagctaattggtagtcctccggcccctgaatgcggctaatcctaactgcggagcagatacccacacaccagtgggcagtctgtcgtaacgggcaactctgcagcggaaccgactactttgggtgtccgtgtttccttttattttttacactggctgcttatggtgacaattgagaaattgttaccatatagctattggattggccatctggtgacaaacagagcgattatttacctatttgttggttttgtaccattgaattttaaagtattaaaaacccttaacctcattctaacatttaacacagtaac

SEQ ID NO: 307 - DNA, 322 bp, Human rhinovirus A
  misc_feature 1..322: note = strain HRV-A34_p1058_sR263_2008 polyprotein1
  source 1..322: mol_type = genomic DNA
agagagttatgtatggacatgtccagtcaggtctaggggtcctgctggcgacagtgttctagcctgcgtggctgcctgcgtgtcctcacgggcacgaagccatttacttgacaaggtgtgaagagtcccgtgtgctcgtcttgagtcctccggcccctgaatgtggctaaccttaaccctgcagccagtacacacaaaccagtgtgtagctggtcgtaatgagcaattgcgggatgggaccaactactttgggtgtccgtgtttcactttttaccttttattatgcttatggtgacaatatatagacatatatattgacacc

SEQ ID NO: 308 - DNA, 323 bp, Bat pegivirus
  misc_feature 1..323: note = isolate PDB-99 polyprotein gene, complete cds.1
  source 1..323: mol_type = genomic DNA
ggtgcgcgtgaaaccttctcgtcacagaagattagcgcgctaggtacgccaaaggcgtaggcccccggcggtttgcaccgacgtgggacaatgcgctggaggattttacagccgacagagctgcaaaacctgtagtaaggccggagtaccggcctcccagcccgcgtcagcctaaacctggctgtcatacgcggtgtatggaggacatgtccaactatgggtgccttggggtggttccccttggcgtggtgtgacgaccatagcagtactgcctgatagggtcccggcggatgggtcggctgtgtacatccgttgtccccccc

SEQ ID NO: 309 - DNA, 323 bp, Feline picornavirus
  misc_feature 1..323: note = strain 356F, complete genome.1
  source 1..323: mol_type = genomic DNA
ggaatgtggatgacggatgacggttggccaccggggaaaaacggcaattgtgcacctcctctacaacctacgccgaccatgcctaaccatggcatcagtaggagtgggcccctgtagtgggtcaaggtgtgcgacagtcagtggtagagtagacaatcctgaccgggcaataggactgcattgcatatccttaggcggcattgagaagcctctgccacccaccggcatggatttctatggggggggccccatagactaggtctatactgcctgatagggtcgcggctggtcgaccactgactgtataaccagttgtgtataac

SEQ ID NO: 310 - DNA, 324 bp, Enterovirus C
  misc_feature 1..324: note = strain 04-4517, complete genome.1
  source 1..324: mol_type = genomic DNA
agcctactgagctacttgagagtcctccggcccctgaatgcggctaatcccaaccacggagcaggtgaccataaaccaatggttggcctgtcgtaatgcgcaagtctgtggcggaaccgactactttgggtgtccgtgtttccttttacctttttcattggctgcttatggtgacaatcatagattgttatcataaagcgaattggattggccatccggtgaaaatcagagcgattgtatacttgtttattggattcactccattaacaccaaactccctaacactcatcaaactagttttgttgataagacactactatcata

SEQ ID NO: 311 - DNA, 327 bp, Enterovirus B73
  misc_feature 1..327: note = isolate TO-127, complete genome.1
  source 1..327: mol_type = genomic DNA
ggtgtgaagagtatattgagctagctggtagtcctccggcccctgaatgcggctaatcctaactgcggggcaagcacccacaatccagtgggcagcttgtcgtaacgggtaaccctgcagcggaaccgactactttgggtgtccgtgtttcctttatttttaaaactggctgcttatggtgacaattgagagattgttaccatatagctattggattggccatccagtcaccaacagagcaattgtgtacctctttgtagggttcataccacttaattttactagctacaacacactgtgtttcattatcgatttaaacacagcaag

SEQ ID NO: 312 - DNA, 328 bp, Enterovirus G
  misc_feature 1..328: note = EV-G/Wild boar/JPN/Ishi-16/2019 gene for polyprotein,1
  source 1..328: mol_type = genomic DNA
ccggcccctgaatgtggctaatcccaaccacggagcgctcgccaacaaaccagttggtagggcgtcgtaacgggtaactctgtggcggaaccgactactttgggtgtccgtgtttccttttgatcctatattggctgcttatggtgacaacgataagttgttatcataaagcttttgggttggccacctggaaaaagttatcagtgtttgatattgttcggctctcgcgcctaccagtaaaacaagcattatactatttaatttccttttatccaaaggaagagatttctgagtttcatttacagttgctcttagtgttgtcaacaag

SEQ ID NO: 313 - DNA, 329 bp, Human hepegivirus
  misc_feature 1..329: note = isolate AK-790 polyprotein gene, complete cds.1
  source 1..329: mol_type = genomic DNA
tgaactgttgttgtagcaatgcgcatattgctacttcggtacgcctaattggtaggcgcccggccgaccggccccgcaagggcctagtaggacgtgtgacaatgccatgagggatcatgacactggggtgagcggaggcagcaccgaagtcgggtgaactcgactcccagtgcgaccacctggcttggtcgttcatggagggcatgcccacgggaacgctgatcgtgcaaagggatgggtccctgcactggtgccatgcgcggcaccactccgtacagcctgatagggtggcggcgggcccccccagtgtgacgtccgtggagcgcaac

SEQ ID NO: 314 - DNA, 329 bp, Porcine teschovirus
  misc_feature 1..329: note = isolate SH1, complete genome.1
  source 1..329: mol_type = genomic DNA
ttcccaccctcaccctctggatttgtaactgataagtgatgatccttggaagctaggtactcgttacgctggttttggattgtcttgtgcccaacactagttttcggactcttgttgtgtttaaacacagaaatctgattatttggttgtagatttactggacccaccctttgaaagacctgctctggcgcgagctaaagcgcaattgtcaccgggtattgcaccaatggtggcgacagggtacagaagagcaagtactcctgactgggtaatgggactgcgttgcatatccctaggcacctattgagatttctctggggcccaccagc

SEQ ID NO: 315 - DNA, 331 bp, Porcine teschovirus 2
  misc_feature 1..331: note = strain T80 polyprotein gene, complete cds.1
  source 1..331: mol_type = genomic DNA
actagtccttggacttttgttgtgtttaaacacagaaatttaattacctggccatgaattcattggattaacccttctgaaagacttgctctggcgcgagctaaagcgcaattgtcaccaggtattgcaccagtggtggcgacagggtacagaagagcaagtactcctgaccgggcaatgggactgcattgcatatccctaggcacctattgagatttctctggggcccaccggcgtggagttcctgtatgggaatgcaggactggacttgtgctgcctgacagggtcgcggctggccgtctgtactttgtatagtcagttgaaactcacc

SEQ ID NO: 316 - DNA, 331 bp, Teschovirus A
  misc_feature 1..331: note = isolate R6 polyprotein gene, complete cds.1
  source 1..331: mol_type = genomic DNA
actagacctcggtcttctgttgtgtttaaacacagaaatcttgctatctgactatgaattcataggactaacccctctgaaagacttgctctggcgcgagcaaaagcgcaattgtcaccaggtattgcaccaatggtggcgacagggtacagaagagcaagtactcctgactgggcaatgggactgcgttgcatatccctaggcacctattgagatttctctggggcccaccagcgtggagttcctgtatgggaatgcaggactggacttgtgctgcctgacagggtcgcggctggccgtctgtactttgtatagtcagttgaaactcatc

SEQ ID NO: 317 - DNA, 332 bp, Porcine teschovirus 2
  misc_feature 1..332: note = strain Vir 480/87 polyprotein gene, complete1
  source 1..332: mol_type = genomic DNA
actagaccttggtctcttgttgtgtttaaacacagaaatttttcctatttggttatgaattcattggatcaatccctctgagagacctgctctggcgcgagcaaaagcgcaattgtcaccaagtactgcactaatggtggcgacagggtacagaagagcaagtactcctgactgggcaatgggactgcgttgcatatccctaggtacctattgagatttctctggggcccaccagcgtggagttcctgtatgggaatgcaggactggacttgtgctgcctgacagggtcgcggctggccgtctgtactttgtatagtcagttgaaactcact

SEQ ID NO: 318 - DNA, 333 bp, Bovine viral diarrhea virus 1
  misc_feature 1..333: note = isolate CA2006, complete genome.1
  source 1..333: mol_type = genomic DNA
caatgattaggcctagggaatgaatcccccttagcgaaggccgaaaagaggctagccatgcccttagtaggactagcataatgaggggggtagcaacagtggtgagtttgctggatggcttaagccctgagtacagggtagtcgtcagtggttcgacgcctcagtgaggaggtctcgatatgccacgtggacgagggcatgcccaaagcgcatcttaacctgggcgggggtcgctcaggcgaaagcggtttattaactgctgcaaatacagcctgatagggtgctgcagaggcccactgtattgctactaaaaatctctgctgtacatggcac

SEQ ID NO: 319 - DNA, 333 bp, Atypical porcine pestivirus
  misc_feature 1..333: note = isolate KU16-5 polyprotein gene,1
  source 1..333: mol_type = genomic DNA
tgctgtgagccccgtggtgagtgggggaaaggggttaaccaggcctctagtaccacaggcaccattggacagggcaactcgaacctgagagagaggtaccgaacccttaagccccgagtacggggtagacgtcaccgagtagtacacccaaagaccaccacattcaggtgtagggtctactgaagctcgggtggacgtgggcgtgcccaaagggaaatcggtggtggacctgggggttgggcccgccatgccccttcatggggtagacctcactgcttgatagagtgccggcggatgcctcaggtaagagtataaaatccgttgttcattaac

SEQ ID NO: 320 - DNA, 335 bp, Porcine teschovirus 1
  misc_feature 1..335: note = strain Teschen-Konratice polyprotein gene,1
  source 1..335: mol_type = genomic DNA
caacactagacctcggtctactgttgtgtttaaacacagaaatctcgctacttggttatgaattcattggatcaatccctttgaaagacctgctctggcgcgagcaaaagcgcaattgtcaccaggtattgcaccaatggtggcgacagggtacagaagagcaagtactcctgactgggcaatgggactgcattgcatatccctaggcacctattgagatttctctggggcccaccagcgtggagttcctgtatgggaatacaggactggacttgtgctgcctgacagggtcgcggctggccgtctgtactttgtatagtcagttgaagcacact

SEQ ID NO: 321 - DNA, 337 bp, Bat picornavirus
  misc_feature 1..337: note = isolate BtNv-PicoV/SC2013 polyprotein gene,1
  source 1..337: mol_type = genomic DNA
accttttccccctctaaggcaatgcactttggtttattctcatggatcatgattttagaggctggccacctaggttaaacggcaattattagtgataggggtcaaacactcatcgtgaaaccgtccagtagcgaggagtagttccctatctactagtgactagtgtgagcagagtaggaggtatacaaggaagtgggacgctatttgctatccccgtattgagagttctctacaccttgtgtatacagtggattgggaagtccactctggtcctatactgcctgatagggttgttaactgtcagctcacacttagtataacagtttgtcaaacactt

SEQ ID NO: 322 - DNA, 337 bp, Enterovirus C
  misc_feature 1..337: note = isolate mew716_CV-A polyprotein gene, complete cds.1
  source 1..337: mol_type = genomic DNA
tacccatggctaacgccatgggacgctagttgtgaacaaggtgtgaagagcctattgagctacttaagagtcctccggcccctgaatgcggctaatcctaaccacggagcaagtgcccacaaaccagtgggtagcttgtcgtaacgcgtaagtctgtggcggaaccgactactttgggtgtccgtgtttccttttatttttatcatggctgcttatggtgacaatctaagattgttatcatatagctgttggattggccatccggtgatttacagagacttgagaactaacccgcctttctacaacactcatttacttattaatctcacaatacaaa

SEQ ID NO: 323 - DNA, 338 bp, Phacovirus sp.
  misc_feature 1..338: note = strain RS/BR/2015/1R-1 polyprotein gene, partial1
  source 1..338: mol_type = genomic DNA
ctcgtgagtagtacttggccctgcccattacttgaggaccgactcttcttgactacaatgtgtttaaagtaacctggaccacattgtgtatccagacaactccattaggtaatgtacgctggagacgttttcagtgcatagggttctaaagtggtgctgaaatattgcaagctcaatggaatactgaacgctgaaaaccgccgctattatcttttgggccccttgtgggcaaacgttggctttaagcatatactgcttgggaatgcagtactggttgtagacagggtgatagcctaccggctggcgtagttgagttggtatagccagttgattgccat

SEQ ID NO: 324 - DNA, 341 bp, Hepatitis C virus
  misc_feature 1..341: note = replicon I389/NS2-3'UTR.1
  source 1..341: mol_type = genomic DNA
gccagcccccgattgggggcgacactccaccatagatcactcccctgtgaggaactactgtcttcacgcagaaagcgtctagccatggcgttagtatgagtgtcgtgcagcctccaggaccccccctcccgggagagccatagtggtctgcggaaccggtgagtacaccggaattgccaggacgaccgggtcctttcttggatcaacccgctcaatgcctggagatttgggcgtgcccccgcgagactgctagccgagtagtgttgggtcgcgaaaggccttgtggtactgcctgatagggtgcttgcgagtgccccgggaggtctcgtagaccgtgcacc

SEQ ID NO: 325 - DNA, 343 bp, Culex theileri flavivirus
  misc_feature 1..343: note = complete genome.1
  source 1..343: mol_type = genomic DNA
atataaatcccagtttggttaaacctatttcaaggcttaagttgtttattattttatcgccgctcgtgactataaagttgcctagcggagagagataaagaagaaggagttcaaggctcagggcagggcgcaagttccctggtccctaggccgctcgcaggaaggaggagtgaagaagaagaaagagaaggagaggaccaccgccgaaagaaggcaggtgcctcacaagagggccaaccagcgtgttggaccagtggccaacgccggacggcgtggtggcctgctgggacgcctggggattggatggagtgccttcctacaggaagacatcgttcaagccatc

SEQ ID NO: 326 - DNA, 343 bp, Parechovirus sp.
  misc_feature 1..343: note = QAPp32 polyprotein gene, complete cds.1
  source 1..343: mol_type = genomic DNA
acatggggcaggtgtgctgtgccaagagcaacactacggtggccgagccgatggttcgtcaccacgtagtaggactccgtagtgcttggttacggcggacgtaagtcagttgagtgatgtctaagtggcaaaccatgagtacatggtaaccttgtgtggactcgcgggacggaatttcctatcccattgactccttgtagcaaggtgggtatacccaaccacaatggcagcaccctgggtgggaacccaggggcctggattagtatccagtcacacagcctgatagggtggcggctcagccactgaccagcgtctctaaataattgtgagctgttcatgcacc

SEQ ID NO: 327 - DNA, 343 bp, Porcine teschovirus 2
  misc_feature 1..343: note = isolate Stendal 2532 polyprotein gene,1
  source 1..343: mol_type = genomic DNA
cttgtgcccaacaaaaggctttggtctcttgttgtgtttaaacacagaaattttgttactcggttatgaattcactggattaacccctttgaaagacctgctctggcgcgagctaaagcgcaattgtcaccgggtattgcaccaatggtggcgacagggtacagaagagcaagtactcctgactgggcaatgggactgcattgcatatccctaggcacctattgagatttctctggggcccaccagcgtggagttcctgtatgggaatgcaggactggacttgtgctgcctgacagggtcgcggctggccgtctgtgctttgtatagtcagttgaaattcact

SEQ ID NO: 328 - DNA, 343 bp, Porcine teschovirus 2
  misc_feature 1..343: note = isolate DS 183/93 polyprotein gene, partial1
  source 1..343: mol_type = genomic DNA
cttgtgcccaacattggtcctcggacttctgttgtgtttaaacacagaaattcaactattcggttatgaattcattggatcaaccctcttgaaagacctgctctggcgcgagctaaagcgcaattgtcaccaggtattgcaccatcggtggcgacagggtacagaagagcaagtactcctgactgggcaatgggactgcattgcatatccctaggtacctattgagatttctctggggcccaccagcatggagttcctgtatgggaatgcaggactggacttgtgctgcctgacagggtcgcggctggccgtctgtactttgtatagtcagttgaaatgcact

SEQ ID NO: 329 - DNA, 347 bp, Bovine viral diarrhea virus 1
  misc_feature 1..347: note = viral cRNA for polyprotein, strain1
  source 1..347: mol_type = genomic DNA
aattccaaaacagaaatcaggcctagggaacaaaatcctcctcagcgaaggccgaaaagaggctaaccatgcccttagtaggactagcaaattggggggggtagcaacagtggtgagttcattggatggccgaagccctgagtacggggtagtcgtcagtggttcgacgccttaaggaaactaggtctcgagatgccacgtggacgagggcatgcccacggcatatcttaacctgcgcgggggtcgctcaggtgaaagcggcataaatgaccgttatggacacagcctgatagggtgctgcagaggcccactgtattgctactgaaaatctctgctgtacatggcac

SEQ ID NO: 330 - DNA, 347 bp, Picornaviridae sp.
  misc_feature 1..347: note = isolate ybb150shi01 genomic sequence.2
  source 1..347: mol_type = genomic DNA
atgtttgtttcatcatatcactatttttgtatcctatcttgattaatcgcttagattggcttggggaagccgatgcgaatttccgccacctcacccccctcaattgtccaaatcagggactgggaaggttttaactaagggcataatttgtcagtggatggtctaggtacagagaatggcgcggtcacttcttctcagtgaacaccgtttgtcctaccctcttaggcccgccatctgctgaatttctgttgcagctggtagtcgcttttgtaattaatcactatagaaatacaatccactttcgtcttctttttgtatccccttctctatagattcgtgtgttttac

SEQ ID NO: 331 - DNA, 348 bp, Bovine viral diarrhea virus 1
  misc_feature 1..348: note = genome assembly, complete genome:1
  source 1..348: mol_type = genomic DNA
cgaaccactgacgactaccctgtactcagggcttcagccatccaacgaactcaccactgttgctaccccccccgggatgcccttagtaggactagcataccggggggggtagcaacagtggtgagttcgttggatggctgaagccctgagtacagggtagtcgtcagtggttcgacaccttagaatttaggtctcgagatgccacgtggacgagggcacgcccacagcacatcctaacctggacaggggtcgtccaggtgaaagcgggcaaccgttacggacacaacctgatagggtgctgcagaggcccactgtattgctactaaaaatctctgctgtacatggcac

SEQ ID NO: 332 - DNA, 349 bp, Pegivirus J
  misc_feature 1..349: note = isolate CC61, complete genome.1
  source 1..349: mol_type = genomic DNA
ggacttcggtccccctgttactctgcgagccaccgcagagccagggttggtacgcccgaggtgttagaccccggccgaaagctcctaaccatggggttagtaggacgtggtaaatgccactgaggggttggagagctggtagagcgagtaagtcggcgtaaggcccgagtacgggcctcccagcccgggtcagcctaaacctggctgtgatacccggtgcatggagggcgtgtcccaacgctcgatcgctgtagggtgggtccctgcagttgggtgtggctaccctgctcgtactgcttgatagagtcccggcggacggaccagctctcgtcagtccgtggagttgcac

SEQ ID NO: 333 - DNA, 353 bp, Echovirus E9
  misc_feature 1..353: note = isolate NSW-V32-2008-ECHO9, complete genome.1
  source 1..353: mol_type = genomic DNA
cccgtaggacgctctaatactgacatggtgcgaagagtcgattgagctagttagtaatcctccggcccctgaatgcggctaatcctaaccgcggaacacatgctcacataccagtgaggagtgtgtcgtaatgggcaactctgcggcggaaccgactactttgggtgaccgtgtttctttttattctcatactggctgcttatggtgacaattgaaagattgttaccatatagctattggattggccatccggtgacgaatagagcaattatatacttattcgttggatacatcccactcaactttaaagaactaagaactcttaattatatattgcaattaaatttcgcaaa

SEQ ID NO: 334 - DNA, 354 bp, Human enterovirus
  misc_feature 1..354: note = isolate EV/Human/CMRHP5B/CMR/2014 polyprotein1
  source 1..354: mol_type = genomic DNA
acccataggacgctctaatgtggacatggtgcgaagagtctattgagctagttagtagtcctccggcccctgaatgcggctaatcctaactgcggagcgcatgcccccaaaccagggggaggtgcgtcgtaacgggcaactctgcagcggaaccgactactttgggtgtccgtgtttccttttatctttgcaatggctgcttatggtgacaattgagagattgttaccatatagctattggattggccatccggtgagcaatagagcgatcatctattcctttattggatttgtaccattggactatactgcctttgtcacattgaaatacattctattgttgaacactataaa

SEQ ID NO: 335 - DNA, 355 bp, Atypical porcine pestivirus 1
  misc_feature 1..355: note = isolate APPV-China/SWU-KZ/20181
  source 1..355: mol_type = genomic DNA
gcattatgtatgggacatcctaaattggagtgagccccgtggtgagtgggggaaaggggttaaccaggcctctagtaccacaggcaccaatgaacagggcaactcgaacccgagagagaggtaccgaactcttaagccccgagtacggggcagacgtcaccgagtagtacacccaaagaccaccactaggtgtagggtctactgaggctcgggtggacgtgggcgtgcccaaagagaaatcggtggtggacctgggggtcggggccaccatacccctaaacagggtagaccttactgcttgatagagtgccggcggatgcctcgggcaagagtataaaatccgttgtctatcaac

SEQ ID NO: 336 - DNA, 356 bp, Border disease virus
  misc_feature 1..356: note = strain BD31 polyprotein gene, complete cds.1
  source 1..356: mol_type = genomic DNA
gaactacatcatactcgtgtacaaaattggacattccaaaactcgattgggttagggagccctcctagcgacggccgaaccgtgttagccatacacgtagtaggactagcagacgggaggactagccatcgtggtgagatccctgagcagtctaagtcctgagtacaggacagtcgtcagtagttcaacgcaaacatgctctgcctgaaatgctacgtggacgaggcatgcccaagactgcttaatctcggcggggtcgccgaggtgaaacacctaccggtgttgggttacagcctgatagggcgctgcagggcccacgtataggctagtataaaaatctctgctgtacatggcac

SEQ ID NO: 337 - DNA, 358 bp, Pestivirus sp.
  misc_feature 1..358: note = isolate ovine/It/338710-2/2017 polyprotein gene,1
  source 1..358: mol_type = genomic DNA
gttcattctcgtgtacaaaattgggcatataaatttctgattcgattagggaatccctctagcgacggccgaactgggctagccatgcccatagtaggactagcaaacggagggactagccgtagcggtgagctccctgggaagtctaagccctgagtacagggtagtcgtcagtagttcgacgtggacgagagtccatctcgagatgctacgtggacgagggcatgcccaagacataccttaacccaggcgggggtcgtctgggtgaaatcacttagcgtgatgggggtacaacctgatagggtgctgcagaggcccgctattaggctagtataaaaatctctgctgtacatggcac

SEQ ID NO: 338 - DNA, 359 bp, Human pegivirus
  misc_feature 1..359: note = gene for polyprotein, isolate 89860282.1
  source 1..359: mol_type = genomic DNA
gtgatgccagggttggtaggtcgtaaatcccggtcatcttggtagccactataggtgggttttaagggagggttaaggtccctctggcgcttgtggcgagaaagcgcacggtccacaggtgttggccctaccggtgtgaataagggcccgacgtcaggctcgtcgttaaccaataggcaatgccggcgagttgacaaagaccagtgggggccgggcggcgggggaaggacccccgtcgccgcccttcccgggaggggtgggaaatgcatggggccacccagctccgcggcggcctgcagccggggtagcccaagagccttcgggtgagggcgggtggcatttcctttcttgtaccgatc

SEQ ID NO: 339 - DNA, 360 bp, Bovine viral diarrhea virus 2
  misc_feature 1..360: note = strain SD1301, complete genome.1
  source 1..360: mol_type = genomic DNA
atacagattggatgttggcaaaaagtgaatcgataaatagggaaccttcccctcagcgaaggccgaaaggaggctagccatgtccttagtaggactagcaaagagaggggactagcggtagcagtgagttcattggatggccgaatccctgagtacagggaagtcgtcaatggttcgacgctctggcaacaaagagcctcgagatgccatgtggacgagggcatgcccacggcacatcttaacctatgcgggggttgcgtaggtgaaagcatcatcttgagatgttatggacacagcctgatagggtgtagcagagacctgctattccgctagtataaaaaactctgctgtacatggcac

SEQ ID NO: 340 - DNA, 363 bp, Human rhinovirus C
  misc_feature 1..363: note = strain HRV-C17_p1192_sR2967_2009 polyprotein1
  source 1..363: mol_type = genomic DNA
cagggtcgcctttgtgtttgatgggttagtcgctcagtcagttaccccctgatagacctggcagatgaggttggaaacaccccactggtaacagtgttccagcctgcgtggctgcctgcccctctttttgaggggaagcccatatgtagacaaggtgagaagagccgcgtttgctaatcatgagtcctccggcccctgaatgcggctaatccaaccccacagctactgcgcagaaaccactgcgtgggtagtcgtaatgagcaattgtgggacggaaccgactactttgggtgtccgtgtttcctgttttaccttacattgcttatggtcacaacatatatgaaatcgtatatgttgttcacc

SEQ ID NO: 341 - DNA, 365 bp, Bovine viral diarrhea virus 1
  misc_feature 1..365: note = isolate SLO/2416/2002, complete1
  source 1..365: mol_type = genomic DNA
gctcttgtatacaaattggacatccacaaattaaaaatccggcctagggaaaaatccctctcagcgaaggccgaaaagaggctaaccatgcccttagtaggactagcaaaaggagaggggtagcaacagtggtgagttcgttggatggctgaagccctgagtacagggtagtcgtcagtggttcaacacctcggaaagaaggtcttgagatgccacgtggacgagggcatgcccacagcacatcttaacctggacgggggtcgcccaggtgaaagcagttttaaccaactgttatgaacacagcctgatagggtgctgcagaggcccactgcattgctactaaaaatctctgctgtacatggcac

SEQ ID NO: 342 - DNA, 366 bp, Classical swine fever virus
  misc_feature 1..366: note = isolate IND/AS/GHY/G4, complete genome.1
  source 1..366: mol_type = genomic DNA
aggttagttcgttctcgtatgtaatatcggacaaactaaaattctgatttggtttagggcacccctccagcgacggccgaactgggctagccatgcctatagtaggactagcaaacggagggactagccgtagtggcgagctccctgggtggtctaagtcctgagtacaggacagtcgtcagtagttcgacgtgagcaggggctcacctcgagatgctatgtggacgagggcatgcccaggacacaccttaaccctagcgggggtcgctagggcgaaatcacgctatgtgatgggggtacgacctgatagggcgctgcagaggcccactaacaggctagtataaaaatctctgctgtacatggcac

SEQ ID NO: 343 - DNA, 367 bp, Rodent pestivirus
  misc_feature 1..367: note = isolate RtNe-PestV/SC2014 polyprotein gene,1
  source 1..367: mol_type = genomic DNA
tataagctgggggtgggagcccagcttgtactaaagtttacagcacgtgtgtgaagtttacttagtcctgtagaggtgacggggataacctatgccagtgggtgtgtaccagtaaccattgaactacagggactgcaacctgggagagcacctagagcccctaaggcatgagcacatgccattcgtcaagtggtcagctggaaaggatcacccacctggaaaccactgtggacgagggtattcacccaagggtaactctattaattggggggggccccaattatcaacacaattgtgttgggtgtgctgcctgacagggtcccggctgatggcccaggaagcagtataatatcagttgttttggcac

SEQ ID NO: 344 - DNA, 369 bp, Border disease virus
  misc_feature 1..369: note = isolate R4785/06, complete genome.1
  source 1..369: mol_type = genomic DNA
gtatacgagagtagctcatgctcgtatacaaaattggacattctaaaagattaattggactaggattccctcccagcgacggccgaaccgggttagccatacctgcagtaggactagcagacgggaggactagctatcgtggtgaggtccctgagtggtctaagtcctgagtacaggacagtcgtcagtagttcgacacaaacttttgtctcgaggtgctacgtggacgagggcgtgcccaagacacactttaaccctggcgggggtcgctagggtgaaagcgcctaacggcgttggaactacagcctgatagggtgctgcagaggcccacgtaccagctagtataaaaatctctgctgtacatggcac

SEQ ID NO: 345 - DNA, 369 bp, Pronghorn antelope pestivirus
  misc_feature 1..369: note = complete genome.1
  source 1..369: mol_type = genomic DNA
gtatacgcagttagttcatcctgtgtatacagattggagactctaaaaacaacgattcggaataggggcccgcggcgaagaccgaagacaggctaaccatgccgttagtagggctagcaccaaaacgcgggaactagacacttaggagagtggtctggctactctaagaggtgagtacaccttaaccgtcaagggttctactcctcagttgaggactagagatgccctgtggacgggggcatgcccaagagttagcttagccggggcgggggttgttccggtgaaagtagcaatattgaccacactgcctgatagggcggagcaggccccctaggtagtctagtataaaatgtctgctgtacatggcac

SEQ ID NO: 346 - DNA, 369 bp, Porcine pestivirus 1
  misc_feature 1..369: note = isolate ISDVDL2014016573 polyprotein gene,1
  source 1..369: mol_type = genomic DNA
ggccaattaaagcattatgcgtgggacatcctaaatatttatgagccctgcggtgagtgggggaaagaggttaaccaggcctctagtaccacaggcaccaatggacagggcaactcaaacctgagagagaggtaccgaactcttaagccccgagtacggggcagacgtcaccgagtagtacacccaaagaccaccacttctaggtgtagggtctactgaggctcgggtggacgtgggcgcgcccaaagagaaatcggtggtggacctgggggtcggggccaccatgcccctttacggggtagaccttactgcttgatagagtgccggcggatgcctcaggtaagagtataaaatccgttgttcattaac

SEQ ID NO: 347 - DNA, 370 bp, Pestivirus reindeer-1
  misc_feature 1..370: note = V60-Krefeld complete genome.1
  source 1..370: mol_type = genomic DNA
gtatacgaaagtagctcacgttcgtatacaaaattgactgtaccaaatccccaattcggttagggcccctcccagcgacggccgaaccgggttagccatacccgtagtaggactagcaaacgggaggactagcttacgtggtgagatccctgagtggtctaagtcccgagtacggggcagtcgtcagtagttcaacgcaatgtggagttgccttgagatgctacgtggacgagggcatgcccaagacacactttaaccctggcgggggtcgccaggtgaactcacctaatggtgttgggattacagcctgatagggtgctgcagaggcccacgcataagctagtataaaaatctctgctgtacatggcac

SEQ ID NO: 348 - DNA, 370 bp, Border disease virus
  misc_feature 1..370: note = strain Aveyron, complete genome.1
  source 1..370: mol_type = genomic DNA
gtatacgagagtagctcaagtctcgtatgcagattggatacacaaaattgttgaattggtgtagggcccccagcgacggccgaactaggctaaccatgcccacagtaggactagcatacggggggactagctttcgtggtgagatccctgagcggtctaagccctgagtacagggtagtcgtcagtagttcgacacaaacgtggttttgtctcgagatgctacgtggacgagggcatgcccatgacacgctttaggcccggcaggggtcgccgggtcgaaaacacctcactgtgttggggttacagcctgatagggtgctgcagaggcccacgcataagctagtataaaaatctctgctgtacatggcac

SEQ ID NO: 349 - DNA, 370 bp, Bovine viral diarrhea virus 1
  misc_feature 1..370: note = strain USMARC-55477 polyprotein gene,1
  source 1..370: mol_type = genomic DNA
gtaaaatactcgtatacatattggaaaagaaaaaaataataattaggcctagggaacaaatcctcctctgcgaaggccgaaaagaggctagccatgcccttagtaggactagcacaatgaggggggtagcaacagtggtgagttcgttggatggcttaagccctgagtacagggtagtcgtcagtggttcgacaccttggcataaaggtctcgagatgccacgtggacgagggcatgcccaaagcacatcttaaccagggcgggggtcgctctggtaaaagcagttagatcaactgttatgaatacagcctgatagggtgctgcagaggcccactgtattgctactaaaaatctctgctgtacatggcac

SEQ ID NO: 350 - DNA, 370 bp, Sicinivirus A4
  misc_feature 1..370: note = strain RS/BR/2015/1 polyprotein gene, complete cds.1
  source 1..370: mol_type = genomic DNA
cccgattgctgtcctgcttgtctggtgaactcggctggaagcattcagtttctggatttgctggtttgtggtgattagtagaccccctggaggtacccgtctggatctgaccagggacccgtgactataccgttccggtaattcgggtttaaaactatgaacgtcaccacccattttgttttgtttggttgggctggattgtttgtttagatgctcctagaatccctgttggtgattgtagcacttgttgtagtggtcgtctctcctagtgaattaccccagctgtttgctatttgcatctacaactttgtcttgatttttctctggttatttggtaccttagagctccccaattatcccaccattcatc

SEQ ID NO: 351 - DNA, 370 bp, Pasivirus A3
  misc_feature 1..370: note = complete genome.1
  source 1..370: mol_type = genomic DNA
tacctaaaggttcggacacaactccgcgcttcagcctccttaccaaaacaggtgggcagccctgtcttatacttagtggaaacgggaaccaaacgaagtgctttcggttccgttgcaaaaagcatttccgcaggcattacgagcacgtcacgaccacctggtggactgtgggcgagcgtggatctgagagacagggggatgcctgcattttagtaactttcaaaaactcctgtcaaagacaggacttcctcaaaactgtgcctttgccgccaggaatgcaagcgcaaggaattaccatgcatttagactattaacagacaatcttgcattgcacctgcagtgaaggacatctttgtgcagaaaaactgtg

SEQ ID NO: 352 - DNA, 371 bp, Bovine viral diarrhea virus 1
  misc_feature 1..371: note = isolate SLO/3301/2014, complete1
  source 1..371: mol_type = genomic DNA
agttctcgtatacacattggacactctaaaaatatattgtaattaggtctaggggactaaatcctccttagcgaaggccgaaaagaggctagccatgcccttagtaggactagcacaataaggggggtagcaacagtggtgagttcgttggatggctgaagccctgagtacagggtagtcgtcagtggttcgacgcctcggaggacaggcctcgagatgccacgtggacgagggcacgcccacagcacatcttaacctgaacgggggtcgtttaggtgaaagcggtttaaccaaccgctacgaatacagcctgatagggtgctgcagaggcccactgtattgctactgaaaatctctgctgtacatggcac

SEQ ID NO: 353 - DNA, 372 bp, Border disease virus
  misc_feature 1..372: note = isolate Coos Bay 5 c, complete genome.1
  source 1..372: mol_type = genomic DNA
gtatacgggagtagctcatacccgtatgcaaaattggacgtctcaaaattcgattgggtgagggagccctcctagcgacggccgaaccgtgttaaccatacacgtagtaggactagcaaacgggaggactagccatcgtggtgagatccctgagcagtctaagtcctgagtacaggatagtcgtcagtagttcaacgcaggcgtggttctgccttgagatgctacgtggacgagggcatgcccaagacatgctttaatcccgacgggggtcgccgggatgaaaacacctactggtgttgggattacagcctgatagggtgttgcagagacccacgtataggctagtataaaaatctctgctgtacatggcat

SEQ ID NO: 354 - DNA, 372 bp, Border disease virus
  misc_feature 1..372: note = strain X818, complete genome.1
  source 1..372: mol_type = genomic DNA
gtatacgggagtagctcatgcccgtatacaaaattggatattccaaaactcgattgggttagggagccctcctagcgacggccgaaccgtgttaaccatacacgtagtaggactagcagacgggaggactagccatcgtggtgagatccctgagcagtctaaatcctgagtacaggatagtcgtcagtagttcaacgcaggcacggttctgccttgagatgctacgtggacgagggcatgcccaagacttgctttaatctcggcgggggtcgccgaggtgaaaacacctaacggtgttggggttacagcctgatagggtgctgcagaggcccacgaataggctagtataaaaatctctgctgtacatggcac

SEQ ID NO: 355 - DNA, 372 bp, Classical swine fever virus
  misc_feature 1..372: note = strain 94.4/IL/94/TWN, complete genome.1
  source 1..372: mol_type = genomic DNA
gtatacggtgttagctcatcaccgtatgcaagattggacaaaccaaatctcaatctggctcagggcatccctccagcgacggccgaactgggctagccatgctcatagtaggactagcaaacggagggactagccgtagtggcgagctccctgggtggtctaagtcctgagtacaggacagtcgtcagtagttcgacgtaagcggaagctcacctcgagatgctacgtggacgagggcatgcccaagacacaccttaaccctggcaggggtcgccagggtgaaatcacactatgtgaggggggtacgacctgatagggtgctgcaggggcccactattaggctagtataaaaaactctgctgtacatggcac

SEQ ID NO: 356 - DNA, 372 bp, Wood duck megrivirus
  misc_feature 1..372: note = isolate WDMeV/6497nt/WD08.18-AU-20181
  source 1..372: mol_type = genomic DNA
tgggctcttttccgtacggtggcgtgacgaaccaccgtgcgtgaccctgctaagtcgtctgtgcctctcgggcatgtcgtggctccggctccgatatgcttgggacaacggatgggcggcttggtggggctagtcaccccgtttttggacttcctggttttgactccctctttgtctttcgggcttggtccaccgacggactaattggtatctgcaaggcctatagcctcgttctgaaatgccctagccaaagggacgtagtaggatcttggtgtttcccttgcagctctaccgaccgtattagctagagctaggactgtgcaggatgtttcagacctctttttgagcaatctgggacaagaccccggtctg

SEQ ID NO: 357 - DNA, 373 bp, Bovine viral diarrhea virus 1
  misc_feature 1..373: note = isolate VE_138cp_05 genome assembly,1
  source 1..373: mol_type = genomic DNA
actagataaaatactcgtatacgtattgggcatttaaaaatataattaggcctagggaataaatccccctctgcgaaggccgaaaagaggctagccatgcccttagtaggactagcataatgaggggggtagcaacagtggtgagttcgttggatggcttaagccctgagtacagggtagtcgtcagtggttcgacgccttgtcgcaaaggtctcgagatgccacgtggacgagggcacgcccaaagcacatcttaacctgagcgggggtcgctcaggcgaaagcagtttaaccaactgttacgaatacagcctgatagggtgctgcagaggcccactgtattgctactaaaaatctctgctgtacatggcac

SEQ ID NO: 358 - DNA, 373 bp, Classical swine fever virus
  misc_feature 1..373: note = isolate CSFV-UP-GZ-NVD-11, complete1
  source 1..373: mol_type = genomic DNA
gtatacgaggttagttcattctcgtatgcattattggacaaatcaaaatttcaatttggttcagggcctccctccagcgacggccgaactgggctagccatgcccatagtaggactagcaaacggagggactagccatagtggcgagctccctgggtggtctaagtcctgagtacaggacagtcgtcagtagttcgacgtgggcagaggcccatctcgagatgctatgtggacgagggcatgcccaagacacaccttaaccctggtgggggtcgctagggtgaaatcacacaacgtgatgggggtacgacctgatagggtgctgcagaggcccactaacaggctagtataaaaatctctgctgtacatggcac

SEQ ID NO: 359 - DNA, 373 bp, Classical swine fever virus
  misc_feature 1..373: note = strain JJ17LOM-JSJ12, complete genome.1
  source 1..373: mol_type = genomic DNA
gtatacgaggttagttcattctcgtatgcatgattggacaaattaaaatttcaatttggatcaggtcctccctccagcgacggccgaagtgggctagccttgcccgcagttggactagcaaacggagggactagccgtattggcgagctccctgggtggtctaagtcctgagtacaggacagtcgtcagtagttcgacgtgagcagaagcccacctcgatatgctatgtggacgagggcatgcccaagacacatcttaaccctagcgggggtcgctagggtgaaatcacaccacgtgatgggagtacgacctgatagggtgctgcagaggcccactattaggctagtataaaaatctctgctgtacatggcac

SEQ ID NO: 360 - DNA, 373 bp, Sicinivirus 1
  misc_feature 1..373: note = strain UCC001, complete genome.1
  source 1..373: mol_type = genomic DNA
gtgtcattaaggtgtgtttggaagttcgaattagctggtttgtggtgattagtagaccccctggaggtacccaattcggatctgaccagggacccgtgactataccgctccggtaattcgggtttaaaacaatgaacgtcaccacacaattacttttctcattttattttcatcattgtcttcctatttaccgattacactcgatttccttggatgttcctggagatttccctggttacctggaccctcattattgttgttgtttcacccagcgagctgtcccaattgcttattatttgcgcttacaacttcgtcctaatatttttctggttgatcgggttgattgagctcccgggctatcctgccattcaac

SEQ ID NO: 361 - DNA, 374 bp, Classical swine fever virus
  misc_feature 1..374: note = strain CSFV/1.4/dp/CSF1058/2010/Pinar1
  source 1..374: mol_type = genomic DNA
gtatacgaggttagctcattctcgtatacatgatcggacaaatcaaaatctcaatttggttcagggcctccctccagcgacggccgaactgggctagccatgcccacagtaggactagcaaacggagggactagccatagtggcgagctccctgggtggtctaagccctgagtacagggcagtcgtcagtagttcgacgtgagcagaagcccacctcgagatgctatgtggacgagggcatgcccaagacacaccttaactctagcgggggttgctagggtgaaatcacaccatgtgatgggagtacgacctgatagggcgctgcagaggcccactattaggctagtataaaaaatctctgctgtacatggcac

SEQ ID NO: 362 - DNA, 374 bp, Border disease virus
  misc_feature 1..374: note = gene for polyprotein, complete cds, strain:1
  source 1..374: mol_type = genomic DNA
gtatacggggtagctcatgcccgtgtacaaaattggactttccaaaaaactcaattggattagggagccctcctagcgacggccgaaccgtgttagccatacacgtagtaggactagcagacgggaggactagccatcgtggtgagatccctgagcggtctaagtcctgagtacaggatagtcgtcagtagttcaacgcagacatggttctgccttgagatgctacgtggacgagggcatgcccaagacgcgctttaatcctggcgggggtcgccagggtgaaaacacataccagtgttggggttacagcctgatagggtgctgcagaggcccacgtataggctagtataaaaaatctctgctgtacatggcac

SEQ ID NO: 363 - DNA, 374 bp, Classical swine fever virus
  misc_feature 1..374: note = strain JJ9811, complete genome.1
  source 1..374: mol_type = genomic DNA
gtatacgaagttagctcaccctcgtatacataattgggcaggtcaaaattccaatttggttcagggcccccctccagcgacggccgaactgggctagccatgcccacagtaggactagcagacggagggactagccgtagtggcgagctccctgggtggtctaagtcctgagtacaggacagtcgtcagtagttcgacgtgagcagcagctcatctcgagatgctatgtggacgagggcatgcccaagacacaccttaatcctggcgggggtcgccagggtgaaatcacactgcgtgatgggggtacgacctgatagggtgctgcagaggcccactattaggctagtataaaaaatctctgctgtacatggcac

SEQ ID NO: 364 - DNA, 374 bp, Classical swine fever virus
  misc_feature 1..374: note = strain CSFV/2.3/dp/CSF857/2006/Borken,1
  source 1..374: mol_type = genomic DNA
gtatacgaggttagctcgttctcgtatacgatattggatacactaaatttcgatttggtctagggcacccctccagcgacggccgaaatgggctagccatgcccatagtaggactagcaaacggagggactagccgtagtggcgagccccctgggtggtctaagtcctgagtacaggacagtcgtcagtagttcgacgtgagcaccagcccacctcgagatgctacgtggacgagggcatgcccaagacacaccttaaccctggcgggggtcgctagggtgaaatcacattatgtgatgggggtacgacctgatagggtgctgcagaggcccactattaggctagtataaaaaaatctctgctgtacatggcac

SEQ ID NO: 365 - DNA, 374 bp, Bovine viral diarrhea virus 1
  misc_feature 1..374: note = isolate GXNN1, complete genome.1
  source 1..374: mol_type = genomic DNA
ggaaaaaacactcgtatacatattgggcgattctaaaacgataattaggcctagggaatgaatccccttcagcgaaggccgaaaagaggctagccatgcccttagtaggactagcataatggagggggtagcaacagtggtgagttcgttggatggcttaagccctgagtacagggcagtcgtcagtggttcgacaccttggaagaacaaggcctcgagatgccacgtggacgagggcatgcccaaagcacatcttaacccgggcgggggtcgctcaggtgaaagcagtttaaccaactgttacgaatacagcctgatagggtgctgcagaggcccactgtattgctactaaaaatctctgctgtacatggcac

SEQ ID NO: 366 - DNA, 374 bp, Human enterovirus
  misc_feature 1..374: note = isolate EV/Human/CMRHP55/CMR/2014 polyprotein1
  source 1..374: mol_type = genomic DNA
ggtacctgtggctaaaagccacaggacgctagttgtgaacaaggtgtgaagagtctattgagctacaagagagtcctccggcccctgaatgcggctaatcccaaccatggagcaagtgctcacgcaccagtgagtagcttgtcgtaacgggtaactctgtggcggaaccgactactttgggtgtccgtgtttccttttatttttataatggctgcttatggtgacaatctcagattgttatcataaagcgaattggattggccatccggtgaaagtgagatatattatatacctttttgttggatttactccaatcaattccttcacttatcagctcatcactataactctgttgattagaagcatataccaca

SEQ ID NO: 367 - DNA, 375 bp, Classical swine fever virus
  misc_feature 1..375: note = strain GD19/2011, complete genome.1
  source 1..375: mol_type = genomic DNA
gtatacgaggttagttcgttctcgtgtacaatattggacaagaccaaaattccgatttggcctagggcacccctccagcgacggccgaactgggctagccatgcccacagtaggactagcaaacggagggactagccgtagtggcgagctccctgggtggtctaagtcctgagtacaggacagtcgtcagtagttcgacgtgagcaggagcccacctcgagatgctatgtggacgagggcatgcccaagacacaccttaaccctggcgggggtcgccagggtgaaatcacaccatgtgatgggggtacgacctgatagggtgctgcagaggcccactaacaggctagtataaaaaatctctgctgtacatggcac

SEQ ID NO: 368 - DNA, 375 bp, Pestivirus Burdur/05-TR
  misc_feature 1..375: note = complete genome.1
  source 1..375: mol_type = genomic DNA
gtatacgagattagctcacactcgtatacaaattggatatgacaaattcaaattggactagggactccctctagcgacggccgaacggggttaaccatacctctagtaggactagcaaacggagggactagctatagtggtgagctccctgggaggtctaagttccgagtacggaatagtcgtcagtggttcaacgccggtaaaccccggccttgagatgccacgtggacgagggcatgcccaagacacaccttaacctgggcgggggtcgtccaggtgaaaacacccctttttgggtgctgggggtacagcctgatagggtgctgcagaggcccactaataggctagtataaaaatctctgctgtacatgagac

SEQ ID NO: 369 - DNA, 375 bp, Bovine viral diarrhea virus 1
  misc_feature 1..375: note = isolate MA_101_05 genome assembly,1
  source 1..375: mol_type = genomic DNA
atttagaaaaggttctcgtatacgtattgggcaatcaaaaataatgattaggcctagggaacaaaccctctcagcgaaggccgaaaggaggctagccatgcccttagtaggactagcaaaatgaggggggtagcaacagtggtgagttcgttggatggctgaagccctgagtacagggcagtcgtcagtggttcgacacctaggatggtaggtctcgagatgccacgtggacgagggcatgcccacagcacatcttagcctgagcgggggtcgcccaggtgaaagcggtacagacagaccgctacgaatacagcctgatagggtgctgcagaggcccactgcaatgctactaaaaatctctgctgtacatggcac

SEQ ID NO: 370 - DNA, 376 bp, Border disease virus
  misc_feature 1..376: note = strain Gifhorn clone pBeloGif3, complete1
  source 1..376: mol_type = genomic DNA
gtatacgagagtagttcaggctcgtatgcaaaattgggtgtttcaaattttaaaattcgactagggccaccccccagcgacggccgaaacgggttagccatacccttagtaggactagcggacggggggactagccatcgtggtgagatccctgagcggtctaagtcctgagtacaggacagtcgtcagtggttcgacgcggtcatcgcatcgtctcgagatgccacgtggacgagggcatgcccaagacacgctttaatcctggcgggggtcgccagggtgaaaacgtcctagtggcgttggggttacagcctgatagggtgctgcagaggcccacgcataggctagtataaaaaaactctgctgtacatggcac

SEQ ID NO: 371 - DNA, 376 bp, Border disease virus
  misc_feature 1..376: note = strain H2121 (Chamois-1), complete genome.1
  source 1..376: mol_type = genomic DNA
gtatacgagagtagctcatgctcgtatacagattggacacgctaaattttttaattagggttagggtgttccccccagcgacggccgaactgggttagccatacccatagtaggactagcagacgggaggactagccatcatggtgaggtacctgagcggtctaagccctgagtacagggcagtcgtcagtagttcgacactaacttggcttagtctcgagatgctacgtggacgagggcatgcccatgacacgctttagccccagcgggggtcgttggggtgaaaacacattacggtgctggtatcacagcctgatagggtgctgcagaggcccatgaataggctagtataaaaaatctctgctgtacatggcac

SEQ ID NO: 372 - DNA, 376 bp, Bovine viral diarrhea virus 1
  misc_feature 1..376: note = isolate SLO/2407/2006, complete1
  source 1..376: mol_type = genomic DNA
agatttaggaaagctctcgtatgcatattgggcaatctaaaataataattagacctagggaacaatccctctcagcgaaggccgaaaggaggctagccatgcccttagtaggactagcaaaatgaggggggtagcatcagtggtgagttcgttggatggctgaagccctgagtacagggcagtcgtcagtggttcgacgcctaggatgataggtctcgagatgccacgtggacgagggcatgcccacagcacatcttagcccgagcgggggtcgcccgggtgaaaacggtaaatacagaccgctacgaatacagcctgatagggtgctgcagaggcccactgtaatgctactaaaaaactctgctgtacatggcac

SEQ ID NO: 373 - DNA, 377 bp, Border disease virus
  misc_feature 1..377: note = isolate R9336/11, complete genome.1
  source 1..377: mol_type = genomic DNA
gtatacgagagtagttcatgctcgtatacagaattggatattctaaaatttgttaattggactagggtctcctcctggcgacggccgaaccgggttagccatacccgtagtaggactagcatatgggaggactagctttcgtggtgaggttcctgagtggtctaagtcctgagtacaggatagtcgtcagtagttcgacacaaacggagttttagtctcgagatgctacgtggacgagggcatgcccaagactcactttaatcctggcgggggtcgccagggtgaaaacgcccaatggcgttggaactacagcctgatagggtgctgcagaggcccacgcaacagctagtataaaaaatctctgctgtacatggcac

SEQ ID NO: 374 - DNA, 377 bp, Pestivirus
  misc_feature 1..377: note = strain Aydin/04-TR, complete genome.1
  source 1..377: mol_type = genomic DNA
gtatacgagattagctcatactcgtgtacaaattggacgtagcaaatttaaaaattcggatagggtccccatccagcgacggccgaacggggttaaccatacctctagtaggactagcagacggatggactagccacagtggtgagctccctgggaggtctaagttctgagtacagaacagtcgtcagtagttcaacgctggtaaaccccagccttgagatgctacgtggacgagggcatgcccaagacacaccttaacctggacgggggtcgtccaggtgaaagtacccatctttgggtgctgggagtacagcctgatagggcgctgcagaggcccactgacaggctagtataaaaatctctgctgtacatggaac

SEQ ID NO: 375 - DNA, 377 bp, Bovine viral diarrhea virus 1
  misc_feature 1..377: note = isolate SLO/1361/2014, complete1
  source 1..377: mol_type = genomic DNA
agatttagctcaatctctcgtatgcacattgggcaagcaaaataacaattaggcctagggaaaaaataatcctcctcagcgaaggccgaaaagaggctagccatgcccttagtaggactagcatattggggagggtagcaacagtggtgagttagttggatggctgaagccctgagtacagggtagtcgtcagtggttcgacgccttagaatacaggcctcgagatgccacgtggacgagggcatgcccacagcacatcttaacctgagcgggggtcgcccaggtaaaagcggatgaaaaccgttactaacacagcctgatagggtgctgcagaggcccactgcactgctactaaaaatctctgctgtacatggcac

SEQ ID NO: 376 - DNA, 377 bp, Atypical porcine pestivirus
  misc_feature 1..377: note = isolate 5620 polyprotein gene, complete1
  source 1..377: mol_type = genomic DNA
gcataatgcttagattggctgcattatgtttgggacatcctaaatttttatgagccctgtggtgagtgggggaaaggggttaaccaggcctctagtaccacaggcaccaatggacagggcaactcgaacctgagagagaggtaccgaactcttaagtcccgagtacggggcagacgtcaccgagtagtacacccaaagaccaccacttttaggtgtagggtctactgaggctcgggtggacgtgggcgtgcccaaagagaaatcggtggtggacccgggggtcgggaccaccatgcccttcacggggcagaccttactgcttgatagagtgccggcggatgcctcgggtgagagtataaaatccgttgtttattaac

SEQ ID NO: 377 - DNA, 378 bp, Bovine viral diarrhea virus 2
  misc_feature 1..378: note = isolate McCart_c, complete genome.1
  source 1..378: mol_type = genomic DNA
ttgcatggtacgggctgagctacggattggatgttgacaaattttgaattggcaaagtaggtaactttcccctcagcgaaggccgaaaagaggctagccatgcccttagtaggactagcaaaaggaggggactagcggtagcagtgagttcattggatggccgaacccctgagtacaggggagtcgtcaatggttcgacactccatcattcatggagtctcgagatgccatgtggacgagggcatgcccacggcacatcttaacctatgcgggggttgcatgggtgaaagcgccattcgtggcgttatggacacagcctgatagggtgtagcagagacctgctattccgctagtaaaaaactctgctgtacatggcac

SEQ ID NO: 378 - DNA, 378 bp, Atypical porcine pestivirus
  misc_feature 1..378: note = isolate GX02-2019 polyprotein gene,1
  source 1..378: mol_type = genomic DNA
gcataatgctttgattggctgcattatgtgttggacacctcaaattaccacgcgccctgcggtgagtgggggaaaggggttaaccaggcctctagtaccacagacaccaattggcagggcaactcaaacctgagagagaggtaccgaactcttaagccccgagtacggggcagacgtcaccgagtagtacacccaaagaccaccatgtttaggtgtagggtctactgaggcttgggtggacgtgggcgtgcccaaagagaaatcggtggtggacctgggggtcgggcccaccacacccctttatggggtggaccttactgcttgatagagtgccggcggatgcctcaggtaagagtataaaatccgttgtttattaac

SEQ ID NO: 379 - DNA, 378 bp, Porcine pestivirus 1
  misc_feature 1..378: note = complete genome.1
  source 1..378: mol_type = genomic DNA
gcataatgctttgattggctgcattatgtgtgggacatcctaaattgtcataagccctgcggtgagtgggggaaaggggttaaccaggcctctagtaccacaggcacctatggacagggcaactcaaacctgagagagaggtaccgaactcttaagtcccgagtacggggcagacgtcaccgagtagtacacccaaagaccaccatttctaggtgtagggtctactgaggctcgggtggacgtgggcgtgcccaaagagaaatcggtggtggacctgggggtcggggccaccataccccgttatggggtagaccttactgcttgatagagtgccggcggatgcctcgggtaagagtataaaatccgttgtctattaac

SEQ ID NO: 380 - DNA, 378 bp, Atypical porcine pestivirus
  misc_feature 1..378: note = isolate NL11 Farm10 polyprotein gene,1
  source 1..378: mol_type = genomic DNA
gcataatgctttgattggctgcattatgtatggaacatcctaaattgttgtgagccccgtggtgagtgggggaaaggggtttaccaggcctctagtaccacaggcaccgatagacggggcaactcgaacctgagagagaggtaccgaactcttaagtcccgagtacggggcagacgtcaccgagtagtacacccaacgaccaccactcctaggtgtagggtctactgaggctcgggtggacgtgggcgcgcccaaagagaaatcggtggtggacctgggggccggggccaccatgctcctttacggggtagaccttactgcttgatagagtgccggcggatgcctcgggtaagagtataaaatccgttgtctattatt

SEQ ID NO: 381 - DNA, 378 bp, Swine pasivirus 1
  misc_feature 1..378: note = complete genome.1
  source 1..378: mol_type = genomic DNA
gcttttgaccagtggctctgggttacttagccaagtccctttctcttattttcactagtttatgttgtgtgttgtctgttttgttttgtttaaattgtatacaagatccttcccgccgacacagacctcgacagtctggtgtaggagggttggtgatattaatttgccccaaaagagtgaccgtgatacgtggaaaccatgagtacatgtgtatccgtggaggatcgcccgggactggattccatatcccattgccatcccaacaaacggagggtatacccaccacgtgcgcgtttgcagtgggaatctgcaaatttagtcatactgcctgatagggtgtgggcctgcactttggggtactcaggctgttcatataat

SEQ ID NO: 382 - DNA, 379 bp, Bovine viral diarrhea virus 2
  misc_feature 1..379: note = isolate 1786c polyprotein gene,1
  source 1..379: mol_type = genomic DNA
tcctcgttgaaattctcgtatacagattgggtgttggcaaacagttaattagtgaagtagggaaccttcccccctctgcgaaggccgaaaagaggctaaccatgcccttagtaggactagcaaaaagagggggctagcggtagcagtgagtttattggatggccgaatccctgagtacagggaagtcgtcaatggttcgacactctggtaatataagagtctcgagatgccatgtggacgagggcatgcccacggcacatcttaacctatgcgggggttgcatgggtgaaagcaccatttacggtgttataaacacagcctgatagggtgtagcagagacctgctatcccgctagtaaaaactctgctgtacatggcac

SEQ ID NO: 383 - DNA, 379 bp, Classical swine fever virus
  misc_feature 1..379: note = isolate LK-VNIVViM, complete genome.1
  source 1..379: mol_type = genomic DNA
gcatactcaggacttagaccaccctcgcatctgcatgatatcggacaaatcaaatttcaatttggttcagggcctccctccagcgacggccgaactgggctagccatgcccacagtaggactagcaaacggagggactagccgtagtggtgagctccctgggtggtctaagtcctgagtacaggacagtcgtcagtagttcgacgtgagcagaagcccacctcgagatgctacgtggacgagggcatgcccaagacacaccttaaccctagcgggggtcgctagggtgaaatcacaccacgtgatgggagtacgacctgatagggtgctgcagaggcccactattaggctagtataaaaatctctgctgtacatggcac

SEQ ID NO: 384 - DNA, 379 bp, Atypical porcine pestivirus
  misc_feature 1..379: note = isolate GX01-2019 polyprotein gene,1
  source 1..379: mol_type = genomic DNA
gcataatgctttgattggctgcattatgtatgggacatcctaaattgctacgagccctgcggtgagtgggggaaaggggttaaccaggcctctagtaccacaggcaccaataaacagggcaactcgaacctgagagagaggtaccgaactcttaagtcccgagtacggggcagacgtcactgagtagtacacccaaagaccaccacatctaggtgtagggtctactgaggctcaggtggacgtgggcgtgcccaaagagaaatcggtggtggacctgggggtcgggtccaccatgccccctttagggggtagaccttactgcttgatagagtgccggcggatgcctcgggtaagagtataaaatccgttgttcattaac

SEQ ID NO: 385 - DNA, 380 bp, Atypical porcine pestivirus
  misc_feature 1..380: note = isolate APPV-China/HeNLY/2017, complete1
  source 1..380: mol_type = genomic DNA
tgcataatgcttcgattggctgcattatgtgtgggacatcctaaattgttaagcgccctgcggtgagtgggggaaaggggttaaccaggcctctagtaccacaggcaccattggacagggcaactcgaacctgagagagaggtaccgaactcttaagctccgagtacggggcagacgtcaccgagtagtacacccaacgaccaccatgtttaggtgtagggtctactgaagctcgggtggacgtgggcgtgcccaaagagaaatcggtggtggacctgggggtcgggcccaccatgccccccttacggggtagacctcactgcttgatagagtgccggcggatgcctcaggtgagagtataaaatccgttgttcgttaac

SEQ ID NO: 386 - DNA, 380 bp, Sicinivirus sp.
  misc_feature 1..380: note = strain RS/BR/2015/3R polyprotein gene, complete1
  source 1..380: mol_type = genomic DNA
ttttgtcccgattgttgcaacattggcttggggaaccgaactcggttgcatttaagttgtgaacttgttggtctgtgatgattagtagaccccctggaggtacccgtctggatctgaccagggacccgtgactataccgttccggtaattcgggtttaaaacaatgaacgtcatcactcaacattctttcccattttattttgtatcttactgtcttagtatgctcattgagatttcgctggtagttgttgctttggttgtagtggttgtttcgcacagtgagtctcatcagcttctcacagtttgtatctacaattttgctttgaccttcctttggctgttcggatttcttgaacttcctaactatcctgctgttcaac

SEQ ID NO: 387 - DNA, 380 bp, Porcine teschovirus 2
  misc_feature 1..380: note = isolate JF613 polyprotein gene, complete cds.1
  source 1..380: mol_type = genomic DNA
ttggaagctaggtacttgttacgctagttttggattgtcttgtgcccaacattagtctttggacttctgttgtgtttaaacacagaaatttgaacatttggctatagattcacaggataaaccctttgaaagacctgctctggcgcgagctaaagcgcaattgtcaccgggtattgcaccaatggtggcgacagggtacagaagagcaagtactcttgactgggtaatgggactgcgttgcatatccctaggcacctattgagatttctctggggcccaccagcgtggagttcctgtatgggaatgcaggactggacttgtgctgcctgacagggtcgcggctggccgtctgtactttgtatagtcagttgaaactcact

SEQ ID NO: 388 - DNA, 381 bp, Linda virus
  misc_feature 1..381: note = strain Austria1, complete genome.1
  source 1..381: mol_type = genomic DNA
gtatagcagcagtagctcaaggctgctatacgattggacataccaaattccaattggtgttagggaccacctaggtgaaggccgacgacaggtagccattcctgttagtaggacgaaccgttatggtggactggttgctcaggtgagcaggctgcaatgcgtaagtggtgagtacaccacagccgtcaaaggtgccactggtaaggatcacccactggcgatgccttgtggacgggggcgtgcccaacgcaatgttagcggtggcgggggctgccatcgtgaaagctaggtcttgatggaccttgttgcctgtacagtctgataggatgccggcggatgccctgtgacagccagtataaagaatatccgttgtgattgcac

SEQ ID NO: 389 - DNA, 381 bp, Pestivirus PG-2
  misc_feature 1..381: note = complete genome.1
  source 1..381: mol_type = genomic DNA
gtatacgagattagctcatcactcgtatacataatcggatataaccaaaacaatgatttggcataggaaataccccgatgcgaaggccgaaacaggctaaccatgcctttagtaggactagcacaaaatcggggactagccaaggtggcgagcttcctggatgaccgaagtcctgagtacaggacagtcgtcaacagttcaacgcgcaggacaggtctgcgtcttgatatgctgtgtggacgagggcatgcccacggtacatcttaacccagccgggggtcggttgggtgaaagtccaataggactggaagtacggcctgatagggtgtagcagagacccacctgttaggctagtataaaatactctgctgtacatggcac

SEQ ID NO: 390 - DNA, 382 bp, Pestivirus giraffe-1 H138
  misc_feature 1..382: note = complete genome.1
  source 1..382: mol_type = genomic DNA
gtatacgagtttagctcaatcctcgtatacaatattgggcgtcaccaaatatagatttggcataggcaacaccccgatgcgaaggccgaaaagggctaaccatgcccttagtaggactagcaaaaaatcggggactagcccaggtggtgagcttcctggatgaccgaagccctgagtacagggcagtcgtcaacagttcaacacgcagaataggtttgcgtcttgatatgctgtgtggacgagggcatgcccacggtacatcttaacctatccgggggtcggataggcgaaagtccagtattggactgggagtacagcctgatagggtgttgcagagacccatctgataggctagtataaaaaactctgctgtacatggcac

SEQ ID NO: 391 - DNA, 382 bp, Bovine viral diarrhea virus 1m
  misc_feature 1..382: note = isolate LN-1, complete genome.1
  source 1..382: mol_type = genomic DNA
gtatacgagaattagatcaatctctcgtatacacattgggcatcccaaacagcaattaggcatagggaaaatcctcctcagcgaaggccgaatagaggctagccatgcccttagtaggactagcaaattgaggggggtagcagcagtggcgagttcgttggatggctgaagccctgagtacagggtagtcgtcagtggttcgacgccttaggatctaaggcctcgagatgccacgtggacgagggcatgcccacagcacatcttaatccgagcgggggtcgctcgggtgaaagctgttgtgctaacagttatgaacacggcctgatagggtgctgcagaggcccactgtgttgctactaaaaatctctgctgtacatggcac

SEQ ID NO: 392 - DNA, 382 bp, Phocoena pestivirus
  misc_feature 1..382: note = isolate NS170386, complete genome.1
  source 1..382: mol_type = genomic DNA
gtatacacaaggttagctcaatccattgtgtgtacgattggatgttgcaaatttataatttgagatatagggacccattcatcacagcgaaggccgaacaagggtagccaatcccttcattaggactagcacaagtgatggactggagacgtggatgagtgagctgtagagaggaagtggtgagtacaccacagtcgtcaagagtactaccggtaaggatcacccgctagttatgctctgtggacgagggcatgcccaccttttctactagataccccgggggttggggtgtcgaaagtcgaaatatcgattgctcacacagtctgataggatgccggcggatgctccacgtataccagtataaaaatccgttgaatagcac

SEQ ID NO: 393 - DNA, 383 bp, unidentified
  source 1..383: mol_type = unassigned DNA; note = cDNA to genomic RNA of bovine viral diarrhea virus.1,
atgtatacgagaatttgcctaacctcgtatacatattgggcattctaaaaataaattaggcctaagggacaaatcctccttagcgaaggccgaaaagaggctagccatgcccttagtaggactagcaaaacaaggagggtagcaacagtggtgagttcgttggatggctgaagccctgagtacagggtagtcgtcagtggttcgacgcttcgtgtgacaagcctcgaggtgccacgtggacgagggcatgcccacagcacatcttaacctgagcgggggtcgttcaggtgaaagcggtttaaccaaccgctacgaatacagcctgatagggtgctgcagaggcccactgtattgctactaaaaatctctgctgtacatggcac

SEQ ID NO: 394 - DNA, 383 bp, Bovine viral diarrhea virus 3
  misc_feature 1..383: note = Th/04_KhonKaen, complete genome.1
  source 1..383: mol_type = genomic DNA
gtatacgcccagttagttcaggtggacgtgtacgattgggtatcccaaattaataatttggtttagggactaaatcccctggcgaaggccgaaacaggttaaccatacctttagtaggacgagcataatgggggactagtggtggcagtgagctccctggatcaccgaagccccgagtacggggtagtcgtcaatggttcgacgcatcaaggaatgcctcgagatgccatgtggacgagggcgtgcccacggtgtatcttaacccaggcgggggccgcttgggtgaaatagggttgttatacaagcctttgggagtacagcctgatagggtgttgcagagacctgctacaccactagtataaaaactctgctgtacatggcac

SEQ ID NO: 395 - DNA, 383 bp, Bovine viral diarrhea virus 1
  misc_feature 1..383: note = isolate Carlito, complete genome.1
  source 1..383: mol_type = genomic DNA
gtatacgagaattagttaaaactatcgtatacacattgagcattccaaaatgataattggacctagggaacaatccctcccagcgaaggccgaaaagaggctagccatgcccttagtaggactagcaaaatggggggggtagcaacagcggtgagttcgttggatggccgaagccccgagtacggggcagtcgtcagtggttcgacgcctggcgcgacaggcctcgagatgccacgtggacgagggcacgcccacggcacatcttagccagagcgggggtcgctcgggtgaaagtggtcaaacagactactacgaatacagcctgatagggtgctgcagaggcccgctgtaatgctactaaaaatctctgctgtacatggcac

SEQ ID NO: 396 - DNA, 384 bp, Pestivirus type 1
  misc_feature 1..384: note = cytopathic genomic RNA, complete genome.1
  source 1..384: mol_type = genomic DNA
gtatacgagaatttgcctaggacctcgtttacaatatgggcaatctaaaattataattaggcctaagggacaaatcctcctcagcgaaggccgaaaagaggctagccatgcccttagtaggactagcaaaataaggggggtagcaacagtggtgagttcgttggatggctgaagccctgagtacagggtagtcgtcagtggttcgacgcttcggaggacaagcctcgagataccacgtggacgagggcatgcccacagcacatcttaacctggacgggggtcgttcaggtgaaaacggtttaaccaaccgctacgaatacagcctgatagggtgctgcagaggcccactgtattgctactgaaaatctctgctgtacatggcac

SEQ ID NO: 397 - DNA, 384 bp, Bovine viral diarrhea virus 1
  misc_feature 1..384: note = isolate SuwaCp, complete genome.1
  source 1..384: mol_type = genomic DNA
gtatacgagatttagaaaagtctctcgtatacacattggacataacaaaataacaattaggcctagggaacgaatccctctcagcgaaggccgaaaagaggttaaccatacccttagtaggactagcaaacgagaggggtagcaatggtggtgagttcgttggatggctgaagccctgagtacagggtagtcgtcaatggttcgacacctatggaacgtaggtctcgagatgccatgtggacgagggcatgcccacagcacatcttaactttggcaggggtcgccaaagtgaaagtggcctaaccaaccactacgaacacagcctgatagggtgctgcagaggcccaccttcttgctactaaaaatctctgctgtacatggcac

SEQ ID NO: 398 - DNA, 384 bp, Bovine viral diarrhea virus 1
  misc_feature 1..384: note = isolate 10JJ-SKR, complete genome.1
  source 1..384: mol_type = genomic DNA
gtatacaggaattaggaaaagctcctgtatacaaattgggcaattaaaaattgaagattaggcctagggaaagatccctctcagcgaaggccgaaaagaggctagccatgcccttagtaggactagcaaaatgagaggggtagcaacagtggtgagttcattggatggctgaagccctgagtacagggtagtcgtcagtggttcgacacctcggaaagaaggtctcgagatgccacgtggacgagggcatgcccacagcacatcttaacctggacgggggtcgcccaggtaaaagcagtttaactaactgttatggacacagcctgatagggtgctgcagaggcccactgcattgctactaaaaatctctgctgtacatggcac

SEQ ID NO: 399 - DNA, 384 bp, Pasivirus A3
  misc_feature 1..384: note = isolate CS15-4016, complete genome.3R
  source 1..384: mol_type = genomic DNA
cctacctcaagcagcagtagcagtagaaaagcagagaagcgctctcaaggtctgcaggttggagaatgagcgtaagaggaagaagggttgaagatatagagaggtgatagcaaggaggaggtgctcaggttaggagaccaatggtagcagggggtaagggtactttccctagttgagatagctatatatggctgggggaggtgctgggattgtttaaagattgtctaaatgtggcgcaagttctgttaatattttacctgacctttaccgtaaaaggaacaaggaagcatgtctttgcattacataacgcatgagtggttttaatctgttaccaattaacagagtacggtcagggttcgttgcggcttcctttgatacgtgggc

SEQ ID NO: 400 - DNA, 385 bp, Bovine viral diarrhea virus
  misc_feature 1..385: note = strain Oregon C24V, complete genome.1
  source 1..385: mol_type = genomic DNA
gtatacgagagttagataaaaatactcgtatacacattgggcaattaaaagtaataattaggcctagggaacgaatcctcctccgcgaaggccgaaaagaggctagccatgcccttagtaggactagcatagcgaggggggtagcaacagtggtgagttcgttggatggcttaagccctgagtacagggtagtcgtcagtggttcgacgccttaacatgaaggtctcgagatgccacgtggacgagggcacgcccaaagcacatcttagcccgagcgggggtcgctcggacgaaaacagtttgatcaactgctacgaatacagcctgatagggtgctgcagaggcccactgtattgctactaaaaatctctgctgtacatggcac

SEQ ID NO: 401 - DNA, 385 bp, Bovine viral diarrhea virus 1-SD1
  misc_feature 1..385: note = polyprotein gene, complete cds.1
  source 1..385: mol_type = genomic DNA
gtatacgagaactagataaaatactcgtatacatattggacaacagaaaataactattaggcctagggaatgaatccctctcagcgaaggccgaaaggaggctagccatgcccttagtaggactagcataatgaggggggtagcaacagtggtgagttcgttggatggcttaagccctgagtacagggtagtcgtcagtggttcgacgcctcggtataaaggtctcgagatgccacgtggacgagggcacgcccaaagcacatcttaacctgagcgggggtcgcccaggcaaaagcagatcgaccaatctgttacgaatacagcctgatagggtgctgcagaggcccactgtattgctactaaaaatctctgctgtacatggcac

SEQ ID NO: 402 - DNA, 385 bp, Bovine viral diarrhea virus 2
  misc_feature 1..385: note = strain HLJ-10, complete genome.1
  source 1..385: mol_type = genomic DNA
gtatacgaaattagctaaagtactcgtatacggattggacgttggcaaacattgaattgacaaggtagggaattttcccctcagcgaaggccgaaaagaggctagccatgcccttagtaggactagctaaaagaggggactagcggtagcagtgagttcattggatggccgaatccctgagtacagggaagtcgtcaatggttcgacactccgtcagtcgaggagtctcgagatgccatgtggacgagggcttgcccacggcacatcttaacccatgtgggggttgcatgggtgaaagcaccattctaggtgttatggacacagcctgatagggtgtagcagagacctgctattctgctagtaaaaactctgctgtacatggcac

SEQ ID NO: 403 - DNA, 385 bp, Atypical porcine pestivirus 1
  misc_feature 1..385: note = isolate AH-GL-2017.04, complete1
  source 1..385: mol_type = genomic DNA
atatggggcataatgcatagattggctgcattatgtgtataacatcccaaattgccataggctctgtggtgagtgggggaaaggggttaaccaggcctctagtaccacaggcaccatttaacagggcaactcaaacctgagagagaggtaccgaactcttaagcctcgagtacggggcagacgtcaccgagtagtacacccaacgaccaccacatttaggtgtagggtctactgaggctcgggtggacgtgggcatgcccaaagagaaaacggtgggggacctgggggtcgggtccgccatgcccctcaatggggtagaccttactgcttgatagagtgccggcggatgcctcaggtaagagtataaaatccgttgtttattaac

SEQ ID NO: 404 - DNA, 385 bp, Bovine viral diarrhea virus 2
  misc_feature 1..385: note = clone BV 65 polyprotein gene, partial1
  source 1..385: mol_type = genomic DNA
gtatacgagattagctaaagtactcgtatacggattggacgtcgacaaactttgaattggcaacacagggaaccttcccctcggcgaaggccgaaaagaggctagccatgcccttagtaggactagacaaaggaggggactagtggtagcagtgagtccattggatggccgaacccctgagtacaggggagtcgtcaatggttcgacactcctttagtcgaggagtctcgagatgctatgtggacgagggcatgcccacggcacatcttaacccacgcgggggttgcgtgggtgaaagcgccattcgtggcgtcatggacacagcctgatagggtgtagcagagacctgctactccgctagtaaaaactctgctgtacatggcac

SEQ ID NO: 405 - DNA, 386 bp, Bovine viral diarrhea virus 2
  misc_feature 1..386: note = genomic RNA, complete genome, strain:1
  source 1..386: mol_type = genomic DNA
gtatacgagattagctaaagtactcgtatacagattggatgttgacaaaatattgaattgacaaggtagggaattttcccctcagcgaaggccgaaaagaggctagccatgcccttagtaggactagcaaaaggaggggactagcggtagcagtgagttcattggatggcctaatccctgagtacagggaagtcgtcaatggttcgacactccatcagttgcggagtctcgagatgccatgtggacgagggcatgcccaaggcacatcttaacctatgcgggggttgcataggcgaaagcaccattcgtggtgttatggacacagcctgatagggtgtagcagagacctgctattccgctagtaaaaactctgctgtacatggcac

SEQ ID NO: 406 - DNA, 386 bp, Bovine viral diarrhea virus 1
  misc_feature 1..386: note = gene for polyprotein, complete cds,1
  source 1..386: mol_type = genomic DNA
gtgtatacgagatttagaaaaagctcttgtatacatattgggcaatctaaacaacaatcaggcctagggaattaatcctcctcggcgaaggccgaaaagaggctagccatgcccttagtaggactagcataacgaggggggtagcaacagtggtgagttcgttggatggcttaagccctgagtacagggtagtcgtcagtggttcgacgcctcggaaatagaggtctcgatatgccacgtggacgagggcacgcccaaagcacatcttaacctgagcggggggtcgctcaggtgaaagcggttcaaccaaccgttacggatacagcctgatagggcgctgcagaggcccactgttttgctactaaaaatctctgcttacatggcac

SEQ ID NO: 407 - DNA, 386 bp, Bovine viral diarrhea virus 1
  misc_feature 1..386: note = strain Singer Arg, complete genome.1
  source 1..386: mol_type = genomic DNA
gtatacgagaattattcgcccttctcgtatacgtattgggcaattaaaataataattaggcctagggaacaaaagtccccctcagcgaaggccgaaaagaggctagccatgcccttagtaggactagcataaagaggggggtagcagcagtggtgagttcgttggatggcttaagccctgagtacagggtagtcgtcagtggttcgacgccttggaataaaggtctcgagatgccacgtggacgagggcatgcccaaagcacatcttaacctgagcgggggtcgcccaggtaaaagcagttctaaccgactgttacgaatacagcctgatagggtgctgcagaggcccactgttctgctactaaaaatctctgctgtacatggcac

SEQ ID NO: 408 - DNA, 386 bp, Bovine viral diarrhea virus 2
  misc_feature 1..386: note = strain CN10.2015.821, complete1
  source 1..386: mol_type = genomic DNA
gtatacgagtactttagctaacctcgtatacagattggatgttgacaaacattgaattggcaaagtagggaacctttcccctcagcgaaggccgaaaagaggctagccatgcccttagtaggactagcaaaaggaggggactagcggtagcagtgagttcattggatggccgaatccctgagtacagggaagtcgtcaatggttcaacactccactaatcgaggagtcttgagatgccatgtggacgagggcatgcccacggcacatcttaacctatgcgggggttgcatgggtgaaagcaccatttgtggtgttatggacacagcctgatagggtgtagcagagacctgctattccgctagtaaaaactctgctgtacatggcac

SEQ ID NO: 409 - DNA, 386 bp, Classical swine fever virus
  misc_feature 1..386: note = isolate IVRI-CSF-BS, complete genome.1
  source 1..386: mol_type = genomic DNA
tttgcccgattgtgcatacgaggttagttcattctcgtatgcacaatcgggcaaatggaaacttcaatttggttcagggcctctctccagcgacggccgaactgggctagccatgcccatagtaggactagcaaatggagggactagccgtagtggcgagctccctgggtggtctaagtcctgagtacaggacagtcgtcagtagttcgacgtgagcagaagctcacctcgagatgctatgtggacgagggcgtgcccaagacacaccttaactctagcgggggtcgctagggtgaaatcacaccatgtgatgggagtacgacctgatagggtgctgcagaggcccactattaggctagtataaaaatctctgctgtacatggcac

SEQ ID NO: 410 - DNA, 386 bp, Bovine viral diarrhea virus type 1b
  misc_feature 1..386: note = strain HP-KY-RK13, complete1
  source 1..386: mol_type = genomic DNA
gtatacgaggttaggcaagttctcgtatacatattggacactctaaaaaaaaataattaggtctaggggacaaaaatcctccttagcgaaggccgaaaagaggctagccatgcccttagtaggactagcaaaataaggggggtagcaacagtggtgagttcgttggatggctgaagccctgagtacagggtagtcgtcagtggttcgacgctttgaagaacaagcctcgagatgccacgtggacgagggcatgcccacagcacatcttaatctggacgggggtcgttcaggtgaaaacggtttaaccaaccgctacgaatacagcctgatagggtgctgcagaggcccactgtattgctactaaaaatctctgctgttcatggcac

SEQ ID NO: 411 - DNA, 386 bp, Bovine viral diarrhea virus 1
  misc_feature 1..386: note = genomic RNA, complete genome, strain:1
  source 1..386: mol_type = genomic DNA
gtatacgagaagatttagctaaaaactctcgtatacaaattgggcattccaaacaacaattaggtctagggaagaatcctcctcagcgaaggccgaaaagaggctagccatgcccttagtaggactagcaaattggggagggtagcagcagtggtgagttcgttggatggctgaagccctgagtacagggtagtcgtcagtggttcgacacctcaaggttgaggtctcgagatgccacgtggacgagggcatgcccacagcacatcctagtctgggcaggggtcgctcagatgaaagcggttgagtcaaccgttacggacacagcctgatagggtgctgcagaggcccactgtgttgctactaaaaatctctgctgtacatggcac

SEQ ID NO: 412 - DNA, 386 bp, Porcine enterovirus 8
  misc_feature 1..386: note = isolate Po 5116 polyprotein gene, partial1
  source 1..386: mol_type = genomic DNA
ccttccaaatcggatggactactggacttgaaactatggaaagtaaattggtgagattttggatacacttgaacggtagtagcgtggcgagctatggaaaaatcgcaattgtcgatagccatgtcagtgacgcgcttcggcgtgctcctttggtgattcggcgactggttacaggagagtagacagtgagctatgggcaaacccctacagtatttcttagggggaatgtgcaattgagacttgacgagcttctctcagagatgtggcgcatgctcttggcattaccatagtgagcttccaggttgggaaacctggactgggtctatactacctgatagggtcgcggctggccgcctgtaactagtatagtcagttgaaaccccccc

SEQ ID NO: 413 - DNA, 387 bp, GB virus C
  misc_feature 1..387: note = gene for polyprotein, complete cds,isolate: HGV-GA128.1
  source 1..387: mol_type = genomic DNA
tagccactataggtgggtcttaaggggaggttatggtccctctcgcgcttatagagagaaagcgcacggtccacaggtgttggccctaccggtgtaataagggcccggcgctaggcacgccgttaaaccgagaccgttacccccctgagcaaacgacgcccacgtacggcctacgtcgcccttcaatgtctctcttgaccaataggcgatgccggcgagttgacaaaggccagtgggggccgggcggcaggggaaggacccctgtcgctgctcttcccgggggggcgggaaatgcatggggccacccagctccgcggcggcctacagccggggtagcccaagagccttcgggtgagggcgggtggcatttttcttccttaactgatc

SEQ ID NO: 414 - DNA, 387 bp, Bovine viral diarrhea virus 1
  misc_feature 1..387: note = gene for polyprotein, complete cds,1
  source 1..387: mol_type = genomic DNA
cgtatacgagagttagacaaaatgctcgtatacacattgggcaaactaaataataataattgggcctagggtactaatccccctctgcgaaggccgaagagaggctagccatgcccatagtaggactagcataatgaggggggtagcaacagtggtgagttcgttggatggcttaagccctgagtacagggtagtcgtcagtggttcgacgccttagtataaaggtctcgagatgccacgtggacgagggcacgcccaaagcacatcttaacctgagcgggggtcgctcaggcgaaagcagtttaaccaactgttacgaatacagcctgatagggtgctgcagaggcccactgtactgctactaaaaatctctgctgtacatggcac

SEQ ID NO: 415 - DNA, 387 bp, Bovine viral diarrhea virus 2
  misc_feature 1..387: note = genomic RNA, complete genome, strain:1
  source 1..387: mol_type = genomic DNA
gtatacgaggttagttaaagttatcgtatacagattggacgtttacaaaacagtgaattggcaaaatagggaaccttcccctcagcgaaggccgaaaagaggctagccatgcccttagtaggactagcaaaaagaggggactagcggtagcagtgagttcattggatggccgaatccctgagtacagggaagtcgtcaatggttcgacgctctagcaattgcagagcctcgagatgccatgtggacgagggcatgcccacggcacaccttaacctatgcgggggttgcgtaggtgaaagcaccattttgtggtgttatgaacacagcctgatagggcgtagcagagacctgctactccgctagtaaaaactctgctgtacatggcac

SEQ ID NO: 416 - DNA, 387 bp, Bovine viral diarrhea virus 2
  misc_feature 1..387: note = isolate JZ05-1, complete genome.1
  source 1..387: mol_type = genomic DNA
gtatacgagattagctaaagtactcgtatacggattggacgttgacaaaatattgaattgaaaatgtagggaatcttcccctcagcgaaggccgaaaagaggctaaccacgcccttagtaggactagcaaaaggaggggactagcggtagcagtgagttcattggatggccgaacccctgagtacaggggagtcgtcaatggttcgacactccttcagttaaggagtctcgagatgccatgtggacgagggcatgcccacggcacatcttaacccatgcgggggctgcatgggtgaaagcgccattcgtggcgttatggacacagcctgatagggtgtagcagagacctgctatcccgctagtaaaaaactctgctgtacatggcgc

SEQ ID NO: 417 - DNA, 387 bp, Bovine viral diarrhea virus 1
  misc_feature 1..387: note = genomic RNA, complete genome, strain:1
  source 1..387: mol_type = genomic DNA
cgtatacgaggatttaggaaaaactctcgtatacagattgggcactcaaaaataacaattaggcctagggatcaaatcctcctcagcgaaggccgaaaagaggctagccatgcccttagtaggactagcaaattgaggggggtagcaacagtggtgagttcgttggatggctgaagccctgagtacagggtagtcgtcagtggttcgacacctacggcgtgtaggtctcgagatgccacgtggacgagggcatgcccacagcacatcttagcctgggcgggggtcgctcaggtgaaagcggtttaaccaactgctacgaatacagcctgatagggtgctgcaggggcccactggactgctactaaaaatctctgctgtacatggcac

SEQ ID NO: 418 - DNA, 387 bp, California sea lion sapelovirus 1
  misc_feature 1..387: note = isolate 1162 polyprotein gene,1
  source 1..387: mol_type = genomic DNA
ccccaatccactaaccttttccccctcctttaatcggactgatatttgtgttttgacgcttgttttccttttgcggatgtcggttgcgtggctggccaccacgggaaaaatggcaattgtggattgatgggtctacacattctcaccgaacgccttgtgttattaggggagtctaagtgtccatcatgaagcgagtgtactggtaagagaggagacctagctaggggcaatgggacggcgttgcctatccctaattagccatcgagatttctctggcgattacccagtgatggtcgggttgtcggggggcaacctgcttagctccttactgcctgatagggtcgcggctggccgtatcagtacactatagtcagttgatgttcgaat

SEQ ID NO: 419 - DNA, 387 bp, Norway rat rosavirus
  misc_feature 1..387: note = isolate NrRV/NYC-A15 polyprotein gene, partial1
  source 1..387: mol_type = genomic DNA
taaggtagcagatgatttagtgaaaagctttggattgtttggagttttgtagcgatgctagtagtgtgtgtggacctccccacgtggtaacacgtgccccacaggccaaaagccaaggtgttgaaagcacccctactagtcccagaccctcccatctgggaactcctctcatgaaaaaccctagtaactaatgatttggcttctcatcaacctctctagtcaaggctgaaggatgcccggaaggtacccgcaggtaacgataagctcactgtggatctgatccggggctctggtgcgaccgactgtccggcgtagcagggttaaaaaacgtctaggcccttctaccccaagggattggggtttccccaatcattttagaagttcact

SEQ ID NO: 420 - DNA, 388 bp, GB virus C
  misc_feature 1..388: note = gene for polyprotein, complete cds, isolate: HGV-BL230.1
  source 1..388: mol_type = genomic DNA
tagccactattggtgggtcttaaggggtggtcaaggtccctctggcgcttgtggcgaaaaagcgcacggtccacaggtgttggccctaccggtgggaataagggcccgacatcaggctcgtcgttaaaccgagcccattatccccctgggcaaacgacgcccacgtacggtccacgtcgcccttcaatgtctctcttgaccaataggcgatgccggcgaattgacaaggaccaatgggggccgggcgtcaggaaatggactcctgccgctgcccttcccgggggagtgggaaatgcatggggccacccagctccgcggcggcctgcagccggggtagcccaagagccttcgggtgagggcgggtggcatttttcttcctgtaccgatc

SEQ ID NO: 421 - DNA, 388 bp, Bovine viral diarrhea virus genotype 2
  misc_feature 1..388: note = strain 1373 polyprotein1
  source 1..388: mol_type = genomic DNA
gtatacgagattagctaaagtactcgtatatggattggacgtcaacaaatttttaattggcaacgtagggaaccttcccctcagcgaaggccgaaaagaggctagccatgccctttagtaggactagcaaaagtagggggactagcggtagcagtgagttcgttggatggccgaacccctgagtacaggggagtcgtcaatggttcgacactccattagtcgaggagtctcgagatgccatgtggacgagggcatgcccacggcacatcttaacccatgcgggggttgcatgggtgaaagcgctaatcgtggcgttatggacacagcctgatagggtgtagcagagacctgctattccgctagtaaaaaactctgctgtacatggcac

SEQ ID NO: 422 - DNA, 388 bp, Bovine viral diarrhea virus 1
  misc_feature 1..388: note = isolate SD0803, complete genome.1
  source 1..388: mol_type = genomic DNA
acatggggtatacgagatttagatcaatctctcgtatacacattgggctatcaaaaaagaaaattaggcctagggaacaatcctcctcagcgaaggccgaaaagaggctagccatgcccttagtaggactagcaaattggggggggtagcaacagtggtgagcttgttggatggctgaagccctgagtacagggtagtcgtcagtggttcgacgccagagatgaggcctcgagatgccacgtggacgagggcatgcccacagcacatcttaatctgggcgggggtcgctcagacgaaagcggttgtaccaaccgttacaagcacagcctgatagggtgctgcagaggcccactgcactgctactaaaaatctctgctgtacatggcac

SEQ ID NO: 423 - DNA, 389 bp, Hepatitis G virus
  misc_feature 1..389: note = gene for polyprotein, complete cds.1
  source 1..389: mol_type = genomic DNA
tagccactataggtgggtcttaagggtgggtcaaggcacctcttactcctgcggcgggacagcgcacggtccacaggtgatggccctaccggtgtgaataagggcccgacgtcaggctcgtcgttaaaccgagcccgttacccacctgggcaaacgacgcccacgtacggtccacgtcgccctacaatgtctctcttgaccaataggctatgccggcgagttgacaaggaccagtgggggccgggcgttatggggaaagaccccctgcgctgcccttcccggtggggcgggaaatgcatggggccacccagctccgcgggggcctgcacccggggtagcccaagaaccttccggtgaaggcgggtggcatttttctttcctgactaatc

SEQ ID NO: 424 - DNA, 390 bp, Bovine viral diarrhea virus 1
  misc_feature 1..390: note = isolate SD-15, complete genome.1
  source 1..390: mol_type = genomic DNA
acatggggtatacgagatttagctaaaactctcgtatacatattggacattccaaacaataattaggcatagggaaaatcctcctcagcgaaggccgaaaagaggctagccatgcccttagtaggactagcaaattgaggggggtagcagcagtggcgagttcattggatggctgaagccctgagtacagggtagtcgtcagtggttcgacgccttaggatctaaggcctcgagatgccacgtggacgagggcacgcccacagcacatcctaatccgggcgggggtcgctcggatgaaagcggttgtaataaaccgttatggacacggcctgatagggcgctgcaggggcccactgtgttgctactaaaaatctctgctgtacatggcac

SEQ ID NO: 425 - DNA, 391 bp, Bovine viral diarrhea virus 3
  misc_feature 1..391: note = isolate HN1507, complete genome.1
  source 1..391: mol_type = genomic DNA
gtatacgcccggttagctcatgtcggcgtatatgattgggtatcccaaattaatgatttggtttagggactaaattcccctagcgaaggccgaaataggttaaccataccttcagtaggacgagcataatgggggactagtggtagcagtgagctccttggattaccgaagccccgggtacagggtcgtcgtcaataaggttcgacgcatcaacgagtggatgcctcgagatgccatgtggacgagggcgtgcccacggtatgtcttaacccaagcgggggccgcttgggtgaaagatggtcgattatgtggccctttgggagtacagcctgatagggtgttgcagagacctgctatatcactagtataaaaactctgctgtacatggcac

SEQ ID NO: 426 - DNA, 391 bp, Bovine viral diarrhea virus 3
  misc_feature 1..391: note = isolate LV168-36/16RN, complete1
  source 1..391: mol_type = genomic DNA
gttgggtgtgtttgggccgggtagctcatgtcggcgtatatgattgggtatcccaaattaataatttggtttagggactaactcccctagcgaaggccgaaatgggttaaccataccttcagtaggacgagcgtaatgggggactagtggtagcagtgagctccttggattaccgaagccccgagtacggggtagtcgtcaatggttcgacgcatcaaggaatgcctcgagatgccatgtggacgagggcgtgcccacggtgaatcttaactcaagcgggggccgcttgggtgaaagagggtcattatatggctctttgggagtacagcctgatagggtgttgcagagacctgctacattactagtataaaaactctgctgtacatggcac

SEQ ID NO: 427 - DNA, 391 bp, Bat pestivirus
  misc_feature 1..391: note = BtSk-PestV-1/GX2017 polyprotein gene, complete cds.1
  source 1..391: mol_type = genomic DNA
tgcataaccctgattgtaattggctgggttatgcatgtgagaacgcaaaattttttaaattatgttaccggctttgaggttggcggaccagagttaaccaggctctcagtacgacaccctcctaaacaaagtcggaactgctgactaggagactatgcactcagcactaagcccggagtaccgggcattctactacagctctgcactcaacgacggctcttgaggcctagagtccaggatggctgtgtaagtagaggacatgtccaagtgtgaggtgtaatccggtgggggttgccggatttgctactggtagaccagtagtcatagactgcctgatagggtcccggcggacggcctaggcttagcagtataatagtccgttgtattcaac

SEQ ID NO: 428 - DNA, 392 bp, Picornaviridae sp.
  misc_feature 1..392: note = isolate zftegr01hep3nc genomic sequence.1
  source 1..392: mol_type = genomic DNA
taactccttggctagcaaggagctgtggccgccaaaagtggtgatacactgactaatactctacttgggtacagtgagttggtccctttggaaagtcacctgatgatctttcaattggggtaggctacgggtgaaaccccttctccctccatttgttatacaaatgtggagtgacaacgctaaggccctggatagaaatgagttctttatggacaagaatttctcaacagggggagcaccggtgtatgtctttgaatgcgtcttgtgactgaaaaaggagcaggcttattgtgttcacatagagttaaggtgtaccctatgagtttagggctactcaggggcatgttaggttttaaaatgctcatttattgttttctatgagttgagagaag

SEQ ID NO: 429 - DNA, 393 bp, Pasivirus A3
  misc_feature 1..393: note = isolate CS15-4016, complete genome.2R
  source 1..393: mol_type = genomic DNA
agcgaagcgatcggtgtctcgggcactgtgacgataagcaaactcagcatcagggacgaggctggaggaagaacctacttatctaagcgccccgtctgagcagcagcgtcgaaaatcaacttcgtcttcgtcgtgaactgcgacgactggttgtgcgaacggcaacgatcctagtcgtagtgttggttctcgcccgtcgagacgcgcccccgcggactcggcgcctgctgacgcgtcgtctccgacgcgacctagcagcacccaatcctaagagtgtgcgaagggtcagagctccgcgtcggagcccaactccccgcataccgtgacgggagatacgtcgtggtctcatggcgccccaaccgcggttgtcgctgggtgagatcaaaatggaca

SEQ ID NO: 430 - DNA, 393 bp, Kunsagivirus B
  misc_feature 1..393: note = clone Bat/CAM/KuV-P2/2013 polyprotein gene, complete1
  source 1..393: mol_type = genomic DNA
gattttctggttatcccttttggacttggtaggggcccacgtgcccacccacctctgtgtgtgttgatttctaatcgatgcctggcagtggcggccacctctccttactggtaaacctccggtgagtgaagttgtcaagctacaggtaccgtgcaggatgaaatgcgcacatgtgaacaaactaggagtcatacaccgggtcaaactctggaaacggagtccgggactctgaccttggttgggtgagctcgaggcatcacattgatggacgcgattcgctatccttccctagtaggaccttgtggtgtacccctggttgggaatccagggctggtcgggtgcagggtgacagcctgttctccacctcaaccattgtaggagaaatcaacccct

SEQ ID NO: 431 - DNA, 395 bp, Kobuvirus sp.
  misc_feature 1..395: note = strain 16806x8 polyprotein gene, partial cds.1
  source 1..395: mol_type = genomic DNA
accacgtctttcctccagatcgacagtcctgctgtgtgaattcccattgcgcacttagtggtgtcactgtgcgctcccaatctcggccgcggagtgctgttccccaagccaaacccctggcccttcactatgtgcctggcaagcatatctgagaaggtgttccgctgtggctgccagcctggtaacaggtgccccagtgtgcgtaaccttcttccgtcttcggacggtagtgattggttaagatttggtgtaaggttcatgtgccaacgccctgtgcgggatgaaacctctactgccctaggaatgccaggcaggtaccccacccccgggtgggatctgagcctgggctaattgtctacgggtagtttcatttccaattcctttatgtcggagtc

SEQ ID NO: 432 - DNA, 396 bp, Border disease virus
  misc_feature 1..396: note = isolate TO_121_04 genome assembly, complete1
  source 1..396: mol_type = genomic DNA
ctctgcagatatcaggggtgtatacgaaagtagctcaagttcgtatacaaattgactatgaccaaaatagtattcggcgtagggacaccctccagcgaaggccgaacggggttaaccatacccttagtaggactagcagacggagggactagccatcatggtgagcttcctgaggggtctaagtcctgagtacaggacagtcgtcaatagttcgacacgtgcgagtcgcacgtctcgagatgctatgtggacgagggcatgcccaagacactttctctagcctgggcgggggtcgcccaggtgaaagcacctgataggtgttgggagtacagcctgatagggtgctgcagaggcccatgcataggctagtataaaaatctctgctgtacatggcac

SEQ ID NO: 433 - DNA, 396 bp, Porcine teschovirus 15
  misc_feature 1..396: note = JPN/Ishi-Ka1/2015/G new genomic RNA, nearly1
  source 1..396: mol_type = genomic DNA
gataagtgatagtccttggaagctaggtacttgttacgctagttttggattatcttgtgcccaacaattgtctttggacacttgttgtgtttaaacacagaaatctttgattattggttgtgaatttaatggattcttcccttgaaagacttgccttggcgcgggctagagcgcaattgtcaccaggtattgcaccaacggtggcgacagggtacagaagagcaagtactcctgactgggcaatgggactgcattgcatatccctaggcatctattgagatttctctggagcccaccagcatggagttcctgtatgggaatgcaggactggacttgtgctgcctgacagggtcgcggctggccgtctgtactttgtatagtcagttgaaactcatt

SEQ ID NO: 434 - DNA, 399 bp, Porcine pestivirus
  misc_feature 1..399: note = isolate Bungowannah, complete genome.1
  source 1..399: mol_type = genomic DNA
tacgcggggtataacgacagtagttcaagtgtcgttatgcatcattggccataacaaattatctaatttggaatagggacctgcgacctgtacgaaggccgagcgtcggtagccattccgactagtaggactagtacaaataggtcaactggttgagcaggtgagtgtgctgcagcggctaagcggtgagtacaccgtattcgtcaacaggtgctactggaaaggatcacccactagcgatgcctgtgtggacgaggacatgtccaagccaatgttatcagtagcgggggtcgttactgagaaagctgcccagaatgggtagttgcacatacagtctgataggatgccggcggatgccctgtattttgaccagtataaatattatccgttgtaaagcat

SEQ ID NO: 435 - DNA, 399 bp, Pasivirus A
  misc_feature 1..399: note = isolate SPaV-A_GER_L00721_2014 genome assembly,1
  source 1..399: mol_type = genomic DNA
attttctggccgtgtagctgcttttgaccagtggctctgggttacttagccaaatcccccttccttcacccttttaaatttgatggtctgtgttgtttgttttgtcttgtctaaataatatataagatccttcccgccgatacagacctcgacagtctggtgtaggagggttggtgttattaatttgccccagaagagtgaccgtgacacatagaaaccatgagtacatgtgtatccgtggaggatcgcccgggactggattccatatcccattgccatcccaacaagcggagggtatacccactatgtgcgcgtttgcagtgggaatctgcaaatttagtcatactgcctgatagggtgtgggcctgcactctggggtactcaggctgttcatataat

SEQ ID NO: 436 - DNA, 400 bp, GB virus C
  misc_feature 1..400: note = gene for polyprotein, complete cds, isolate: G13HC.1
  source 1..400: mol_type = genomic DNA
ggtcatcttggtagccactataggtgggtcttaagggtgggtcaaggtccctctggcgcttgtggcgagaaagcgcacggtccacaggtgttggccctaccggtgtgaataagggcccgacgtcaggctcgtcgttaaaccgagcccatttcccacctgggcaaacgacgtccacgtacggtccacgtcgcccttcaatgtctctcttgaccaataggctttgccggcgagttgacaaggaccagtgggggccgggcagcaggggaaggacccctgttgtcgcccttcccggtggggatgggaaatgcatggggccacccagctccgcggcggcctgcagccggggtagcccaagaaccttcgggtgagggcgggtggcatttttcttcctataccgatc

SEQ ID NO: 437 - DNA, 401 bp, Human rhinovirus A
  misc_feature 1..401: note = strain HRV-A33_p1152_sR1114_2009 polyprotein1
  source 1..401: mol_type = genomic DNA
tttgatcgttatccgcaaaacaactacgcaaagcctagtatcatcttcaaagatatgtggttggtcgctccgctataaacccaatagcagacctggcagatgaggctagaaattccccactggcgacagtgttctagcctgcgtggctgcctgcgtaccctgcatgggtacgaagccatatattggacaaggtgtgaagagccccgtgtgcttgttttgagtcctccggcccctgaatgtggctaaccttaaccctgcagctggtgtgtgcaatccagcacatggccagtcgtaatgagtaattgcgggatgggaccaactactttgggtgtccgtgtttcctgttttacctttatatttgcttatggtgacaatatatatataacatatatattggcatc

SEQ ID NO: 438 - DNA, 402 bp, Human pegivirus
  misc_feature 1..402: note = isolate JD2B8C, complete genome.1
  source 1..402: mol_type = genomic DNA
tggtcaccttggtagccactataggtgggtcttaagagaaggttaagattcctcttgtgcctgcggcgagaccgcgcacggtccacaggtgttggccctaccggtgtgaataagggcccgacgtcaggctcgtcgttaaaccgagcccatttcccgcctgggcaaacgacgcccacgtacggtccacgtcgcccttttaatgtctctcttgaccaataggttcatccggcgagttgacaaggaccagtgggggccgggggtcacagggatggaccctgggccctgcccttcccggcggggtggggaaagcatggggccacccagctccgcggcggcctgcagccggggtagcccaagaaccttcgggtgagggcgggtggcatttttcttcctataccgatc

SEQ ID NO: 439 - DNA, 403 bp, Pasivirus A
  misc_feature 1..403: note = isolate SPaV-A_GER_L01061-K07_15-03_2015 genome1
  source 1..403: mol_type = genomic DNA
gcggctggatattctggccgtgcaactgcttttgaccagtggctctgggtaacttagccaaagtgtccttctccctttccctattatatgttttatggctttgtctggtcttgtttagtttatatataagatcctttccgccgatatagacctcgacagtctagtgtaggaggattggtgatattaatttgccccagaagagtgaccgtgacacatagaaaccatgagtacatgtgtatccgtggaggatcgcccgggactggattccatatcccattgccatcccaacaagcggagggtatacccactatgtgcacgtctgcagtgggagtctgcagatttagtcatactgcctgatagggtgtgggcctgcactctggggtactcaggctgtttatataat

SEQ ID NO: 440 - DNA, 404 bp, Pasivirus A
  misc_feature 1..404: note = isolate SPaV-A_GER_L00799-K11_14-01_2014 genome1
  source 1..404: mol_type = genomic DNA
gctggactttctggctgcgcaactgcttttaaccagtggctctgggttacttagccaaaaccccctttccccgtaccctagtttgtgtgtgtattattattttgttgttgttttgtaaatttttatataagatcctttccgccgatatagacctcgacagtctagtgtaggaggattggtgatattaatatgccccagaagagtgaccgtgacacatagaaaccatgagtacatgtgtatccgtggaggatcgcccgggactggattccatatcccattgccatcccaacaaacggagggtatacccgctatgtgcgcgtctacagtgggaatctgtagatttagtcatactgcctgatagggtgtgggcctgcactctggggtactcaggctgtttatataat

SEQ ID NO: 441 - DNA, 405 bp, Pacific black duck aalivirus
  misc_feature 1..405: note = isolate PBDAaV/4768nt/PBD05.18-AU-20181
  source 1..405: mol_type = genomic DNA
gctcttccctccacctcctttcaacgtctggcccacgaaacgggccacttttcaatcttaaataactatcccttttcttgttttgactttccggttaagaataatatggatcacacaattggattttctctaaggataatggataggatactttcgggataccactccctttctgtgctaacacaaattctaattctctacatctcttatatgctcgaagaggtggtgctgaaatattgcaagccattcttgcatgtaggtggtttagactcaagatgaatgttgtgttactcaagacaagtgtagctatcaccatggtattggtagcgtgaatcggattaccggtagtagcgcaatcttccgccatggtgctctagtgactagaggacaacgacatggcattgg

SEQ ID NO: 442 - DNA, 405 bp, Enterovirus sp.
  misc_feature 1..405: note = isolate CU106 polyprotein gene, partial cds.1
  source 1..405: mol_type = genomic DNA
caaaaacctcaaagatcgttatccgctcattaactacgcaaagcctagtaacatcttggatgtggtaaagttggtcgctccctgcattcccagcagtagacctggcagatgaggctggatgttccccactggcgacagtgatccagcctgcgtggctgcctgctcacccaaacgggtgagaagccttattactgacatggtgtgaagagccccgtgtgcttaatgtgagtcctccggcccctgaatgtggctaaccttaaccctgtagccgttgctcataatccaatgagtatgcggtcgtaatgcgcaagtacgggatgggaccaactactttgggtgtccgtgtttcttatttttctttatctgcgttatatggtgacaatttatagaatatagattgtcatc

SEQ ID NO: 443 - DNA, 405 bp, Rhinovirus B
  misc_feature 1..405: note = strain 20692_48_HRV-B polyprotein gene, partial cds.1
  source 1..405: mol_type = genomic DNA
tgtgcttgtaacgccatgggggaaatcacttgatcgaacgcctagtaccatcatgtctttgactaggcgttcgatcaagtgatttcccccatcactagtttggtcgatgaggctaggaattccccacgggcgaccgtgtcctagcctgcgtggcggccaacccagcagttgctgggacgccttttttagggacatggtgcgaagactcgcatgtgcttggttgtgactcctccggcccctgaatgcggctaaccttaaccctggagccttgtgctacaatccagtagcattaaggtcgtaatgagtaattccgggatgggaccgactactttgggtgtccgtgtttcctgttttttccaaatgttttcttatggtcacagcatatagcatatatatactgtgatc

SEQ ID NO: 444 - DNA, 407 bp, Picornaviridae sp.
  misc_feature 1..407: note = isolate gbt104pic2 genomic sequence.1
  source 1..407: mol_type = genomic DNA
ccactgtatatacatttaatcatttccccttctttttggtctctcttgtacataaggataaaacccctctaacaaagcctgttcttcagactattaagtatgacaatatattacattatctaactacacatgaaggccgtcgtgctttctcacgccttcccacctacttccatcttcacagacattgggtagaggcactttatcctgaaggactccagcccacatccactcatttatcttctgagactttccattgtaaatatctttgcggccattttcttcagacgtgtgagtggcatgcaaacgttcaagtccctccttttattttagttcgtaggcaacttatttataatattctttgcaaattgaatcttcttgatagtcttcctttcttcctttcagtggca

SEQ ID NO: 445 - DNA, 407 bp, Hepatovirus sp.
  misc_feature 1..407: note = isolate HepV-bat3206/Hipposideros_armiger/20111
  source 1..407: mol_type = genomic DNA
ggataccaatggaacgaccgctgcgcccggcggggttaacttgttgattagcaacaagctgtagtttctaaaagtcctgacaccataggtccacgtcccgacctttggcattttaacttcattttggtgaagtccattgatcttctaggaggagtaggctatgggtgaaactcctcatgctagtacctatattaggagatgcattgtgtaggtgaaggtttccggtagaggtgagttttacgacgcaacctctcaacggatgtgggcccatctcacacactagatgctttggatgaatccaatctgagggtgtcattgttagggatctggatactaggtgccctcccgagaggtcgtaggggtaatcaggggcatataggtttccacacattaaatgttattatgtt

SEQ ID NO: 446 - DNA, 410 bp, Bat picornavirus 1
  misc_feature 1..410: note = strain NC16A, complete genome.1
  source 1..410: mol_type = genomic DNA
gaaacccgtatacaccggaccttttctcccctccctctccacttacctttttcccctcttcggcatgaaacaaggattattcaagtggaaacgcgatttaatatgcggctggccaccgcggaataacggcaattgtgtatctgctggaagccaagcctgcctagccgatagcccttgaccgggtgtgtaggatagcccaggaaccagcaatacgcgacaggttatggtagagtagatacctagccaggggcaatgggactgcattgcatatccctaatgaaccattgagatttctctggtcattacccggtgatggttactagaggggggcctctagtactagatctatactgcctgatagggtcgcggctggccgaccatgacctgtatagtcagttgatttgagcaat

SEQ ID NO: 447 - DNA, 410 bp, Enterovirus sp.
  misc_feature 1..410: note = isolate CU42 polyprotein gene, partial cds.1
  source 1..410: mol_type = genomic DNA
ttgaagctgtagcgttcgttacccgcacacgtactgcgtgacggctagtagcatcttgcattttcctttaggtgtttcgctcattgtggttaccccaccacatagatcagggcaatggggctacacaatccccactggcgacagtggtgtagcccgcgtggtgccccgcccaggctttgcctgggacgccttaggaaagacagggtgtgaagaccttaatgcgctacgtgtgagtcctccggcccctgaatgcggctaatcctaaccccgtagccatggtgcgcaatccagcgcatgtgtggtcgtaacgagcaattacgggatggaaccgactactttgggtgtccgtgtttcactttttatttgaaattgtctcatggttacagatttgtgtatacagatttgtaatc

SEQ ID NO: 448 - DNA, 411 bp, GB virus C
  misc_feature 1..411: note = genomic RNA, complete genome, strain: F1029.1
  source 1..411: mol_type = genomic DNA
ccgacgcctatcttaagtgagacgtaatggccccgcgccgaactggcgaccggccaaaaggtggtggatgggtgatgacagggttggtaggtcgtaaatcccggtcatcctggtagccactataggtgggtcttaaagggaggctacggtccctcttgcgcttatggcgagaaagcgcacggtccacaggtgttggccctaccggtgtgaataagggcccggcgctaggcacgccgttaaaccgagcccgtcatccccctgggcaaacgacgcccatgtacggtccacgtcgcccttcaatgtctctcttgtaccaataggttttgccggcgttgttgacaaggaccagtgggggctgggcggtaggggaaggacccctgccgctgcccttcccggtggggtgggaaatgc

SEQ ID NO: 449 - DNA, 412 bp, Pasivirus A3
  misc_feature 1..412: note = complete genome.2
  source 1..412: mol_type = genomic DNA
ttagtcatactcaaggtgtaaatattcatttgatctttgtacagtttttataccatatttacattattataggttactggttgctacatcctggtcatagtcacatcatcatcataggtctaggtcacaattaggtttgtcagatactcaagacgacgtggaatctctcttgtcacctgaatcctatcctttactgtcctatcctatcctatactgcctttgttttgttatccaaagtcagcaagtgccatctttctccaagtgcaatgtcatctgcctgtaatcccaaaagctggtgtcatccttgtcagtagaacagtcaaactaagcctttgaaaagaaagcctcacacggaaaccttgtatgtatacctcgtgaaaaagctttgaactgccacgacattgacgcctgc

SEQ ID NO: 450 - DNA, 413 bp, Sapelovirus A
  misc_feature 1..413: note = strain ISU-SHIC polyprotein mRNA, complete cds.1
  source 1..413: mol_type = genomic DNA
gttgtatcccccataccttaccctcccttccacacaggacggacaaatggacttggacttacggcaagaacatatggtatggcttttggatacggatgaatggcagtagcgtggcgagctatggaaaaatcgcaattgtcgatagccatgttagtgacgcgctccggcgtgctcctttggtgattcggcgactggttacaggagagtaggcagtgaactatgggcaaacctctgcagtattactcagggggaatgtgcaattgagacttgacgagcgtctccttggagatgtggcgcatgctcttggcattaccatagtgagcttccaggttgggaaacctggactaggcctatactacctgatagggtcgcggctggccgcctgtaactagtatagtcagttgaaacccccc

SEQ ID NO: 451 - DNA, 414 bp, Avian encephalomyelitis virus
  misc_feature 1..414: note = isolate 204C, complete genome.1
  source 1..414: mol_type = genomic DNA
ggagcgcacggtatatatgtgctcccgcatggcaggggcgtgctaccttgccccttgacgcatggtatgcgtcaaactgattttggatttgtcttaaggattagtcgctttgtgccgaaaatctctttgcgtttcacagaaccatcctaaccatggatgtagtatgggaggcgtgtataggggtgagtaggatctctcatagagggataggcatgccattcaaatccggggagtactccggctctgacattgggacatttgatttaaccggacctggttcagtatccgggttgtcctgtattgtcacggtgtatccgtcttggcatgttgaaaaggtatctttgggtaatcccttcctactgcctgatagggtggcgtgcccggccatgagagattaagggtagcattttaacc

SEQ ID NO: 452 - DNA, 415 bp, Teschovirus A
  misc_feature 1..415: note = strain CHN-NP2-2016, complete genome.1
  source 1..415: mol_type = genomic DNA
cccctttgaacttgtaactgataagtgatagtccttggaagctaggcacttgctgcgctagttttggattatcttgtgcccaacactagtcttcggactcttgttgtgtttaaacacagaaattttgttatctggttatgaattcattggatcaatccttctgaaagacctgctctggcgcgagcgaaagcgcaattgtcaccaggtattgcaccaatggtggcgacagggtacagaagagcaagtactcctgactgggcaatgggactgcgttgcatatccctaggcacctattgagattcctctggggcccaccagcatggagttcctgtatgggaatgcaggactggacttgtgctgcctgacagggtcgcggctggccgtctgtactttgtatagtcagttgaaactcacc

SEQ ID NO: 453 - DNA, 415 bp, Porcine teschovirus
  misc_feature 1..415: note = strain HuN-1, complete genome.1
  source 1..415: mol_type = genomic DNA
ctccctttgaatttgtaactgataagtgatgatccttggaagctaggtacttgttacgctagttttggattgtcttgtgcccaacactagtcttcggactcttgttgtgtttaaacacagaaatctgattgtctggttgtggatttattggattaaccctttgaaagacctgctctggcgcgagctaaagcgcaattgtcaccgggtactgcaccaatggtggcgacagggtacagaagagcaagtactcctgactgggcaatgggactgcgttgcatatccctaggcacctattgagatttctctggggcccaccagcatggagttcctgtatgggaatgcaggactggacttgtgctgcctgacagggtcgcggctggccgtctgtactttgtatagtcagttgaaactcatc

SEQ ID NO: 454 - DNA, 415 bp, Human rhinovirus B97
  misc_feature 1..415: note = strain SCH-105 polyprotein gene, complete cds.1
  source 1..415: mol_type = genomic DNA
ggttgtacccacgaccaaaagcctttaaccgttacccgccaatcaactacgtaacggctagtaccatcatgtttttaatctggtgttcgatcaggtggtatcccccactagtctggtcgatgaggctaggaattccccacgggtaaccgtgtcctagcctgcgtggcggccagcccagcttatgctgggacgcctttttaaagacatggtgtgaagacccgcatgtgcttgattgtgagtcctccggcccctgaatgcggctaaccctaaccccggagcccagcaacataatccaatgttgtttgggtcgtaatgagtaattctgggatgggaccgactactttgggtgtccgtgtttccttttattcttatattgtcttatggtcacagcatatatatcatatatactgtgatc

SEQ ID NO: 455 - DNA, 416 bp, Porcine teschovirus 15
  misc_feature 1..416: note = JPN/Ishi-Ta1/2016/G new genomic RNA, nearly1
  source 1..416: mol_type = genomic DNA
cttccttttaattcgtaactgataagtgatagtccttggaagctaggtatttgttacgctagttttggattatcttgtgcccaacatttgttttcgaacatatgttgtgtttaaacacagaaatctagtttctttggttatgagtttaatggaatatccttttgaaagacttgccttggcgcgggctagagcgcaattgtcaccaggtattgcaccaatggtggcgacagggtacagaagagcaagtactcctgactgggtaatgggactgcattgcatatccctaggcatctattgagatttctctggagcccaccagcatggagttcctgtatgggaatgcaggactggacttgtgctgcctgacagggtcgcggctggccgtctgtactttgtatagtcagttgaaactcatt

SEQ ID NO: 456 - DNA, 419 bp, Bat picornavirus 2
  misc_feature 1..419: note = strain MH9F, complete genome.1
  source 1..419: mol_type = genomic DNA
gggttttacgaaacccgtatacaccagaccttttctcccctccccctccacctaccttttccccctctttggaccgaaacaaggacacgtaagtggaaacgcgattttatatgtggttggccaccacggaataacggcaattgtctacatgtgggaagtgcaacctccctagccgataacccctgaccgggtgtgtaggataggaaaggtgcccactgtgggcgacaggttatggtagagtggatacctagccaggggcaatgggactgctttgcatatccctaatgaagtattgagatttctctgctcattacccggtgatggttgtgtggggggggccccatacactagatccatactgcctgatagggtcgcggctggccgaccataacctgtatagtcagttgaattcagccaag

SEQ ID NO: 457 - DNA, 419 bp, Sapelovirus-like porcine picornavirus Japan
  misc_feature 1..419: note = Pig/Isi-Im1/JPN/20151
  source 1..419: mol_type = genomic DNA
tattacggtaccggtatatcttagtccatttcccccttccctctccacttaccttttccccctcttgtgacggatacttttggttttgactgtatgctagaaaaccctctgatatctggatggcctccagggaataaaggcaattgtggatcgctggtattgggctctgtcggggaaagtaggttaaccataccactagtaccagtctgagcaccccagtgtgaagcgacagtacatagtagagttgggagtgaggcttgggaaatgggactgcattgcatatccctagtgacctattgagatttctctgggcaccaccttgctgagcttaccaggggggggcccctggtactggcccattactgcctgatagggtcgcggctggccgactgtgtattgtatagtcagttgaatttaac

SEQ ID NO: 458 - DNA, 419 bp, Porcine enterovirus 8
  misc_feature 1..419: note = isolate 16-S-X polyprotein gene, partial cds.1
  source 1..419: mol_type = genomic DNA
cttaaggtggttgtatcccctaccccatcctcccctccaaacaggacggacaatcggacctgacatctggcgagaagaattggaatggtatttggacacacttgaatggcagtagcgtggcgagctatggaaaaatcgcaattgtcgatagccatgttagtgacgcgcttcggcgtgctcctttggtgattcggcgactggttacaggagagtagacagtgagctatgggcaaacccctacagtgttacttagggggaatgtgcaattgagacttgacgagcgtctcgtagagatgtggcgcatgctcttggcattaccatagtgagcttccaggttgggaaacctggactgggtctatactacctgatagggtcgcggctggccgcctgtaactagtatagtcagttgaaaccccccc

SEQ ID NO: 459 - DNA, 420 bp, GB virus C
  misc_feature 1..420: note = isolate KY117, complete genome.1
  source 1..420: mol_type = genomic DNA
gttggtaggtcgtaaatcccggtcatcttggtagccactataggtgggtcttaagggtgggtcaaggttcctcttacgcctgtggcgggacagcgcacggtccacaggtgttggccctaccggtgtgaataagggcccgacgtcgggctcgtcgttaaaccgagaccattacccgcctgggcaaacgacgcccacgtacggtccacgtcgcccttcaatgtctctcttgaccaataggctttgccggcgagttgacaaggaccagtgggggccgggtgcagggggaaggaccccctgtactgcccattccggcggggtgggaaatgcatggggccacccagctccgcggcggcctgcagccggggtagcccaagaatccctcgggtgagggcgggtggcatttttctttctgtaccaatc

SEQ ID NO: 460 - DNA, 420 bp, Bovine kobuvirus
  misc_feature 1..420: note = polyprotein gene, complete cds.1
  source 1..420: mol_type = genomic DNA
cccggtggtttgatggtagctctcttatggttctgccctggcaaggctatagagtactgtgatccgctgcggacgccatcctggtaacaggacccccagtgtgcgcaacagtatgctcacggttcgccgtgtccaccatgactggaacactgctttcatgaaacagtgtgtgtccaatccctgtgatcagtatcaaccacaccacctaggaatgctaggaaggtaccccaattcgttgggatctgatcctaggctaattgtctacggtggtgctcctttttattttcacttcacttctctggtcacaactgcttgattctgtgtttgctgcttcctccgctctcactgccattctcaagtgttcacactgtccaagttcctttggttgatctcttccacttgccactgtcaactcttgtc

SEQ ID NO: 461 - DNA, 421 bp, Porcine teschovirus
  misc_feature 1..421: note = strain wild boar/WB2C-TV/2011/HUN, complete1
  source 1..421: mol_type = genomic DNA
ccccccctcctttgaatttgtaactggtaagtgataatccttggaagctaggtacttgttacgctagttttggattgtcttgtgcccaacattggtcttcggacttctgttgtgtttaaacacagaaattttaacacctgactatgaattcaatggaccaccccttttgaaagacctgctctggcgcgagctaaagcgcaattgtcaccaggtactgcaccaatggtggcgacagggtacagaagagcaagtactcctgactgggcaatgggactgcattgcatatccctaggcacctattgagacttatctggggcccaccagcgtggagttcctgtatgggaatgcaggactggacttgtgctgcctgacagggtcgcggctggccgtctgtactttgtatagtcagttgaaactcacc

SEQ ID NO: 462 - DNA, 421 bp, Human poliovirus 1
  misc_feature 1..421: note = strain NIE1116623, complete genome.1
  source 1..421: mol_type = genomic DNA
agtctggacatccctcaccggcgacggtggtccaggctgcgctggcggcctacctgtggtccaaagccacgggacgctacatgtgaacaaggtgtgaagagcctattgagctacaaaagagtcctccggcccctgaatgcggctaatcccaaccacggatcaagggtgcacaaaccagtgtacaccttgtcgtaacgcgcaagtctgtggcggaaccgactactttgggtgtccgtgtttcctttttaattttgatggctgcttatggtgacaatcatagattgttatcataaagctaattggattggccatccggtgagagtgaaatatattgtttacctccctgttgggtttactctaactaacttctccatttataaacttgtcatcacagttttaataattagaagtgcagtttaca

SEQ ID NO: 463 - DNA, 423 bp, GB virus C
  misc_feature 1..423: note = isolate GBV-C_agmMal_seqID_10 putative polyprotein gene,1
  source 1..423: mol_type = genomic DNA
catggacgaaagcccgtggatggacggtgacagggttggcaggtcgtaaatcccggccgccctggtagcgggtataagtctgagggaaacccactagaggcttacgtgttcttgtccgagtggacgtgcacggtccacaggagacgcctattccggtgtgaataataggccgactcgagcggagtcgttaaactgaggaccgtctgagagatggtaacttggcctgcgtacgggaacgccgctaaagaatacagtgggttaagtccggcgggttggcaatcccagcagggcgggggggttctactgttgaatcctgccagttcctctcagatggtaggcatggggggacccagctccgcggcgcgctacagccggggtagcccaaaatccttcgggtgagggcgggtcccatgtccctttttg

SEQ ID NO: 464 - DNA, 423 bp, Hepatitis G virus
  misc_feature 1..423: note = polyprotein gene, complete cds.1
  source 1..423: mol_type = genomic DNA
gtgcaagccccacaaaccgacgcctatttaaatagacgttaagaaccggcgcctgcccggcgaccggccaaaagttggtggatgggtgatgccagggttggtaggtcgtaaatcccggtcatcttggtaaccactataggtgggtcttaagggttggtcaaggtccctctgaaccctgtggcgagaaagcgcacggtccacaggtgttggccctaccggtgtgaataagggcccgacgtcaggctcgtcgttaaaccgagcccattacccacctgggcaaacaacgcccacgtacggtccacgtcgcccttcaatgtctctcttgaccaataggctttgccggcgagttgacaaggaccagtgggggctgggcgtcgggggaaggacccccggcgctgcccttcccggtggggtgggaaatgc

SEQ ID NO: 465 - DNA, 424 bp, Hepatovirus D2
  misc_feature 1..424: note = isolate FO1AF48Rhilan2010 polyprotein gene, complete1
  source 1..424: mol_type = genomic DNA
gtcttcttttatccgggctcacgtgatgccaatggtccgacccatgcgcccgtgggggttaacacatggattagccatgtgctgtaggccctaaaagtcacgttcacgtaaggcttggatgaaactcatgtctgttaactgagggtggtaagttacattgatcttctaaagagggtaggctacgggtgaaaccctctaggttagtactcatattgagagatacctccagtaggtgaaggtttccggatattggtgagtttaacgacaataaccattcaacggatgtgggcccacctcactggttagatgccttgtaatccaacacccaaggggatatgagtgaattcttagtcccaagtgaccctcccgaaaggttgtaggggtactcaggggcatttaggttttccacatttaaagtgaattg

SEQ ID NO: 466 - DNA, 426 bp, Porcine teschovirus
  misc_feature 1..426: note = complete genome.1
  source 1..426: mol_type = genomic DNA
ccccccccctccccctttgaacttgtaactggtaagtgatgatccttggaagctaggtacctgttacgctagttttggattatcttgtgcccaacactagtctttggacttctgttgtgtttaaacacagaaatctgattgcttggttatgaattcactggactaacccttttgaaagacctgctctggcgcgagctaaagcgcaattgtcaccgggtattgcaccaatggtggcgacagggtacagaagagcaagtactcctgactgggcaatgggactgcattgcatatccctaggcacctattgagatttctctggggcccaccagcgtggagttcctgtatgggaatgcaggactggacttgcgctgcctgacagggtcgcgggtggccgtctgtactttgtatagtcagttgaaactcacc

SEQ ID NO: 467 - DNA, 426 bp, Porcine teschovirus 8
  misc_feature 1..426: note = isolate Fuyu/2009/2, complete genome.1
  source 1..426: mol_type = genomic DNA
ttgaaaccccctccctttgaatttgtaattgataagtgatgatccttggaagctaggtacttgatacgctagttttggattgtcttgtgcccaacattagtctttggacttctgttgtgtttaaacacagaaattttgttatctggctacgaattcattggattaatccctctgaaagacctgctctggcgcgagcgaaagcgcaattgtcaccgggtattgcaccaatggtggcgacagagtacagaagagcaagtactcctgactgggcaatgggactgcattgcatatccctaggtacctattgagatttctctggggcccaccagcgtggagttcctgtatgggaatgcaggactggacttgtgctgcctgacagggtcgcggctggccgtctgtactttgtatagtcagttgaaactcact

SEQ ID NO: 468 - DNA, 426 bp, Porcine teschovirus 1
  misc_feature 1..426: note = JPN/Ishi-Im7/2016/G1 genomic RNA, nearly1
  source 1..426: mol_type = genomic DNA
cccccctcctctccttttggactcgtaactgataagtggtagtccttggaagctaggtactcgttacgctagttttggattatcttgtgcccaacattggacctcggtcctgtgttgtgtttaaacacagaaatcttgacacttggttatgaattcattgtatcaacccttttgaaagacctgctctggcgcgagcaaaagcgcaattgtcaccaggtattgcaccaatggtggcgacagggtacagaagagcaagtactcctgactgggtaatgggactgcattgcatatccctaggcacctattgagatttctctggggcccaccagcatggagttcctgtatgggaatgcaggactggacttgtgctgcctgacagggtcgcggctggccgtctgtactttgtatagtcagttgaaaagcacc

SEQ ID NO: 469 - DNA, 427 bp, Simian pegivirus
  misc_feature 1..427: note = isolate myb_M23 polyprotein precursor, gene,1
  source 1..427: mol_type = genomic DNA
ctggacgaaagcccgtggacgggcggtgacagggttggcaggtcgtaaatcccggccgccctggtagcgggtataagtctggaggaaacccgtgaaccggcagcgtgaagctctgctagcgaacgtgcacggtccacaggagacgccgattccggtgtgaataatcggccgactcgagcggagtcgttaaactgaggaccatcagggagatggcaacttggcttgcgtacgggaacgccgctaaagtcacagtgggttaagtccggcgggttgacaatcccagcaaggcgagggggtgctattgttgcaccctgccagtccctcccttttggtaggcatggggggacccagctccgcggcgcgctacagccggggtagcccaaaatccttcgggtgagggcgggtcccatgtcccttttattcaggc

SEQ ID NO: 470 - DNA, 427 bp, GB virus C
  misc_feature 1..427: note = isolate VSAC1003, complete genome.1
  source 1..427: mol_type = genomic DNA
tggacgaaagcccgtggatggacggtgacagggttggcaggtcgtaaatcccggccgccctggtagcgggtataagtctgagggaaacccactagaggcttacgtgtacttgtccgcgtggacgtgcacggtccacaggagacgcctattccggtgtgaataataggccgactcgagcggagtcgttaaactgaggaccatttgtaagatggcaacctggcctgcgtacgggaacgccgctaaagaatacagtgggttaagtccggcgggttggcaatcccagcagggcggggggactctattgttgagccctgccagttccttacaagtggtaggcatggggggacccagctccgcggcgcgctacagccggggtagtccaaaatccttcgggtgaggacgggtcccatgtccctttttatggctc

SEQ ID NO: 471 - DNA, 427 bp, Theiler's disease-associated virus
  misc_feature 1..427: note = isolate B2 NS3 gene, partial1
  source 1..427: mol_type = genomic DNA
cggcgcggtgttttgggttcagggcagtaggggcagccgggccagcagtagctggctcctggtaccaccaccctacccggacgacctccctcgcgaaaggtcgccacggtctgtggctcgacgacgcctacaattcagtccgaggggcgcagccctcgttaaactcagacttgattcctcgcctttgatctggccaggggtttaagtgaacgccgcccttttaatgtttaatagggttctttcccggcgggttgacaaacacttccctgggcttttcttcggcttcggtttcatgttgcttcggcacccatgagcgcacaggggggggaccctgcgacagtccgccaagaggaaaatccttcgggtgacctcgtgcgcaacccaatccctttctcttccacatggcgtgtctgtggtgcatgctgtg

SEQ ID NO: 472 - DNA, 428 bp, Sicinivirus sp.
  misc_feature 1..428: note = strain RS/BR/2015/1R-1 polyprotein gene, complete1
  source 1..428: mol_type = genomic DNA
tggctggaagcattcagtttctggatttgttggtttgtggtgattagtagaccccctggaggtacccgttctggatctgaccagggacccgtgactataccgttccggtaattcgggtttaaaactatgaacgtcaccacccattttcttttcctattttattttttcttatattctgatatacgtgtgagtattgatgttccctgatctttgtgtctggtctgcattttcagttattcaatttggttgggctgggctctttatttagatgtttttagaggtctttcttgttattgtagcgctcgttgttgtggtattgtctcctagcgaattatcccagctgttgactatttgcatctacaactttgtcttgatttttctctggttatttggtaccttagagctccccaattatcccaccattcatc

SEQ ID NO: 473 - DNA, 430 bp, Sapelovirus A
  misc_feature 1..430: note = isolate PSV_GER_L00798-K11_14-02_2014 genome1
  source 1..430: mol_type = genomic DNA
cccctccacccttaaggtggttgtatcccacataccccaccctcccttccaaagtggacggacaactggattttgactaacggcaagtctgaatggtatgatttggatacgtttaaacggcagtagcgtggcgagctatggaaaaatcgcaattgtcgatagccatgttagtgacgcgcttcggcgtgctcctttggtgattcggcgactggttacaggagagtaggcagtgagctatgggcaaacctctacagtattacttagagggaatgtgcaattgagacttgacgagcgtctctttgagatgtggcgcatgctcttggcattaccatagtgagcttccaggttgggaaacctggactgggcctatactacctgatagggtcgcggctggccgcctgtaactagtatagtcagttgaaaccccccc

SEQ ID NO: 474 - DNA, 430 bp, Sapelovirus A
  misc_feature 1..430: note = isolate PoSapV_VIRES_NM02_C1 polyprotein gene,1
  source 1..430: mol_type = genomic DNA
cctccacccttaaggtggttgtatccccataccctaccctcccttccaaagcggatggatatacggacctgaacttttggcgagtacatatggtatgattattggatacaccctgaatggcagtagcgtggcgagctatggaaaaatcgcaattgtcgatagccatgttagtgacgcgcttcggtgtgctcctttggtgattcggcgactggttacaggagagtaggcagtgagctatgggcaaacctctacagtattacttagagggaatgtgcaattgagacttgacgagcgtctcctagagatgtggcgcatgctcttggcattaccatagtgagcttccaggttgggaaacctggactgggcctatactacctgatagggtcgcggctggccgcctgtaactagtatagtcagttgaaaccccccc

SEQ ID NO: 475 - DNA, 430 bp, Human rhinovirus B
  misc_feature 1..430: note = strain HRV-B35_p1135_sR738_2007 polyprotein1
  source 1..430: mol_type = genomic DNA
cgcgaggcataggttgtacccacggccaaaaaccttcaaccgttacccgccaatcaactacgtaacagctagtatcatcatgtctttgtctaggcgttcgatcaggtggttttcccctccactagtttggtcgatgaggctaggaaatccccacgggtgaccgtgtcctagcctgcgtggcggccaacccagcatcagctgggacgccttttcagagacatggtgtgaagactcgcatgtgcttgattgtgattcctccggcccctgaatgcggctaacctcaaccccggagccttgtattgcaatccagcaatattaaggtcgtaatgagcaattctgggacgggaccgactactttgggtgtccgtgtttcctgtttttcataaatttttcttatggtcacagcatatagtacatatatactgtgatc

SEQ ID NO: 476 - DNA, 431 bp, Human enterovirus
  misc_feature 1..431: note = isolate EV/Human/CMRHP58/CMR/2014 polyprotein1
  source 1..431: mol_type = genomic DNA
aggtcgatgagtcactgcattccccacaggcgactgtggcagtggctgcgttggcggcctgcctatggggcaacccataggacgctttaatgttgacacggtgcgaagagtctactgagctagttagtagtcctccggcccctgaatgcggctaatcctaactgcggagcgcacaccagcaaaccagctggtaatgcgtcgtaacgggcaactctgcagcggaaccgactactttgggtgtccgtgtttccttttattcttattatggctgcttatggtgacaatctaagattgttatcatatagctattggattggccatccggtgactaacagacacatcatttacctttttgttggatttgttccactaaactcactctcatatcaaaccttattgtacatccttaagtccaattatttaaagcaact

SEQ ID NO: 477 - DNA, 432 bp, Hepatitis G virus
  misc_feature 1..432: note = polyprotein precursor, gene, complete cds.1
  source 1..432: mol_type = genomic DNA
gggtgatgacagggttggtaggtcgtaaatcccggtcatcttggtagccactataggtgggtcttaagggctggtcaaggtccctctggcgcttgtggcgagaaagcgcacggtccacaggtgttggccctaccggtgtgaataagggcccgacgtcaggctcgtcgttaaaccgagcccgttacccacctgggcaaacaacgcccatgtacggtccacgtcgcccttcaatgtctctcttgaccaataggctttgccggcgagttgacaaggaccagtgggggttgggcggtgggggaaggacccctttcgctgcccttcccggtggggcgggaaatgcatggggccacccagctccgcggcggcctgcagccggggtagcccaagaaccttcgggtgagggcgggtggcatttccttttctgtaccgatc

SEQ ID NO: 478 - DNA, 433 bp, Human parechovirus 17
  misc_feature 1..433: note = strain M36/CI/2014 polyprotein gene, complete1
  source 1..433: mol_type = genomic DNA
ctctattagtgagataccacgcttgtggaccttatgctcacacagccatcctctagtaagtttgtaagacgtctggtgacgtgtgggaacttgtgggaatcaatattttgctttaaagcatccattagccagcggataaaacacctggtaacaggtgcctctggggccaaaagccaaggtttaacagaccctagtggattggtttcaaaacctgaaatattgtggaacacactcagtacctactgatctggtagtaatgcaagcactagttgtaaggcccacgaaggatgcccagaaggtacctgtagggaacaagagacactatagatctgatctggggctggctacctctattttggtgagtcagttaaaaaacgtctagtgggccaaacccaggggggaccctggtttccatttattttacaaaggcact

SEQ ID NO: 479 - DNA, 433 bp, Picornaviridae sp.
  misc_feature 1..433: note = isolate yc-4 polyprotein gene, partial cds.1
  source 1..433: mol_type = genomic DNA
agtagtggccgtaagccacttttctttctttataacctatcactatactccaacttaatcttctctacttggactaggatctactggttatcgatgagtcgtgatgcttagtgatttggatagggaaatcccacctgagggtaccgatggtatcactcaaacgggtaggggagatacccatttgctattggctgaaccggattaccgatgtacgccagtattagcagtggggcaaatacctccccgagcattatggttagagacagaactacgggtgctagccccggtggcattgcctagtagggttccgacctaatggtattggaaaccacccgtagtaaggtgagtgttggggaacctcaccagtgtctgttactgcctgatagggtcgcggctggccgaatcataatgcttaatgtcagttgaactagtc

SEQ ID NO: 480 - DNA, 438 bp, Human rhinovirus C50
  misc_feature 1..438: note = strain human/Australia/SG1/2008, partial1
  source 1..438: mol_type = genomic DNA
ttccccggacgtgtgaataggctccaccaggggctgaagctgtagcgttcgttacccgcactgctactacgcaagggttagtatctaactgaaaacattgtggagtttcgctcagcagaaccccactgtagatcggggtaatggggctacacaacccccaccggcgacggtggtgtagcccgcgtggtgccccgcctgaggcttgtgcctcaggacgccacaatgttgacagggtgagaaggcctacgtgtgctagcagtgagtcctccggcctctgaatgcggctaatcctaaccccatagccatcacacacaatccagtgtgcaggtggtcgtaacgggtaactatgggatggaaccgactactttgagtgtccgtgtttcctattttacctttacatgtcttatggtcacaatatagtgtatacatattgtgatc

SEQ ID NO: 481 - DNA, 439 bp, Human rhinovirus B
  misc_feature 1..439: note = strain HRV-B69_p1162_sR1549_2009_g1 polyprotein1
  source 1..439: mol_type = genomic DNA
gttaccccggagcggagtatagatggccaccgctgtcaaaagctcttaaccgttacccgccagttaactacgcaacggctagtagcatcctgttgccttcatggcgttcgatcaggtgagacttccctcctcactagtctggtcgatgaggctgagaactccccacgggcgaccgtgtctcagcctgcgtggcggccagcccagcttttgctgggacgccttgattgagacatggtgtgaagacccgcgtgtgcttaactgtgagtcctccggcccctgaatgcggctaacctaaaccctggagccttgaaacacaatccagtgttcgcaaggtcgtaatgagcaattccgggacgggaccgactactttgggtgtccgtgtttcctttttacctttcaattgttcttatggtcacaatataagtgttatattgtgatc

SEQ ID NO: 482 - DNA, 439 bp, Human rhinovirus C
  misc_feature 1..439: note = strain HRV-C40_p1009_s3787_1999 polyprotein1
  source 1..439: mol_type = genomic DNA
tccccggcatgagaggaatagactctttcagggttgaagccacgagtgtcgttacccgcactggtactacgcaaagcctagtaacatcttgaaactctttttggttggtcgttccactagttaccccctagtagacctggcagatgaggcaggacgctccccactggcgacagtggtcctgcctgcgtggctgcctgcacacccttcggggtgtgaagccaaaagaaagacaaggtgtgaagagccccgtgtgctaccagtgaatcctccggcccctgaatgcggctaatcttaccccacagctattgcacacaatccagtgtgtatgtagtcgtaatgagcaattgtgggacggaaccgactactttgggtgtccgtgtttccttttattcccatgtttctgcttatggtgacaatactgacgtatagtgttgttacc

SEQ ID NO: 483 - DNA, 439 bp, Coxsackievirus
  misc_feature 1..439: note = A20,isolate ETH_P10/A20_2016 polyprotein gene,1
  source 1..439: mol_type = genomic DNA
tgtagatcaggctgatgagtcactgcactcctcacgggcgaccgtggcagtggctgcgttggcggcctgcctatggggcaacccataggacgctctaaagtggacatggtgcgaagagtctattgagctagttagtagtcctccggcccctgaatgcggctaatcccaaccacggagcaagtgctatcaaaccagagagtggcttgtcgtaatgcgcaagtctgtggcggaaccgactactttgggtgaccgtgtttccttttatttttatcgtggctgcttatggtgacaatctcagattgttatcataaagcaaattggattagccatccggtgaaagtcaaatcgattatttacttacttgttagtttttctccactaacaccacaaacacttaaaattattgaaatagtgctgctaattagataccactatcata

SEQ ID NO: 484 - DNA, 442 bp, Pasivirus A3
  misc_feature 1..442: note = isolate CS15-4016, complete genome.1R
  source 1..442: mol_type = genomic DNA
aagcgactcttccgacgacgaggagcagtgggacgccttcgagtcaactgaccgcccgaagaaggagaaacggcgggaacagaagactcgagagatcacccagccccgatctccaaggaaaaagtcaccgccgcgacactaaacgacctccacccctgcattgagtctgccaataaaccctcgaatactttctgtcgtcctcttttttcctttaacctttcgtgggagagcagcgccgcgcggtcctcctcctctttccgacaccgttccatcgcattcaggaacgggtccaacccctcaccgcaattacgcacttccgcaaggccacgcaaaaagtgaccattgcaccgtgccaaacccctccctcagttaatattaacagccgtcctcaatatccttctaccttccgtgacaggacacagtctccgaacaacccagagca

SEQ ID NO: 485 - DNA, 443 bp, Porcine enterovirus 8
  misc_feature 1..443: note = strain V13, complete genome.1
  source 1..443: mol_type = genomic DNA
acactcatttcccccctccacccttaaggtggttgtatcccctacaccctaccctcccttccacataggacgaataaacggacttgagattaaggcaagtacataaggtatggtttttggatacacttaaatggcagtagcgtggcgagctatggaaaaatcgcaattgtcgatagccatgttagcgacgcgcttcggcgtgctcctttggtgattcggcgactggttacaggagagtagacagtgagctatgggcaaacccctacagtattacttaggggaatgtgcaattgagacttgacgagcgtctctttgagatgtggcgcatgctcttggcattaccatagtgagcttccaggttgggaaacctggactgggtctatactgcctgatagggtcgcggctggccgcctgtaactagtatagtcagttgaaaacccccc

SEQ ID NO: 486 - DNA, 443 bp, Porcine sapelovirus 1
  misc_feature 1..443: note = isolate IVRI/PSV/SPF/C-6/2015, complete1
  source 1..443: mol_type = genomic DNA
acacccatttcccccctccacccttaaggtggttgtatcccctataccctatcctcccttccaaacaggatggacaaatggacttgacattatggcaagtacataaggtatggtctttggatacacctgaatggtagtagcgtggcgagctatggaaaaatcgcaattgtcgatagccatgtcagtgacgcgcttcggtgtgctcctttggtgattcggcgactggttacaggagagtaggcagtgagctatgggcaaacccctgcagtattactcaggggaatgtgcaattgaggcttgacgagcgtctcttagagatgtggcgcatgctcttggcattaccatagtgagcttccaggttgggagacctggactgggcctatactacctgatagggtcgcggctggccgcctgtaactagtatagtcagttgaaaacccccc

SEQ ID NO: 487 - DNA, 443 bp, Enterovirus E4
  misc_feature 1..443: note = complete genome.1
  source 1..443: mol_type = genomic DNA
ctacgtctgataagattgatctgaaatctgagaatagagatttatttagaattgtttcatattcgggaaccgtgcagtggagagcattgtgcggtccttgcagacggggggtggggacattgcctcaaatacctttgcttgaaaggcctttgccaacacagcctttgtgcaactgcagcttttgcagcccattgcttgcagaagcagcacctttagttactgtagattctggaggtggttccagatcagcgattcctactgggccttgcgactgcgaggagtgcagtggtaataggacacccgacggggaggaggaaccaggagcaagaaatacaagtagccctgacagttctgtttgtggttgtcctctttgcgagggagaaattattaacgtttaagcttcttgctcatatttggggcgtaggtataataaagcaaaaatt

SEQ ID NO: 488 - DNA, 445 bp, unidentified
  source 1..445: mol_type = unassigned DNA; note = Hepatitis GB virus B subgenomic replicon neoRepB.1 sequence
accacaaacactccagtttgttacactccgctaggaatgctcctggagcaccccccctagcagggcgtgggggatttcccctgcccgtctgcagaagggtggagccaaccaccttagtatgtaggcggcgggactcatgacgctcgcgtgatgacaagcgccaagcttgacttggatggccctgatgggcgttcatgggttcggtggtggtggcgctttaggcagcctccacgcccaccacctcccagatagagcggcggcactgtagggaagaccggggaccggtcactaccaaggacgcagacctctttttgagtatcacgcctccggaagtagttgggcaagcccacctatatgtgttgggatggttggggttagccatccataccgtactgcctgatagggtccttgcgaggggatctgggagtctcgtagaccgtagcac

SEQ ID NO: 489 - DNA, 445 bp, unidentified
  source 1..445: mol_type = unassigned DNA; note = Human coxsackievirus B3 polyprotein gene, complete cds.1 sequence
gcacaacccaagtgtagatcaggctgatgagtcaccgcattccccacgggtaaccgtggcggtggctgcgttggcggcctgcccatgaggcaactcatgggacgcttcaatactgacatggtgcgaagagtctattgagctaattggtagtcctccggcccctgaatgcggctaatcctaactgcggagcagatacccacatgccagtgggcagtctgtcgtaacgggcaactctgcagcggaaccgactactttgggtgtccgtgtttccttttatttctattttggctgcttatggtgacaattgagagattgttaccatatagctattggattggccatccggtgacaagtagagcaattatctacctatttgttggctttgttccactgaattttagagttctaaaaaccttaacttcattttagcactcaatacggcaaa

SEQ ID NO: 490 - DNA, 446 bp, Rhinovirus C
  misc_feature 1..446: note = isolate HRV-C55_ID529T_5UTR/2A polyprotein gene,1
  source 1..446: mol_type = genomic DNA
gcacttctgtttccccggacgtgtgaataggcctcaccaaggctgaagctgtagcgttcgttatccgctcacctactgcgcaaagactagtaactaactagatacttagtggtgtttcgctcagcagtaccccactgtagatcggggcaatgaggctacgcatcccccactggcgacagtggcgtagcctgcgtggtgccctgcccaggcttcggtctgggacaccactatgttgacagggtgtgaagaccggcgtgcgctaggtgtgactcctccggcccctgaatgcggctaatcctaaccccgcagccaccgcatgcaacccagcatgtagatggtcgtaacgagtaattgtgggatggaaccgactactttgggtgtccgtgtttcctgtttttctttattgttgtcctatggttacaaatttgtgtatcagatttgtgacc

SEQ ID NO: 491 - DNA, 449 bp, unidentified
  source 1..449: mol_type = unassigned DNA; note = Human rhinovirus C35 clone LRTI-metagenomic-1 polyprotein gene,1
agctctgcagatatctccccggacgtgtgaataggccctaccagggctgaagctgtagcgttcgttatccgcatgcctactgcgcaaaggttagtaactaactagatacttagtggtgtttcgctcagcagtaccccactgtagatcagggtaatgaggctacgcatcccccactggcgacagtggcgtagcctgcgtggtgccctgcccaggtttatacctgggacaccactatttggacagggtgtgaaggccagcgtgcgctaggcatgagtcctccggcccctgaatgcggctaatcctaaccctgcagccattgcatgcaaaccagcatgttggtggtcgtaatgagcaattgcgggatggaaccgactactttgggtgtccgtgtttcttgtttttccattaattgtcttatggttacaagtttgtgcaacaaatttgtgacc

SEQ ID NO: 492 - DNA, 450 bp, Simian pegivirus
  misc_feature 1..450: note = isolate VGA00020, complete genome.1
  source 1..450: mol_type = genomic DNA
tagagtggttgcgctggaatctggacgaaagccagcggatgggtggtgacagggttggcaggtcgtaaatcccggccatcctggtacctggtataagtctgaaggaacgcgcaagcaactagtgcgatttgttggcaaagtttgagtgcacggtccacaggtgacgcctataccggtgtgaataataggccgactcgagcggagtcgttaaactgaggacccccttggcgatcgcaacttggcctgcgtacgggaacgccgctaaagtcacagtgggttaataccggcgggttgacaatcccagcagggcgggggggagctactgttgcatcctgcgagttccgtcttgggggtaggcatggggtggcccagctccgcggcgcgctacagccggggtaggccaaaaatccgaaaggtgaggccgggccacatgtccgtttttatttaccc

SEQ ID NO: 493 - DNA, 452 bp, Bat pegivirus
  misc_feature 1..452: note = isolate PDB-24 polyprotein gene, complete cds.1
  source 1..452: mol_type = genomic DNA
taaatcccggtccaggtttattcagtatatgataggtggagtcgagccccccgaccggggctctgtgaccactgtccagccggacgaggtggtgaaagttgttcgggcacggtccacaggttgggttcaccggtgtgaatagagccccgtctcgagcggagacgttaaacttagatggtctgcaggatggcaacgcggcccgcgtacgggaacgtcgcaaaataccttcgggaacagtgcatgcagcgggttgtcaaacccagcggtggcgcgctccggagaggtggagccctcaatggaggccagttccctgcagaaccagcccttcggggcaggcatggccccccccagccggcgcggcgctacacgcggcaagaggaagagccttcgggtgacctcgggggggatttgtccctttcaacccaatgagagttcgtgcgttggtcgcagtc

SEQ ID NO: 494 - DNA, 455 bp, unidentified
  source 1..455: mol_type = unassigned DNA; note = Porcine sapelovirus 1 PSV/Porcine/JPN/Ishi-Miya3/2015 gene for1
cgcatgtattccacactcatttcccccctccacccttaaggtggttgtatccacttaccctatcccccccctccaaagcggacggactcttggacctgaaactctggcaagttaaatgataagatatctggatacacttgaatggcagtagcgtggcgagctatggaaaaatcgcaattgtcgatagccatgttagtgacgcgcttcggcgtgctcctttggtgattcggcgactggttacaggagagtagacagtgagctatgggcaaactcctacagtattacttaggaggaatgtgcaattgagacttgacgagcgtctcttagagatgtggcgcatgctcttggcattaccatagtgagcttccaggttgggaaacctggactgggtctatactacctgatagggtcgcggctggccgcctgtaactagtatagtcagttgaaaccccccc

SEQ ID NO: 495 - DNA, 455 bp, Coxsackievirus
  misc_feature 1..455: note = A20,strain NGR_2016, complete genome.1
  source 1..455: mol_type = genomic DNA
gcagtagagatgggagtgtagcttaggtcgatgagtctggacattcctcaccggcgacggtggtccaggctgcgttggcggcctacctgtggcccaaagccacaggacgctagttgtgaacaaggtgtgaagagcctattgagctacaaaagagtcctccggcccctgaatgcggctaatcccaaccacggagcaagtgctcacaaaccagtgagtggcttgtcgtaacgggtaactctgtggcggaaccgactactttgggtgtccgtgtttccatttatttttacaatggctgcttatggtgacaatcgttgattgttatcataaagcgatttggattggccatccggtgaaagtgaaatatattatttatctttttgttggattcgctccaatcaactcctttacttacaaactcatcacaacagtactactaattaggaacatataccact

SEQ ID NO: 496 - DNA, 455 bp, Rhinovirus C
  misc_feature 1..455: note = isolate HRV-C16_ID639T_5UTR/VP1 polyprotein gene,1
  source 1..455: mol_type = genomic DNA
tgcacttctgtttccccggtactagggtgttaaacttccccagaggttgaagcccgatgtatcgttacccgcatggttactaagcagagcctagtagcatcttgctttgcatatgagctggtcgttcagtcagtaaaccccctgatagacctggcagatgaggctggaaataccccactggtaacagtgttccagcctgcgtggctgcctgcccctcttttgaggggaagcccatatgtagacaaggtgtgaagagccgcgtttgctaactatgagtcctccggcccctgaatgcggctaatccaaccccacagctactgcgcagaaaccactgcgtaggtagtcgtaatgagcaattgtgggacggaaccgactactttgggtgtccgtgtttcctgttttactttacattgctcatggacacaacatatataaaatcgtatatgttgttcacc

SEQ ID NO: 497 - DNA, 457 bp, Chicken picornavirus 3
  misc_feature 1..457: note = isolate 45C, complete genome.1
  source 1..457: mol_type = genomic DNA
gggtatggtggttaaccccgtccactgggcatctttgccctctcagaagtggatcaatccaccccaactccccccctggttacctgagccacagtggactccggtgacgaagctagggaccccaatacctcaagtgccaagagagtccccccctcgcgagaggtgctcttgggcccaaaaggctagttggcagagtgaagtgaaggaagctgctaacgtggtgaccttaagcgtaattcgaagctgacctttgaggttaaccctagtggaccactggaggaatctgtggaggtggtggttaggaaagttggccacttgtgagtagatgcccagaaggcataaggctgatctggggccagtgactataccgttccggtaaacctggtataaaaaccatgaaagcaagtgggtgaaattttctctttttatccttcattcagcagttgatattggcaaa

SEQ ID NO: 498 - DNA, 460 bp, Picornaviridae sp.
  misc_feature 1..460: note = isolate ybb044pic01nc genomic sequence.1
  source 1..460: mol_type = genomic DNA
aaaagactcgctaactcaaaactctctcactctcactctccactcccaaactattatccgactaagtgacccactaactaatccaaaattccaatcctacactatcttgcacctttcactctcctctatctaatctataaagctcttacaactaaacctctccataccccattacaaccgcaaaatctacgaattcaaataaactcccaattgcccgaaaattcacttccacctaattctctcaaaatttctgactcactctcagaacaaaccaattcagtgcaaactgaacatacactctcccctgaacaaacgcagcaactcctccaaaccactcttaagactgcgtctcaaatttttgctcaactccaagagaaacaaatctcttctccccagaaagttaatactccaacgctctctgattcctcctccgaccccactcttcaacaagcttcatatc

SEQ ID NO: 499 - DNA, 460 bp, Red-necked stint Picornavirus B-like
  misc_feature 1..460: note = polyprotein gene, complete1
  source 1..460: mol_type = genomic DNA
ctccactctcctttctcccttccccctccctttaccttttccccctctgtaactaagttttgtccctgcagagcagtgatacgacataaccgagttggaacgcgtattgggtattggtgaatatctatctcatgtggttaagctaaggcttgaaatacctttggcattgggttatagtagggcattagtgttcccacatgagagaaccatctatccacttgacacagtgggtgtatagtacaaaggaccctatttggtatcctgacgcgtgggcgagtaagtcttgctggatttccgcgagcatcaaccacaccctgatagtctcaatggggtcactcccgagacggggcaagtcacctatacactacctatggttgggaagccatagctggactgtgacagcttgatagagtgtcggcgggcacagtggattggatgtaaagtccgttgaaatgccatt

SEQ ID NO: 500 - DNA, 464 bp, Sapelovirus A
  misc_feature 1..464: note = strain SZ1M-F/PSV/HUN/2013, complete genome.1
  source 1..464: mol_type = genomic DNA
ttcggcacgcatgtattccacactcatttcccccctccgcccttaaggtggttgtatcccataacctttaccctcccccttcccagtcggacggaactatagttcatagacttagattctgtattaaggtgtgactaggatcaaccccatgtggcagtagcgtggcgagctatggaaaaatcgcaattgtcgatagccatgttagtgacgcgcttcggcgtgctcctttggtgattcggcgactggttacaggagagtaggcagtgagctatgggcaaacctctacagtgttacttagagggaatgtgcaattgaggcttgacgagcgtctccttgagatgtggcgcatgctcttggcattaccatagtgagcttccaggttgggaaacctggactgggcctatactacctgatagggtcgcggctggccgcctgtaactagtatagtcagttgaaaccccccc

SEQ ID NO: 501 - DNA, 465 bp, Rhinovirus C
  misc_feature 1..465: note = strain SCH-108 polyprotein gene, complete cds.1
  source 1..465: mol_type = genomic DNA
cagcggtcaagcacttctgtctccccggcatagggatgttaggcttctcacgaggctgaagtcccgattgtcgttatccgcacaactactggacaaagcctagtaacaccctacgacgtagtatggttggtcgttccaccagtgaatccccccctggtagacctggcagatggggctagaaattcctcactggcgacagtgttctagcccgcgtggctgcctgctccctaacgggagaagccatcctactgacaaggtgtgaagagccccgtacgctagttgtgagtcctccggcccctgaatgcggctaatccaaccctgcagccattgcatggaagccaccatgtagatggtcgtaatgagtaattgcgggacggaaccgactactttgggtgtccgtgtttcttttatttcttgtatattgcttatggtgacaatatatatacagcatatatattgttcatc

SEQ ID NO: 502 - DNA, 466 bp, Genet fecal theilovirus
  misc_feature 1..466: note = isolate S15 polyprotein gene, partial cds;1
  source 1..466: mol_type = genomic DNA
atggggaagggtatgacgtgccccttccttcttcggagaactcgctctagtggtctttccacttctggaaaagagtgagtgcacgtgatcaggaccgtcgaagacgacaaatacctggtgctctatctcatagacgtttcacagctgtagcgacccctcagtagcagcggaagccccctcctggtgacaggagcctctgcggccaaaagccacgtggataagatccactgctgagggcggtgcgaccctagcaccctgtgatgcatactagttgtagcgtgccggactattggtctgtcataagacacctgatagagagaccaagaatgtcctggaggtaccccgcgtgcgggatctgaccaggagaccattgcccaatgctttacaacgggtctatggtttaaaaactgtcgcagtctctccaaaccaagtggtcttggttttcaattactttgaatatttcact

SEQ ID NO: 503 - DNA, 468 bp, Picornaviridae sp.
  misc_feature 1..468: note = isolate ybb117hav01 genomic sequence.1
  source 1..468: mol_type = genomic DNA
aaaaggagggatacaaatggtaccacggacaagcgtggaaaaccacctgtatccccccttttgggcttggcaacccattaatcaagatgccttctcttttgccggttttaagactccattttgcctgctgaatctgatgtgttctcactagacgtgtagcttagcacgatggccaggtcttgtttatactggcataagccgggagaacggtcttacagtgatcttggagtttggttagtatctgctagagtggcgtaactgcagacatgttgcccagggccgtaggctaggtaactagcaccctgggggccgcaagcctaggtggtcacaaccaccctcatgtaacccttgtcgggcattcttgtagtagaacccctaactccacttttgctgggaccaagtaccctgtgagagcaatgtaagtagatgccctgtaggtacccgtttaggatctgagcaggggccggg

SEQ ID NO: 504 - DNA, 475 bp, Sapelovirus A
  misc_feature 1..475: note = strain DIAPD5469-10, complete genome.1
  source 1..475: mol_type = genomic DNA
gtacatgcgtattacggtacgcatgtattccacactcatttcccccctccacccttaaggtggttgtatccactcaccctaccctcccttccaaagcggatggactttatgtgtttgaaactttggcaaccataaaaggaatggtatttggatacggatgaatggcagtagcgtggcgagctatggaaaaatcgcaattgtcgatagccatgttagtgacgcgcttcggcgtgctcctttggtgattcggcgactggttacaggagagtaggcagtgagctatgggcaaacctctacagtattacttagagggaatgtgcaattgagacttgacgagcgtctctttgagatgtggcgcatgctcttggcattaccatagtgagcttccaggttgggaaacctggactgggcctatactacctgatagggtcgcggctggccgcctgtaactagtatagtcagttgaaaccccccc

SEQ ID NO: 505 - DNA, 476 bp, Enterovirus J
  misc_feature 1..476: note = strain NGR_NHP_1, partial genome.1
  source 1..476: mol_type = genomic DNA
aacacatcgctcaacagcagttccacatccagtgggattatgagcaagcactcctgtttccccggaagggactaacggtacgctgtacccacggcggaagtatgtcctaccgttaaccggccatgtacttcgagaagcctagtaccattatgaaggttgattgatgttacgctccccggtatccccaaccggtagttctggtcgatgagtctcggcatcccccacgggcgaccgtggccgaggctgcgttggcggccagcctacacccaccagggtgtaggacgtcatgatactgacatggtgtgaagagcctattgagctacgtggtagtcctccggcccctgaatgcggctaatcctaactccggagcatccgctaacaatcccgttagaagggtgtcgtaacgcgaaagtctggagcggaaccgactactttgggtgtccgtgtttcctgttttacttactgtttggctgctt

SEQ ID NO: 506 - DNA, 478 bp, Shanbavirus A
  misc_feature 1..478: note = isolate BtMf-PicoV-1/SAX2011 polyprotein gene,1
  source 1..478: mol_type = genomic DNA
tgaaaagggggcgcagggtggtggtggttactaaatacccaccatcgccctgcacttcccttttcccctgtggctcagggtcacttagccccctctttgggttaccagtagttttctacccctgggcacagggttaactatgcaagacggaacaacaatctcttagtccccctcgccgatagtgggctcgacccccatgtgtaggagtggataagggacggagtgagccgatacggggaagagtgtgcggtcacaccttaattccatgagcgctgcgaagaaggaagctgtgaacaatggcgacctgaaccgtacacatggagctccacaggcatggtactcgttagactacgcagcctggttgggagtgggtataccctgggtgagccgccagtgaatgggagttcactggttaacacacactgcctgatagggtcagggcctcctgtccccgccgtaatgaggtagaccatatgcc

SEQ ID NO: 507 - DNA, 478 bp, Human rhinovirus B
  misc_feature 1..478: note = strain HRV-B06_p1198_sR1308_2009 polyprotein1
  source 1..478: mol_type = genomic DNA
gtgcgccacatccagtggtgttttgtacaagcacttctgtttccccggagcgaggtataggctgtacccactgccaaaagcctttaaccgttatccgccaaccaactacgtaaaagctagtaacatcttgtttgtaatctggcgttcgatcaggtggatttcccctccactagtttggtcgatgaggctaggaatccctcacgggcgaccgtgtcctagcctgcgtggcggccaacccagcatatgctgggacgcccttttatagacatggtgtgaagactcgcatgtgcttggttgtgattcctccggcccctgaatgcggctaaccttaaccctggagccttgtattacaaaccagtgatattaaggtcgtaacgagcaattccgggacgggaccgactactttgggtgtccgtgtttctctttttactcattattgtcttatggtcacagcatatttgttaaatatactgtgatc

SEQ ID NO: 508 - DNA, 478 bp, Human rhinovirus
  misc_feature 1..478: note = NAT001 polyprotein gene, complete cds.1
  source 1..478: mol_type = genomic DNA
gtgacaatcagccagattgttaacggtcaagcacttctgtttccccggtacccttgtatacgcttcacccgaggcgaaaagtgaggttatcgttatccgcaaagtgcctacgagaagcctagtagcacttttgaagcctatggctggtcgctcaactgtttacccagcagtagacctggcagatgaggctagatgttccccaccagcgatggtgatctagcctgcgtggctgcctgcacactctattgagtgtgaagccagaaagtggacaaggtgtgaagagcctattgtgctcactttgagtcctccggcccctgaatgtggctaatcctaaccccgtagctgttgcatgtaatccaacatgtctgcagtcgtaatgggcaactatgggatggaaccaactactttgggtgtccgtgtttcttgtttttctttatgcttgcttatggtgacaactgtagttattacatttgttacc

SEQ ID NO: 509 - DNA, 480 bp, Rhinovirus C
  misc_feature 1..480: note = isolate RV-C45-cpz1-2013 polyprotein gene, complete1
  source 1..480: mol_type = genomic DNA
gtggtaaatccataccactaatggtcaaacacttctgttcccccggcatgtgaggaataggctccaaaagggctaaagccactagtgtcgttatccgcattggtactacgcaaagcctagtatcactctggaagtctctcggttggtcgctccaccaggtaccccactggtagacctggcagatgaggcaggactcaccccactggcgacagtggtcctgcctgcgtggctgcctgcacacccctacggggtgtgaagcctagagatagacagggtgtgaagagccccgtgtgctaccaatgagtcctccggcccctgaatgcggctaatcttaccccacagctgttgcacgcaatccagcgtgtatgcagtcgtaatgagcaattgtgggatggaaccgactactttgggtgtccgtgtttccttttattcctattatttgcttatggtgacaatattgatagcatcagtgttgtcatc

SEQ ID NO: 510 - DNA, 480 bp, Rhinovirus C
  misc_feature 1..480: note = isolate E0-9 polyprotein gene, partial cds.1
  source 1..480: mol_type = genomic DNA
gtgcttgaccgtcagtaacctggatggtcaccacctattggtcattgtgtacaagcttctatatgtttcaccagaggcgaaaaacgaggttatcgttatccgcaaagtgcctacgagaagcctagtagcactttcgaaacctatggctggtcgctcagctgcttgcccagcagtagacctggtagatgaggctagacattccccaccagcgatggtggtctagcctgcgtggctgcctgcacacccaatcgggtgtgaagccagaaagtggacaaggtgtgaagagcctattgtgctcactttgagtcctccggcccctgaatgtggctaatcctaaccccgtagctgttgcatgcaacccagcatgtatgcagtcgtaatgggcaactatgggatggaaccaactactttgggtgtccgtgtttcttgttttacttttcattgcttatggtaacaattgtagttgatacacttgttacc

SEQ ID NO: 511 - DNA, 487 bp, Hainan gekko similignum picornavirus
  misc_feature 1..487: note = strain LPXYC222841 polyprotein1
  source 1..487: mol_type = genomic DNA
gtgtccgggaagcgactcaagcttttgactgagtctctacaccttcatccgtaacatctttaagtttatgtgcctatggacctctagtgcactgccatcaccgggggtgtattggactggtttttccacaatccattcatcctgaggaattttggctttgttactaggatggtcccaccacacgcttatctgtgcctattgtgtcaaccatgttcttaagtagttgtgcccgtgggtgagtagataaccacaacaatccgataaagcatctcgcaaggatgtgagtaatggagtgtatgtgctacagagacccacaacctgaaccaagagagacacagtgaggattgtaaagggggaactctttgaaagggcatgtcccgcaattcctactgactgacaccgggggttggtgtcggtggattttagcaaatcctgttactgggtgatagccttgtgcacttcacttggttcttgtataagtgctgta

SEQ ID NO: 512 - DNA, 488 bp, Avian encephalomyelitis virus
  misc_feature 1..488: note = strain Pf-CHK1/AEV, complete genome.1
  source 1..488: mol_type = genomic DNA
tttgaaagaggcctccggagactccggaggtattctttcgacccaacccatactggggggagtgtgggaccgtacttggagcgcacggtatatatgtgttcccgcatggcaagggcgtgttaccttgctccctgacgcatggtatgtgtcgatttgattttcaacttatcctaaggtctaggcgtttcgtgccgaaaacctctttgcgtttcacagaaccatcctaaccatgggtgcagtatgggaatcgtgtatgggggtgattaggatctctcatagagggataggtatgtcatcaaaccggggagtactccggctctggcattgggacatttgaattaaccggacctggttcagtatccgggttgtcctgtattgttacggtgtatccgtcttggcatactgaaagggtattcttgggtaatcctttcctactgcctgatagggtggcgtgcccggccatgagagattaagggtagcatttaacc

SEQ ID NO: 513 - DNA, 489 bp, Sapelovirus A
  misc_feature 1..489: note = strain JXXY-a2, complete genome.1
  source 1..489: mol_type = genomic DNA
ttgaaatgggtgtggggtacatgcgtattacggtacgcatatattccacactcatttccccccctccacccttaaggtggttgtatccccataccttaccctcccttctaaaacagatggacaaatggatttgaacttatggcaagtgaatatggtatgactttggatacactttaacggcagtagcgtggcgagctatggaaaaatcgcaattgtcgatagccatgttagtgacgcgcttcggcgtgctcctttggtgattcggcgactggttacaggagagtaggcagtgagctatgggcaaacctctacagtattacttagagggaatgtgcaattgagacttgacgagcgtctcttagagatgtggcgcatgctcttggcattaccatagtgagcttccaggttgggaaacctggactgggcctatactacctgatagggtcgcggctggccgcctgtaactagtatagtcagttgaaacccccc

SEQ ID NO: 514 - DNA, 489 bp, Cardiovirus B
  misc_feature 1..489: note = strain Ruian-Rn93-3 polyprotein gene, complete cds.1
  source 1..489: mol_type = genomic DNA
gttcgtctgctttctgagtactattcatgaaaagggtatgtgctaccccttccttcttggagaatctgcgtggcggtctttccgtctcttgaaaagcgcagatgtagcatgctggaaccggtgaagaaaacagttctctgtggagacttagagcagacatcgaaacagctgtagcgacctcacagtagcagcggaaccccctcctggtgacaggagcctctgcggccaaaagccacgtggataagatccactgctgtgagtggtgcaaccccagcaccctggttcgatggttgttctctgtggaatcagggaatggttattctcaagccctccagtagagaagccaagaatgtcctgaaggtaccccgcgtgcgggatctgatcaggagatcagttaccagtgctctacactggtactctgatttaaaaaatgtcacagcttctccaaaccaagtggtcttggttttccttttacctacaaagttcatg

SEQ ID NO: 515 - DNA, 489 bp, Human rhinovirus A
  misc_feature 1..489: note = strain HRV-A28_p1292_s6470_2000 polyprotein1
  source 1..489: mol_type = genomic DNA
gaagaccaataggcggtggttatccaaaccatcaacggtcaagcacttctgtttccccggttagattgatacgctccaacagggcgaaaacaactctaatcgttatccgcaagatgcctacgcaaagcttagtatcacctttgattctatttggttggtcgctcagctacaaacccagtagtagacctggcagatgaggctagaaacaccccactggtaacagtgttctagcctgcgtggctgcctgcacaccctatgggtgtgaagccgactagttgacaaggtgtgaagagccccgtgtgctcatcttgattcctccggcccctgaatgtggctaaccttaaacctgcagccaatgtacacgatccagtgtgctgttggtcgtaatgagtaattgcgggatgggaccaactactttgggtgtccgtgtttctctttttacctttattattgcttatggtgacagtatatggtatatatattgtcact

SEQ ID NO: 516 - DNA, 491 bp, Porcine sapelovirus
  misc_feature 1..491: note = isolate KS05151, complete genome.1
  source 1..491: mol_type = genomic DNA
ttgaaatgggtgtggggtacatgcgtattacggtacgcatgtattccacactcatttcccccctccacccttaaggtggttgtatccacataccctaccctcccttccacacaggacggacttttggacttggaccttcggcaagcacatatggtatgattactggatacaccttgaatggcagtagcgtggcgagctatggaaaaatcgcaattgtcgatagccatgttagtgacgcgcttcggcgtgctcctttggtgattcggcgactggttacaggagagtaggcagtgagctatgggcaaacctctgcagtattactcagagggaatgtgcaattgagacttgacgagcgtctctttgagatgtggcgcatgctcttggcattaccatagtgagcttccaggttgggaaacctggactgggcctatactacctgatagggtcgcggctggccgcctgtaactagtatagtcagttgaaaccccccc

SEQ ID NO: 517 - DNA, 491 bp, Rhinovirus A
  misc_feature 1..491: note = isolate HRV_A_SK001, complete genome.1
  source 1..491: mol_type = genomic DNA
aaagtgaccaataggcggcaatcacccagattgtcaaaggtcaagcacttctgtttccccggtcgaagctgatatgctccaacagggcaaaaacagctgagatcgttatccgcaaagtgcctacgcaaagcctagtaacattttcgaagttatatggttggtcgctcagccaaaccccatggtagacctggcagatgaggctagaaataccccactggtgacagtgttctagcctgcgtggctgcctgcacaccctctgggtgtgaagccatataatagacaaggtgtgaagagccccgtgtgctcactttgagtcctccggcccctgaatgtggctaaccttaaccctgcagctagtgcatgcaatccagcatgtatctagtcgtaatgagtaattgcgggatgggaccaactactttgggtgtccgtgtttcctttttatccttattgattgcttatggtgacaatatatagtactatatattgacacc

SEQ ID NO: 518 - DNA, 492 bp, Chicken picornavirus 2
  misc_feature 1..492: note = isolate 44C, complete genome.1
  source 1..492: mol_type = genomic DNA
caccccctactgccctaacccccaaagttagttatagggtggctccctacccttactccacggggtaagccctaacccggttgaatctcaagatcagccttagcgaggactattagtaccgctcaaaccctttgcctgtagtgcccaggggtcacagaggggtgaccctctccctggggcccaaaaggctaggtggcaagacagggtccaagtgaggggctactctaagtagccccaagctgaacatcctgtctgaagccacccttgcagggccaggtttgattggggaaactagacaccagctttgtcctgggattggggggatatcgagttagtccaggaggtgcgagtagatgcccccgaaggtaccccaggcacatctgggatctgatcgggggcccgtgactatacaataggtaaaccgggttaaaaaacatgaaagcgcctctctctttcctacttcttttattgactggtgacaaaaatagcagt

SEQ ID NO: 519 - DNA, 493 bp, Avian encephalomyelitis virus
  misc_feature 1..493: note = strain van Reokel, complete genome.1
  source 1..493: mol_type = genomic DNA
tttgaaagaggcctccggggtatccggaggtcctttttcgacccaacccatactggggggtgtgtggggccgtatttggagtgcacggtatatatgcattcccgcatggcaagggcgtgccaccttgccccttgacgcatggtatgtgtcatcatttgccttggttaaaccccataaaacgaggcgccacgtgccgaaaatccctttgcgtttcacagaaccatcctaaccatgggtgtagtatgggaatcgtgtatgggggtgattaggatctctcgtagagggataggtgtgtcattcaaatccagggagtactctggctctgacattgggacatttgatgtaaccggacctggttcagtatccgggttgtcctgtattgttacggtgtatccgtcttgacacactgaaagggtattcttgggtaatcccttcctactgcctgatagggcggcgtgcccggccacgagagattaagggtagcaatttaaac

SEQ ID NO: 520 - DNA, 494 bp, Quail picornavirus QPV1/HUN/2010
  misc_feature 1..494: note = complete genome.1
  source 1..494: mol_type = genomic DNA
tttgcatcagttcgcccctcccctcaccatacctttttcccctctttaggactgatacttggttatgatgagcagaggatttcgcaagttatgcttcttgataaaaagtaattcacgaatcatgggattatagcctggaagtgaacactcatgtggcaagtgggttagtagctctccatgttcccatgtgcagtggactgacaacagtgagttcggggttgtgtagtaaagggaaagtattacttacccgcacctgctatacgtggtgtacgtaggatacgagttagtagtgcttagcaactttaaactggtgctgaaatattgcaaggtcactgaagttgtgaacgcgaacgctccgccactgccatgtatagcgtgcaatgcataaatggtgcactacatgatacgagggaatgggaaaccctccatggccgaatgcagggtgacagcctgccggcggatgcctgttgttagtataatccgttgtttgccac

SEQ ID NO: 521 - DNA, 494 bp, Avian encephalomyelitis virus
  misc_feature 1..494: note = strain L2Z, complete genome.1
  source 1..494: mol_type = genomic DNA
tttgaaagaggcctccggagtgtccggaggctctctttcgacccaacccatactggggggtgtgtgggaccgtacctggagtgcacggtatatatgcattcccgcatggcaagggcgtgctaccttgccccttgacgcatggtatgcgttatcatttgccttggttaagccccatagaaacgaggcgtcacgtgccgaaaatccctttgcgtttcacagaaccatcctaaccatgggtgtagtatgggaatcgtgtatggggatgattaggatctctcgtagagggataggtgtgccattcaaatccagggagtactctggctctaacattggcacatttgatgtaaccgaacctggttcagtatccgggttgtcctgtattgttacggtgtatctgtcttggcacactcacagggtatttttgggtaatcctttcctactatctgatagggtggcgtgcccggccacgagagattaagggtagcaatttaaac

SEQ ID NO: 522 - DNA, 494 bp, Human enterovirus
  misc_feature 1..494: note = strain NYS/2006/1999/CVB2 polyprotein gene,1
  source 1..494: mol_type = genomic DNA
atcgagaaacctagtaccaccatgaaggttgcgcagcgtttcgctccgcacaaccccagtgtagatcaggccgatgagtcaccgcgttccccacgggtgaccgtggcggtggctgcgttggcggcctgcccatggggcaacccatgggacgcttcaatactgacatggtgtgaagagtctattgagctaattggtagtcctccggcccctgaatgcggctaatcccaactgcggagcagatacccacacgccagtgggcagtctgtcgtaatgggcaactctgcagcggaaccgactactttgggtgtccgtgtttccttttattttttgtactggctgcttatggtgacaattgagagattgttaccatatagctattgggttggccatccggtgtcaaacagagcgatcatctatttgtttgttggattcatacccttaaaccttaaagccctaaacactcttaattttgtgttgcaactgaactcagcaaa

SEQ ID NO: 523 - DNA, 496 bp, Bat picornavirus 3
  misc_feature 1..496: note = strain TLC5F, complete genome.1
  source 1..496: mol_type = genomic DNA
taagcggaaagcattcttgtcccccggtcagtaacctataggctgttcccacggctgaaagggtgaacatccgttacccgcctcagtacttcgagaaacctagtacgcctgatgattccaaattggtatgatccggtcaaccccagaccagaaactgtggatgggggtcaccattcctagtatggcaacatacaggtgtccccgcgtgtgtcacaggcccttacgggtgccatttcggatgagtctggccgaagagtctattgagctactgttgatacctccggccccctgaatgcggctaatctcaaccccggagccactgggtggtgaaccaaccacttggtggtcgtaatgagcaattctgggacggaaccgactactttggggtgtccgtgtttcttttgttcatattaaactgttttatggtcacaacacaacttggtacgatttgtgattattcactgctcacttgtcacagtaaatatacacaatcatc

SEQ ID NO: 524 - DNA, 496 bp, Enterovirus Stuttgart 97
  misc_feature 1..496: note = polyprotein gene, partial cds.1
  source 1..496: mol_type = genomic DNA
tacttcgagaaacccagtaccaccatgaaggttgcgcagtgtttcgctccgcacaaccccagtgtagatcaggtcgatgagccaccgcattccccacgggcgaccgtggcggtggctgcgttggcggcctgcccatggagcaatccatgggacgcttcaatactgacatggtgtgaagagtctattgagctaattggtagtcctccggcccctgaatgcggataatcctaactgcggagcagacgctagcaaaccagcgagtagtctgtcgtaacgggcaactctgcagcggaaccgactactttgggtgtccgtgtttccttttattctcatactggctgcttatggtgacaattgaagaattgttgccatatagctattggattggccatccagtgacaaatagagcaattgtctatttatttgtcggttttgtaccgttaaactacaaagttctaaacactctcaatcttgttttatcactcaatacatcaaa

SEQ ID NO: 525 - DNA, 498 bp, Simian pegivirus
  misc_feature 1..498: note = isolate SPgVkrtg_RT11 polyprotein precursor, gene,1
  source 1..498: mol_type = genomic DNA
gcttcggcgcctagccgaaaccgacaccctgttcgaaatctttccgaaacatagagcggttgtggggaaactggacgaaagccagcggatggggggtgacagggtaggcaggtcgtaaatcccggcctccctggtacctggtataagtctggtggaaccatagcttaactgtgtggactttggacgtaggcagagtgcacggtccacaggtgacgcctataccggtgtgaataataggccgactcgagcggagtcgttaaactgaggacccattctaggatcacaacttggctgccgtacggtgacgccgctaaagtcacagtgggttaagtccggcgggttgacaacaccaggcaggcggggggacgctactgttgcgccctgtgagttccctagttgggtaggcatggggggacccagctccgcggcgcgctacagccggggtaggccaaaaatccgaaaggtgaggccgggtcccatttttcctttttgagtctc

SEQ ID NO: 526 - DNA, 498 bp, Pestivirus J
  misc_feature 1..498: note = isolate NrPV/NYC-D23 polyprotein gene, complete cds.1
  source 1..498: mol_type = genomic DNA
gtataagggttgggaaccttgtaccaagctacctctgccattcagtatttgggagtagaagtagatgtgtttacaaactcacacgtgtgggggcggggatagactgtgccagcggtcgtgtaccagcacctacgcatacgtgtggactgcgaaccaggagagcacctaggtctgacaagctgtgagaacacagtagtcgtcagtgagtcagctggtaaggatcacccacctggatactcacgtggacgagggagtttcccagtcagaaacctacaccagaggaggggtcctctggagacatggatggtctgagtaacagactatctactggggtgtgctgcctgacagggtctcggctgatagcctggctagcagtataaaaatcagttgaattggcatatgagttgtgaacatctagtaaacaatgaaagacaaaaacaaaaaatgagcataataaaaaaattgtacaatccactactcaggtgtggctgcagactt

SEQ ID NO: 527 - DNA, 500 bp, Kunsagivirus 1
  misc_feature 1..500: note = strain roller/SZAL6-KuV/2011/HUN, complete genome.1
  source 1..500: mol_type = genomic DNA
tttcaaatcggactccggtagttataccggagcccggtttggacgcttgggccgcgttaacagccccccacccctttcccactgactgatttctcggattggactcatttgcattgctaactctgattctggatttccccgtttatgtcgtcgcggtcggaagtgcacgtacttcgacgttgatctgatggcgtttgtttccaggggggaggtggcggcagaaacgcccccgccgtaaacttcggcgggccacgcctgtcaagccactccctggggccgagcgcctgaggtgatacagagagataagcacactgggcgctgacaacgcccgggacctcagtgagaagagcagtagggccgtgtttatgggactccattggatatcccccgcttgtcggaactcacggctactccgggttgggaagcccgcgactggtactgtactgggtgatagcctggtgccttccctctcactgttgtatgaaggctgaaaaccccct

SEQ ID NO: 528 - DNA, 501 bp, GB virus C
  misc_feature 1..501: note = Hepatitis G virus, isolate D50 polyprotein gene, complete1
  source 1..501: mol_type = genomic DNA
accgacgcctatcaaagtaggcaataaggcctcgcgccgaaccggcgaccggccaaaaggtggtggatgggtgatgccagggttggtaggtcgtaaatcccggtcatcttggtagccactataggtgggtcttaaggggaggctacagtccctctagtgcctgtggagagaaagcgcacggtccacaggtgttggtcctaccggtgtgaataaggacccgacgtcaggctcgtcgttaaaccgagcccgttaaccccctgggcaaacgacgcccacgtacggcccacgtcgcccttcaatgtctctcttgaccaataggcaaagccggcgagttggcaagggccagtgggggccgggggcagggagaaggactccctgtcctgcccttcccgggggtgcgggaaatgcatggggccacccagctccgcggcggcctgcagccggggtagcccaagagccttcgggtgagggcgggtggcatttttctttcctataccgatc

SEQ ID NO: 529 - DNA, 502 bp, Human rhinovirus A
  misc_feature 1..502: note = strain HRV-A71_p1047_sR141_2008 polyprotein1
  source 1..502: mol_type = genomic DNA
ctttgtgtttgagggccaataggtgagtggtaaaccataccactaaaaggtcaagcacttctgtttccccggtgtgcagggaataagctctacccgggctgaagccttaaacatcgttatccgcacaattactacgcaaagcttagtagtaccttgaaagctccttgactggtcgctccgctagattacccatctagtagacctggcagatgaggctggatactccccactggcgacagtgatccagcctgcgtggttgcctgcacacctggtaacaggtgtgaagccaatgagtagacagggtgtgaagagccccgtgtgctaattgtgagtcctccggcccctgaatgcggctaatctaaccccacagctaatgcatacaaaccagtatgtatttagtcgtaatgggcaactgtgggacggaaccgactactttgggtgtccgtgtttcctttattctcattattttgcttatggtgacaaatacgatatatttgtcatc

SEQ ID NO: 530 - DNA, 506 bp, Phacovirus Pf-CHK1/PhV
  misc_feature 1..506: note = complete genome.1
  source 1..506: mol_type = genomic DNA
gtgtgtcatttctcccctccccctcccaaaccttttccccctctaatcggattgattaacccggttaaagatgattaatggtttgtgagttgatatgatggcccggcattgaatccgggaattcttaagtaatggaattgcatccaatatgaaagtgagtgtggcaagctcacaagtagtacttggctctgcccattatttgaggaccaactcttcttgactacaatgtgtttaaagtaaactggaccacattgtgtatccagacaactccatttgataatgtacgctggaaacgttttcagtgcatagggtcctaaagtggtgctgaaatattgcaagctcaatgggatactgaacgctgaaaaccgccgctgttatcatatgggcccctagtgggtaaatgttggctttaggcatatactgcttgggaatgcagtactggttgtagacagggtgatagcctaccggctggcgtagttgagttggtatagccagttgattgccat

SEQ ID NO: 531 - DNA, 506 bp, Seal picornavirus type 1
  misc_feature 1..506: note = isolate HO.02.21, complete genome.1
  source 1..506: mol_type = genomic DNA
ttcaaaggtggcgggagagttggcctcacgctgtttagcgtgagagctggctctcctgccccttcccctgagccggggatcttggctcattcccctcttttctatcctccctcattggactttacggatgacccggcataaacttgacaaccgatgttggatttcccttgtggctgtgatggaggacataccctcgggtgtagttgtgtgcgtgtcgctctgcgactcgagcttcaaagtggtgctgaaatattgcaagcgtcgttgctcgattaacggagtggtacaatcctatgaacccaagtgcattcatgcgaaagccccggaggggtgagtagcatggactcgaatcagaagagctggagctcgcttggtacggcacgtagcattgctttgcctaaagaccaagggggtatggctataggtgggggcctatagcttgtccagtgctggttgacagactcgtgctacgcgtctggttcgagtataagtagctgcaactcact

SEQ ID NO: 532 - DNA, 508 bp, unidentified
  source 1..508: mol_type = unassigned DNA; note = Crohivirus B clone Bat/CAM/CroV-P25/2013, polyprotein gene, complete1 sequence
gtataagagacaggtgtttgccttgtcttcggactggcatcttgggaccaaccccccttttccccagccatgggttaaatggcaataaaggacgtaacaactttgtaaccattaagctttgtaattttgtaaccactaagctttgtgcacataatgtaaccatcaagcttgttagtcccagcaggaggtttgcatgcttgtagccgaaatggggctcgaccccccatagtaggatacttgattttgcattccattgtggacctgcaaactctacacatagaggctttgtcttgcatctaaacacctgagtacagtgtgtacctagaccctatagtacgggaggaccgtttgtttcctcaataaccctacataataggctaggtgggcatgcccaatttgcaagatcccagactgggggtcggtctgggcagggttagatccctgttagctactgcctgatagggtggtgctcaaccatgtgtagtttaaattgagctgttcatatacc

SEQ ID NO: 533 - DNA, 509 bp, Bear picornavirus 1
  misc_feature 1..509: note = isolate CH-1, complete genome.1
  source 1..509: mol_type = genomic DNA
gctcaggggaaggggtagggtggctggacgcccgccatacaggcgggctccaaccaccccaccccttcccctgagccggggttctttggctcatcccccttctttatctatctccctcatgtacggattaaactggcataaatttgatatcgatgttggattatcccttaaatggttttggtgggggacatagccccgggcgacctctagtcggacatgctggctttcctagattcaaagtggtgctgaaatattgcaagcgtcgtttctaggtaggttggtatgaatggctttagtgaacccaactgcaatcatttgaacgcccctgaggggttagtaaaatggactcacagctggagagctggagtgagtgcaccacggtacatagcattgctctacctatagggtgtacttgcatggctaagggtgggggcccttagcttgtccagtgctgggtgacagcctcgtgccacgcgctggcctgtgagtataagtggctgaatatcgct

SEQ ID NO: 534 - DNA, 510 bp, GB virus C
  misc_feature 1..510: note = isolate P187 polyprotein gene, partial cds.1
  source 1..510: mol_type = genomic DNA
aagccccagaaaccgacgccccacggaatagtgggactaaggcccaatcaaagccaggaattccggccgaaagggtgtggatggtggtgacagggttggcaggtcgtaaatcccggccattctggtagcacctataggtgggttgaactggcggcgagaagtccctaatacctcttgcacgtgttgcgcacggtccacaggattggtctttccggtgtgaatagagacccgacgccagtcacgtcgttaaacagagtgcctttccccatcgcaacgccggccctcgtacgggaacgtcgcccttttaataccactctggtcagtagcatgtgcggcgagttggcaatcccagggggcgggcggggcgtacacggtaggaccgtgccgcctgcgttgtcggggtctggtattaatgcatggggccacccagctccgcggcggactgcagccggggtagaccaagatccttcgggtgaggtcgggtggcatctttctttctttgacatcatg

SEQ ID NO: 535 - DNA, 512 bp, Bovine picornavirus
  misc_feature 1..512: note = genomic RNA, complete genome, strain:1
  source 1..512: mol_type = genomic DNA
ttttctcccctccccctccacttaccttttccccctcttgtaacgctagaagtttgtgcaaatcgcctgtagggtactgcaatccagcagtgcataggcaaagcttttcttgttaccccaccccacattatactgaggaggatggtgaaattgtgttagtatgggttagtagcggtgacccgggtaaccccaacccagaaactcacggatgagatgaacaggaccccacatggtaacgtgtgtgttcgtctgccccgcaaggtgaggccgtgagagctccgcacgcgaaaaccttgaaaacccaaaagtaccttgagctcttcgctattttgtgtttcctccaggaccctgaatgcggctaaacccaacccgcgatccgcacgtagcaacccagctagagtgtggtcgtaatgcgcaagttgcgggcggtaccgactactttggtgttcctgtgtttcctttattttattttaaatttttatggtgacaacagctggaaaataagagtgatc

SEQ ID NO: 536 - DNA, 512 bp, Bovine picornavirus
  misc_feature 1..512: note = genomic RNA, complete genome, strain:1
  source 1..512: mol_type = genomic DNA
ttttctcccctccccctccccttaccttttccccctctagtaacgttagaagctagcactaaccgcctgtagggtactgcaatccagcagtgcataggcaaagtctttcttgtcaccccaaccccacactatactgaggaggatgacgaaatttgactagtatgggttagtaacggtgatccgggtgaccctgacccagaaactcacggatgaggtgaacagaaccccgcacggtaacgtgtgtgttcgcctgccccgcaaggtgaggccgtgagagctttgcacgtaaaacccctgaaagtccgagagtagtttgagctcttcgctattttgtgtttcctccaggaccctgaatgcggctaaacctaacccgcgatccacacatggcaatccagctagggtgtggtcgtaatgcgcaagttgcggacggtaccgactactttggtgttcctgtgtttcttttattttattttaaatttttatggtgacagcaatccagaaaagagataaac

SEQ ID NO: 537 - DNA, 512 bp, Picornaviridae sp.
  misc_feature 1..512: note = isolate sru051pic1 genomic sequence.1
  source 1..512: mol_type = genomic DNA
gagtgcttgatttgtaatggaaaaagcaaagcttatccaaatacaaatcaagcacccgtttggggagttcaccgtccccttaattcataggtgattggactgattttgatactgatttaggatttcctttgacctggattgggataaagacttaaacatgttgaataaggatggattagctcgatccattaggtgggtctcatatataccaccacagagccggagaataaccttacaaaggatgttagtaattaaatacacttgttgggtggcgtaactgcagaccatgtggacatgggcctatgttgtggtaacacaatcccatgtggccaaaagcctagtggataacaatccacccatggtaatccaatttggacactcaacatttaagtgtttagtgaaagtatctgatggggtgacactctgtgagaacccagggagtagatgcccaggaggtacccttttaaaggatctgacttggggcctagacacttaatgctaggttaaaaact

SEQ ID NO: 538 - DNA, 513 bp, Simian pegivirus
  misc_feature 1..513: note = isolate SPgVkob_OB23 polyprotein precursor, gene,1
  source 1..513: mol_type = genomic DNA
cctccccctcccccgaccggagcggaactccggaaaaccgacacctagtgaacatttcggatcattggcgcggatctggtgttaatctggacgaaagcccgtggacgggcggtgacagggttggcaggtcgtaaatcccggccgccctggtagcgggtataagtctggaggaaaccagtgaaccctcagtgtgaagtcagactaacgaaagtgcacggtccacaggagacgccgattccggtgtgaataatcggccgactcgagcggagtcgttaaactgaggacctccttggggatggcaacttggcttgcgtacgggaacgccgcaaaagtcacagtgggttaagtccggcgggttgacaatcccagcaaggcgggggggcactattgttgtgccctgccagttcccccaagggggtaggcatggggggacccagctccgcggcgcgctacagccggggtagcccaaaatccttcgggtgagggcgggtcccatgtcccttttttgtatgc

SEQ ID NO: 539 - DNA, 513 bp, GB virus C
  misc_feature 1..513: note = isolate G3825 polyprotein gene, complete cds.1
  source 1..513: mol_type = genomic DNA
cccccccccggcactgggtgcaagccccagaaaccgacgcctactgaagtagacgtaatggtccagcgccgaactggcgaccggccaaaaggtggtggatgggtgatgacagggttggtaggtcgtaaatcccggtcatcctggtagccactataggtgggtcttaaagggaggttatggtccctcttgcgcatatggagggaaagcgcacggtccacaggtgttggtcctaccggtgtaataaggacccggcgctaggcacgccgttaaaccgagcccgttactcccctgggcaaacgacgcccatgtacggtccacgtcgcccttcaatgtctctcttgaccaataggcttagccggcgagttgacaaggaccagtgggggccccccccgttgcccttcccggggaggcgggaaatgcatggggccacccagctccgcggcggcctacagccggggtagcccaagagccttcgggtgagggcgggtggcatttttctttcctgtaccgatc

SEQ ID NO: 540 - DNA, 513 bp, Picornaviridae sp.
  misc_feature 1..513: note = isolate wftcra74pic2 genomic sequence.1
  source 1..513: mol_type = genomic DNA
gttaggcatagacacctacgaggcccaggacatacgcaatttcaattgcgaaaatgccctgggccccgtaggtgtctatgcctaacttcaacgagtagtggccgtaagccactttctttctaaactctctaactctacattttcctccttgtttgcaggttttatggtcttaaacttggaacgcgaatgacgatgaaactggaacaactttctgattgggctacccgccttccaaccggcaatggtgtaaaggtaaaagggtagattgctaccacttatggcatgtgaactggattaccaatgtagcatggaccctctaggtggggaatggcaatcgactatcctagctagattggaccactcatgggctttgggcgcgaattacgcagaacctaccgacaacatgtctggaaaccccatgagtggaggggaattgggaaaacccctttgatccaaactgcctgatagggtcgcggctggccgagttaggattagtagtcagtagaatttaac

SEQ ID NO: 541 - DNA, 516 bp, Rosavirus M-7
  misc_feature 1..516: note = polyprotein gene, complete cds.1
  source 1..516: mol_type = genomic DNA
tatgcatcactggacggcctaacctcggtcgtggcttcttgccgatttcagcgctaccaggctttctggtctcgccaggcgttgattagtaggtgcactgtctaagtgaagacagcagtgctctctgtgaaaagttgatgacactcttcaggtttgtagcgatcactcaaggctagcggatttccccgtgtggtaacacacgcctctaggcccagaaggcacggtgttgacagcaccccttgagtggctggtcttccccaccagcacctgatttgtggattcttcctagtaacggacaagcatggctgctcttaagcattcagtgcgtccggggctgaaggatgcccagaaggtacccgcaggtaacgataagctcactgtggatctgatctggggctgcgggctgggtgtctttccacccagccaaaacccgtaaaacggtagtcgcagttaaaaaacgtctaggccccacccccccagggatggggggttcccttaaaccctcacaagttcaac

SEQ ID NO: 542 - DNA, 517 bp, Crohivirus A
  misc_feature 1..517: note = gene for polyprotein, complete cds, strain: ZM54.1
  source 1..517: mol_type = genomic DNA
gttgaagtccatttcttgcttgcccccgatgaatcctgttaaggcctcacggccctaagggtgaaactcggttatcccctcctgtacttcgagaagattagtacaacactatgaaatctacatcttgtgatccgggataaccccaatcccagaaacctgtgatgggcgtcaccacccctcttatggtaacataagggtgtcgccgcgttggcacaggaccctttgggctggatgtttttagtaatggtgtcgaaggtcctattgagctacaggagtttcctccgccctggtgaatgcggctaatcttatccctgagcctaaggttgcgatccagcaacttgatggtcgtaatgcgtaagttgggggcggaaccgactactttccagaaggcgtgtttctttgttttgtctgttactatggtgcatgatatagatattgaatatttgatctttttgagctgtttcttatcttattgctacatcctttcaggtgttggatttacattttggttaataag

SEQ ID NO: 543 - DNA, 518 bp, Foot-and-mouth disease virus
  misc_feature 1..518: note = type SAT 2, isolate SAT2/EGY/24/20141
  source 1..518: mol_type = genomic DNA
gacgtcagcgcacgaaacgcgccgccacttcggaacactcgtacaaacacgatcacacgcgggtttcccaactggcatcctcgtgcaacctggagtttcgcctggtctttccaggtctggagagatgacacgttgtactggaaccaactccacgatcggtctactggcgggtgctagtaacgacattgttgcttcgtagcggagcatgcaagccgtgggaactcccccctggcaacagggacccacggggccaaaagccacgttctccgaaccttgcatgtgtgcaaccccagcacggtaacactgttgtgaaacacgctttaaggtaacactgagactggtacttggtttctggggacaggctaaggatgccctccaggtaccctgaggtaacaagcgacactcgggatctgaggaggggactgggacttctataaaagtgcccagtttaaaaagcttctatgcctgaataggtgaccggaggccggcaccttttccttttacacacaaaccactac

SEQ ID NO: 544 - DNA, 518 bp, Encephalomyocarditis virus
  misc_feature 1..518: note = strain 1086C polyprotein gene, partial1
  source 1..518: mol_type = genomic DNA
ccggtgtgcgtttgtatacatgttacttccaccacgttgtcgtcttttgacaacgtgagggcccggaacctggccctgtcttcttggcgagtattcctaggagtctttctcctctcgacaaaggaatacaaggtctgttgaatgtcgtgaaggaagcagttcctctggaagcttcttgaagacaagcaacgtctgtagcgaccctttgcaggcagcggaatcccccacctggtaacaggtgcctctgcggccgaaagccacgtgtataagatacacctgcaaaggcggcacaaccccagtgccacgttgtgagttggatagttgtggaaagagtcaaatggctctcctcaagcgtattcaacaaggggctgaaggatgcccagaaggtactccactggctggaatctgatctggggcctcggtgcacgtgctatacacgtgttgagtcgaggttaaaaaacgtctaggccccccgaaccacggggacgtggttttcctttgaaaaccacgaagataat

SEQ ID NO: 545 - DNA, 520 bp, Foot-and-mouth disease virus
  misc_feature 1..520: note = type SAT 1, isolate SAT1/ZIM/22/891
  source 1..520: mol_type = genomic DNA
gggacgtcagcgcacgaaacgcgctgttgctctttgcattcttgtacaaacacgatctcacgcaggaatcttagaccaacccaacccgtgcaactgcaagtttcacccggtctttccgggcctagagagacgaacagctgtactgagactgactccacgatcggtctactagcgggtgctagtaacactcactttgcttcgtagcggagcacatgagcggtgggaacccccccatggtaacatggacccaccgggccaaaagccacgcctcacggcctcatgtgtgtgcaaccccagcacggcaacttgtttgtgaaacacatcttaaggtaacactgagactggtactcggtttctggagacaggctaaggatgcccttcaggtaccccgaggtaacaagagacactcgggatctgagaaggggaccaggagttctttaaaactgcttggtttaaaaagcttctatgcctgaataggtgaccggaggccggcaccttttcctttatccacaacaacttt

SEQ ID NO: 546 - DNA, 520 bp, Human enterovirus C105
  misc_feature 1..520: note = strain BU5 polyprotein gene, complete cds.1
  source 1..520: mol_type = genomic DNA
ccagtgtggtttcgagcaagcacttctgtttccccggccgcgccctatatgctgtgcaaacggcagaaaggggcaacgtcgttacccgcttgcatactacgggaaacccagtaccaccattgattgtattgagagttgcgttcagcgcctctcccccctggcgtagctcgggccgatgaggctcagaagcccccacaggtgactgtgtctgagcctgcgttggcggcctgcccgcacctcttggtgtgggacgcttaatacatgacatggtgcgaagagtctactgtgctatgtaagattcctccggcccctgaatgtggataatcctaaccactgatcccatgtgcgcaaaccagcgtgcggtgggtcgtaacgcgcaagtcggtggcggaaccaactactttgggtgtccgtgtttcctttattacctattgaatgtttatggtgacaattgcttgattcagttgttgccatttattacattcgttgacctagactgaaaaccaactgaaccattaca

SEQ ID NO: 547 - DNA, 522 bp, Rabovirus A1
  misc_feature 1..522: note = strain HT5, complete genome.1
  source 1..522: mol_type = genomic DNA
ccgggtataacccggagttttggggcaggtccaagccccacataggaacatacgatccacggatcgtgtgttcttttatgctttctaaccttaccctttgtaaccattacgctttacgccgcatggtgtttggcggcaccatgacgtggacaagaggttacgccattacgatatgtaccctccccttttggggagagaccgaccaattatggtacagtatccaactgtattgtggtcaagtacttctgtttccccggtgatgcgggataggctgtacccacggccaaaacctgctgatccgttacccgactcacatctacgaggaggctagtaaaaggcatgaagttcaagagtatgatccaaccagatccccactggtaaactagtgatgagggttcccgttccgaacatggcaacatgtgggttccctgcgttggcactaggccccttccgaggggtgctctgaagatggattgttgatgaagaccaatttgtgcatgtgtttatcctccggccctctga

SEQ ID NO: 548 - DNA, 523 bp, Simian pegivirus
  misc_feature 1..523: note = isolate SPgVkrc_RC58 polyprotein precursor, gene,1
  source 1..523: mol_type = genomic DNA
ggggaatctcacccccccccgtccggttccggaagaatcggaaaccgacaccctgaccaatcattcttgatcatagagtggatgttagtgaaagccagacgaaagccggcggatgggtggtgacagggttggtaggtcgtaaatcccggccaccctggtacccggtataagttgggcggaagctgactgaagctccgtgctcttttctgtgcgttcttggtgcacggtccacaggtgacgcctataccggtgtgaataataggccgactcgagcggagtcgttaaactgagaacctccatacggatggcaacttggcttgcgtacggggacgccgctaaagtcacagtgggttaagtccggcgggttgacaaccccagcaaggcgagggggtcctattgttggactctgccagttcccggtggaggtaggcatggggtggcccagctccgcggcgcgctacagccggggtagcccaaaatccgaaaggtgagggcgggccacatgtccgaaatttagtcaagc

SEQ ID NO: 549 - DNA, 523 bp, Echovirus E19
  misc_feature 1..523: note = strain HAI/2016-23036E polyprotein gene, partial cds.1
  source 1..523: mol_type = genomic DNA
ggaaaaaacgtccgttatccggccaattacttcaagaaacccagtaccaccatgaaggttgcgcagcgtttcgctccgcacaaccccagtgtagatcaggtcgatgagtcaccgcattcctcacgggcgaccgtggcggtggctgcgctggcggcctgcccatggggcaacccatgggacgcttcaatactgacatggtgcgaagagtcaattgagctaattggtagtcctccggcccctgaatgcggctaatcctaactgtggagcagattcccgcatgccagcgggtggtctgtcgtaacgggcaactctgcagcggaaccgactactttgggtgaccgtgtttccttttattcctatattggctgcttatggtgacagttgagagattgttaccatatagctattggattggccatccggtgacaaacagagcaattatctaccaatttatcggttttgtaccattgaatttcaacgcattcaaaaccctcaactttattttgactcttaatacagcaaa

SEQ ID NO: 550 - DNA, 524 bp, GB virus C
  misc_feature 1..524: note = isolate UU1, complete genome.1
  source 1..524: mol_type = genomic DNA
cactgggtgcaagccccagaaaccgacgcctatctaagtagacgcaatgactcggcgccgacccggcgaccggccaaaaggtggtggatgggtgatgccagggttggtaagtcgtaaatcccggtcatcttggtagccactataggtgggtcttaagggaaggttaagattcctcttgtgcctgtggcgagacagcgcacggtccacaggtgttggccctaccggtgtgaataagggcccgacgtcaggctcgtcgttaaaccgagaccgacacccacctgggcaaacgacgcccacgtacggtccacgtcgcccttcaatgtctctcttgaccaataggctttgccggcgagttgacaaggaccagtgggggccggggacgggggggagggacccccccgccccgcccttcccggtgggacgggaaatgcatggggccacccagctccgcggcggcctgcagccggggtagcccaagagccttcgggtgagggcgggtggcatttttcctttctgtactaatc

SEQ ID NO: 551 - DNA, 524 bp, Carp picornavirus 1
  misc_feature 1..524: note = isolate F37/06, complete genome.1
  source 1..524: mol_type = genomic DNA
agctacaggaaagagagagataatcacagcacataaatacaactacagaagagagcctttccctgagcactatttacagcaaaccacgctgggaaaagtggtagcatgacccacttacgggttacttagtataggattttaatatcttcgattctttattttcttttcttaactaagttcgcccggactttatccgtgttttattttagtttaagcaaaattgagtaactaagtttttaacctgccaaatggtgagaagtaactctgtgaaaataccatttgtgcatgaaattgtcttgaaaactcttaggcttttggggggtcccactgctgtttggaggactattgacagactctattgtagttgagtagtgactaatgataacgatttgcgtattacgcaatgggctgtacccgttagatttagtatgccggggggaggggtcccactggattgcactatgtaacctgacagggcgtctgccgacgcactacaatgaggataagatcggctgtttttattt

SEQ ID NO: 552 - DNA, 527 bp, Human pegivirus
  misc_feature 1..527: note = isolate GBV-C-ZJ-180501, complete genome.1
  source 1..527: mol_type = genomic DNA
cccggcactgggtgcaagccccagaaaccgacgcctatttaaacagacgttatgaaccggcgccgacccggcgaccggccaaaaggtggtggatgggtgatgccagggttggtaggtcgtaaatcccggtcatcttggtagccactataggtgggtcttaagggttggtcaaggtccctctggcgcttgtggcgagaaagcgcacggtccacaggtgttggccctaccggtgtgaataagggcccgacgtcaggctcgtcgttaaaccgagcccattacccacctgggcaaacaacgcccacgtacggtccacgtcgccctacaatgtctctcttgaccaataggctttgccggcgagttgacaaggaccagtgggggctgggcgacgggggtcgtataggaagaaaaatgccacccgccctcacccgaaggttcttgggctaccccggctgcaggccgccgcggagctggggtagcccaagaaccttcgggtgagggcgggtggcatttttcttcctataccgatc

SEQ ID NO: 553 - DNA, 527 bp, Bat hepatovirus
  misc_feature 1..527: note = SMG18520Minmav2014 polyprotein gene, complete cds.1
  source 1..527: mol_type = genomic DNA
ttcaaaagccccagcggggtttcattaccccgctgtggcttttggacttccctaggatggggaagtaaattaccatcctcgcgtttgccgtgcgttaacggctacttttcttctagctgtagaagtaaaattcagcatgttttatgtttgtttgtcttgtttgttatatacatttttacactcctacaaatgcacatgaagaacagtttgtagagattaacaaacgcttagctgaacctaggtggtgaatctagtagtaagataagtagaggaagctataccttaagttggttgggccctcgtgtttgctctataaacaaaaccaagtgagtagagtggatgaacagtactaaatccctgagtacagggaacctcacaggtgtgatacacttatgtctatgtgacctggttggaggttgggcgtgccctatgatactggagtgggagatcttttggggaacccacgttttcacactgcctgatagggtcttgccgagagactcacttgtttcggctgtacttgtaac

SEQ ID NO: 554 - DNA, 527 bp, Picornaviridae sp.
  misc_feature 1..527: note = isolate ecw123pic1 genomic sequence.1
  source 1..527: mol_type = genomic DNA
gggctacacatgtgataccatgttctagcatggaaaatcacacatgcagcccgatttcgggcttgggaacccgttcatcaagatcccataacctttcttttcttttgtctatcccttgagtagctaggctcgcggcagggtcttgtatatacctgcactagctgccacgaagtgctacagaaaccattagtatatatttagaaaccacctgttgacgtaactgtgattgattgcctggggctgagggcatggtaacatgcaccccaggggccaaaagcctagtgggtaacaacccaccattcatgatgcccttcttggcacaacaagtggatctctctatctatagaacatgggagtatggtatggagtggtgtaaggagcacgctagtagatgccccataggtacccttctggatctgagtgggggccatgaggaggtctttccctctgaattggttaaaaaccatgaacgtttgctccgcccatctttcttctaattttatcaacttacttgaattctgatcaca

SEQ ID NO: 555 - DNA, 528 bp, Hepatovirus A
  misc_feature 1..528: note = isolate KibOB-1, complete genome.1
  source 1..528: mol_type = genomic DNA
cttttcacgctttctgtcatcttatttcctgggctctccccttgcccaaggctctggccgttgcgcccggcggggtcaactccatggttagcatggagctgtaggagtctaaattggggacgcagatgctgggaacgtcaccctgcagtgttaacttggctttcatgaagctctttgatcttctacaagaggtaggctacgggtgaaacctcttagattaatactcctatggagagatatcttgaatagggtaacagcggtggatattggtgagttcctttgggacaagaaccattcaacaccggaggactggctctcattcagtagttgcattgagtgaattgtctgtcagggctgtctctgggtttaattcctggcctctctgtgcttagggcaaaccatttcctggccttaaatggagttctgtgagaggggactcctcctttatatgctggacatattttggggccttagggttctggtttgcctctgaggtactcaggggcatttaggtttttcctcacttat

SEQ ID NO: 556 - DNA, 529 bp, GB virus C
  misc_feature 1..529: note = isolate 62-11, complete genome.1
  source 1..529: mol_type = genomic DNA
ccccccggcactgggtgcgagccccagaaaccgacgcctatcaaagtagacgtaatggccctgcgccgaaccggcgaccggccaaaaggtggtggatgggtgatgacagggttggtaggtcgtaaatcccggtcaccttggtagccactataggtgggtcttaaggctaggtaatggtccctcttgcgcttatggcgagaaagcgcacggtccacaggtgttggtcctaccggtgtaataaggacccggcgctaggcacgccgttaaaccgagcccgttatccccctgggcaaacgacgcccacgtacggcccacgtcgcccttcaatgtctctcttgaccaataggcttagccggcgagttgacaaaggccagtgggggccgggcgtagagggaaggaccctctgcgctgcccttcccgggggagcggtaaatgcatggggccacccagctccgcggcggcctacagccggggtagcccaagagccttcgggtgagggcgggtggcatttttctctcctataccaatc

SEQ ID NO: 557 - DNA, 529 bp, Simian sapelovirus 2
  misc_feature 1..529: note = strain VRDL1 polyprotein gene, complete cds.1
  source 1..529: mol_type = genomic DNA
ctgacctgtttatgaacatgagcagcggcactgctccacgggctatccgtgtaagaaatattgattattcttatggatcatgatttcagggttggccgcccagtctaaaaggcaattgtggtaagctatgtaagtagttggctgttgaaaggagccaagtacatcctaggtctacgctgtgcgggccgaagtaagacttggaacaactctgagtaggcagtttttctctttagcccaacacgaccgcatactgaagagctagaggcactttggggcaaaggtaaaagcattgcttagaccgaatgttcaatgagaccttgacgagtgctgtcacagtgtcccctgatggcagtatggcgcatgctcttggcattacccatatgtgtatctatagggggggggccccctatacttagtctagtgctacctgacagggccgcggctggtcgtcggtgtgtggtataaccagtagtaatcccccatggattgctttaactccccctcctccctcaacaaaactttctctaag

SEQ ID NO: 558 - DNA, 529 bp, Encephalomyocarditis virus
  misc_feature 1..529: note = isolate KNP/17/94 5' UTR; and1
  source 1..529: mol_type = genomic DNA
ttggaataagaccggtgtgcgtttgtctatatgttgcttctactacactgttgcctgtgacagtgtaagggcccagaacctggccctgtcttctcgacgagtgttcctaggggtctttcccctcttgacaaaggaatacaaggtctgttgaatgtcgtgaaggaagcagttcctctggaagcttcttgaagacaaacaacgtctgtagcgaccctttgcaggcagcggaatcccccacctggtaacaggtgcctctgcggccaaaagccacgtgtataagatacacctgcaaaggcggcacaaccccagtgccacgttgtgcgttggatagtttcggaaagagttaaacggctctccccaagcgtattcaacaaggggctgaaggatgcccagaaggtaccccactggttgggatctgatctggggccccggtgcacgtgctttacacgtgttgagccggggttaaaaaacgtctaagcccccctaaccacggggacgtggttttccttttgaaaaccacgataacaat

SEQ ID NO: 559 - DNA, 529 bp, Rhinovirus B
  misc_feature 1..529: note = strain 20692_33_HRV-B polyprotein gene, partial cds.1
  source 1..529: mol_type = genomic DNA
ccccccacctaacatatccaagtaacttagaagatttgaacactgcacaatagggactattgcaaccagcaatagtcagtgcaagcacttctgtctccccggagcggagtatagacggccaccgctgtcaaaagctcttaaccgttatccgccagttaactacgcaacagctagtaacatcttgttgttcttagggtgttcgatcaggtgagtttaccccctcactagtctggtcgatgaggctgagaaatccccacgggtgaccgtgtctcagcctgcgtggcggccagcccagcatatgctgggacgccttaagtatgacatggtgtgaagactcgcgtgtgcttagctgtgagtcctccggcccctgaatgcggctaacctaaaccccggagccttgaggcacaatccagtgcccgcaaggtcgtaatgagtaattctgggacgggaccgactactttgggtgtccgtgtttccttttatctttttgatgttcttatggttacaatatatagagtatattgtaatc

SEQ ID NO: 560 - DNA, 529 bp, Human rhinovirus C
  misc_feature 1..529: note = strain HRV-C36_p1093_sR548_2008 polyprotein1
  source 1..529: mol_type = genomic DNA
cccccctccttaatgtaacttagaagcttgaacaatcgcccaataggatatgaccactccatggttatgaagggcaagcacttctgtttccccgggtgtgtgaataggctctaacagggctgaagctgtagcactcgttatccgcgcatctactacgcagaggttagtagggccatgtcaatcctttaggcgtttcgctcagcgtgtacccccacgtagatcagggcaatggggctacacattccccatcggcgacgatggtgtagcccgcgtggtgccccgcctaggcctatttggcctaggacgccaaaggaaagacagggtgtgaagacccgagtgtgctaggtgtgagtcctccggcccctgaatgtggctaatcctaaccccgtagccatggtgtacaagccagtacaaacatggtcgtaatgggcaactatgggatggaaccaactactttgggtgtccgtgtttctctttttaccctttactgcatttatggttacaagcttgtgaatacagacttgtaatc

SEQ ID NO: 561 - DNA, 530 bp, Human pegivirus
  misc_feature 1..530: note = gene for polyprotein, isolate 56330272.1
  source 1..530: mol_type = genomic DNA
cccccggcactgggtgcaagccccagaaaccgacgcctactaaagtagacgtgatggccccgcgccgaaccggcgaccggccaaaaggtggtggatgggtgatgccagggttggtaggtcgtaaatcccggtcatcttggtagccactataggtgggtcttaaggggaggtaaaggtccctctcgcgcttacggagggaaagcgcacggtccacaggtgttggtcctaccggtgtaataaggacccggcgataggcacgccgttaaaccgagcccgtaagccccctgggctaacgacgcccacgtacggtccacgtcgcccttcaatgtctctcttgaccaataggcttagccggcgagttgacaaggaccagtgggggccgggcgagggggggaaggaccccccctcgctgcccttcccgggggttgcgggaaatgcatggggccacccagctccgcggcggcctacagccggggtagcccaagagccttcgggtgagggcgggtggcattttttttcttgtaccgatc

SEQ ID NO: 562 - DNA, 530 bp, Rosavirus B
  misc_feature 1..530: note = strain RNYL1109081R polyprotein gene, complete cds.1
  source 1..530: mol_type = genomic DNA
ggagtgtcttaagtgatcccctccagtctctttagtgcctatgcttcagagagcggtgaactgacaccgttgcttcttgcacagcccttcgtgccggtctttccggttctcgacagcgttgggcatcatggctagttaggctaagatggcaaatgatctggtgaaaagttttggattgtttggagctttgtagcgatgctagtagtgtgtgtggatctccccacgtggtaacacgtgccccacaggccaaaagccaaggtgttaaaagcacccctactagtcccagatacccccatctgggagctcctctcatgaaaaatcttagtaccctttgatttggctgttcatcaacctctctagtcaagggctgaaggatgcccggaaggtacccgcaggtaacgataagctcactgtggatctgatccggggccctggtgcgaccgtctgtccggcgtagctagggttaaaaaacgtctaggcccttccaccccaagggattggggtttccccaatcattttagaagttcact

SEQ ID NO: 563 - DNA, 530 bp, Rhinovirus A
  misc_feature 1..530: note = isolate E0-163 polyprotein gene, partial cds.1
  source 1..530: mol_type = genomic DNA
cttccgatctcctaaagtaacttagaagttgagcacaatgaccaataggcgacatttctccagaatgtcaaaggtcaagcacttctgtttccccggtcaaggttgatatgctccaacagggcaaaaacagctgcgatcgttatccgcaaagcaactacacaaagcctagtatcacttttgagaatgtatggttggtcgctccactataaacccaatagtagacctggcagatgaggctagaagttccccactggtaacagtgttctagcctgcgtggctgcctgcgtgctccttgtgggcacgaagccatatatttgacaaggtgtgaagagccccgtgtgcttgttttgattcctccggcccctgaatgtggctaaccttaaccctgcagctagcgtgtgcaatccagcacaaagctagtcgtaatgagcaattgcgggatgggaccaactactttgggtgtccgtgtttcttgtttttcttttatacttgcttatggtgacaatatatataatatatatattggcatc

SEQ ID NO: 564 - DNA, 531 bp, Human pegivirus
  misc_feature 1..531: note = isolate NIG-N3559, complete genome.1
  source 1..531: mol_type = genomic DNA
ccccccggcactgggtgcgagccccagaaaccgacgcctatcaaagtagacgttatggccccgcgccaaactggcgaccggccaaaaggtggtggatgggtgatgacagggttggtaggtcgtaaatcccggtcatcctggtagccactataggtgggtcttaaagggaggctacggtccctctagcgcttatggagagaaagcgcacggtccacaggtgttggtcctaccggtgtaataaggacccggcgctaggcacgccgttaaaccgagaccgttatccccctgggcaaacgacgcccatgtacggcctacgtcgcccttcaatgtctctcttgaccaataggcagttctgccggcgagttgacaagggccagtgggggccgggcggcgggggaaggacccccgtcgctgcccttcccgggggagcggtaaatgcatggggccacccagctccgcggcggcctacagccggggtagcccaagaaccttcgggtgagggcgggtggcattttctttcctataccgatc

SEQ ID NO: 565 - DNA, 531 bp, Rhinovirus C
  misc_feature 1..531: note = isolate E0-41 polyprotein gene, partial cds.1
  source 1..531: mol_type = genomic DNA
accgcctattggtctttgtgtaaacttctaagttacgcaaaagggaaggggtggcaaatccataccactaacggtcaaacacttctgtttccccggcatgcgaggaataggctccaaaagggctgaagccactagtgtcgttatccgcattggtactacacaaagcctagtattaccttgaaaatttcttggctggtcgttccaccagataccccgctggcagacctggcagatgaggcaggacttaccccactggcgacagtggtcctgcctgcgtggctgcctgcacaccccttacggggtgtgaagcccagaaacagacagggtgtgaagagccccgtgtgctaccaatgagtcctccggcccctgaatgcggctaatcttaccccatagctgttgcacgcaaaccagcgtgtatgcagtcgtaatgagcaattgtgggatggaaccgactactttgggtgtccgtgtttctttttattcctattatttgcttatggtgacaatattgatattatcagtgttgtcatc

SEQ ID NO: 566 - DNA, 532 bp, Bakunsa virus
  misc_feature 1..532: note = complete genome.1
  source 1..532: mol_type = genomic DNA
ttttgaacgccacctcggagcgatatccggggaccccctcccctttttccttcctaccttcttcccaaatttccctcttcccttgttattttggtttggatttcctggacatgactcggacggatctatctcatttgctttgtgtctgctccaccagtggcatggtcgaaagatcatcaacactggacgtgtactgtaatggccaaacgtgcccacaggggaaaccatgccggtcgctgtagcggcgggtggacgtggtggacccctctccctgctcataaactttgggtaggtgaagggttcaagcgacgcttgccgtgagggcgcatccggatggtgggaaccaacaaactaggctgtaatggccgacctcaggtggatgagctagggctgctgcaccaaaagggactcgattcgatatcccggcctggtagcctagtgcagtggactcgtagttgggaatctacgactggcctagtacagggtgatagccccgtttcccacgcccacctgttgtagggacacccccccc

SEQ ID NO: 567 - DNA, 532 bp, Human rhinovirus A
  misc_feature 1..532: note = strain HRV-A20_p1169_sR1200_2009 polyprotein1
  source 1..532: mol_type = genomic DNA
cccctaccccttttatgtaacttagaagttttgtacacaccgaccaataggtggtatttaaccaaaataccaaaggtcaagcacttctgttaccccggtcaagattgatatgctctaccagggcaaaaacaatcgcgatcgttacccgcaaagcaactacgcaaagcctagtatcatttttgatggtgtatggttggtcgttccgctatgaacctgatagtagacctggcagatgaggctagaaaatccccactggtaacagtgttctagcctgcgtggctgcctgcgtaccccttgtgggtacgaagccgtacatttgacaaggtgtgaagagccccgtgtgcttgctttgagtcctccggcccctgaatgtggctaaccttaaccctgcagctagtgtgcacaagccagtgcatagctagtcgtaatgagcaattgcgggatgggaccaactactttgggtgtccgtgtttcttgtttttcttttatatttgcttatggtgacaatatattcaatacatatattgacacc

SEQ ID NO: 568 - DNA, 533 bp, GB virus C
  misc_feature 1..533: note = isolate EM110 polyprotein gene, complete cds.1
  source 1..533: mol_type = genomic DNA
cccccccccggcactgggtgcaagccccagaaaccgacgcctactgaagtagacgtaatggtccagcgccgaactggcgaccggccaaaaggtggtggatgggtgatgacagggttggtaggtcgtaaatcccggtcatcctggtagccactataggtgggtctaaaagggaggttatggtccctcttgcgcatatggagggaaagcgcacggtccacaggtgttggtcctaccggtgtaataaggacccggcgctaggcacgccgttaaaccgagcccgttactcccctgggcaaacgacgcccacgtacggtccacgtcgcccttcaatgtctctcttgaccaataggcttagccggcgagttgacaaggaccagtgggggccgggcgggagggggaaggacccccaccgctgcccttcccggggaggcgggaaatgcatggggccacccagctccgcggcggcctacagccggggtagcccaagagccttcgggtgagggcgggtggcatttttctttcctgtaccgatc

SEQ ID NO: 569 - DNA, 533 bp, GB virus C
  misc_feature 1..533: note = isolate Hu_5, complete genome.1
  source 1..533: mol_type = genomic DNA
cccccccacggcactgggtgcaagccccagaaaccgacgcctatctaagcaggcaataaggcctcgcgccaaaccggcgaccggccaaaaggtggtggatgggtgatgccagggttggtaggtcgtaaatcccggtcatcttggtagccactataggtgggtcttaaggggaggctacagtccctctgtcgcccgtggcgagaacgcgcacggtccacaggtgttgaccctaccggtgtgaataagggtccgacgtcaggctcgtcgttaaaccgagcccattatccccctgggcaaacgacgcccacgtacggtctacgtcgcccttcaatgtctctcttgaccaataggcaatgccggcgagttgacaaagaccagtgggggccgggggtgagggagaaggactccccaccctgcccttcccgggggagtgggaaatgcatggggccacccagctccgcggcggcctgcagccggggtagcccaagagccttcgggtgagggcgggtggcattttctttcttataccgatc

SEQ ID NO: 570 - DNA, 533 bp, Picornaviridae sp.
  misc_feature 1..533: note = isolate ybb150shi01 genomic sequence.1
  source 1..533: mol_type = genomic DNA
ccttttaacgtaccgtagcacgttagctacaaacttagcatttattttattttaattctaaatttattttaatttacataatttcggctctagtaacaaaaaccttattatcgtatttatacgaacagcatttattatttaatacatatccttatttttaaattacaaatacataccccccttttaacttactataattgctaatcaccaacaaccttcaaatttgatctagtacacattttaaaattccgtttctaaattttattaacttgcatctttgattataactctgggagtctattcagacttggcaaacccttgagcagccctcaaaatttgtagaacacctcaggcgatcttttaatacatgacccctgttgtaataacgtattactgaaaacacaaacacaactgaattaacagaagacattaatacaacccaagaacaacaatttactttcgataaccaacgcacagttaagacagaaaactcttatctgttgcctccaataaattcaatttcggctcagaaa

SEQ ID NO: 571 - DNA, 534 bp, GB virus C
  misc_feature 1..534: note = isolate Hu_21, complete genome.1
  source 1..534: mol_type = genomic DNA
cccccccccggcactgggtgcaagccccagaaaccgacgcctactaaagcaggcattaaggcctcgcgccgaaccggcgaccggccaaaaggtggtggatgggtgatgccagggttggtaggtcgtaaatcccggtcatcttggtagccactataggtgggtcttaaggggaggctacagtccctctattgcccgtggcgggaacgcgcacggtccacaggtgttggccctaccggtgtgaataagggcccgacgtcaggctcgtcgtaaaaccgagcccgttgtctccctgggcaaacgacgcccacgtacggctcacgtcgcccttcaatgtctctcttgaccaataggcttagccggcgagttgacaagagccagtgggggccgggggtgagggggatggaccccccaccctgcccttcccgggagagcgggaaatgcatggggccacccagctccgcggcggcctgcagccggggtagcccaagaaccttcgggtgagggcgggtggcattttcttttcctgtaccaatc

SEQ ID NO: 572 - DNA, 534 bp, Human rhinovirus 23
  misc_feature 1..534: note = complete genome.1
  source 1..534: mol_type = genomic DNA
ccaaagtagttggtcccgtcccgcatgcaacttagaagctttgcacaaagaccaatagccagtaatcatccagattacttaaggtcaagcacttctgtttccccggtcaaagttgatatgctccaccagggcaaaaacaactgcgatcgttatccgcaaggcgcctacacaaagcttagtagcattctgaaagttgtctggttggtcgttccaccattccccctggtagacctggcagatgaggctagaaactccccactggcgacagtgttctagcctgcgtggctgcctgcacaccctctgggtgtgaagccatacgatggacagggtgtgaagagccccgtgtgctcgctttgagtcctccggcccctgaatgtggctaaccttaaccctgcagctagagcacacaatccagtgtgtttctagtcgtaatgagcaattgcgggacgggaccaactactttgggtgtccgtgtttccttgttctctttgaatatctgcttatggtgacaatatatacgtatatattgacacc

SEQ ID NO: 573 - DNA, 534 bp, Enterovirus D68
  misc_feature 1..534: note = isolate TOp-15-Ph068 polyprotein gene, partial cds.1
  source 1..534: mol_type = genomic DNA
tttcaaatcaaagctcaataggtggggcacagacgtgcgcattaagtctcaagcacctctgtttccccggtgtggttgtataaactgttcccacggttgaaaacaacctatccgttatccgctatagtacttcgagaaacctagtatcacctttgaattgttgacgcgttgcgctcagcacactaacccgtgtgtagcttgggtcgatgagtctggacgtaccccactggtgacagtggtccaggctgcgtcggcggcctactcatggtgaaaaccatgagacgctagacatgaacaaggtgtgaagagtctattgagctactatagagtcctccggcccctgaatgcggctaatcctaaccatggagcaagtgttcacaggccagtgagttgcttgtcgtaatgcgcaagtctgtggcggaaccgactactttgggtgtccgtgtttcactttttacttttatgactgcttatggtgacaatttgatattgttaccatttagcttgtcaaattaattgcaaaagatcctaagt

SEQ ID NO: 574 - DNA, 535 bp, Rhinovirus C
  misc_feature 1..535: note = strain 20692_51_HRV-C polyprotein gene, complete cds.1
  source 1..535: mol_type = genomic DNA
ccccgtttccatttacacccaaccctatgtaacttagaagcagtacactggaccaataggtggtaacaatccatgttgccaaaggtcaagcacttctgtctccccggcatgcgtggaataaacagtgcaaacggttgaaaccacaaatgtcgttatccgcgcatgaactacgcagagcctagtatctccctgaaaatctgttggttggtcgttcagctaatccccatagtagacctggcagatgaggcaagacgcaccccactggcgacagtggtcttgcctgcgtggctgcctgcacacccccccccggggtgtgaagccaattgatagacagggtgtgaagagccgagtgtgcttcatgtgagtcctccggcccctgaatgcggctaatctaaccccgcagctgtggcacacaagccagtgtgtatgcagtcgtaacgggcaactgcgggacggaaccgactactttgggtgtccgtgtttccttttattcttttatcaggtacttatggtgacaatagtgaatattgttacc

SEQ ID NO: 575 - DNA, 537 bp, Picornaviridae sp.
  misc_feature 1..537: note = isolate yc-6, complete genome.1
  source 1..537: mol_type = genomic DNA
gccatccgtaggttctggtaaggttccatcaactgttggggcgctagttgctatgaccgcattcacggacggatgatttatagtatcacccaatccgggcacaacttctttagccacttcttccacattactaagggctctcttgccgagtttcaacgtctagtccacgacacggaccttcctacttttctatcttcttattttctctactaaattggtatctggtactgaagatatgcggattgtgattttgtgcctgtctaaactaaccctattctagggttaggtgggtaccatatactaatggtgaacaggattacctatgtatccattagtccctatggatctggcgacccacaaactcatgttcatagagaggctaagctgagtgctcgccgaataagcattgcttcaggtgccgactattgtctggaaaccactcagtgatagctataggggggggccccgtagcatctgccttactgcctgatagggtggcggctggtccatgaacatgcagtaaccagttgacttgac

SEQ ID NO: 576 - DNA, 538 bp, Rosavirus C
  misc_feature 1..538: note = strain NFSM6F polyprotein gene, complete cds.1
  source 1..538: mol_type = genomic DNA
cagggagatctccatgaataatcttttccaccctctttagcgtctatgctattgaggacgggttggagccccgttgacccagcgtcagagtgtgtcggtagcaggctttctgctctcgccccatgccggccacacctcccattagtgatgtgaaggttgtaagttacatgtgaaaaggtttctaataattgagctgaatgtagcgattacctaaggtgagcggattcccccacgtggtaacacgtgcctctcaggccaaaagccaaggtgttaaaagcaccccttaggtaggccactaccccgtggcctcagttctcttagaagattcacttagtagtgtgtgcactggcaactcttaagcagagctagtgagtgggctaaggatgccctgaaggtacccgcaggtaacgttaagacactgtggatctgatcaggggctcgagtgctgaagctttacagaggtagctcgagttaaaaaacgtctatgcccctcccccacgggagtgggggttcccccacaccaattttagattgcact

SEQ ID NO: 577 - DNA, 539 bp, Bovine rhinitis A virus 2
  misc_feature 1..539: note = isolate H-1 polyprotein gene, complete1
  source 1..539: mol_type = genomic DNA
tttgttttgcggctttgccgttgttcgggttttacctgttttcacacagcaaaacaggccttctagtttcgtgcttaaacgagatcatgctcgaactagaactacatagctggtcactggactcataccacaccttgtggagctttatgggaaaggtggctagtgggctgtggaagtgactctgaccacatgcctctcaagtgtgggaaatcacggatcggtgtagcgacgacaacaggccttgggacaccctctccagtaatggagacccaaggggccaaaagccacgcctcgtgccctgttgttcacaaccccagtgcgacccgtgttagtacctatttgcgagaactgtgtctggacagctaaacacaaccctagtgggagactaaggatgcccaggaggtacccggaggtaacaagtgacactctggatctgacctggggagagagggcttgctttacaggcgcctctctttaaaaagcttctatgtctcatcaggcaccggaggccgggccttttccttttaaaattacactta

SEQ ID NO: 578 - DNA, 539 bp, Bovine rhinitis A virus
  misc_feature 1..539: note = strain MexB15 polyprotein gene, partial1
  source 1..539: mol_type = genomic DNA
tttgtttcgcggctctgccgctgttcgggttttacctgttttcacagagcaaaacaggacatctagtttcgtgcttaaacgatatcatgctcgaactagaactacaatgctggttaccgaacccgcaccacaccttgtggaactttgcggggaaagtgactagtgggctgtagaagtgactctgaccacatgccccatcagcgtgggaaaccacaaatcggtgtagcgacgacaacaggccttgggacaccctctccagtgatggagacccgaggggccaaaagccacgccttgtgccctgttgttcacaaccccagtgcgatttgtgttagtacctactcatgggaattgtgtttggacagctgaacacaaccctagtgggagactaaggatgcccaggaggtacccggaggtaacaagtgacactctggatctgacctggggagagggggcctgctgtacaggcgcccctctttaaaaaacttctatgtctcatcaggcaccggaggccgggccttttccttttaaaacaacatttt

SEQ ID NO: 579 - DNA, 540 bp, Human rhinovirus A
  misc_feature 1..540: note = strain HRV-A36_p1163_sR2897_2009_g2 polyprotein1
  source 1..540: mol_type = genomic DNA
taactttgtgtttgactcccctaacatgtaacttagaagtttgaacgataagaccaataggtgataatcatccagattatcaaaggtcaagcacttctgtttccccggtcgatgaggatatgctttacccgaggcaaaaaccttagagatcgttatccacacactgcctacacagagcctagtaccacttttgacgtaactaggttggtcgctccctgcaaacccagcagtagacctggcagatgaggctggacgttccccactggcgacagtggtccagcctgcgtggctgcctgctcaccctattgggtgagaagcctatttattgacaaggtgcgaagagccgcgtgtgctcagtgtgcttcctccggcccctgaatgtggctaaccttaaccctgcagccgctgcccataatccaatgggtttacggtcgtaacgcgtaagtgcgggatgggaccaactactttgggtgtccgtgtttcttgtttttcctttatttgcattttatggtgacaatttatggtatatagattgtcatc

SEQ ID NO: 580 - DNA, 541 bp, Ovine picornavirus
  misc_feature 1..541: note = genome assembly, complete genome: monopartite.1
  source 1..541: mol_type = genomic DNA
aaaatggggtgcatatagcatggttcccatgctgtatgctaccccattttcttccctccccctccaactaccttttccccctctattgtaacttagaagctaatacacatagcccaataggggcaccacacccagtggtgtatagggcaagcacttctgtttccccggctttgccgttaacccccacagtactacgcgactgttagtaggtaacgtaactagtgaaggttgatccggaggtaaaccccaacctccagaaacgtgagatgagggttcagtaaccccctatggtaacatagactgatccctgcgctggctcacgggcttcgtgcactgaatctaggtaaagttactgaagccacgagtgtgctactgtggtttcctccagcgccttgaatgcggctaaccctaaccccggagcacatgcatataatccaatatgtagtgtgtcgtaatgagtaattctgggacgggaccgactactttaggttgctgtgtttcctttatttttatatatcaatttatggtgacaagttacaag

SEQ ID NO: 581 - DNA, 541 bp, Human rhinovirus A
  misc_feature 1..541: note = strain HRV-A75_p1038_sR149_2008 polyprotein1
  source 1..541: mol_type = genomic DNA
ccagttttatctcccccccccttttatgtaacttagaagttctgcacaccgaccaatagtgaacaatcagccagattgttttaggtcaagcactcctgtttccccggtcaacgttgatatgctccaacagggcaaaaacaacagcgatcgttatccgcaaggtgcctacacagagcctagtatcatcttagaagaattgtggttggtcgctcagttgcaaacccagcaatagacctggcagatgaggctggacattccccactggtgacagtggtccagcctgcgtggctgcctgcacacctctatgaggtgtgaagccagaatttcgacaaggtgtgaagagccgcgtgtgctcaccttgagtcctccggcccctgaatgcggctaaccttaaacccgcagccatggtccacaaaccagtggatgtgtggtcgtaatgagtaattgtgggatgggaccgactactttgggtgtccgtgtttcctgtttttctttttatactgcttatggtgacaatatatataggatatatattgacacc

SEQ ID NO: 582 - DNA, 542 bp, Bovine rhinovirus 1
  misc_feature 1..542: note = strain SD-1, complete genome.1
  source 1..542: mol_type = genomic DNA
acgatctttgcggctctgccgccgttcgggttttacctgttttcacagagcaaaacaggacctctagtttcgtgcttaaacgagatcatgctcgaactagaactataacgctggtcactggacccgtgccgcgccttgcggatctttgcgggaatggtggctagtgggctgtggaagtgactctaaccacacgcccctcaagtgtgggaaaacacgaactggtgtagcgacgacgataggccttgggacaccctctccagtgatggagacccaaggggccaaaagccacgccttgtgccctgtcgttcacaaccccagtgcagttcgtgccagtacctgcttttgggaagtgtgctttggacagctgaaaacagtcctagtgggagactaaggatgcccaggaggtacccggaggtaacaagtgacactctggatctgacttggggagagcgggtctgctttacagacgccactctttaaaaaacttctatgtctcgtcaggcaccggaggccgggccttttcctttaaaacaatacacttt

SEQ ID NO: 583 - DNA, 542 bp, Human rhinovirus A
  misc_feature 1..542: note = strain HRV-A01_p1103_sR1167_2009 polyprotein1
  source 1..542: mol_type = genomic DNA
cccccccctccccaacccttttatgtaacttagaagtttctaaacacaagaccaatagcaggcaactctccaggttgtctaaggtcaagcactcctgtctccccggttgacgttgatatgctccaacagggcaaaaacaactgatatcgttatccgcaaagtgcctacacagagcttagtagtgctctgaaagatttttggttggtcgctcagctgcatacccagcagtagaccttgcagatgaggctggacattccccactggtaacagtggtccagcctgcgtggctgcctgcacacctctcacgaggtgtgaagccaaagattggacagggtgcgaagagccgcgtgtgctcactttgagtcctccggcccctgaatgcggctaaccttaaacccgcagccatggttcacaaaccagtgaacttatggtcgtaatgagcaattgtgggatgggaccgactactttgggtgtccgtgtttcactttttcctttattgattgcttatggtgacaatatatatatagatatatattggcatc

SEQ ID NO: 584 - DNA, 544 bp, Mengo virus
  misc_feature 1..544: note = strain AnrB-3741, complete genome.1
  source 1..544: mol_type = genomic DNA
atgtggtcgaagccacttggaataagaccggcgtgcgcttgtctatatgttacttccaccacattgccgtcttttggcaatgtgagggcccggaacctggccctgtcttcttgacgaacattcctaggggactttcccctctcgccaaaggaatgtaaggtctgttgaatgtcgtgaaggaagcagttcctctggaagcttcttgaagacaaacagcgtctgtagcgaccctttgcaggcagcggaaccccccacctggtaacaggtgcctctgcggccgaaagccacgtgtataagatacacctgcaaaggcggcacaaccccagtgccacgttgtgcgttggatagttgtggaaagagtcaaatggctttccccaagcgtattcaacaaggggctgaaggatgcccagaaggtaccccactggttgggatctgatctggggcctcggtgcaggtgctttacacctgttgagtcgaggttaaaaaacgtctaggccccccgaaccacggggacgtggttttcctagaaaaccactatgacaat

SEQ ID NO: 585 - DNA, 546 bp, Human pegivirus
  misc_feature 1..546: note = gene for polyprotein, isolate 56330265.1
  source 1..546: mol_type = genomic DNA
ggggggttgatccccccccctcggcactgggtgcaagccccagaaaccgacgcctatctaagtagacgcaatgactcggcgccgactcggcgaccggccaaaaggtggtggatgggtgatgacagggttggtaggtcgtaaatcccggtcaccttggtagccactataggtgggtcttaagagaaggttaagattcctcttgtgcctgcggcgagaccgcgcacggtccacaggtgttggccctaccggtgtgaataagggcccgacgtcaggctcgtcgttaaaccgagcccgttccccacctgggcaaacgacgcccacgtacggtccacgtcgcccttcaatgtctctcttgaccaataggcgtagccggcgagttgacaaggaccagtgggggccgggggcctggagagggactccaggtcctgcccttcccggtgggccgggaaatgcatggggccacccagctccgcggcggcctgcagccggggtagcccaagaacccttcgggtgagggcgggtggcatttctcttttctataccatc

SEQ ID NO: 586 - DNA, 548 bp, Bat sapelovirus
  misc_feature 1..548: note = strain Henan-Mr221 polyprotein gene, complete cds.1
  source 1..548: mol_type = genomic DNA
ggtaaactggtgttgcggcaccagtttatcctcatctcatttcccccctccccctccaaataccttttccccctcaatcggacggattctcaggcttaaacggtggaggataccccttcaaggtccgcaggtgccaagtctaaaacctgaattggaagccctttgctatcagctcatttggccgataacccctgaccgggtgtgtaggacaattgagacgctctgggtgtacgactgcctatggtagaggtagagtgtacaagtaaaggctcctttttggataccgctaggcgaatgttgagatttctcctaccctagcacttgtgcatatgactaaggggggggccccttagtttgtctactgctgcctgacagggtcgcggctggccgaccataggtagtatagtcagttgatttaacacatggattgcttcaagttccttacaacctacaaacaaaccttcaaagctcaccagtgccaccagtattggttcactgtgtgtgaacaaaaacaagtaactgtagcaaagaagagccccggccccaaa

SEQ ID NO: 587 - DNA, 548 bp, Turkey avisivirus
  misc_feature 1..548: note = strain turkey/M176-TuASV/2011/HUN polyprotein1
  source 1..548: mol_type = genomic DNA
ttcactcgctttccccccctctctataggggcggtcttttaattcttattaatttcctactttactatcaaatttcttctaagtagggactgaggtcacttagccctccctctcctgggctttccagggttatagaggttctaaagctaagccatgtgtcttgagctacacttagtacaaaggtttagtaatgattgtacatgccagtaaccttctagtgcccatggattaaagagtggtaacactctccatggggcccgaaaggctagtgggcatagttggcatcaaggaaggggtccccaccccaacctgaattgctggctagaagctcaccttagaagaagtgctgggtgacaacgtgtccaatcgtgaacgactgatggaaacgtgtggagatggatatgtgggggttcactgagtagatgccctgaaggagaaatctgatcaggggcccgtgactatacgctaggtaaaccgggtataaaaaccatgaaaggtggcccaaaatctcttccttttattttatttctatgttggtgacagtcaag

SEQ ID NO: 588 - DNA, 548 bp, Human parechovirus 1
  misc_feature 1..548: note = isolate ETH_P16_2016 polyprotein gene,1
  source 1..548: mol_type = genomic DNA
gatacactattcgaaggcatctagcaataagaagagtggatttagggcgcttaaagcatagtgcaaataatcatttctagcctgtgttttacacagggtggcagatggcgtgccataactctactagtgagataccacgcttgtggaccttatgctcacacagccatcctctagtaagtttgtaaagcgtctgatgacgtgtgggaacttattggaaacaatagtttgctgcaaagcatcctactgccagcggaataacacctggtaacaggtgcctctggggccaaaagccaaggtttaacagaccctttaggattggttcaaacctgaactattgtggaagatatttagtacctgctgatttggtagttgtgcaaacactagttgtaaggcccacgaaggatgcccagaaggtacccgtaggtaacaagtgacactatggatctgatctggggccaactatctctatcttgatgagttggttaaaaaacgtctagtgggccaaacctgggggggaccccagtttccttttattttataatgccact

SEQ ID NO: 589 - DNA, 548 bp, Human rhinovirus A
  misc_feature 1..548: note = strain HRV-A18_p036_s2916_1999_g1 polyprotein1
  source 1..548: mol_type = genomic DNA
catgtacgccagttttatatcccctctccccttttgtaacttagaagataagcacaaagaccaataggtggtggctatcccagtcactaaaggtcaagcacttctgtttccccggtcgatgttgatatgctccaccagggcaaaaacaacagagatcgttatccgcaaagtgcctacacaaagcctagtaacactttgaatggtatgtggttggtcgctccgctattccccatagtagacctggcagatgaggctagaaatcccccactggcgacagtgttctagcctgcgtggctgcctgcgtgtcctaacgggcacgaagccatatacttgacaaggtgtgaagagccccgtgtgctcactttgagtcctccggcccctgaatgtggctaaccctaaccctgcagctgaggcacacaacccagtgtgaactcagtcgtaatgagcaattgcgggatgggaccaactactttgggtgtccgtgtttcacttttttttcttttataatgcttatggtgacaatatataacaatttatatattggcacc

SEQ ID NO: 590 - DNA, 548 bp, Human rhinovirus A
  misc_feature 1..548: note = strain HRV-A67_p1130_sR2849_2008 polyprotein1
  source 1..548: mol_type = genomic DNA
cgtgaagccagttttgccacccttccctaatatgtaacttagaagtttgagcaacaagaccaataggtgataatcatccagattatcaaaggtcaagcacttctgtttccccggtcgatgaggatatgctttacccaaggcaaaaaccttaaagatcgttatccacacactgcctacacagagcctagtaccacttttgatgtaattaggttggtcgctccctgcaaacccagcagtagacctggcagatgaggctggacattccccactggcgacagtggtccagcctgcgtggctgcctgctcaccctattgggtgagaagcctacttattgacaaggtgtgaagagccgcgtgtgctcagtgtgcttcctccggcccctgaatgtggctaaccttaaccctgcagccgctgcccataatccaatgggtctacggtcgtaacgcgtaagtgcgggatgggaccaactactttgggtgtccgtgtttcttatttttcctatatatttgcttatggtgacaatatataattacttgtatattggcacc

SEQ ID NO: 591 - DNA, 550 bp, Human parechovirus 8
  misc_feature 1..550: note = isolate ETH_P25_2016 polyprotein gene, partial1
  source 1..550: mol_type = genomic DNA
ggaccccattattcgagggcatctagcaataagaactggagattaaggacgctcaaagcatagtgtaagtattcttttctaacctgtgttttacacagggtggcagatggcgtgccataaccctattagtgagataccacacttgtggaccttatgctcacacagccatcctctagtaagtttgtaaggcgtctgatgacgtgtgggaacttgttggaaataatggtttgctgtaaagcatcctactgccagtgggtaaacacctggtaacaggtgcctctggggccgaaagccaaggtttaacagaccctttaggattggttcaaacctgaactattatggaagacacttagtacctgctgatttggtagttgtgcaaacactagttgtaaggcccacgaaggatgcccagaaggtacccttaggtaacaagtgacactatggatctgatctggggccaaccacctctatctcggtgggttggttaaaaaacgtctagtgggccaaacccaggggggaccctggtttccttttatttatcataaacaat

SEQ ID NO: 592 - DNA, 550 bp, Coxsackievirus
  misc_feature 1..550: note = A7,strain VEN/2018-23121A polyprotein gene, partial1
  source 1..550: mol_type = genomic DNA
tatcagtagactgcttacgcggttgaaggagaaaacgttcgttacccggctaactacttcgggaaacctagtaacaccattgaagctgcagagtgtttcgctcagcacttcccccgtgtagatcaggtcgatgagtcactgcaaacctcacgggcgaccgtggcagtggctgcgttggcggcctgcctatggggtaacccataggacgctctaatgtggacatggtgtgaagagtctactgagctggttagtagtcctccggcccctgaatgcggctaatcctaactgtggagcgcatacttccaaaccagggagcagtgcgtcgtaatgggcaactccgcagcggaaccgactactttgggtgtccgtgtttccctttattcttatattggctgcttatggtgacaattgaagagttgttaccatatagctattggattggccatccggtgtgcaacagagcaattatatacctatttgttggatatattccactgacatttaagtcactcaatactctacagtacatcttgaatttaaacaccagaaa

SEQ ID NO: 593 - DNA, 550 bp, Rhinovirus C
  misc_feature 1..550: note = isolate E0-165 polyprotein gene, partial cds.1
  source 1..550: mol_type = genomic DNA
ggctcttccgatctgccgcaactttctttcactctttgtttctggtaatttagaagttgacacagagtccaatagggtgcagctaatccaagactgctacggacaagcacttctgtctccccgggtgtgtgaatagactctaacagggttgaagctgtagcactcgttatccgcacaactactacgcgaatgttagtaacaccctctaagtatagtgggatttcgctccgcagataccccatctgtagattggggtaatgaggctacacataccccactggcgacagtggtgtagcctgcgtggtgccctacctggggttctttaccccaggattccactttactgacagggtgtgaaggcgctagtgtgctagttgtgagtcctccggtccctgaatgtggctaatcctaaccccgtggccattacatgtaacccaacatgcagatggtcgtaacgagtaatcacgggatggaaccaactactttgggtaaccgtgtttcctgttttactttaatgtgtgtatcttatggttacaactatagagtaacc

SEQ ID NO: 594 - DNA, 551 bp, Encephalomyocarditis virus type 2
  misc_feature 1..551: note = isolate RD 1338 (D28/05)1
  source 1..551: mol_type = genomic DNA
aaatactggtcgaaaccgcttgggataagaccggggtttgttaatgtctcaatgttattctccacccaattgacgtcttttgtcaattggagggcagtgaaaccttgcccttgcttcttgcagaggattcccagtggtctttccgctctcgacaagggaattcatgatccaccaaaagttgtgaagagagcaggtcccatggaagctttctgacgactgatgatgactgtagcgaccctttgcaggcagcggacccccccacctggtgacaggtgcctctgcggccaaaagccacgtgtttaacagacacctgcaaaggcggcacaaccccagtgcctcatcaaaagtctgatgactgtggaaatagtcaaccggcttttcttaagcaaatttggtgtcggggctgaaggatgcccggaaggtaccacactggttgtgatctgatccggggccacagtacatgtgctttacacatgtagctgcggttaaaaaacgtctaggccccccgaaccacggggacgtggttttcctttgaaaaccacgattacaat

SEQ ID NO: 595 - DNA, 552 bp, Coxsackievirus
  misc_feature 1..552: note = A24, clone V19C2 polyprotein gene, partial cds.1
  source 1..552: mol_type = genomic DNA
agactgtacccacggttgaaaacgactgatccgttatccgctttagtacttcgagaagcctattaacaccttggaatcttcgatgcgttgcgctcagcactcaaccccagagtgtagcttaggtcgatgagtctggacatacctcaccggcgacggtggtccaggctgcgttggcggcctacctgtggtccaaagccacaggacgctagttgtgaacaaggtgcgaagagcctattgagctactaaggagtcctccggcccctgaatgcggctaatcccaaccacggatcaggtgctcacgagccagtgagcggcctgtcgtaacgcgcaagtctgtggcggaaccgactactttgggtgtccgtgtttcctttttaactttatcatggctgcttatggtgacaatcgaagattgttatcataaagcgaattggattggccatccggtgaaaattaaatatatagtttacctgtttgttggatttattccactaacacaacatacttggaaattactcaactttgtgttgttaatcagacactgttaccaca

SEQ ID NO: 596 - DNA, 552 bp, Human rhinovirus A
  misc_feature 1..552: note = strain HRV-A55_p1275_s6474_2000 polyprotein1
  source 1..552: mol_type = genomic DNA
ttccggtaactttgtatgccagttttatcacccttcccccacgtaacttagaagatgtacacttggaccaataggcgataatcctccagattatctaaggtcaagcacttctgtttccccggtctaaactgatatgctccaacagggcaaaaacagtgcagatcgttatccgcaggatgcctacgcaaagcctagtaattcctttgaagatatttggttggtcgttccactattccccatagtagacctggcagatgaggctagaaactccccactggcgacagtgttctagcctgcgtggctgcctgcacaccctcttgggtgtgaagccaaatattggacaaggtgtgaagagccccgtgtgctcatcctgagtcctccggcccctgaatgtggctaaccttaaccctgcagctagtgcatgcaatccagcatgtagctagtcgtaatgagtaattgcgggatgggaccaactactttgggtgtccgtgtttcactttttaccttatatttgcttatggtgacaatatatatagtatatatattggcatc

SEQ ID NO: 597 - DNA, 553 bp, Bovine picornavirus
  misc_feature 1..553: note = genomic RNA, complete genome,strain:1
  source 1..553: mol_type = genomic DNA
ttgaaagacctcggcatatatcgttgtcacaacggtatatgtcgagatctttctccccaccccctccaattcccttttccccctcttgcaacttagaagtttgtacacacagggcaataggatacgtgatccagccaggacacgtgagctcaagcacttctgtttccccgtccccttcacgtactacgggaatgttagtaatttgtgtgcactttagtaaggttgatccgggattaaccccaaatcccagaaactggtgatgagcgttaccacccccgccgggcgaccggaaggtttcgctgcgttggcaccagggcttcggcaccagaaaaaggtaaagcaaatgaaggcgctactgtgctacgagaagtttcctccaggcccctgaatgcggctaatcctaaccagtgatccaccggtgcaaaaccatgtactaggtggtcgtaacgcgcaagtcgctggcggaaccgactactttgggtgtcctgtgtttccatattttattttattcaattttatggtgacaagagtaaagagatacagatttgcagcc

SEQ ID NO: 598 - DNA, 554 bp, Human rhinovirus A
  misc_feature 1..554: note = strain HRV-A23_p1216_sR3071_2008 polyprotein1
  source 1..554: mol_type = genomic DNA
taggtaactttgtgtttgatgccagttttatcctcccctcccccatgcaacttagaagttttgcacagagaccaataggcagtaatcatccagattacttacggtcaagcacttctgtttccccggtcaaagttgatatgctccaccagggcaaaaacagctgcgatcgttatccgcaaagcgcctacgcaaagcttagtagcattctggaagttgtctggctggtcgctccaccatttcccctggtagacctggcagatgaggctagaaattccccactggcgacagtgttctagcctgcgtggctgcctgcacaccctctgggtgtgaagccatacaatggacagggtgtgaagagccccgtgtgctcgctttgagtcctccggcccctgaatgtggctaaccttaaccctgcagctagagcacacaatccagtgtgtttctagtcgtaacgagcaattgcgggatgggaccaactactttgggtgtccgtgtttccttgttttctttaaatatttgcttatggtgacaatatatacgcatatattgacacc

SEQ ID NO: 599 - DNA, 554 bp, Human poliovirus 1
  misc_feature 1..554: note = strain 3788ALB96 polyprotein gene, partial cds.1
  source 1..554: mol_type = genomic DNA
gtataggctgtactcacggctgaaaacaaacgatccgttatccgcttaggtacttcgagaagcctagtaccatcttggaatcttcgacgcgttgcgctcagcactctaccccgagtgtagcttaggctgatgagtctgggcgttccccaccggtgacggtggcccaggctgcgttggcggcctacccatggctcacgccatgggacgctagttgtgaacaaggtgtgaagagcctattgagctacctaagagtcctccggcccctgaatgcggctaatcctaaccacggagcaagtgccttcagcccagaaggtagcttgtcgtaacgcgcaagtctgtggcggaaccgactactttgggtgtcccgtgtttccccttattttcattgtggctgcttgcgggactataattgattgccatcataaagcgatttggattggccatccggagaaagttaaacacgttgtttatttattcgttggattcacctcattaacccaaattacacccagcttgatatatatagtgttgccgactagacaaaatcaccacca

SEQ ID NO: 600 - DNA, 557 bp, Jotan virus
  misc_feature 1..557: note = isolate OTU7 RNA-dependent RNA polymerase gene,1
  source 1..557: mol_type = genomic DNA
atcttattaacaatacgtattttaaaagctcttactctagtaagggtatgtggttaacataggatgtaatacccatttatggatattgcatcttgtggagttagtcctcacacatacttgtctagcacctgcattccaaggagtatttgcgaaaatcttattcttaaaaccaattcttaattttaagtacaaacctcgcagaacttacaaatcgtgctcacgccttttgttctatttagttaatttgtatttgaagaatttagacgaataatataacgtgcttattattcacgagaccctctaacgtttttaacgcattgatctcgtaaaatctaaagactgatcttacattgatattgaattaaactaaagaaacgcaccacgacagtagtgtggccttactgttaaaacaactaggcctaacgagtatttctaactgtgacgttcgatgaattattccgaactatgtactaactgatctaaatcgttgttctacaaggaacgtttcaccgcctcaatagatcctaactatagaggaaaagaaacaacaaacaaac

SEQ ID NO: 601 - DNA, 557 bp, Fathead minnow picornavirus
  misc_feature 1..557: note = strain 09-283, complete genome.1
  source 1..557: mol_type = genomic DNA
ttgaaagagagtccatacggggaactgcggttctcctattggattctgctttcacagtttctgagcactggtaagagcttagacaaacgtttttaaaatttattttctctgcaacttttgtttgtgtttatttttatttgttaattttgtgcctaaacatttgttgcgaagtatttgattcattagcaatattcattattgtttatttagatggcattcaaagtggtgggagtatcgaacccaagcgtcgtatgttatctccttgaataattttggattttttcgacatgatcattgaaaaggataagtgtttaagaactcaaggagtgttaacaatggtgggtgacaggtgtccccatataatttgttaacatgatttggactggttatctagtaagaagaaccatcgaacgcacgagcgagcattgcttgcggggcagttaccctgcgtcgatgtaagtgtgtaccggggggtgcacatgttgattctttatggcctgatagggtgcgtcattcgcgcctagataattagtataatgcgaatggaataaatttac

SEQ ID NO: 602 - DNA, 557 bp, Foot-and-mouth disease virus
  misc_feature 1..557: note = type A, isolate A/ALG/3/2017, partial1
  source 1..557: mol_type = genomic DNA
acaagttcagcagttttgcccgttttcaggagaaacgggacgtcagcgcacgaaacgcgccgccactttcggaacacttgtacaaacacgatctgacgcaggtatccctaactggcattctcgtgcaacttggagtctcgcctggtctttccaggtctagggaggcaacactttgtactgaaaccaactccacaactggtctactggcgggtgctagtaacgactttgttgcttcgtagcggagcatgcgagccgcgggaactcccccctggtaacagggacccgcggggccgaaagccacgtccctcggacctcgcatgtgtgcaaccccagcacggcaacactgtagtgaaacacactttaaggtaacactgagactggtacttggtttctggggacaggctaaggatgccctccaggtaccccgaggtaacaagcgacactcgggatctgaggaggggactggggcttctataaaagcgcccagtttaaaaagcttctatgcctgaataggtgaccggaggccggcaccttttcttttgtacacgaatcacttt

SEQ ID NO: 603 - DNA, 557 bp, Coxsackievirus
  misc_feature 1..557: note = A14, isolate ETH_P25/A14_2016 polyprotein gene,1
  source 1..557: mol_type = genomic DNA
ggataaagaggctactcacgtggttgaaggagaaaacgtccgttacccgactaactacttcgagaaacctagtagcaccattgaacctgcggagcgtttcgctcagcacttcccccgtgtagatcaggctgatgagtcactgcactcctcacgggcgaccgtggcagtggctgcgttggcggcctgcctatggggcaacccataggacgctctaaagtggacatggtgcgaagagtctattgagctagttagtagtcctccggcccctgaatgcggctaatcctaactgcggagcgcataccctcaatccagggggtggtgtgtcgtaacgggcaactctgcagcggaaccgactactttgggtgtccgtgtttccttttattcttacactggctgcttatggtgacaattaaagaattgttaccatatagctattggattggccatccggtgtgcaacagagcgatcatttactcctttgttgcttttattcccttgaacttcacttctttgagcacactaaattatatactccatctcaactccaagaagcgagt

SEQ ID NO: 604 - DNA, 558 bp, Picornaviridae sp.
  misc_feature 1..558: note = isolate muf160pic1 genomic sequence.1
  source 1..558: mol_type = genomic DNA
tttgtggggtgggctcccactttattcatagcccatctgctctgactctacctattgacccgtaactggtactcgtttgagattgactggtttaaagattttggtgtggttctttaggaaggattagctcgatcctttaggtgggacttatttttaccactacagagcacctatgattagttatagacagtggaggaaccattagtaactctttggaatgcgtaactgctaatcctgtgcccttggccaagacatagtaatatgttccaaggggcccaaaaggctagtgggtaaaaacccacctgggatggtcacttctgtgaattctgattagtgaagtttggattccgaatcctgtctagctaaaagtggggttagatggcactgagtagatgccctggaggtaccaattgatctgaccaggggcctagatacttaatgctaggttaaaaactatgaaaggtaagccatcgaaaattattttcctatttttactttgtttaactgattagtgaaatttactaatatttagctaggccttgctttattttattaagg

SEQ ID NO: 605 - DNA, 560 bp, Red-capped plover megrivirus
  misc_feature 1..560: note = polyprotein gene, complete cds.1
  source 1..560: mol_type = genomic DNA
gggggttttccccctgggagtcttttccgttgggtctgtggcttggttgaaccatggatctggcgttagccggcatagtggtctgcggaaaagggccctcacgcggctgcggcttcgtgagctgttcttttccactagtgggccatctatgttggtataagctcaaccacccaaattttgtaacggccaattaagcttaggtcccgcacagattcgttctggcgtgctttataggaataggcggtctgactcggttttgtcttgacaactctcttgtttttccctttggctttgttttctttttaggctaacggttcagccttgttcagaacggccctatggcaagtgggcctagtaggttcttggtgttttccgttagtcgacccatccatagtgctagactaggtgggcgtgaggtaaaacgggacgcgtttttcgctatcccaatgaccggacctctgttgaatgcgctggatctccgcgtagccagaggaaaccacccgaaccctgatggcaactgacggtagtagggctcgtagtcagcctcatgttacccgtgg

SEQ ID NO: 606 - DNA, 560 bp, Hepatovirus G2
  misc_feature 1..560: note = isolate M32Eidhel2010 genomic sequence.1
  source 1..560: mol_type = genomic DNA
gtcatgtttctctttaagaacactcaattttggccataagtgagactcttgtcgaacctttcatgtcaggaccatgttagggccattatccttttccctggggcattcttcttgcccctgtttcatctttctatcatctttcttccgggctctcacaatgccaatggagcgaccgatgcgcacgtcggggttaacccatggattagccatgggctgtagctgctaaaagttgtgactcctgaagcatactatcaatggtagtagatgtaactgaaacactgaagcttctctgatcttgaaagaagggtaggctacgggtgaaacccttcaggttaatactcatattgagagatacctttggtaggttaacgttggcggataatgttgagtttaacgacaataaacattcaacgcctgtgggcgaacctcaccaatttcatgctttgaagtgaatgtgcgtagggtctctatcggagatgctatgtggatggtgccctccctggaaacaggttgtaggggtactcaggtgcacttaggtttccacattttaaagatttttc

SEQ ID NO: 607 - DNA, 560 bp, Tortoise rafivirus A
  misc_feature 1..560: note = strain WHWGGF74766 polyprotein gene, complete1
  source 1..560: mol_type = genomic DNA
tgcgaatttattcgcacagtctcttttcccccatcttgtgtgtgtgatggggtaagccgcagagtaatacctactctgctgcaaacacactcactcttttctatctactttatatcatgtaataataagtagggaacatattcaattcatattgttcatctcactgaacccgcatgaaggactgcattgcatatcctggacgaagtgacgtggaatatttggacatttatggattggacaccattacgctttgtgcctctacggagatgtaaccataatcttaagtagtagtaccccagcacaagaggataaagtggcatacacgacaacgggtgttgctcgcaccttagtaatgtggatgttcacccttggagcgtgctgaaactctgtgggtaaagacacacattagtacaaatgtgggggaactcactgaaagggcatgtcccgtgtactggtgtgccggaaagtgggggtcgctttctggagaacttagtagttcttgttattgggtgatagccttgcggcggatcaactcacagttttaatccgttgttttgcat

SEQ ID NO: 608 - DNA, 560 bp, Enterovirus A71
  misc_feature 1..560: note = isolate DK16-06 polyprotein gene, partial cds.1
  source 1..560: mol_type = genomic DNA
tccccggactgagtatcaataggctgcttgcgcggctgaaggagaaaacgttcgttacccggccaactacttcgaaaagcctagtaccaccatcaatgaggcagagcgtttcgctcggcactaccccagtgtagatcaggctgatgagtcactgcaatccccatgggcgaccatggcagtggctgcgctggcggcctgcccatggaggaatccataggacgctctaatttggacatggtgcgaagagcctattgagctagttggtagtcctccggcccctgaatgcggctaatcctaactgcggagcgcacacccacaaaccagtgggcagtgcgtcgtaacgggcaactctgcagcggaaccgactactttgggtgtccgtgtttccttttattcctatattggctgcttatggtgacaaacgaagagttgttaccatatagctattggattggccatccggtgtgtaacagagcaattgtctatcagttcgttggttttgtaccattacattaaagtccttaacacattacatttatcttgaccctaaatacaaaagc

SEQ ID NO: 609 - DNA, 560 bp, Human rhinovirus C30
  misc_feature 1..560: note = strain USA/2015/CA-RGDS-1045 polyprotein gene,1
  source 1..560: mol_type = genomic DNA
cggtacacttgcacgccagtttgcctccctttccctttcccttgccaaacccccttggaacttagaagcaatacattagaccaataggaggtaacgatccatgttacctaaggtcaagcacttctgtctccccggtatgcgtggaataaacagtgcaaacggttgaagccacaattatcgttatccgcgcacaaactacgcagagcctagtactaccctgaaagtctgtaggttggtcgatcagctaatccccatagtagacctggcagatgaggcaagacactccccactggcgacagtggtcttgcctgcgtggctgcctgcacaccctctggggtgtgaagcctactgacggacagggtgcgaagagccgagtgtgctttgtgtgagtcctccggcccctgaatgcggctaatccaaccccacagctgtggcatacaagccagtatgtacgcagtcgtaacgggtaactgtgggacggaaccgactactttgggtgtccgtgtttcctgtttttctttatatatatgcttatggtgacaatagtgaatattgttacc

SEQ ID NO: 610 - DNA, 561 bp, Avisivirus
  misc_feature 1..561: note = Pf-CHK1/AsV, complete genome.1
  source 1..561: mol_type = genomic DNA
cattcccctttccccagccatgggttaaatggcccctcaccaggttcggtgctgtctaggcttccagtaaagaagtcaaccgagcattgaacaaaacctcagtgggtatggtagttaaccccgtccactggacaactttgtcctcttaaaagtggatcaatccaccccaactccccccctagccacctgagccatggtggatagcagtgacgaaactagggaccccaatacctctagtgccaagagaattcccccctcgcgagaggtgctcttgggcccgaaaggctagttggcagggtgaagtgaaggaagctgctagcgtggcaaccttaagcgtagcccgaagctgaccttagaggttaaccctagtggaccactggatgaagctgtggaggtggtggataggaaagttggccacttgtgagtagatgcccagaaggcataaggctgatctggggccagtgactataccgttccggtaaacctggtataaaaaccatgaaagcaagtgggtttaaaatttcttctaattccttcatttcagtagtgataactggcaga

SEQ ID NO: 611 - DNA, 564 bp, Poliovirus type 2
  misc_feature 1..564: note = mRNA for polyprotein, strain PV2_6526-1_ISR06.1
  source 1..564: mol_type = genomic DNA
tgacgttgcatagactgctcacgcggttgaaagcgattgatccgttatccgcttgtgtacttcgagaagcctagtatcgccttgggatcttcgacgcgttgcgctcagcacccgaccccggggtgtagcttaggctgatgagtctggacattcctcaccggtgacggtggtccaggctgcgttggcggcctacctatggctaacgccataggacgctagatgtgaacaaggtgtgaagagcctattgagctacacaagagtcctccggcccctgaatgcggctaatcctaaccacggagcaggcggtcgcaaaccagcgattggcctgtcgtaatgcgcaagtctgtggcggaaccgactactttgggtgtccgtgtttcctgttatttttatcatggctgcttatggtgacaatcagagattgttatcataaagcgaattggattggccatccggtgagaattgtgtcaagcgtacaactgtttgttggaatcactgtgttagctttaattctcatttaaccgattaatcaaaactacacgagaacaaaacactagcatcact

SEQ ID NO: 612 - DNA, 565 bp, Coxsackievirus
  misc_feature 1..565: note = A9,strain VEN/2018-23122 polyprotein gene, partial1
  source 1..565: mol_type = genomic DNA
ttaccccggactgagtatcaatatgctgctcacgcggctgaaggagaaaacgttcgttacccggccaattacttcgagaaacctagtaccaccatgaaggttgcgcagtgtttcgctccgcacaaccccagtgtagatcaggccgatgagtcaccgcaatcctcacgggcgaccgtggcggtggctgcgttggcggcctgcccatggggcaacccatgggacgcttcaataccgacatggtgagaagagtctattgagctaattggtagtcctccggcccctgaatgcggctaatcctaactgcggagcagatgcctgcatgccagcgggtagtctgtcgtaacgggcaactctgcagcggaaccgactactttgggtgtccgtgtttccttttattcttgtgttggctgcttatggtgacagttgagaagttgttaccatatagctattggattggccatccgttaacaaatagagcaattatcttctcttttgttggattcgttccactgaattacaaggcactaaacacacttaatttcattttaatacttaacacatcaaa

SEQ ID NO: 613 - DNA, 565 bp, Human poliovirus 2
  misc_feature 1..565: note = gene for polyprotein, isolate pv2_6056-3T_ISR04.1
  source 1..565: mol_type = genomic DNA
tgacgttgcatagactgctcacgtggttgaaagcgatcgatccgttatccgctcgcgtacttcgagaagcctagtatcgccttggaatcttcgatgcgttgcgctcagcgcccgaccccggggcgtagcttaggctgatgagtctggacgttcctcaccggtgacggtggtccaggctgcgttggcggcctacctatggctaacgccataggacgctagatgtgaacaatgtgtgaagagcctattgagctacacgagagtcctccggcccctgaatgcggctaatcccaaccacggagcaagcggtcacaaaccagtggctggcttgtcgtaacgcgcaagtctgtggcggaaccgactactttgggtgtccgtgtttcctgttatttttatcatggctgcttatggtgacaatctgtgattgttatcataaagcgatttggattggccatccggtgagtgttatatcgaatacttgactgtttgtcagacccactgtattagaatcacttcatatttaagtagtcaatcaaaaacagcacgaagataagacaatagtaccaca

SEQ ID NO: 614 - DNA, 565 bp, Human poliovirus 2
  misc_feature 1..565: note = gene for polyprotein, isolate pv2_6316-1T_ISR05.1
  source 1..565: mol_type = genomic DNA
tgacgttgcatagactgctcacgcggttgaaagcgatcgatccgttatccgctcgcgtacttcgagaagcctagtatcaccttggaatcttcgatgcgttgcgctcagcgctcgaccccggggcgtagcttaggctgatgagtctggacgttcctcaccggtgacggtggtccaggctgcgttggcggcctacctgtggctaatgccataggacgctagatgtgaacaaggtgtgaagagcctattgagctacacgagagtcctccggcccctgaatgcggctaatcctaaccacggagcaagcggtcacaaaccagtgactggcttgtcgtaatgcgcaagtctgtggcggaaccgactactttgggtgtccgtgtttcctgttatttttatcatggctgcttatggtgacaatctgtgattgttatcataaagcaatttggattggccatccggtgagtgttgtatcgaatacttgactatttgccaggactactatattaaattcattttatatttgagaaatcagttaaaaacagtaggaagataaaacaataataccaca

SEQ ID NO: 615 - DNA, 566 bp, Rosavirus B
  misc_feature 1..566: note = strain rat08/rRoB/HUN, complete genome.1
  source 1..566: mol_type = genomic DNA
tgtcttctccggatgctgttacagcatgtggacccaggagtgttttaagtgatcttctacagtctctttagtgtctatactttagagagcggtgaactgacaccgttgcttcttgcacagcccttcgtgctggtctttccggttctcgacagcgttgggcatcatggctagtcaggctaagatagcagatgatttagtgaaaagttttggattgtttggagctttgtagcgatgctagtagtgtgtgcggacttccccacgtggtaacacgtgcctcacaggccaaaagccaaggtgttaaaagcacccctactagtcccaggctttcccacctgggagctcctctcatgaaaattcctagtaattaatgattgggctattcatcaacctttctagtcaatggcttaaggatgcccggaaggtacccgcaggtaacgatgagctcactgtggatatgatccggggctctggtgcgaccgtctgtccggcgtagtcagagttaaaaaacgtgtaagcccttccaccccaagggattggggtttccccaatcatttaacaggttcatt

SEQ ID NO: 616 - DNA, 567 bp, Enterovirus C
  misc_feature 1..567: note = strain 03-4101, complete genome.1
  source 1..567: mol_type = genomic DNA
aaaccagtaccaccacgaacaagcacttctgtttccccggtgaagctgtatagactgttcccacggttgaaaatggcagatccgttatccgcttaagtacttcgagaagcctagtatcactttggaatcttcgatgcgttgcgctcagcactctaccccgagtgtagcttaggctgatgagtctgggcataccccaccggcgacggtggcccaggctgcgttggcggcctacccatggctaacgccatgggacgctagttgtgaacaaggtgtgaagagcctattgagctacttaagaatcctccggcccctgaatgcggctaatcccaaccacggagcaagtgcttacaaaccagtgagtagcttgtcgtaacgcgtaagtctgtggcggaaccgactactttgggtgtccgtgtttcctttttatttccattgtggctgcttatggtgacaatctaagattgttatcatatagctattggattggccatccggtgatttactgagatcaaacacttgcccatttccttgttgcacccacccatttgttatatttatacaattaca

SEQ ID NO: 617 - DNA, 568 bp, Human rhinovirus
  misc_feature 1..568: note = A57, strain SC9723, complete genome.1
  source 1..568: mol_type = genomic DNA
gagttgtactctgttattccggtaactttgtatgccagttttatttccctccccaattgtaacttagaagatgtacataaagaccaataggtggtgatcacccagatcactaaaggtcaagcacttctgtttccccggtcaaagttgatatgctccaacagggcaaaaacaacttggatcgttatccgcaaagtgcctacgcaaagcttagtaccatctttgagagcctatggttggtcgctccactgaaccccacagtagacctggcagatgaggctagaagacccccactggcgacagtgttctagcctgcgtggctgcctgcacacccctacgggtgtgaagccatacgtttgacaaggtgcgaagagccccgtgtgctcactttgagtcctccggcccctgaatgtggctaaccttaaccctgcagctagtgcatacaaaccagtatgttgctagtcgtaacgagcaattgcgggatgggaccaactactttgggtgtccgtgtttcactttttacctttattttgcttatggtgacaatatatatagcatatatattgacacc

SEQ ID NO: 618 - DNA, 569 bp, Porcine kobuvirus
  misc_feature 1..569: note = gene for polyprotein, complete cds,strain:1
  source 1..569: mol_type = genomic DNA
aagggggtgggggggcttcggccctctcaccctcttttccggtggccacccgcccgggccaccgttactccactccactccttcgggactggtttggaggaacacaacagggcttcccacccctgtttaccccgatttcatctacccttctcccgaactgaccctatccacaccccactgactaactcctttggattagacctcggaatgcctacttgacctcccacttgcctctccctttctggattgccggtggtgcctggcggaaaaagcacaagtgtgttgcaggctaccaaactcctacccgacaaaggtgcgtgtccgcgtgctgagtaatgggataggagatgcctacaacaggctcgcccatgagtagagcatggactgcggtgcatgcgacttcggtcgccacgggcatagcattgctcacccgtgaatcaagtcatcgagatttctctgacctctgaagtgcactgtggttgcgtggctgggaatccacgcttgaccatgtactgcttgatagagtcgcggctggccgactcatgggttaaagtcagttgacaagacac

SEQ ID NO: 619 - DNA, 571 bp, Picornaviridae sp.
  misc_feature 1..571: note = isolate yc-1, complete genome.1
  source 1..571: mol_type = genomic DNA
ttcgtgttgggagaaccgtccaaaagaccctccggggttaaaccccggaagggcttttggacggttctcccaacacgaaagattgggacacttctcgtggtgagtgcttcactgcgacccgatggtgttatggagggcttccatcccgccgtttgcctaggctataggctgttttatttcttctttatttttctctatttccaggttgtctccataccgagagctgctaccgctgcgcccggcggggttaactccagggctagcctggagctgtggccgccaaaagtggagagagtgtgactaactgggatggtccgtcctgagtggctgtttccttgcacatactaaacattgatctgggtgctcaggtaggctacgggtgaaacctgaggtgtaataatgttcttctgttgaagaaactgcacgtcaaacgctaaccttatcagatatagctgagatttaagtgtcaaaaagctatcaatgattgcgggggggtgtaaggccaccttgcgatgtttggttgtgtgaggttaagaggccctcttgatggggtttccctaggcactcccct

SEQ ID NO: 620 - DNA, 571 bp, Human enterovirus
  misc_feature 1..571: note = isolate EV/Human/CMRHP52A/CMR/2014 polyprotein1
  source 1..571: mol_type = genomic DNA
tttccccggtgatgttgtatagactgtacccacggttgaaaatgactgatccgttatccgcttttgtacttcgagaagcccagtatcatcttggaatctccgatgcgttgcgctcagcactcgaccccagagtgtagcttaggtcgatgagtctggacgttcctcaccggtgacggtggtccaggctgcgttggcggcctacctgtggcccaaagccacaggacgctaggtgtgaacaaggtgtgaagagcctattgagctacagaagagtcctccggcccctgaatgcggctaatcccaaccacggagcaagggtgcacgaaccagtgtatgccttgtcgtaatgcgcaagtctgtggcggaaccgactactttgggtgtccgtgtttccttttatttttatattggctgcttatggtgacaatcatagattgttatcataaagcgaattggattggccatccggtgaaagcaaaacacattatttacttatttgttggatttactccactcaataattttacctataaactcattacatcagtcttgctgattagaaataagtatcata

SEQ ID NO: 621 - DNA, 572 bp, Coxsackievirus
  misc_feature 1..572: note = A9, isolate NSW-V20-2008-CVA9, complete genome.1
  source 1..572: mol_type = genomic DNA
acttctgtttccccggaccgagtatcaataaactgctcacgcggtcgaaggagaaaacgtccgttacccggccaactacttcgagaaacctagtaacaccatggaaattgcaaagtgtttcgctcagcacacccccagtgtagatcaggccgacgagtcaccgcgttccccacaggcgactgtggcggtggctgcgttggcggcctgcccgtgggacaacccatgggacgctttaatatggacatggtgtgaagagtctattgagctagttggtagtcctccggcccctgaatgcggctaatcctaactgcggagcatgcgcccccattccagagggtagcgtgtcgtaacgggcaactctgcagcggaaccgactactttgggtgtccgtgtttccttttatcttctcattggctgcttatggtgacaattgcgagattgttaccatatagctattggattggccatccggtgtctaacagagctataatataccaatttgtgggattcgttccattaagtttgaaagtcttacaaaccctcaacttgatactgcaactcaatagtgtaaa

SEQ ID NO: 622 - DNA, 573 bp, Encephalomyocarditis virus
  misc_feature 1..573: note = isolate Sing-M100-02, partial genome.1
  source 1..573: mol_type = genomic DNA
cccccccctccccctcccccttattttcctggtcgaaaccgctcggaataagaccggggtcttgtaatgtctaaatgttacttctacccaaccattgtctatgatggttggagggctgtagaacctagcccttgcttcttgcagagaaatccaagtggtctttccactctcgacaatgggtttcatggctcgccaaaagttgtgaagaaagcaagtcctatggaagctttctgacgaccgatgatgtctgtagcgaccctttgcaggcagcggaatcccccacctggtaacaggtgcctctgcggccaaaagccacgtgtttaacagacacctgcaaaggcggcacaaccccagtgccacatcaagagtctgatgactgtggaaatagtcaactggcttttcttaagcaaatttggtgtcggggctgaaggatgcccggaaggtaccacactggttgtgatctgatccggggcccatgtgcatgtgctatacacatgtagcctgggttaaaaaacgtctaggccccccgaaccacggggacgtggttttccttttgaaaaccacaatgataat

SEQ ID NO: 623 - DNA, 574 bp, Dolphin pegivirus
  misc_feature 1..574: note = isolate DPgV, complete genome.1
  source 1..574: mol_type = genomic DNA
cgcaccggtacttggtgcacacagtcaggttagtccgctgtgtgcaagtggtggtcccacaaaccgactgccgccctctaacgtggttttagaatgcggacgccaagtctgcaactggacgaagcgctaccggcagcgctctcctggtcgcttgagggactggagggttgcactgttagtgaataagtccggggggataagctaagggggccgtacccacggcccgcctcacgcctctgccctgctcacctaagctgatgcggacgactccatgctatggtagcagcacggtctcacaggttgtgcaaccggtggaaaaatgctccgtcaggcgcagctgacgttaaactcagtgcccccgcgctcttgcgtggtttccgggctggaagtacgccgccttcctaaagtcgttactcggccaatacattctcgggcgggttgacaaacggaaagcgcggacccatagctccgggcgggggggtatagtccatgggggggcccaggcggcacgcctgcgacacgtggcaaggggaaaaatccttcgggtgaccccgggccccatcttcttttcttt

SEQ ID NO: 624 - DNA, 574 bp, Human rhinovirus A
  misc_feature 1..574: note = strain HRV-A01_p1143_sR2058_2009 polyprotein1
  source 1..574: mol_type = genomic DNA
ttgagtgctctgttattccggtaactttgcacgccaattttataacccctcttccccatgtaacttagaagttttacaaatagaccaatagcaagcagcgaaccagctgtacaaggtcaagcacttctgtttccccggtcaatgttgatatgcttcaacaaggcaaaaacaacagcgatcgttatccgcaagatgcctacacaaagcttagtacctccttcgatggtatttgtctggtcgctcaggtgtttccccaacactagacctggcagatgaggctagaaactccccactggcgacagtgttctagcctgcgtggctgcctgcacaccctttcgggtgtgaagccaaatactggacaaggtgtgaagagccccgtgtgctcatcttgagtcctccggcccctgaatgcggctaaccttaaacccgcagccattgctcacaatccagtgagcagatggtcgtaatgagcaattgtgggatgggaccgactactttgggtgtccgtgtttcactttttcctttatcaattgcttatggtgacaatatatatataaatatatatattggcatc

SEQ ID NO: 625 - DNA, 575 bp, Picornaviridae sp.
  misc_feature 1..575: note = isolate ybw202pic02 genomic sequence.1
  source 1..575: mol_type = genomic DNA
cccgttggtagggggtgctaatacctaccacccgtttgccgtgggaaacggctatggagggtcgggacgcctcgttaatcacgttctagtaattgagtgtgttactttaaatcttacacttatctatttagagtagttaatgtttctactattctttactatatatatcatagctgtcgtcttgctaagagctccgaccactgcgcccggtggggttaaccaatggactagccattggctgtaggcgccagaagagacgacctcctgactatgattgagatttgtcttgcttcagggctgtggaccatggatgtgatcgatcgaaccagggaaggtaggctacgggtgaaaccttccatgtaatgatgatgtcatattgacataccgcatccatacgctaatgcagcggatattgctgagatgataagtcaataagcattcaacgttggtgcccaggtgtcatggctggggcgcggttgcgtgcgtggttcacagtataacttgaagtgtcccttaagataaatctcactctaagggaggaccctgctagtaatagtacagggctaatcaggggc

SEQ ID NO: 626 - DNA, 576 bp, Porcine kobuvirus
  misc_feature 1..576: note = strain KobuV/Pig-wt/ESP/P461/2017, complete1
  source 1..576: mol_type = genomic DNA
tttggaaaaaggtggggggggcttcggccctctcaccctcttttccggtggccacccgcccgggccaccgttactccactccactccctcgggactggtttggaggaacacaacagggcttctcatccctgtttacccttattccacttacccttctccccgaactacccaacccactccccactgattgactcccttggattaagacctcggaatgtcttcctgaccttcttcttggttttcccttttcggattgccggtggtgcctggtggaaaaagcacaagtgtgttgttggctaccaaactcctacccgacaaaggtgcgtgtccgcgtgctgagtaatgggataggagatgccaataacaggctcgcccatgagtagagcatggactgcggtgcatgtgacttcggtcaccaggggcatagcattgctcacccctgaatcaagtcatcgagatttctctgacctctgaagtgcactgtggttgcgtggctgggaatccacgcttgaccatgtactgcttgatagagtcgcggctggccgactcatgggttaaagtcagttgacaagacac

SEQ ID NO: 627 - DNA, 576 bp, Encephalomyocarditis virus
  misc_feature 1..576: note = ZM12/14 gene for polyprotein, complete1
  source 1..576: mol_type = genomic DNA
tccccccctttctcttccccttccttaatttaactggccgaaaccacttgggataaggccggtgtgtgtttgtctatatgtcacttctaccacaccactgtcttttggtggtgtgggggcccagaacctggccctgtcttcttgacgagcactcctaggggtctttcccctcttgccaaaggagtgtaaggtctgttggatgtcgcgaaggaagcaatctctctgtaagcttctggaagacaagcaacgtctgtagcgaccctttgcaggcagcggatttccccacctggtaacaggtgcctctgcggccaaaagccacgtgtataacatacacctgcaaaggcggcacaaccccagtgccacgttgtgagttggatagtcgtggaaagagtttgatggctttcctcaaacgtatccagcaaaagggctgaaggatgcccagaaggtaccccattttatgggatctgatctggggccacggtgcacgtgctttacacgtgtcgagccggggttaaaaaacgtctaagcccttaagtcacggggacgtggctttccctgttaaattaacactgaaac

SEQ ID NO: 628 - DNA, 576 bp, Echovirus E30
  misc_feature 1..576: note = strain 16-I10, complete genome.1
  source 1..576: mol_type = genomic DNA
gcctattggtactcggtccggggtaacagaagtgcttggccaaggtggctgaaggggaaaacgttcgttaaccgactaataacttcgagaaacctagtaccaccatgaaagttgcgcagtgtttcgctccacacaaccccagtgtagatcaggtcgatgagtcaccgcgttccccacgggtgaccgtggcggtggctgcgttggcggcctgcccatggggcaacccatgggacgcttcaatactgacatggtgcgaagagtctattgagcttattggtagtcctccggcccctgaatgcggctaatcctaactgcggagcaggtacccacaagccagtgggtggcctgtcgtaacgggcaactctgcagcggaaccgactactttgggtgtccgtgtttccttttattcttaaattggctgcttatggtgacaattgaaaggttgttgccatatagctattggattggccatccggtgtctaatagagcaattatctacctttttgttggattcattccactcaactataaaacactcaaaacactcatatacattgtaggtctcaacacagcaaa

SEQ ID NO: 629 - DNA, 576 bp, Rhinovirus C
  misc_feature 1..576: note = isolate CO03302015 polyprotein mRNA, complete cds.1
  source 1..576: mol_type = genomic DNA
acccaagtggtgtagtactcttgtatttcggtacacttgtacgccagtttgccaccccttccccaagcgaacgtagaagcttacaatcccggtcaataggaggtggtgaaccacaccacttaagaccaagcacttctgtttccccggctcaagaggaatatgctttgcaaagggctgaagccccgagagtcgttatccgcatacatactacgcaaagcctagtactgtcctggaagtctgttggttggtcgctccgtcaattccccattgatagacctggcagatgaggcaggaaatcccccactggcgacagtgttcctgcctgcgtggctgcctgcacaccctcacgggtgtgaagccaactgatggacagggtgagaagagccccgtgtgctatgtatgagtcctccggcccctgaatgcggctaatccaaccccacagctgccgcacacaaaccagtgtgttgacagtcgtaatgggtaactgtgggacggaaccgactactttgggtgtccgtgtttcctttattctttcaattgatgcttatggtgacaacatcaagtgatattgttacc

SEQ ID NO: 630 - DNA, 578 bp, Porcine kobuvirus
  misc_feature 1..578: note = strain CH/KB-1/2014, complete genome.1
  source 1..578: mol_type = genomic DNA
tttgaaaagggggtgggggggcttcggccctctcaccctcttttccggtggccacccgcccgggccaccgttacttcactccactccttcgggactggtttggaggaacataacagggcttcccaatcccctgttatcctttatcccaaacaccttttcccttaaccaaccctatccacaccccactgactgattcctttggattttgacctcagaatgcctacctgacctcccactcgcctctcccttctcggattgccggtggtgcctggcggaaaaagcacaagtgtgttgcaggctaccaaactcctacccgacaaaggtgcgtgtccgcgtgctgagtaatgggataggagatgcctacaacaggctcgcccatgagtagagcatggactgcggtgcatgtgacttcggtcaccacgggcatagcattgctcacccgtgaatcaagtcatcgagatttctctgacctctgaagtgcactgtggttgcgtggctgggaatccacgcttgaccatgtactgcttgatagagtcgcggctggccgactcatgggttaaagtcagttgacaagacac

SEQ ID NO: 631 - DNA, 578 bp, Enterovirus C99
  misc_feature 1..578: note = polyprotein gene for polyprotein, VP4 and VP2 and1
  source 1..578: mol_type = genomic DNA
gcacttctgtttccccggtacgacgacatagattgtgcccacggtcgaaagtcgtcaatccgttatccgctttggtacttcgaaaagcctagtatcaccttggaattctcgatgcgttgcgctcagcacccaaccccagagtgtagcttaggctgatgagtctgggcactccccaccggcgacggtggcccaggctgcgttggcggcctacccatggctaacgccatgggacgctagagttgaacaaggtgtgaagagcctattgagctaccaaagagtcctccggcccctgaatgcggctaatcccaaccatggatcaagtgcgtgcaatccagcatgtagcttgtcgtaatgcgcaagtccgtggcggaaccgactactttgggtgtccgtgtttccttttatttttattatggctgcttatggtgacaatctcggattgttatcatatagcaattggattggccatccggtgagagtgagagatattatctatttgtttgtggcatttactccactagatactaacacaccaattctaattagagcagttatactaattagatcaatacatcaca

SEQ ID NO: 632 - DNA, 579 bp, Porcine kobuvirus
  misc_feature 1..579: note = isolate OH/RV11/2011, complete genome.1
  source 1..579: mol_type = genomic DNA
tttgaaaagggggtgggggggcctcggccccctcaccctcttttccggtggccactcgcccgggccaccgttactccactccactccctcgggactggtttggaggaacataacagggcttcccatccctgtttttacccttatttccatctaccctttcccttaaccaaccctatccacaccccactgactgactcctttggattttgacctcagaatgcctacttgacctcccacttgcctctcccttatcggattgccggtggtgcctggtggaaaaagcacaagtgtgttgttggctaccaaactcctacccgacaaaggtgcgtgtccgcgtgctgagtaatgggataggagatgccaatgacaggctcgcccatgagtagagcatggactgcggtgcatgtgacttcggtcaccaggggcatagcattgctcacccctgaatcaagtcatcgagatttctctgacctctgaagtgcactgtggttgcgtggctgggaatccacgcttgaccatgtactgcttgatagagtcgcggctggccgactcatgggttaaagtcagttgacaagacac

SEQ ID NO: 633 - DNA, 579 bp, Enterovirus sp.
  misc_feature 1..579: note = C99, polyprotein gene for polyprotein, VP4 and VP2 and1
  source 1..579: mol_type = genomic DNA
gcacttctgtttccccggtgcgatgacatagactgtacccacggttgaaagtcgttaatccgttatccgctttggtacttcgagaagcctagtacctccttggaattttcgatgcgttgcgctcaacactcaaccccagagtgtagcttaggctgatgagtctgggcattcctcaccggcgacggtggcccaggctgcgttggcggcctacccatggctaacgccatgggacgctagatttgaacaaggtgtgaagagcctattgagctaccaaagaatcctccggcccctgaatgcggctaatcccaaccatggatcaagtgcatgcaaaccagcatgtggcttgtcgtaacgcgtaagtccgtggcggaaccgactactttgggtgtccgtgtttcctttttatttttataatggctgcttatggtgacaatctcagattgttatcatatagcgattggattggccatccggtgagaataagagatattatctatttgtttgtggcattcactccacttaactcatacacaccaagtttaatcaaagcagttttactaattagatcagcataccaca

SEQ ID NO: 634 - DNA, 581 bp, Picornaviridae sp.
  misc_feature 1..581: note = isolate muf159pic1 genomic sequence.1
  source 1..581: mol_type = genomic DNA
aatgcaaataacaatcaaggacccgtttgtggggtgggctcccactttattcatagcccataacattggtatcctgttaaactgactactggctgttctactaggtatttcaactggtttaaagattttaattttgttgaaacaggaaggattagctcgatcctttaggtgggacttatttttaccaccacagagcgcccatgaacaattaaaggtagtggaggaactattagtaaccatgtgaaatgcgtaactgctatccctgtgcccttggccttggcatagtaatatgctccaaggggcccgaaaggctagtgggtagaaactcacctagggtggtcactctgtgaatttcacatggcgaagtttagattctgaatcctactttgttgtgagtggggtcaggtgacactgagtagatgccctggaggtaccaattgatctgaccaggggcctggatacttaatgccaggttaaaaattatgaaaagtaagtcaccgaactgaaatgtttttcctttttatttcatctcatactgctgtgttgtttggtgtaatagtttgaagacacaattttccagg

SEQ ID NO: 635 - DNA, 584 bp, Canine picodicistrovirus
  misc_feature 1..584: note = strain 236, complete genome.2
  source 1..584: mol_type = genomic DNA
gtccgtataccaacggatcgatttccctgttacagcctctttgcttccccaccccactcctctccgtggagagcctagtaggattcttgaaagcaaatgtctgttgaccccaccttcaatcccggaaggaagaaaccgagaatgagactcgtctattcccccatggtgacatggagacttgtctgcgtgtgtctcgggctcccttatgagtattgtgggagaaccgctaccctgactccgaggagtctgatgggatatgttagtacctatgaaagtaaggtgacagactttgttagtatggatacgaagagccgactgccgttggagtgtatcctccggacccgtgaatgcggctaaccctaaccccggatcaagtgcccacaaaccagtgggtggcttgtcgtaatgcgtaagtctgggatgggaccgactactttcggtgttccgtgtttcctatttattttatcaataaagtatatggtgacaatattactagtgtgatatatagcctctattgtatttttattgatcaattttaataggttatttggtggtgatttaaatagagatagttactattagag

SEQ ID NO: 636 - DNA, 584 bp, Rhinovirus
  misc_feature 1..584: note = B14, strain SC0641, complete genome.1
  source 1..584: mol_type = genomic DNA
tactctggtattatgtacctttgtacgcctgtttcttccctacaaccccttcctaaaactcccacccatgaaacgttagaagcttgacatttaagtacaataggtggcaccacatccagtggtgtctacgtacaagcacttctgtttccccggagcgaggtataggctgtacccactgccaaaagcctttaaccgttatccgccaaccaactacgtaacagctagtatcatcttgttcttcactggacgttcgatcaggtggattccccctccactagtttggtcgatgaggctaggagctccccacgggtgaccgtgtcctagcctgcgtggcggccaacccagctcatgctgggacgcccttttaaggacatggtgtgaagactcgcatgtgcttggttgtgagtcctccggcccctgaatgcggctaaccttaaccctggagccttatgccacgaaccagtggttgtaaggtcgtaacgagcaattccgggatgggaccgactactttgggtgtccgtgtttcctatttttctttatattgtcttatggtcacagcatatatataagtatatactgtgatc

SEQ ID NO: 637 - DNA, 587 bp, Human rhinovirus C
  misc_feature 1..587: note = strain QCE, complete genome.1
  source 1..587: mol_type = genomic DNA
catggttacccacgaggtgcagtggtcttgtattacggtacatttccataccagttttataaaccctaccctgaaacttatagaagcttgtacacaccgaccgacaggtggcaatcatccagattgtcgaaggtcaagcacttctgtttccccggtatccttgtatacgcttcacccgaggcgaaaaccgaggttatcgttacccgcaaagtgcctacgagaagcctagtatcactttggaaacctatggttggtcgctcagctgttttcccaacagtagacctggcagatgaggctggacgctccccaccagcgatggtggtccagcctgcgtggctgcctgcacaccctgtggggtgtgaagccagaaagtggacaaggtgtgaagagcctattgtgctcactttgagtcctccggcccctgaatgtggctaatcctaaccccgtagctgttgcatgtaatccaacatgtatgcagtcgtaatgggcaactatgggatggaaccaactactttgggtgtccgtgtttcttgtttttctttatatactgcttatggtgacaatagtaattcattactcttgttacc

SEQ ID NO: 638 - DNA, 588 bp, Canine picodicistrovirus
  misc_feature 1..588: note = strain 209, complete genome.2
  source 1..588: mol_type = genomic DNA
gttcgtatgccaacggattgatttccctgttacagcctctttgcttccccaccccactcctctctgtggagagcctagtaggattcttgaaagcaaatatctgttgaccccaccttcaatcccggaaggaagaaaccgagaatgagactcgtctattcccccatggtgacatggagacttgtctgcgtgtgtctcgggctcccttatgagtattgtgggagaaccgctaccctgactccgaggagtctgatgggatatgttagtacctatgaaaataaggtgacaggttttgttagtatggatacgaagagccgactgccgttggagtgtatcctccggacccgtgaatgcggctaaccctaaccctggatcaagtgctcacaaaccagtgagtggcttgtcgtaacgcgcaagtctgggatgggaccgactactttcggtgttccgtgtttctatttattttatcaataaagttttatggtgacaatcttgtgatattaagatataaagcttttatccttttgtttattgattatcttaaatagattgcttggtggtgatttaaaatagagatagttattattagag

SEQ ID NO: 639 - DNA, 588 bp, Rhinovirus A
  misc_feature 1..588: note = isolate E0-227 polyprotein gene, partial cds.1
  source 1..588: mol_type = genomic DNA
ggctcttccgatctgggggttgtactctattattccggtaattttgtacgccagttttatctccccttcccccgactgtaacttagaagtttatcattacggccaataggtggtagttatccaaactaccaaaggtcaagcacttctgtctccccggtcaaagttgatatgctccaacagggcaaaaacaactaagatcgttatccgcaaagtgcctacgcaaagcctagtaatgtctttgaaaatttatggttggtcgctccgctattccccatagtagacctggcagatgaggctagaaattccccactggtgacagtgttctagcctgcgtggctgcctgcgcaccctttgggtgcgaagccatacattggacaaggtgtgaagagccccgtgtgctcactttgagtcctccggcccctgaatgtggctaaccttaaccctgcagctagtgcatgtaatccaacatgttgctagtcgtaatgagcaattgcgggacgggaccaactactttgggtgtccgtgtttcactttttccttttattattgcttatggtgacaatatatatagatatatatattgacacc

SEQ ID NO: 640 - DNA, 589 bp, Human rhinovirus
  misc_feature 1..589: note = A68, strain SC305, complete genome.1
  source 1..589: mol_type = genomic DNA
ccatgtggagttgtactctattattccggtaattttgtacgccagttttatctcccctcccccttttacataacttagaagtttgtacacatcgaccgataggtggcatttatccaaaatgttgaaggtcaagcacttctgttaccccggttaaaattgatatgctccaacagggcaaaaacagttttaatcgttatccgcaaagcaactacgcaaagcctagtatcatttttgataatatacggttggtcgctccactgtgaacccgacagtagacctggcagatgaggctggaaaccccccactggtgacagtgttccagcctgcgtggctgcctgcgtacccctttgtgggtacgaagccatatgtttgacaaggtgtgaagagccccgtgtgcttgttttgagtcctccggcccctgaatgtggctaaccttaaccctgcagctagtgtgtacaatccagtacatagctagtcgtaatgagtaattgcgggatgggaccaactactttgggtgtccgtgtttcctgtttttcttttatatttgcttatggtgacaatatatatacatcacatatatattggcacc

SEQ ID NO: 641 - DNA, 591 bp, Bat picornavirus
  misc_feature 1..591: note = strain ITA/2017/189/18-155, complete genome.1
  source 1..591: mol_type = genomic DNA
ccccccctccctccttttcatcggctgtccgttgccgtggagcttcactatccgtagtgttgttccggaaaacggacacagcaacaccttcctccgggttggtgcttgcaatccctttccccttttgttgacttcccggactcattcgttttggctttcacattggccctagaggctatcttgttggattcctgtaccctggcaatctgaactccttcgcatgccctcccacatggtcgaggacagtaaggcgcgggaccaagagagccgggcaccagacccatttctgaattggactgccaccgccaagaattgcggagcggctctgttgtgtgagatcctcctttcccacagatagcgcatcccagtgcgtgtgtatgggggttagggtgcatacagcatccgcgactgtggtcagatgagcggaagcatctgctaggataaaggggacgcgattcgctatccccgaagcatccctcattgaggtaaagccctagtaggtgacggtggactggaatgccaccctggttccgtgcagcttgacagagtgccggccggtgctctggccacagaaatcggctgttttgggac

SEQ ID NO: 642 - DNA, 591 bp, Rhinovirus C
  misc_feature 1..591: note = strain SCH-109 polyprotein gene, complete cds.1
  source 1..591: mol_type = genomic DNA
cccgtaggcagtatgggtgtagtactcttgtattctggtacatttgtacgccagtttttcttcccacccccaagtaacctttagaagcaattgcatccagacgagcaggcgaccaacactccacgttggttcacgtcaagcacttctgtttccccggtattagagtgttaggcttctcaagaggctgaagctcgaggtatcgttatccgcacagttactaagcagagcctagtatcactctgaccttctcactggctggtcgttcaatgagagacccactcatagacctggcagatggggctggaagtaccccactggcgacagtgttccagcccgcgtggctgcctgtccccctttctgggggaaagccgatgttaagacagggtgtgaagagccgcgtttgctaactgtgagtcctccggcccctgaatgcggctaatcttaccccacagctattgcatggaaaccaccatgtggatagtcgtaatgggcaactgtgggacggaaccgactactttgggtgtccgtgtttccttttattccatttattatctcatggtgacaacgtataagagttatatgttgtttacc

SEQ ID NO: 643 - DNA, 591 bp, Rhinovirus C
  misc_feature 1..591: note = C18-NIID JPN-2014 gene for polyprotein, partial cds.1
  source 1..591: mol_type = genomic DNA
ccgtctacggacgtagtactcttgtatttcggtacacttgtacgccagttttcctccctccaccccttatgcaacttatagaagcttgaacttacaggcgaataggaggccagcaatccatgctggtaaacgccaagcacttctgtatccccggtattagagtgttaggcttctcacgaggctgaagcttgatatatcgttatccgcacagttactaagcagagcctagtatcatcttactctttatgctggttggtcgctcagtcagtttcccctgatagacctggcagatggggctggaaatccctcactggtaacagtgttccagcccgcgtggctgcctgtccccctccttagggggaaagccaatataaagacaaggtgtgaagagccgcgtttgctaattgtgagtcctccggcccctgaatgcggctaatccaaccccacagctatcgcatggaatccaccatgtaggtagtcgtaatgggcaactgtgggacggaaccgactactttgggtgtccgtgtttccttttataccttatctgatctcatggtgacaacatatattgacaagtgtatgttgttcacc

SEQ ID NO: 644 - DNA, 596 bp, Enterovirus C
  misc_feature 1..596: note = strain 03-4209, complete genome.1
  source 1..596: mol_type = genomic DNA
gtaccaccacgaacaagcacttctgtttccccggtgaagttgcatagactgtgcccacggttgaaagcgactgatccgttatccgctcttgtacttcgagaagcctagtaccatcttggaatcttcgacgcgttgcgctcagcactcaaccccagagtgtagcttaggctgatgagtctggacattccccatcggtgacgatggtccaggctgcgttggcggcctacctgtggcccaaagccacaggacgctagttgtgaacaaggtgtgaagagcctattgagctacatgagagtcctccggcccctgaatgcggctaatcccaaccacggagcaggtggtcataatccaatgactggcctgtcgtaacgcgcaagtctgtggcggaaccgactactttgggtgtccgtgtttccttttatttttacaatggctgcttatggtgacaatcatagattgttatcataaagcgaattggattggccatccggtgagaatcaaatcgcttgtatatttgtttgttggatttgctccattaacattaaacaccttaacacttattaaagtagttctattgataagacattgctattaca

SEQ ID NO: 645 - DNA, 596 bp, Human rhinovirus
  misc_feature 1..596: note = B4, strain SC165, complete genome.1
  source 1..596: mol_type = genomic DNA
gacccactgggtgtagtgctctggtattttgtacccttgcacgcctgtttcccatttgtacccttccttgatttcctccccatgtaacgttagaagtttcggaattttaaagtacaataggaagcgccacatccagtggtgttgtgtacaagcacttctgtttacccggggcgaggtataggctgtgcccacggccaaaaacctttaaccgttatccgccaaccaactacgtaacggctagtatcatcttgtttctgacttggcgttcgatcaggtggtaacccccactagtctggtcgatgaggctaggaattccccacgggcgaccgtgtcctagcctgcgtggcggccagcccagcttttgctgggacgccttttcaaagacatggtgtgaagacccgcatgtgcttggttgtgagtcctccggcccctgaatgcggctaaccttaaccctggagcccagtgacataatccaatgttatttgggtcgtaatgagtaattccgggatgggaccgactactttgggtgtccgtgtttccttttattctttataatgtcttatggtcacagcatatatattgtatatactgtgatc

SEQ ID NO: 646 - DNA, 596 bp, Human rhinovirus
  misc_feature 1..596: note = C32, strain USA/CA/RGDS-2016-1008, complete genome.1
  source 1..596: mol_type = genomic DNA
atcccaccatgattgttcactgaacgttgtactcttgtattacggtacacttgtacgccagttttataatcccctccccttgtaacttagaagcaagtacacacaggccaatagcaagtagcaagccatgctacttatggtcaagcacttctgtttccccggtctgacgggatatgcttcacccgaggcagaaactcagatgatcgttatccgcaaagtgcctacgggaagcctagtagcaccctggaaactgttaggttggtcgctcaattgctgaccccgagcaatagacttggcagatgaggctagacataccccaccagcgatggtggtctagcctgcgtggctgcctacccaccctaatagggtgggaagcctatcaatggacagggtgtgaagagcctactgtgctcactttgactcctccggcccctgaatgtggctaatcctaaccccgtatctatcgcatgcgcaccagcatgtaggtagtcgtaatgggcaactacgggatggaaccaactactttgggtgtccgtgtttcctgttttctttattatttgcttatggtgacaattgtatgaaatacgattgacacc

SEQ ID NO: 647 - DNA, 597 bp, Human rhinovirus
  misc_feature 1..597: note = 56 polyprotein gene, partial cds.1
  source 1..597: mol_type = genomic DNA
gttgttcccacctggacttcctatgtggagttgtacactgttatcccggtaaccttgtacgccagttttatacacccttccctgtaacttagaagttataagcacgaggaccaataggtagtgactttccaggtcactaaaggtcaagcacttctgtctccccggtcaaagttgatatgctctccccagggcaaaaacaattgagatcgttatccgcaatgtgcctacgcaaagcctagtaatatcttagatgatatatggttggtcgctccgccatttcccatggtagacctggcagatgaggctagaaactccccactggcgacagtgttctagcctgcgtggctgcctgcgcactctctgagtgcgaagccatatatttgacaaggtgtgaagagccccgtgtgctcacattgaatcctccggcccctgaatgtggctaaccttaaacctgcagctagtgcacacaaaccagtgtgtagctagtcgtaacgagcaattgcgggatgggaccaactactttgggtgtccgtgtttcacttttttccttttatatttgcttatggtgacaatatatataatacatatattgacacc

SEQ ID NO: 648 - DNA, 598 bp, WUHARV Enterovirus 2
  misc_feature 1..598: note = polyprotein gene, partial cds.1
  source 1..598: mol_type = genomic DNA
cccagtaacgttagaagaaagtacaaatgacacttagcaaatccaccaacccaggtgggttttcgtcaagcacttctgtttccccggacctagtaccaataggctgtacccacggctgaaggggaaaacgttcgttacccggctacctacttcgaaaagcctagtatcatcatagaatgtctcaagtgttacgctcagcacaaccccagtgtagttcaggtcgatgagtcaccgaattccccacgggcgaccgtgtcggtggctgcgttggcggcctgcctgcgagtttcactcgcaggacgcttgattcatgacatggtgtgaagagcctattgagctaggtagtagtcctccggcccctgaatgcggctaatcctaaccacggagccatgcgtcacaatccagtgatgtcgtggtcgtaacgagcaattctgtggcggaaccgactactttgggtgtccgtgtttcctgttttatttaccttggctgcttatggtgacaattgtatagttgtcatcatatagctattggattggccatccggatatatacaagcaactagtgttcacactacctcttttgctataacacaagtatc

SEQ ID NO: 649 - DNA, 598 bp, Human rhinovirus
  misc_feature 1..598: note = C11, strain SC1065, complete genome.1
  source 1..598: mol_type = genomic DNA
ccaccgggcacactgtgcgtagtactctgtgattacggtcactttgtacgcctgtttgcatccccaacccacatttcctatcatcttttatatccgtaacttagaagcataacacacagtccaataggaagcagctaaaccaagactgctaaggacaaatacttctgtttccccgggcgtgtgaatagactccaacagggttgaagctgtagcgctcgttatccgcacaactactacgcgactgttagtagcactttggatagcatgtggggttccgctccacagaaaccccatctgtaggtcagggcaatggggctacacataccccactggcgacagtggtgtagcccgcgtggtgccctgcctgggactgtgtcccaggactccacttgtttgacagggtgtgaaggcactagtgtgctagttgtgagtcctccggcccctgaatgcggctaatcctaaccctgcagccattgcaaacattccagtttgtgggtggtcgtaacgagtaattgcgggatggaaccgactactttgggtgtccgtgtttctctttttaacttgatgagtgtcttatggttacaattatacagtaacc

SEQ ID NO: 650 - DNA, 600 bp, Hunnivirus 83GR
  misc_feature 1..600: note = isolate 83GR-70-RAT106 polyprotein gene, complete1
  source 1..600: mol_type = genomic DNA
agctttcttacccttcatttgtgaacccactagtctaagccgcttggaatacgatgagtggaaacgttcattctaaatggagtgaaacatgctcaattttctagctcgtgctggtctttccagtgcggggcggccctgtctggccgtaactctacagagtgtcacgccgtgcttgcggatctcacgtggcacatgacaaggctctcgctggaactgtgagtctgatgcatgtggagtaacagtgaaaagtgcatgatcacacatttgtgtgggctatgagcctgcggaacaacaactggtaacagttgcctcaggggccgaaagccacggtgttaacagcaccctcatagtttgatctatcccaggatagtgatgttgtgtacctagtaattgccaatcctcatgtcttggtatcacggcataccggagagttcgcgggtgaaggatgcccagaaggtacccgtaggtaaccttaagagactatggatctgatctggggccctgtctggagtgctttacacacagctcagggttaaaaaacgtctagcccgccaggacccgagggattcgggttttcccttaaaaacccgattagagcat

SEQ ID NO: 651 - DNA, 600 bp, Human enterovirus
  misc_feature 1..600: note = isolate EV/Human/CMRHP35B/CMR/2014 polyprotein1R
  source 1..600: mol_type = genomic DNA
cggtaagccacccgagttctggccaagcacttctgtttccccggactgagtatcaataagttgctcgcgcggctgaaggagaaaacgttcgttacccgaccaactacttcaagaaacccagtatcaccatggaagttgcgcagtgtttcgctccgcacaaccccagtgtagatcaggtcgatgagtcaccgcaacccccacgggtgaccgtggcggtggctgcgctggcggcctgcccatggggcaacccatgggacgcttcaatactgacatggtgtgaagagtctattgagctagttggtagtcctccggcccctgaatgcggctaatcctaactgcggagcagacgctcgcatgccagcgggtagtctgtcgtaacgggtaactctgcagcggaaccgactactttgggtgtccgtgtttccttttattcttatactggctgcttatggtgacaattgaaaggttgttaccatatagctattggattggccatccggtgacaaacagagcgattatatactcttttgttgggttcatcccattgaattacaaggtattaaacaccctcagttttatcctgatactaaatacaacaaa

SEQ ID NO: 652 - DNA, 601 bp, Human rhinovirus
  misc_feature 1..601: note = C56, strain USA/2017/CA-RGDS-1003, complete genome.1
  source 1..601: mol_type = genomic DNA
acccacaccgtctacggacgtagtactcttgtatttcggtacatttgtacgccagttttccctccctcccccctttcacgtaacttatagaagcttgaacatacaggcgaataggaagccaacaaaccatgttggtaaacgccaagcacttctgtttccccggtattagagtgttaggcttctcacgaggctgaagcttgatatatcgttacccgcacagttactaagcagagcctagtaacactttgatctctatactggctggtcgctccgtcagaaaccccctgatagacctggcagatggggctggaaattccccactggtgacagtgttccagcccgcgtggctgcctgtccccctttcttgggggaaagccaatatatagacaaggtgccaagagccgcgtttgctaattgtgagtcctccggcccctgaatgcggctaatccaaccccacagctatcgcatggattccaccatgtaggtagtcgtaatgggcaactgtgggacggaaccgactactttgggtgtccgtgtttccttttataccttattttatctcatggtgacaacatatattgacaagtatatgttgactacc

SEQ ID NO: 653 - DNA, 602 bp, Rhinovirus C
  misc_feature 1..602: note = strain HRV-C45_p1084_s3920_2000 polyprotein gene,1
  source 1..602: mol_type = genomic DNA
ttaaaacagctgtgtggttgcacccaccaccaggcacaatgtgcgttgtacactgggattccggtcactttgtacgcctgtttgaccacccccccccatgcaacttagaaaatatacacatagcccaataggatgcggccaaaccaggttcgtcacgggcaagcacttctgtttccccgggtgtgtgaatagaccctaccagggttgaagctgtagcactcgttatccgcatggctactacgcaaatgttagtaacaccctctattgtacttgggatttcgttccgcagataccccatctgtagattagggcgatgaggctacacactccccactggcgacagtggtgtagcctgcgtggcgccctacctgggtctcctgacccaggattccacttacaagacagggtgtgaaggcacaagtgtgctagtcatgagtcctccggcccctgaatgcggctaatcttaaccccgtagccattgcaggcaaaccagtctgtggatggtcgtaatgggtaactacgggatggaaccgactactttgggtgaccgtgtttctcttttttctttatgtaggcactttatggttacaacataagtaacc

SEQ ID NO: 654 - DNA, 603 bp, Human rhinovirus
  misc_feature 1..603: note = A51, strain 12K5, complete genome.1
  source 1..603: mol_type = genomic DNA
ttgtacccacccacactgtctacggacgtagtgctctcatattacggtatgcttgcacgccagtttttaccccccttttcccaatttgtaacattagaagtttgtactattaatttggtcaataggaggtagcaagccatgctatctaagaccaagcacttctgttaccccggtatacggagaatagactccaaaagggttgaagctccaaatatcgttatccgcacaattactacgcaaagcctagtaacatcttgataagctctttggttggtcgctcagctgttacccccagtagacttggcagatgaggctgggtattccccactggcgacagtgacccagcctgcgtggctgcctacacacctggcgacaggtgtgaagccaaaagtggacaaggtgtgaagagccccgtgtgctaattgtgattcctccggcccctgaatgcggctaatccaaccccacagccaatgcatgtaaaccaacatgtatttggtcgtaacgggcaactgtgggacggaaccgactactttgggtgtccgtgtttccttttattttaaatgacttgcttatggtgacaaatattggtgtatatttgtcatc

SEQ ID NO: 655 - DNA, 603 bp, Human rhinovirus A
  misc_feature 1..603: note = strain HRV-A80_p1187_sR2954_2009 polyprotein1
  source 1..603: mol_type = genomic DNA
ggcttgacctttgacaactttgtgtttgaggagcagtactctactattccggtagttttgtacaccagttttatctcccttcccctatgtaacttagaagacaagcactcaagaccaataggatgataactaaccaagttgtcaaaggtcaagcacttctgtttccccggtcaaaattgatatgctccaccagggcaaaaacagttttggtcgttatccgcaaagtgcctacgcaaagcttagtaacactttgaagaatgtatggttggtcgttccgctattccccatagtagacctggcagatgaggctagaaaatccccactggcgacagtgttctagcctgcgtggctgcctgcgcacctctttgaggtgcgaagccattcctttgacaaggtgcgaagagccccgtgtgctcactttgagtcctccggcccctgaatgtggctaaccttaaccctgcagctagtgcatgcaatccagcatgtctctagtcgtaatgagcaattgcgggatgggaccaactactttgggtgtccgtgtttctctttttacttttaaattgcttatggtgacaatatatataacacatatatattgacacc

SEQ ID NO: 656 - DNA, 604 bp, Duck picornavirus GL/12
  misc_feature 1..604: note = complete genome.1
  source 1..604: mol_type = genomic DNA
ttgaaagggggtgctcagggtagctccctgagctcttccctccaccctctttcaacgtctggcccacgatacgggccacctttcaatcttaactaactatccctttaatctatttggattttctggtttagaataatttggaacacataattggattatcttttaggattgtggataggatttgttcgggatatcactcccttcctgtgctaacacatattctaattccctcctttgtctattatctcttggaggtggtgctgaaatattgcaagccacttgagtgtatagatgaagtaggctcaagatgaatgttgtgttactcaaggcaagtgtagctatcactaagatattggtaacgtgaaacggattaccggtagtagcgtgatcttccgtcttagtgctctagtgactagaggacaacgacatggcatcacatatcttaaccctccagttttggcatccgggacagaatgggctggatatccgctttctttctggggtatgtgatgggtggtattggggtaaccaccttgaccatgacgctcgataagagtgaccgcctgatcattgaaacctctagtataaaattcaggctgaaatc

SEQ ID NO: 657 - DNA, 605 bp, Coxsackievirus
  misc_feature 1..605: note = A19, strain BBD26 polyprotein gene, complete cds.1
  source 1..605: mol_type = genomic DNA
aactttagaagcaattcaaagagttcaatacagggggtacaaaccagtaccaccacgaacaagcacttctgtttccccggtgaggctgtatagactgtgcccacggtctaaaacggcagatccgttacccgctcaagtacttcgagaagcctagtatcaccttggaatcttcgatgcgttgcgctcagcaccctacccccgggtgtagcttaggtcgatgagtctgggcatgccccaccggcgacggtggcccaggctgcgttggcggcctacccatggctaacgccatgggacgctagttgtgaacaaggtgtgaagagcctattgagctacttgagagtcctccggcccctgaatgcggctaatcccaaccacggagcaagtgcctgcatgccagcaggtagcttgtcgtaacgcgcaagtctgtggcggaaccgactactttgggtgtccgtgtttccttttattcttataatggctgcttatggtgacaatctaagattgttatcatatagcttttggattggccatccggtgattatttgacttttgagcacttgtttaccttatctcatcacatattcatttaattgcttgattgcata

SEQ ID NO: 658 - DNA, 606 bp, Human rhinovirus
  misc_feature 1..606: note = A31, strain SC1031, complete genome.1
  source 1..606: mol_type = genomic DNA
taataatagtgtactactccacgtgggaagtacgggtggagtagtacactattattacggtaatcttgtacgccagttttataaccccttcccctatgtaacttagaagtttgaactcaagaccaacaggtggtaatcaaccagattactaaaggtcaagcacttctgtttccccggtcaatattgatatgctccaccagggcaaaaacaattgcgatcgttatccgcaaagtgcctacgcaaagcttagtaacattttgaataatatatggttggtcgttccgctattccccatagtagacctggcagatgaggctggaaactccccactggcgacagtgttccagcctgcgtggctgcctgcgcactctcacgagtgcgaagccatatatttgacaaggtgtgaagagccccgtgtgctcactttgagtcctccggcccctgaatgtggctaaccttaaccctgcagctagtgcatacaagccagtatgtagctagtcgtaatgagcaattgcgggatgggaccaactactttgggtgtccgtgtttcacttttatctttattatttgcttatggtgacagtatatagtgtatatattgttacc

SEQ ID NO: 659 - DNA, 607 bp, Human rhinovirus
  misc_feature 1..607: note = C54, isolate D3490 polyprotein gene, complete cds.1
  source 1..607: mol_type = genomic DNA
ttaaaacagctgtgtggttgttcccaccaccaggcacactgtgcgttgtacactgggattccggtcactttgtacgcctgtttgctatcccccccaacttatgtaatttagaagatgtacacaacgcccattaggatgcggccaaaccaggtccgcttagggcaagcacttctgtttccccgggtgtgtgaatagactctaacagggttgaagctgtagcactcgttatccgcgcaactactacgcgaatgttagtagcatcctgtgttgcatttgggatttcgctccgcagaaaaccccatctgtagattagggcaatgaggctacacataccccactggcgacagtggtgtagcctgcgtggtgccctacccaggccttcttggcctgggattccacttacaagacagggtgtgaaggcactagtgtgctagttgtgagtcctccggcccctgaatgcggctaatcttaaccccgtagcccccgcaagtaaaccaacttgtaggtggtcgtaatgagtaattacgggatggaaccgactactttgggtgtccgtgtttccttttattctttatatttgcatcctatggttacaacataagtaatc

SEQ ID NO: 660 - DNA, 608 bp, Human rhinovirus C
  misc_feature 1..608: note = isolate LZY79, complete genome.1
  source 1..608: mol_type = genomic DNA
ttaaaactgggtataggttgttcccacctgtaccacccacgtggtgtagtgctcctgtattccggtacacttgcacgccagtttgccctcccttcctgtaacgtagaagtaatataaacagaccaataggggatggcgaaccacgccgttcaaggtcaagcacttctgtttccccggcatgcgaggaatagaccttttcaagggttgaagccacaagtgtcgttacccgcattggtactacacagagcttagtaccgctctggaaacttattggttggtcgttcagccattttcccctggtagacccggcagatgaggcaagaagctccccactggtaacagtgttcttgcctgcgtggctgcctgcacaccctaatgggtgtgaagccaataagtagacagggtgtgaagagccgcgtgtgctaccaatgagtcctccggcccctgaatgcggctaatccaaccccacagctatggcatgcaatccagcatgtgcgtagtcgtaatgagtaattgtgggacggaaccgactactttgggtgtccgtgtttcccttattctcttatgtcttgcctatggtgacaatattaagtattaatattgctacc

SEQ ID NO: 661 - DNA, 608 bp, Human rhinovirus
  misc_feature 1..608: note = C47, isolate CA-RGDS-1001, complete genome.1
  source 1..608: mol_type = genomic DNA
ggcatgggttgtacccacccatgccacccaagtggtgtagtgctcctgtatcccggtacacttgcacgccagtttgccctcccttttccccaagtaacttagaagcttacacacaggccactaggaggtggtaatccataccactgatggtcaagcacttctgtctccccggcacgcatggaatagaccttgaaaagggttgaagccataaatgtcgttatccgcattggtactacacaaagcctagtaatgccttgaaacttctacggttggtcgttccgctagatgcacccctctagtagacctggcagatgaggcagggcaaaccccactggcgacagtggccctgcctgcgtggctgcctgcgcgcccacttgggtgcgaagccgatgaacagacaaggtgtgaagagccccgtgtgctaccaatgagtcctccggcccctgaatgcggctaatccaaccccacagctattgcacacaaaccagtgtgtatgtagtcgtaatgagtaattgtgggacggaaccgactactttgggtgtccgtgtttccttttattctttaaatttgcacatggtgacaatattggtagtatcagtattgtcatc

SEQ ID NO: 662 - DNA, 608 bp, Human rhinovirus C
  misc_feature 1..608: note = strain NY-074 polyprotein gene, complete cds.1
  source 1..608: mol_type = genomic DNA
ttaaaactgggttatagttgctcccactataaccacccacgcggtgttgtggacttgtatttcggtacacttccatgccagttttatcttcccccctgcaacacttagaagaaatgtacttatggaccaataggcggcggccacccaggtcgttgacggtcaagcacttctgtctccccggtgatactggatacgctttacccaaggcgaaaaccgggctcatcgttatccgcaaagtgcctacgagaagtctagtagcactctgaaaacctatgactggtcgctccactgcaatcccagcagtagacctggcagatggggctagacataccccaccagcgatggtggtctagcccgcgtggctgcctgcacaccctatgggtgtgaagccagaaagtggacagggtgtgaagaacctattgtgctcactttgagtcctccggcccctgaatgtggctaatcctaaccctgcaaccgttgcgcacaacccagtgcgtatgcggtcgtaatgagcaattgcgggatggaaccaactactttgggtgtccgtgtttcttgttattcttttatttgcttatggtgacactgtatagctatacattgtcatc

SEQ ID NO: 663 - DNA, 609 bp, Rhinovirus C
  misc_feature 1..609: note = strain 20692_90_HRV-C polyprotein gene, complete cds.1
  source 1..609: mol_type = genomic DNA
taaaactgggtacaggttgttcccacctgtaccacccacgtggtgtggtgctcttgtattccggtacatttgcacgccagtttgctacccctcaccctttgtaacctagaagctattaactcgaccaataggcggtggtaaaccataccacttacggtcaagcacttctgtttccccggtatgcgaggaatagactctcacagggttgaagcctcaagtatcgttatccgcattggtactacgcaaagcctagtagcgcctcggaaatcccttggttggtcgttccgctagtttcccctagtagacctggcagatgaggcaggacattccccactggtgacagtggtcctgcctgcgtggctgcctgcgcacccttcggggtgcgaagccaagtgatggacaaggtgtgaagagccccgtgtgctactaatgagtcctccggcccctgaatgcggctaatccaaccccacagctattgcacacaaaccagtgtgtatatagtcgtaatgagcaattgtgggacggaaccgactactttgggtgtccgtgtttccttttattctcattatcttgcttatggtgacaatactgtgatatagtgttgttacc

SEQ ID NO: 664 - DNA, 609 bp, Human rhinovirus C
  misc_feature 1..609: note = strain HRV-C49_p1277_s6237_2000 polyprotein1
  source 1..609: mol_type = genomic DNA
aactgggcttgggttgtgcccacccaagctgcccacgtggcgttgtgctcttgtattccggtacacttgcacgccagtttgcctcccctaccctgcaacgaatttagaagaatggacacaaatagaccaataggtggtgacaatccatgtcactaatggtcaagcacttctgtttccccggtgtgatgtggaataaactcccccagggttgaagccataagcatcgttacccgctacgtgcctacgcaaaacctagtagcattctggagtctacttggttggccgttcagccactaacccgtggtaggcctggcagatgaggctgggcgtaccccactggtaacagtggcccagcctgcgtggctgcctgcccctctttgaggggaagccaattaggtgacagggtgtgaagagtcccgtgtgctcacgtagagtcctccggcccctgaatgtggctaatcctaaccccgcagctattgcacacaatccagtgtgttagtagtcgtaatgggcaactgtgggatggaaccaactactttgggtgtccgtgtttcttgtttttcttttatacttgcttatggtgacaaatagtgcatactgtttgacacc

SEQ ID NO: 665 - DNA, 610 bp, Mouse kobuvirus M-5/USA/2010
  misc_feature 1..610: note = complete genome.1
  source 1..610: mol_type = genomic DNA
gtaacttcaagtgtgtgtgctcgtaatcttgactcctgccggaatgccgcccggttcagtgaacaaacagctaggcaagtccctcccttcccctgtggtcggttctcaccggccaccatccctcccccagcctgacgtgttacaggctgtgcaaagcccccgcgaaagctgctcacgtggcaattgtgggtcccccctttgtcaagacaccgagtctttctcccttaaggctagcccggtcccacgaacgtggaactggcaactagtggtgtcactacacgcctccgacctcggacgcggagtgctgttccccaagctgtaaccctgacccaagactgtgctgcctggcaagcaccgtctgggaagatgttccgctgtggctgccaaacctggtaacaggtgccccagtgtgtgtagtcttcctccagtctccggactggcagtcttgtgtaaagatgcagtgtaaggttcaagtgccaaatccctggaaggagtgaccctctactgccctaggaatgctgtgcaggtacccccaacttcggttggggatctgagcacaggctaattgtctacgggtagtttcatttcccatcctctcttttttggcatc

SEQ ID NO: 666 - DNA, 610 bp, Human rhinovirus C
  misc_feature 1..610: note = strain HRV-C02_p1264_s3775_1999 polyprotein1
  source 1..610: mol_type = genomic DNA
ttaaaactgggtacaggttgttcccacctgtatcacccacgtggtgtggtgctcttgtattccggtacacttgcacgccagtttgccacccctcacccgtcgtaacttagaagctaacaactcgaccaacaggcggtggtaaaccataccacttacggtcaagcactcctgtttccccggtatgcgaggaatagactcctacagggttgaagcctcaagtatcgttatccgcattggtactacgcaaagcttagtagtgccttgaaagtcccttggttggtcgctccgctagtttcccctagtagacctggcagatgaggcaggacactccccactggcgacagtggtcctgcctgcgtggctgcctgcgcacccttaggggtgcgaagccaagtgacagacaaggtgtgaagagccccgtgtgctaccaatgagtcctccggcccctgaatgcggctaatccaaccccacagctattgcacacaagccagtgtgtatgtagtcgtaatgagcaattgtgggacggaaccgactactttgggtgtccgtgtttccttttattcttatcattctgcttatggtgacaatactgtgaaatagtgttgttacc

SEQ ID NO: 667 - DNA, 610 bp, Human rhinovirus
  misc_feature 1..610: note = 54, isolate F05, complete genome.1
  source 1..610: mol_type = genomic DNA
ttaaaactggatctaggttgttcccacctagatctcctacatggagttgtactctattattccggtaattttgtacgccagttttatatccctacccccatgtaacttagaagttaagcacaacgaccaataggaggcaattgaccaaattgctaaaggtcaagcacttctgtttccccggtcaagattgatacgctccaccagggcgaaaacaattgagatcgttatccgcaaagtgcctacgcgaagcctagtaacactttgaagagtttatggttggtcgctccgctattccccatagcagacctggcagatgaggctagaagctccccactggtgacagtgttctagcctgcgtggctgcctgcacacccttatgggtgtgaagccatatacttgacagggtgtgaagagcctagtgtgctcactttgagtcctccggcccctgaatgtggctaaccttaaacccgtagctagtgcacacaatccagtgtgtggctagtcgtaatgagcaattacgggatgggaccaactactttgggtgtccgtgtttcactttttccttttgtatttgcttatggtgacaatatatagattatatattgacacc

SEQ ID NO: 668 - DNA, 610 bp, Human rhinovirus
  misc_feature 1..610: note = 98, strain ATCC VR-1298, complete genome.1
  source 1..610: mol_type = genomic DNA
ttaaaactgggtctaggttgttcccacctaggcctcctacatggagttgtactctattattccggtaattttgtacgccagttttatatcccttcccccatgtaacttagaagtttgacacactgaccaataggtggcaattaaccaaattgctaaaggtcaagcacttctgtttccccggtcaagattgatacgctctaccagggcgaaaacaattgagatcgttatccgcaaagtgcctacgcgaagcctagtaatatcttgaagaatttatggttggtcgctccgccattacccatggtagacctggcagatgaggctagaaattccccactggtgacagtgttctagcctgcgtggctgcctgcacaccctcacgggtgtgaagccatacgtttgacaaggtgtgaagagcctagtgtgctcactttgagtcctccggcccctgaatgtggctaaccttaaacccgtagctggtgcacacaaaccagtgtgtagctagtcgtaatgagcaattacgggatgggaccaactactttgggtgtccgtgtttcactttttccttttatatttgcttatggtgacaatatatagattatatattggcacc

SEQ ID NO: 669 - DNA, 610 bp, Human rhinovirus
  misc_feature 1..610: note = 74, complete genome.1
  source 1..610: mol_type = genomic DNA
ttaaaactgggtttgggttgatcccacccaaacctcccaagcggagtggtactctgttatttcggtaactttgtacgccagttttatattccctcccccctttaaactgtaaagctaagcacacagaccaatagctgacaatcatccagattgttaatggtcaagcacttctgtttccccggtcaacgttgatatgctccaacagggcaaaaacaactgcgatcgttatccgcaaagtgcctacgcaaagcctagtagcacctttgaagtcatttggttggtcgctccgctgttccccacagtagacctggcagatgaggctagaaataccccactggtgacagtgttctagcctgcgtggctgcctgcacaccctttgggtgtgaagccaaatcatggacaaggtgtgaagagccccgtgtgctcactttgagtcctccggcccctgaatgtggctaaccttaaccctgcagctagagtgcacaatccagtgcatttctagtcgtaatgagcaattgcgggatgggaccaactactttgggtgtccgtgtttcactttttacctattatttgcttatggtgacaatatatataattatatattggcacc

SEQ ID NO: 670 - DNA, 610 bp, Human rhinovirus
  misc_feature 1..610: note = 50, strain ATCC VR-517, complete genome.1
  source 1..610: mol_type = genomic DNA
ttaaaactgggtccaggttgttcccacctggatctcctaatgggagttgtactctgttattccggtaactttgtatgccagttttatctccctacccccaatgtaacttagaagatgtacacaacgaccaataggtgatgatcaaccagattatcaaaggtcaagcacttctgttttcccggttagagttgatatgctccaacagggcaaaaacaactttaatcgttatccgcaaagcgcctacgcaaagcctagtaacagcttcgaagatttatggttggtcgttccgctgttccccacagtagacctggcagatgaggctagagattccccactggtaacagtgttctagcctgcgtggctgcctgcgcacccttcgggtgcgaagccatatttcggacaaggtgcgaagagccccgtgtgctcgctttgagtcctccggcccctgaatgtggctaaccttaaccctgcagctagtgcatacaaaccagtatgtggctagtcgtaatgagcaattgcgggatgggaccaactactttgggtgtccgtgtttctctttttccttttattattgcttatggtgacaatatatagtttatatattggcacc

SEQ ID NO: 671 - DNA, 610 bp, Human rhinovirus
  misc_feature 1..610: note = C43, strain SC174, complete genome.1
  source 1..610: mol_type = genomic DNA
ttaaaactgaaccatagttgttcccactgtggttgcccaaggggcgtggtggtcttgtattacggtacatttccatgccagttttatcaccccttcccgaaacatagaagaaatgcacacaccgaccaataggaggtggtcaaccagaccactaaaggtcaagcacttctgtttccccggttggcttggatatgcttcacccgaggcaaaaaccgagccaatcgttatccgcaaagtgcctacgagaagcctagtagcacccttgaagccaatggttggtcgctccgttgcaaccccagcagcagacctggcagatgaggctgagcattccccaccagcgatggtggctcagcctgcgtggctgcctgcgcatccttcgggatgcgaagccagaaagtggacaaggtgtgaagagcctattgtgctcactttgagtcctccggcccctgaatgtggctaatcctaaccccgcagctactacacataagccaatgtgcaggtagtcgtaacgggcaactgtgggatggaaccaactactttgggtgtccgtgtttccttgttatctttttgaatgcctatggtgacaattgtacagtatacatttgttacc

SEQ ID NO: 672 - DNA, 611 bp, Human rhinovirus
  misc_feature 1..611: note = 100, strain ATCC VR-1300, complete genome.1
  source 1..611: mol_type = genomic DNA
ttaaaactgaatccagattgttcccatctggatttcctacatggagttgtactctattattccggtaattttgtacgccagttttatcaccccttcccccgtaacttagaagtttgaaacaaaagaccaataggaggtaactatccaagttactataggtcaagcacttctgtttccccggtcaaagttgatatgctccaccagggcaaaaacaattgagatcgttatccgcaaagtgcctacgcaaagcctagtagtatcttgaaaagcatgtggttggttgctccgctgtaccccacagtaaacctggcagatgaggctagaagttccccactggtgacagtgttctagcctgcgtggctgcctgcgcactctttgagtgcgaagccatatgtttgacaaggtgtgaagagccccgtgtgctcactttgagtcctccggcccctgaatgtggctaaccttaaccctgcagctagtgcatgcaatccagcatgtggctagtcgtaatgagcaattgcgggatgggaccaactactttgggtgtccgtgtttcacttttttccttttataattgcttatggtgacaatatatagtgatatatattgacacc

SEQ ID NO: 673 - DNA, 611 bp, Human rhinovirus
  misc_feature 1..611: note = 67, strain ATCC VR-1177, complete genome.1
  source 1..611: mol_type = genomic DNA
ttaaaactggatctaggttgttcccacctagatctcccaagtggagtggtacactattatcacggtaattttgtacgccggttttatctccccttaccccaagtaacttagaagtattacataaagaccaacaggcagtgattatccagatcactaaaggtcaagcacttctgtctccccggtcaaagttgatatgctccaacagggcaaaaacaactgagatcgttatccgcaaagtgcctacgcagagcctagtaactaccttgaaattacttggttggtcgttccaccaaaccccatggtagacctggcagatgaggctagaaattccccactggtaacagtgttctagcctgcgtggctgcctgcacaccctttgggtgtgaagccaagtaatggacagggtgtgaagagccgagtgtgctcactttgagtcctccggcccctgaatgtggctaaccttaaccctgcagctagagcgcgcaaaccagcgtgtatctagtcgtaatgagcaattgcgggacgggaccaactactttgggtgtccgtgtttctttttattcttatatttgcttatggtgacaatatataattatttgtatattggcacc

SEQ ID NO: 674 - DNA, 611 bp, Human rhinovirus
  misc_feature 1..611: note = A22, strain SC1029, complete genome.1
  source 1..611: mol_type = genomic DNA
ataaaactggcgtgcatagttcccatccagatcacccaagtggtgtagtgctctgttattccggtaactttgcacgccagttttattacccctttccccagtaacttagaagctttaatacactgaccaatagggtgcgacaaccagtcgtacaaggtcaagcacttctgtttccccggtcaatgttgatatgctcctccagggcaaaaacaatagcgatcgttatccgcaagatgcctacgcaaagcctagtagcatctttgaaaatacttggttggtcgctcatgtgcaaccccagcattagacctggcagatgaggctagaaattccccactggcgacagtgttctagcctgcgtggctgcctgcacaccctaacgggtgtgaagcctggtattggacaaggtgtgaagagccccgtgtgctcatcttgagtcctccggcccctgaatgcggctaaccttaaacctgcagccattgcttacaatccagtgagtttatggtcgtaatgagcaattgcgggatgggaccgactactttgggtgtccgtgtttctctttttacttaaatttgagcttatggtgacaatatatagcaatatatattggcatc

SEQ ID NO: 675 - DNA, 611 bp, Human rhinovirus C
  misc_feature 1..611: note = isolate LZ651, complete genome.1
  source 1..611: mol_type = genomic DNA
ttaaaactgaatcatggttgttcccaccatgattacccacgcggtgcagtggtcttgtattacggtacatttccataccagttttatacaccccaccccgaaacatatagaagtttgtacacaatgaccaataggtggtggccatccaggttactgacggtcgagcacttctgtttccccggtacccttgtatacgcttcacccgaggcgaaaaacgaggttatcgttatccgcaaagtgcctacgagaagcctagtaacacttttgaaacctatggctggtcgctcagctgctcacccagcagtagacctggcagatgaggctagacattccccaccagcgatggtggtctagcctgcgtggctgcctgcacaccctattgggtgtgaagccagaaagtggacagggtgtgaagagcctattgtgctcactttgagtcctccggcccctgaatgtggctaatcctaaccccgtagctgttgcatgcaacccagcatgtatgcagtcgtaatgggcaactatgggatggaaccaactactttgggtgtccgtgtttctcgtttcacttttcattgcttatggtgacaattgtagttgatacacttgttacc

SEQ ID NO: 676 - DNA, 611 bp, Human rhinovirus
  misc_feature 1..611: note = 31, strain ATCC VR-506, complete genome.1
  source 1..611: mol_type = genomic DNA
ttaaaactgggtgcgagttgttcccactcgcacttcctacgtggagtagtacactattattacggtaattttgtacgccagttttataacccttccccttttgtaacttagaagtttgaacttgagaccaataggtggtgatcaaccagatcgccaaaggtcaagcacttctgtttccccggtcaacattgatatgctccaccagggcaaaaacaattgcgatcgttacccgcaaagtgcctacgcaaagcttagtaatatcttgaacgatatatggttggtcgctccactaatccccatagtagacctggcagatgaggctggaaactccccactggcgacagtgttccagcctgcgtggctgcctgcgcactctcacgagtgcgaagccatatatttgacaaggtgtgaagagccccgtgtgctcactttgagtcctccggcccctgaatgtggctaaccttaaccctgcagctagtgcatacaaaccagtatgtggctagtcgtaatgagcaattgcgggacgggaccaactactttgggtgtccgtgtttcactttttcttttatggtttgcttatggtgacagtatatagtgtatatattgttacc

SEQ ID NO: 677 - DNA, 611 bp, Human rhinovirus
  misc_feature 1..611: note = 34, complete genome.1
  source 1..611: mol_type = genomic DNA
ttaaaactgggtccaggttgttcccacctggacttcccacgtggagttgtgcactgttattccggtaactttacacgccagttttatctcccttcccaaatgtaacttagaagatgtacacagcgaccaataggtggcaactagccaagttgcttaaggtcaagcacttctgtccccccggtcaatgttgatacgctctcccagggcgaaaacaactgagatcgttatccgcaaggcgcctacacaaaacctagtaacatcttgaatggtatgtggctggtcgttccgctaaaccccatagtagacctggcagatgaggctagaaattccccactggcgacagtgttctagcctgcgtggctgcctgcgtgtccttacggacacgaagccatatacttgacaaggtgtgaagagtcccgtgtgctcgtcttgagtcctccggcccctgaatgtggctaaccttaaccctgcagccagtgcgcacaaaccagtgtgtagctggtcgtaatgagtaattgcgggatgggaccaactactttgggtgtccgtgtttcactttttaccttttattatgcttatggtgacaatatatagatgcatatattgacacc

SEQ ID NO: 678 - DNA, 611 bp, Human rhinovirus
  misc_feature 1..611: note = 18, strain ATCC VR-1128, complete genome.1
  source 1..611: mol_type = genomic DNA
ttaaaactgaatccaggttgttcccacctggatttcccatgtggagtagtacactgttattccggtaactttgtacgccagttttataaccccttccccttatgtaacttagaagataagcacaaagaccaataggtggtggctatcccagtcactaaaggtcaagcacttctgtttccccggtcaacgttgatatgctccaccagggcaaaaacaaccgagatcgttatccgcaaagtgcctacgcaaagcctagtagcactttgaatagcatgtggttggtcgctccactattccccatagtagacctggcagatgaggctagaaatcccccactggcgacagtgttctagcctgcgtggctgcctgcgtgtcctaacggacacgaagccatatgtttgacaaggtgtgaagagccccgtgtgctcactttgagtcctccggcccccgaatgtggctaaccttaaccctgcagctggggcatacaatccagtgtgaactcagtcgtaatgagcaattgcgggatgggaccaactactttgggtgtccgtgtttcacttttttttataatgcttatggtgacaatatataataatttgtatattggcacc

SEQ ID NO: 679 - DNA, 611 bp, Echovirus
  misc_feature 1..611: note = E1, strain E1_NR-CPE capsid protein gene, partial cds.1
  source 1..611: mol_type = genomic DNA
attagctggcccggtacaccaatcgggtcttgaccaagcacttctgttaccccggactgagtatcaataggctgctcacgcggctgaaggagaaaacgttcgttatccggccaattacttcgagaaacctagtaacaccgtgaaggttgcgcagcgtttcgttccgcactaccccagtgtagatcaggtcgatgagtcaccgcatcccccacgggtgaccgtggcggtggctgcgttggcggcctgcccatggggaaacccatgggacgcttcaatattgacacggtgcgaagagtctattgagctaattggtagtcctccggcccctgaatgcggctaatcctaactgcggagcagatacccgcacaccagcgggcagtctgtcgtaatgggtaactctgcagcggaaccgactactttgggtgtccgtgtttccttttatttttatattggctgcttatggtgacaattgaaagattgttaccatatagctattggattggccatccagtgagcaacagagcgattgtatttctctttgttggattcataccactaaactacaatagttataacactctattgtatatcattcatctgaacacaaaaag

SEQ ID NO: 680 - DNA, 612 bp, Canine kobuvirus
  misc_feature 1..612: note = strain UK003, complete genome.1
  source 1..612: mol_type = genomic DNA
tttcccctgttcgtaactaagtgtgtgcccaatctcctcactcctgctggcttcaccgaccggcagtgtccaaaatgctaggtgaatcccctccctttcctctgggcttctgcccagcttcctccccccagcctgacgtgacacaggctgtgcaaagaccccgcgaaagctgccaaaagtggcaattgtgggtcccccctttgtaaaggcgtcgagtctttctccctcaaggctagacccgtcagtgaattctgtcgggcaactagtgacgccactgcacgcctctgacctcggccgcggagtgctgccccccaagtcgtgcccctgaccacaagttgtgctgtctggcaaacattgtctgtgagaatgttccgctgtggctgccaagcctggcaacaggctgccccagtgtgcgtagttctcatccagacttcggtctggcaacttgctgttaagacacggcgtaaggggcgtgtgccaacgccctggaacgagtgtccactctaataccccgaggaatgctacgcaggtacccctggttcgccagggatctgagcgtaggctaattgtctaagggtattttcatttcccattctttctttcttgttcata

SEQ ID NO: 681 - DNA, 612 bp, Human rhinovirus
  misc_feature 1..612: note = 46, complete genome.1
  source 1..612: mol_type = genomic DNA
ttaaaactggatctgggttgttcccacccagatttcccatgtggagtagtactctattattccggtaattttgtacgccagttttatattccctaccccgagtaacttagaagataagcacacaaggccaatagtgggtgattagccaaatcatcaaaggtcaagcacttctgtttcccccggtcaaggttgatatgctctaccagggcaaaaacaactgagatcgttatccgcaaaatgcctacacaaagcctagtatcatcttggaaggcacagagttggtcgctccactattccccatagtagacctggcagatgaggctagaaaatccccactggcgacagtgttctagcctgcgtggctgcctgcgtgccttgcgaggcacgaagccctgtgtttgacaaggtgtgaagagccccgtgtgctcattttgattcctccggcccctgaatgtggctaaccttaaccctgcagctagtgcacacaaaccagtgtgtatctagtcgtaatgagtaattgcgggacgggaccaactactttgggtgtccgtgtttcactttttaccttttaattgcttatggtgacaatatatataaatatatattgacacc

SEQ ID NO: 682 - DNA, 612 bp, Human rhinovirus
  misc_feature 1..612: note = 53, complete genome.1
  source 1..612: mol_type = genomic DNA
ttaaaactggatctgggttgctcccacccagattacccaagtggtgtagtactctgttattacggtagctttgtacgccagttttatcacccctccccacaatgtaacttagaagttttacacttacagaccaataggatgtgattatccaaatcactaaaggtcaagcacttctgtttccccggttagatttgatacgctccaacagggcgaaaacagatctgatcgttatccgcaagatgcctacgcaaagcttagtagcgctctgaatgctttttggctggttgttccactacaaacccagtagtaaacctggcagatgaggctagaagttccccactggcgacagtgttctagcctgcgtggctgcctgcacaccctatgggtgtgaagccaatcagttgacagggtgtgaagagccccgtgtgctcatcttgagtcctccggcccctgaatgtggctaaccttaaacccgcagccaaggtgtgcaaaccagcacattcttggtcgtaacgagtaattgtgggatgggaccaactactttgggtgtccgtgtttctttttattcttttacaatgcctatggtgacaatatatagtatatattgtcatt

SEQ ID NO: 683 - DNA, 612 bp, Human rhinovirus
  misc_feature 1..612: note = A40, strain 7D5, complete genome.1
  source 1..612: mol_type = genomic DNA
ttaaaactgggtccaggttgttcccacctggatctcctacatggagttgtactctgttattccggtaaccttgtacgccagttttatatcccctccccaaatgtaacttagaagttatacacacagaccaataggcggtgatcctccagatcactaacggtcaagcacttctgtctccccggtttgaattgatacgctccaacagggcgaaaacaatttgaatcgttacccgcaaagtgcctacgcaaagcctagtagcactttagaaaatttatggttggtcgctcagctataccccctagtagacctggcagatgaggctagaagtaccccactggcgacagtgttctagcctgcgtggctgcctgcacaccctcacgggtgtgaagccatatatttgacaaggtgtgaagagccccgtgtgctcactttgagtcctccggcccctgaatgtggctaaccttaaccctgcagctagtgcatgtaatccaacatgttgctagtcgtaatgagcaattgcgggatgggaccaactactttgggtgtccgtgtttcactttttaccttttatttgcttatggtgacaatatatataatatatatattggcatc

SEQ ID NO: 684 - DNA, 612 bp, Human rhinovirus A
  misc_feature 1..612: note = isolate N13, complete genome.1
  source 1..612: mol_type = genomic DNA
ttgaaactgagtgtgggttgttcccacccacacttcccatgtggagtagtacactgttattacggtaaccttgtacgccagttttatcatccctttccctttgtaacttagaagttttaaacttgagaccaataggtggtgatcagccagatcactaaaggtcaagcacttctgtctccccggtcaacgctgatatgctccgccagggcaaaaacagctgcgatcgttatccgcaaagtgcctacgcaaagcctagtaatatcttgaatgatatatggttggtcgttcagctaaaccccatagtagacctggcagatgaggctggaaataccccactggtgacagtgttccagcctgcgtggctgcctgcgcactcttgcgagtgcgaagccatatatttgacaaggtgtgaagagccccgtgtgctcactttgagtcctccggcccctgaatgtggctaaccttaaccctgcagctagtgcatacaatccagtgtgtggctagtcgtaatgagcaattgcgggatgggaccaactactttgggtgtccgtgtttcactttttcctttataatttgcttatggtgacagtatatagcttatatattgttacc

SEQ ID NO: 685 - DNA, 612 bp, Human rhinovirus
  misc_feature 1..612: note = C3, strain HRV-QPM, complete genome.1
  source 1..612: mol_type = genomic DNA
ttaaagctggatcatggttgttcccaccatgattacccacgcggtgcagtggtcttgtattacggtacatttccataccagttttatacaccccaccccgaaactcatagaagtttgtacacaatgaccaataggtggtggccatccaggtcgctaatggtcaagcacttctgtttccccggcacccttgtatacgcttcacccgaggcgaaaaatgaggttgtcgttatccgcaaagtgcctacgaaaagcctagtaacactttgaaaacccatggttggtcgctcagctgtttacccaacagtagacctggcagatgaggctagacattccccaccagcgatggtggtctagcctgcgtggctgcctgcacaccctgccgggtgtgaagccagaaagtggacaaggtgtgaagagcctattgtgctcactttgagtcctccggcccctgaatgtggctaaccctaaccccgtagctgttgcatgtaacccaacatgtatgcagtcgtaatgggcaactatgggatgggaccaactactttgggtgtccgtgtttcctgttttactttttcattgcttatggtgacaattgtatctgatacacttgttacc

SEQ ID NO: 686 - DNA, 612 bp, Human rhinovirus
  misc_feature 1..612: note = 44, complete genome.1
  source 1..612: mol_type = genomic DNA
ttaaaactgggtccaggttgttcccacctggatctcctacatggagttgtactctattatcccggtaatcttgtacgccagttttatatcccttccctttttgtaacttagaagttaaacacacagaccaataggtggtggctatccaagtcattaatggtcaagcacttctgtttccccggtttagattgatacgctccaccagggcgaaaacaatttaaatcgttatccgcaaaatgactacgcaaagcctagtaatatcttgaaggacttatggttggtcgctccactaaaccccatagtagacctggcagatgaggctagaaataccccactggagacagtgttctagcctgcgtggctgcctgcacaccctatgggtgtgaagccatactttcgacaaggtgtgaagagccccgtgtgctcattttgagtcctccggcccctgaatgtggctaaccttaaccctgcagctagtgcatgcaatccagcatgttgctagtcgtaacgagcaattgcgggatgggaccaactactttgggtgtccgtgtttcactttttccttttatttgcttatggtgacaatatatatagtacatatatattggcatc

SEQ ID NO: 687 - DNA, 613 bp, Human rhinovirus
  misc_feature 1..613: note = 9, isolate F01, complete genome.1
  source 1..613: mol_type = genomic DNA
ttaaaactggatctgggttgttcccactcaggtctcccacgtggagtagtacactgttattacggtaactttgtacgccagttttacatcccctccccccaagtaacttagaagataagcacacaggccaataggagatgatcagccagatcattatgggccaagcacttctgtttccccggtcgaagttgatatgctccaacagggcaaaaacaactgagatcgttatccgcaaagcgcctacgcaaagcctagtaactatctggaaattacttggttggtcgctccgccataccccatggtagacctggcagatgaggctagaaattccccactggcgacagtgttctagcctgcgtggctgcctgcacaccctttttgggtgtgaagccaagtaatggacagggtgtgaagagccccgtgtgctcgctttgagtcctccggcccctgaatgtggctaaccttaaccccgcagctagagcacacaacccagtgtgtatctagtcgtaatgagcaattgcgggatgggaccaactactttgggtgtccgtgtttcttgtttttcttttatatttgcttatggtgacaatatatagtgatatatattggcatc

SEQ ID NO: 688 - DNA, 613 bp, Human rhinovirus
  misc_feature 1..613: note = 12, complete genome.1
  source 1..613: mol_type = genomic DNA
ttcaaactgggttgtggttgatcccaccacaactgctcactgagcgtagtgctctcatattccggtatgcttgcacgccagttttactcccctcccctcattgtaacttagaagcaaagcacacctgatcaataggagataacttgccaggttatctaagatcaagcacttctgtttccccggcaagtgtgaatatgctttacccaaggcaaaagctgatcttgtcgttatccgcaaggtgcctacgagaagcctagtaatgctcaagatgtggtttgactggtcgctccgctgttccccacagtagacctggcagatgaggctggacattccccaccagcgatggtggtccagcctgcgtggctgcctgcacaccctatgggtgtgaagccaaatttactgacagggtgtgaagagcctattgtgctcaccttgattcctccggcccctgaatgtggctaatcctaaccccgctgctattgcacacgaaccagtgtgtagatagtcgtaatgagcaatagtgggatggaaccaactactttgggtgtccgtgtttcttgtttttctttatttgtcttatggtcacaatatatatataacgtatattgtgatc

SEQ ID NO: 689 - DNA, 613 bp, Rhinovirus C
  misc_feature 1..613: note = strain 20692_83a_HRV-C polyprotein gene, complete cds.1
  source 1..613: mol_type = genomic DNA
tgtggttgtacccaccaccgggcatactgtgcgtggtacactgtgattccggtcaccttgtacgcctgtttgctaccctaccccaactttctttcgttctttacttccagtaacttagaagttgacacagagtccaataggatgcagctaatccaagtctgccacggacaagcacttctgtttccccgggtgtgtgaatagactccaacagggttgaagctgtagcactcgttatccgcataactaccacgcgaatgttagtaacaccctctaggtatagtgggatttcgctccgcagaaaccccatctgtagattagggcaatgaggctacacggaccccactggcgacagtggtgtagcctgcgtggtgccctacctggggtttcataccccaggattccactttactgacagggtgtgaaggcgctagtgtgctagttgtgagtcctccggtccctgaatgtggctaatcctaaccccgtggccatttcatgtaaaccaacatgcaggtggtcgtaacgagtaatcacgggatggaaccaactactttgggtaaccgtgtttcctgttttactttaatgtgtgtcttatggttacaactatagagtaacc

SEQ ID NO: 690 - DNA, 614 bp, Human rhinovirus
  misc_feature 1..614: note = 64, complete genome.1
  source 1..614: mol_type = genomic DNA
ttcaaactggatctgggttgttcccacccagatcacccaagtggtgtagtactctgtcattccggtgactttgtacgccagtttttacaccccccccttcttgtaacttagaagaattaagttcagaccaataggaaaacgacaaaccagtcgtttaaggtcaagcacttctgtttccccggtcaatgctgatatgcttcaccaaggcaaaaacagcagcgatcgttacccgcaagacgcctacgcaaagcctagtaatgcctttgaagatatttgtctggtcactcaggtacaatcccagtactagacctggcagatgaggctggaaaatccccactggcgacagtgttccagcctgcgtggctgcctgcacacccatacgggtgtgaagccaaatattggacaaggtgtgaagagccccgtgtgctcgtcttgagtcctccggcccctgaatgcggctaaccttaaccccacagccattgcttgcattccagcaagtctatggtcgtaatgagcaattgtgggatgggaccgactactttgggtgtccgtgtttcactttttaccttttattatgcttatggtgacaatatatagcgttatatattggcatc

SEQ ID NO: 691 - DNA, 614 bp, Human rhinovirus
  misc_feature 1..614: note = A22, strain HRV-A22/Lancaster/2015, complete1
  source 1..614: mol_type = genomic DNA
cacttgggtgatctgggtgggaacaacccagatcccccaagtggtgtagtgctctgttattccggtaaccttgcacgccagttttatcacccctttccccatgtaacttagaagttttaaacacagaccaatagggagcgacaaaccagtcgtgaaaggtcaagcacttctgtttccccggtcaacgttgatatgctctcccagggcaaaaacaacagcgatcgttacccgcaagatgcctacgcaaagcttagtaacgccctcgaagatactcggttggtcgttcatgtgcaaccccagcattagacctggcagatgaggctagaaattccccactggcgacagtgttctagcctgcgtggctgcctgcacaccctgacgggtgtgaagcctagtattggacaaggtgtgaagagccccgtgtgctcatcttgagtcctccggcccctgaatgcggctaaccttaaacctgcagccattgctcacaatccagtgagtttgtggtcgtaatgagcaattgcgggatgggaccgactactttgggtgtccgtgtttctctttttaccttacattttagcttatggtgacaatatatagtgatatatattggcatc

SEQ ID NO: 692 - DNA, 614 bp, Rhinovirus C
  misc_feature 1..614: note = isolate 7383-MY-10, complete genome.1
  source 1..614: mol_type = genomic DNA
ttaaaactgaaccatggttgttcccaccatggttacccacgtggtgcagtggacttgtattacggtacatttccataccagttttataacccctaccctgaaacttttagaagcatgtacacatacagaccaacaggtggcaatcagccagattgctaacggtcaagcacttctgtttccccggtaatcttgcatacgcttcacccgaggcgaaaagtgagattatcgttatccgcaaagtgcctacgagaagcccagtagcacattgaaagcctatggttggtcgctcagctgttcacccaacagtagacctggcagatgaggctagatattccccaccagcgatggtgatctagcctgcgtggctgcctgcacaccctatcgggtgtgaagccagaaagtggacaaggtgtgaagagcctattgtgctcactttgagtcctccggcccctgaatgtggctaatcctaaccccgtagctgttgcatgtaacccaacatgtctgcagtcgtaatgggcaactacgggatggaaccaactactttgggtgtccgtgtttcttgtttttctttatatttgcttatggtgacaattgtagatactacacttgttacc

SEQ ID NO: 693 - DNA, 615 bp, unidentified
  source 1..615: mol_type = unassigned DNA; note = Human coxsackievirus A16, strain shzh99-79 polyprotein gene, partial1 sequence
cgaccaatagtgggcgtgacgcaccagtcacgtcttggtcaagcacttctgtttccccggaccgagtatcaatagactgcttacgcggttgaaggagaaaacgttcgttacccggctaactacttcgagaaacctagtagcaccatgaaagttgcagagtgtttcgctcagcacttcccccgtgtagatcaggtcgatgagccactgtgaaccccacgggcgaccgtgacagtggctgcgttggcggcctgcccatggggcaacccgtgggacgctctaatacagacatggtgtgaagagtctattgagctagttagtaatcctccggcccctgaatgcggctaatcctaactgcggagcacgcaccctcaatccagggggcagtgtgtcgtaacgggtaactctgcagcggaaccgactactttgggtgtccgtgtttccttttattccttactggctgcttatggtgacaatcaaagagttgttaccatatagctattggattggccatccggtgtctaacagagctattgtctacctgttcattggatacgtccctctcaattacaagactctccaaactcttaactacatactgctacttaatcataagaa

SEQ ID NO: 694 - DNA, 615 bp, Human rhinovirus
  misc_feature 1..615: note = 41, complete genome.1
  source 1..615: mol_type = genomic DNA
ttaaaactgggtttgggttgatcccacccaaaccacccacgtggtgtagtacactgttatctcggtaactttgtacgccagttttatctccccctcccccctttgtaacttagaagtcatgcacaatgaccaatagcaggcaatcatccagattgtcatcggtcaagtacttctgtttccccggttcagattgatatgctccaacagggcaaaaacaacctggatcgttatccgcaagatgcctacgcagaacctagtatcacactggaagattctcggttggtcgctcagttacaaccccagtaacagacctggcagatgaggctagaaattccccactggcgacagtgttctagcctgcgtggctgcctgcacacccgtttgggtgtgaagcctagaattggacagggtgcgaagagtcgagtgtgctcatcttgagtcctccggcccctgaatgcggctaaccctaaccctgcagccattgcccacaaaccagtgggtctatggttgtaatgagcaattgcgggatgggaccgactactttgggtgtccgtgtttcactttttacttattatttgcttatggtgacaatatatagatacatatattgacacc

SEQ ID NO: 695 - DNA, 615 bp, Human rhinovirus
  misc_feature 1..615: note = 73, complete genome.1
  source 1..615: mol_type = genomic DNA
ttaaaactgggtttgggttgttcccacccaaaccacccacgcggtgttgtacactgttattccggtaaccttgtacgccagttttatatcccttcccccccttgtaacttagaagacatgcgaatcgaccaatagcaggcaatcaaccagattgtcaccggtcaagcacttctgtttccccggctctcgttgatatgctccaacagggcaaaaacaattggagtcgttacccgcaagatgcctacgcaaaacctagtagcatcttcgaagatttttggttggtcgctcagttgctaccccagcaatagacctggcagatgaggctagaaataccccactggtgacagtgttctagcctgcgtggctgcctgcacacccacacgggtgtgaagccaaagattggacaaggtgtgaagagtcacgtgtgctcatcttgagtcctccggcccctgaatgcggctaaccttaaccccgtagccattgctcgcaatccagcgagtatatggtcgtaatgagtaattacgggatgggaccgactactttgggtgtccgtgtttcactttttacttatcaatttgcttatggtgacaatatatatagatatatattgacacc

SEQ ID NO: 696 - DNA, 615 bp, Human rhinovirus
  misc_feature 1..615: note = 15, complete genome.1
  source 1..615: mol_type = genomic DNA
ttaaaactgggttcaggttgatcccacctgaacctcccaagcggagtagtactctgttatttcggtaactttgtacgccagttttatatccccctccccatgtaacttagaagatgagctcacagaccaatagccggcaatcatccagattgtcaatggtcaagcacttctgtttccccggtcaacgttgatatgctccaacagggcaaaaacaactgagatcgttatccgcaaagtgcctacgcaaagcctagtaatgctttcgaagtcatttggttggtcgctccgctgtaacccacagtagacctggcagatgaggctagaaactccccactggcgacagtgttctagcctgcgtggctgcctgcacaccctttgggtgtgaagccaaattacggacaaggtgtgaagagccccgtgtgctcactttgagtcctccggcccctgaatgtggctaaccttaaccctgcagctagagtgcacaatccagtgtatttctagtcgtaatgagcaattgcgggatgggaccaactactttgggtgtccgtgtttcactttctttttttatcttttatttgcttatggtgacaatatattgaattatatattgacacc

SEQ ID NO: 697 - DNA, 615 bp, Human rhinovirus
  misc_feature 1..615: note = 94, complete genome.1
  source 1..615: mol_type = genomic DNA
ttcaaactggatctgggttgttcccacccagatcacccaagaggtgtagtgctctgtcattccggtgaccttgcacgccagttttatcaccccttccctcttgtaacttagaagaattaaactcagaccaataggaagcgacaagccagtcgtgacaggtcaagcacttctgtttccccggtcaaagttgatatgcttcaccaaggcaaaaacaacagcgatcgttatccgcaagatgcctacgcaaagcctagtagtgcctttgaaaatatttgtctggttgctcaagtacaaccccagtactaaacctggcagatgaggctggagcttccccactggtaacagtgttccagcctgcgtggctgcctgcacacccttacgggtgtgaagccaaatattggacaaggtgtgaagagccccgtgtgctcatcttgagtcctccggcccctgaatgcggctaaccttaaccccacagccattgctcacaatccagtgagtgtatggtcgtaacgagcaattgtgggatgggaccgactactttgggtgtccgtgtttctcttttttcctttttaattctgcttatggtgacaatatatagtgttatatattggcatc

SEQ ID NO: 698 - DNA, 615 bp, Human rhinovirus A
  misc_feature 1..615: note = isolate hrv-A101, complete genome.1
  source 1..615: mol_type = genomic DNA
ttaaaactggatcatggttgttcccaccatgattacctacgggtgtagtatacttgtatcccggtacatttatacgccagttttataacccccaccccaaatgtaacttagaagcatgtacacaatgatcaatagggtggtggctatccaagtcatctaagatcaagcacttctgtctccccggtgagtgtgaatatgctttacccaaggcaaaagctaatctcatcgttatccgcaaggtgcctacgggaagcctagtaacattctgaagatattttggttggtcgatcagttgcactcacccatgcaatagacctggcagatggggctaggcatacctcactggtaacagtggcctagcccgcgtggctgcctgcacaccttcgggtgtgaagccataatattgacagggtgcgaagagcctactgtgctcaccttgagtcctccggcccctgaatgtggctaatcctaaccccgtatccattgcacacaaaccagtgtgtctatggtcgtaatgggtaactacgggatggaaccaactactttgggtgtccgtgtttcttgtttttctttaatactgcttatggtgacattatatattgatatagtgtcatc

SEQ ID NO: 699 - DNA, 615 bp, Rhinovirus C
  misc_feature 1..615: note = isolate 8713-MY-10, complete genome.1
  source 1..615: mol_type = genomic DNA
ttaaaactgggcaggagttgttcccactcttgccacccacagggtgtggtgctcttgtattacggtacacttgcatgccagttttatctcccccctccccacaatgtaatttagaagccaatcacatgaccaataggaagtggtaagccataccacttaaggtcaagcacttctgtttccccggtatgcgtggaataggcctcttaaggggctgaagccacaattatcgttacccgcatgtgaactacgcgaaacctagtactaccttgaaagtacattgtctggtcgctcagccaatccccatggtagacctggcagatgaggcaagaggtaccccactggtaacagtgttcttgcctgcgtggctgcctgcacacccttaccgggtgtgaagccaatgtatagacagggtgagaagagtcgagtgtgcttcacatgagtcctccggcccctgaatgcggctaatccaaccccgcagctgtagtatgcaagccagcatatgtgcagtcgtaatgggtaactgcgggacggaaccgactactttgggtgtccgtgtttcctgtttttcctttattcatgcttatggtgacaatattgagaattaatattgtcact

SEQ ID NO: 700 - DNA, 615 bp, Human rhinovirus
  misc_feature 1..615: note = 49, isolate F04, complete genome.1
  source 1..615: mol_type = genomic DNA
ttaaaactggatctgggttgttcccacttggatctcccaaagggagtggtactctgttattacggtaactttgtacgccagttttatcctccccttaccccatgtaacttagaagtttttcataaagaccaatagttggtaatcatccagattacttaaggtcaagcacttctgtttccccggtcaatgttgatatgctccaacagggcaaaaacaactgcgatcgttatccgcaaagcgcctacgcaaagcttagtagcacctttgagattgtttggttggtcgttccgccatttcccctggtagacctggcagatgaggctagaagtaccccactggcgacagtgttctagcctgcgtggctgcctgcacaccctgtgggtgtgaagccaaataatggacaaggtgtgaagagccccgtgtgctcgctttgagtcctccggcccctgaatgcggctaaccttaaccctgcagctagagcatacaaaccagtgtgtatctagtcgtaatgagcaattgcgggatgggaccgactactttgggtgtccgtgtttcactttttttttacttataattgcttatggtgacaatatatatatagtatatattgacacc

SEQ ID NO: 701 - DNA, 616 bp, Human rhinovirus
  misc_feature 1..616: note = 13, isolate F03, complete genome.1
  source 1..616: mol_type = genomic DNA
ttaaaactgggtctgggttgttcccacccaaaccacccacgcggtgtagtacactgttattccggtaactttgtacgccagttttatatccccaccccccttttgtaacttagaagttatgcacactgaccaatagtgggcaatcatccagattgtcatcggtcgagcacttctgtttccccggtttgagttgatatgctccaccagggcaaaaacaactcagatcgttatccgcaagatgcctacacagaacttagtaccattctggaaaattcttggctggtcgttcaattactaccccagtaatagacctggcagatgaggctagaagttccccactggcgacagtgttctagcctgcgtggctgcctgcacacccttctggggtgtgaagcctagaattggacagggtgtgaagagtcgcgtgtgctcatcttgagtcctccggcccctgaatgcggctaaccctaaccctgcagccattgcccacaatccagtgggtttatggtcgtaatgagcaattgcgggatgggaccgactactttgggtgtccgtgtttcactttttacttattatttgcttatggtgacaatatatagatacatatattgacacc

SEQ ID NO: 702 - DNA, 616 bp, Human rhinovirus
  misc_feature 1..616: note = 36, complete genome.1
  source 1..616: mol_type = genomic DNA
ttaaaactgggagtgggttgttcccactcactccacccatgcggtgttgtacactgttattacggtaaccttgtacgccagttttgccacccttccccattatgtaacttagaagtttgtacaacaagaccaataggtgataattatccagattatcaaaggtcaagcacttctgtttccccggtcgatgaggatatgctttacccaaggcaaaaaccttaaagatcgttatccccacactgcctacacagagcctagtaccacttttgatgtaattaggttggtcgctccctgcaaacccagcagtagacctggcagatgaggctggacactccccactggtgacagtggtccagcctgcgtggctgcctgctcaccctattgggtgagaagcctacttattgacaagatgtgaagagccgcgtgtgctcagtgtgcttcctccggcccctgaatgtggctaaccttaaccctgcagccgctgcccataatccaatgggtttacggtcgcaacgcgcaagtgcgggatgggaccaactactttgggtgtccgtgtttcctatttttcttttatttgcattttatggtgacaatttatagtatatagattgtcgtc

SEQ ID NO: 703 - DNA, 616 bp, Human rhinovirus
  misc_feature 1..616: note = 66, strain ATCC VR-1176, complete genome.1
  source 1..616: mol_type = genomic DNA
ttaaaactggatctaggttgttcccacctagatctcccatgtggagtagtactctattattacggtaattttgtacgccagttttatatccccttccccttttgtaacttagaagtcgtgaacacagaccaataggtggcgatcacccagatcgcttaaggtcaagcacttctgtttccccggtcaacgttgatatgctccaccagggcaaaaacaacggagatcgttatccgcaaggtgcctacgcaaagcctagtaacctcttggaggatatatggttggtcgctcagctataccccatagtagacctggcagatgaggctagaaactccccactggcgacagtgttctagcctgcgtggctgcctgcgcactcttatgagtgcgaagccatatatttgacaaggtgtgaagagccccgtgtgctcaccttgagtcctccggcccctgaatgtggctaaccctaaccctgcagctagtgcatgaaatccatcatgttgctagtcgtaatgagcaattgcgggatgggaccaactactttgggtgtccgtgtttcactttttccttttatatttgcttatggtgacaatatatatataacatatatattggcatc

SEQ ID NO: 704 - DNA, 616 bp, Human rhinovirus
  misc_feature 1..616: note = 90, strain ATCC VR-1291, complete genome.1
  source 1..616: mol_type = genomic DNA
ttaaaactgggttcaggttgttcccacctgaatctcctacatggagttgtactctattatcccggtaattttgtacgccagttttatcctcccctccccatgtaacttagaagctgtacacaacgaccaacaggtaacattcatccagagtgttaaaggtcaagcacttctgtttccccggtcaaagttgatatgctccaacagggcaaaaacaactgcgatcgttatccgcagagcaactacgcaaagcttagtaccactttcaatggtgtatggctggtcgctccactataaacccaatagtagacctggcagatgaggctagaaactccccactggtaacagtgttctagcctgcgtggctgcctgcgtgcccttttgggcacgaagccttacatttgacaaggtgcgaagagccccgtgtgcttgctttgagtcctccggcccctgaatgtggctaaccttaaccctgcagctagtgtgtgcaatccagcacatggctagtcgtaatgagcaattgcgggatgggaccaactactttgggtgtccgtgtttcttgtttttcttttatatttgcttatggtgacaatatatatagaatatatatattggcatc

SEQ ID NO: 705 - DNA, 616 bp, Human rhinovirus C
  misc_feature 1..616: note = strain 025, complete genome.1
  source 1..616: mol_type = genomic DNA
ttaaaactgggtacaggttgttcccacctgtaccacccaagtggtgtagtgctcttgtattccggtacatttgcacgccagtttgccacccctaccctctatgtaacttagaagcttacacaaagaccaataggcggtggtaaacccataccactaacggtcaaacacttctgtttccccggcatatgaggaataggctccaaaagggctgaagccactagtgtcgttatccgcattggtactacgcaaagcctagtatcggcctgaaaatttcttggttggtcgttcggccagttaccccactggtagacctggcagatgaggcaggacttaccccactggcgacagtggtcctgcctgcgtggctgcctgcacacccttatggggtgtgaagcctaggaacggacagggtgtgaagagccccgtgtgctaccaatgagtcctccggcccctgaatgcggctaatcttaccccgcagctgttgcacacaatccagtgtgtatgcagtcgtaatgagcaattgtgggatggaaccgactactttgggtgtccgtgtttccttgttttccttatatttgcttatggtgacaatattgatattatcagtgttgtcatc

SEQ ID NO: 706 - DNA, 617 bp, Theiler's disease-associated virus
  misc_feature 1..617: note = isolate HorseA1_serum, complete1
  source 1..617: mol_type = genomic DNA
tgataccgtgtcccggtacgacctcgcgcgtccccaagctcgccctgaggggggagcgtaagggcgcgtagtggggtagccccccaaaccgagccaccctagtgagtgactttagaatggttagggagactaccgccttcgctgtttggggacctaatgatccgcgtgccagggttcttcgggtaaatcccggcgcggtgttttgggttcagggcagtaggggcagacgggccagcagtcgctggttcctggtaccaccaccctatccggacgacctccctcacgaaaggtcgccacggtctgtggctcgacgacgcctataattcagtccgaggggcgcagccctcgttaaacttaggcaaggttcctcgccattgatttggccaggggtttaagtgaacgccgcccttttaatgtttaatagggttctttcccggcgggttgacaaacacttccctgggctcttcgttggcctcggttccttgatgcttcggcacccatgagcgcacaggggggggaccctgcgacagtccgccaagaggaaaatccttcgggtgacctcgtgcgcaacccaatcccttcttcttccacatggcgtgtctgtggtgcatgctgtg

SEQ ID NO: 707 - DNA, 617 bp, Human rhinovirus
  misc_feature 1..617: note = 96, strain ATCC VR-1296, complete genome.1
  source 1..617: mol_type = genomic DNA
ttaaaactgggtctgggttgtccccacctagatcacccaagtggtgtagtacactgttatttcggtaaccttgtacgccagttttataaccccctccccaaatgtaacttagaagctgtacacaacgaccaatagagggtaatcatccagattacttacggtcaagcacttctgtctccccggtttactttgatatgctccaacagggcaaaaacaaagtgaatcgttacccgcaagatgcctacgcaacgcctagtaacatcctgaattgtttatggttggtcgctcaattacaaccccagtaatagacctggcagatgaggctagatattccccactggcgacagtgatctagcctgcgtggctgcctgcacaccccttgtgggtgtgaagccataatcatgacagggtgcgaagagccacgtgtgctcatcttgagtcctccggcccctgaatgcggctaaccctaaccctgcagccattgcctacaaaccagtgggtatgtggtcgtaacgagaaattgcgggatgggaccgactactttgggtgtccgtgtttcactttttaccttatatttgcttatggtgacaatatatacgagtttatatattgacacc

SEQ ID NO: 708 - DNA, 617 bp, Rhinovirus C
  misc_feature 1..617: note = isolate 3805-MY-10, complete genome.1
  source 1..617: mol_type = genomic DNA
ttaaaactgagtgtgggttgcacccacccacactgtctacggacgttgtacacttgtatcccggtacatttgtacgccagtttgcctccccttccctttatgtaacgtaagaagcctcagcacaatggccaacaggtggtaacaatccatgttacctacggtcaagcacttctgtctccccggtacgaagagtgttaagtcttacccaagaccgaagctttgagtatcgttatccgcataactactggacaaagcccagtaacaccccacgatgtaggatggttggtcgttccaccagtgtaaccccctggtagacctggcagatgaggctagagtttccccactggtgacagtgttctagcctgcgtggctgcctgctcccttatgggagaagccattctattgacaaggtgtgaagagccccgtgcgctagttatgagtcctccggcccctgaatgcggctaatccaaccctgcagccattgcatggaaaccaccatgtagatggtcgtaatgagcaattgcgggacggaaccgactactttgggtgtccgtgtttcttgtttttcttatcaattgcttatggtgacaatatatacagctaatatattgttcacc

SEQ ID NO: 709 - DNA, 617 bp, Human rhinovirus
  misc_feature 1..617: note = 81, isolate F06, complete genome.1
  source 1..617: mol_type = genomic DNA
ttaaaactggatctgggttgttcccacccagatcacctacatggtgttgtacactattattacggtaattttgtacgccagttttatatccccttccccaaatgtaacttagaagcaatgcaaactgatcaatagggggcaatcatccagattgctaatgatcaagcacttctgtttccccggtcaaggttgatatgctccacaagggcaaaaacaaccgagatcgttatccacaagatgcctacgcaaagcctagtaatgcttttgaagatacttggttggtcgctcagctgtgcacccgacagtagacctggcagatgaggctagaagtacccctctggcgacagagttctagcctgcgtggctgcctgcacacccttttgggtgtgaagccaagtattggacaaggtgtgaagagccccgtgtgctcatcttgaatcctccggcccctgaatgtggctaaccttaaacctgcagccagtgcacacaaaccagtgtgtagctggtcgtaatgagcaattgcgggatgggaccaactactttgggtgtccgtgtttcactttttacctttatattgcttatggtgacaatatatatagcacatatatattgttatc

SEQ ID NO: 710 - DNA, 617 bp, Human rhinovirus C
  misc_feature 1..617: note = strain WA823M02, complete genome.1
  source 1..617: mol_type = genomic DNA
ttaaaactgaatcatggttgttcccaccatgattgtctactggacgttgtactcttgtattccggtacacttgtacgccagttttataaccccttcccctttgcaacttagaagaaagtaaacactggccaataggaaatagcaaaccacgctatttacggtcaagcacttctgtttccccggtctgacgggatatgcttcacccgaggcagaaactcagatgatcgttatccgcaaagtgcctacgggaagcctagtagcactttggaagttgttgggctggtcgctcaattgctgaccccgagcaatagacttggcagatgaggctggacgtgccccaccagtgatggtggtccagcctgcgtggctgcctactcaccctaacagggtgagaagcctatcaatagacaaggtgtgaagagcctactgtgctcactttgattcctccggcccctgaatgtggctaatcctaaccccgtatctatcgcatgcacaccagcatgtaggtagtcgtaatgggcaactacgggacggaaccaactactttgggtgtccgtgtttccttgttcttttattacttgcgtatggtgacaattgtatgaaatacgattgacacc

SEQ ID NO: 711 - DNA, 618 bp, unidentified
  source 1..618: mol_type = unassigned DNA; note = Human rhinovirus type 89 (HRV89), complete genome.1 sequence
ttaaaactgggagtgggttgttcccactcactccacccatgcggtgttgtactctgttattacggtaactttgtacgccagtttttcccacccttccccataatgtaacttagaagtttgtacaatatgaccaataggtgacaatcatccagactgtcaaaggtcaagcacttctgtttccccggtcaatgaggatatgctttacccaaggcaaaaaccttagagatcgttatccccacactgcctacacagagcccagtaccatttttgatataattgggttggtcgctccctgcaaacccagcagtagacctggcagatgaggctggacattccccactggcgacagtggtccagcctgcgtggctgcctgctcacccttcttgggtgagaagcctaattattgacaaggtgtgaagagccgcgtgtgctcagtgtgcttcctccggcccctgaatgtggctaaccttaaccctgcagccgttgcccataatccaatgggtttgcggtcgtaatgcgtaagtgcgggatgggaccaactactttgggtgtccgtgtttcctgtttttcttttgattgcattttatggtgacaatttatagtgtatagattgtcatc

SEQ ID NO: 712 - DNA, 618 bp, Human rhinovirus
  misc_feature 1..618: note = 7, complete genome.1
  source 1..618: mol_type = genomic DNA
ttaaaactgggagtgggtgttcccactcactccacccacgtggtgctgtacactgttattccggtaactttgtacgccagtttttccctcccttccctcattatgtaacttagaagcatgaacatatggaccaataggcaataatcatccagattattgaaggtcaagcacttctgtttccccggtcaataaagatatgctttacccaaggcaaaaacttttgagatcgttacccgcacatcaactacgcaaagcctagtatcacctttgatgtactaagactggtcgtttcctgcaaccccagcagtagacctggcagatgaggctggacgtaccccactggcgacagtggtccagcctgcgtggctgcctgctcgcccatatgggcgagaagccttattattgacaaggtgtgaagagccgcgtgtgcttggtgtgagtcctccggcccctgaatgtggctaaccttaaccctgcagccattgctcataatccaatgagttagtggtcgtaatgcgcaagtgcgggatgggaccaactactttgggtgtccgtgtttcttattttttctttcatgtgtgttatatggtgacaatttatagtatataagttgtcatc

SEQ ID NO: 713 - DNA, 618 bp, Human rhinovirus
  misc_feature 1..618: note = 63, strain ATCC VR-1173, complete genome.1
  source 1..618: mol_type = genomic DNA
ttaaaactgggtccaggttgttcccacctggacctcctaagtggagtggtacactattattccggtaattttgtacgccagttttatctccccaccccccttttgtaatttagaagttatgaacacagaccaataggtggcaactagccaagttgttaaaggtcaagcacttctgtctccccggctgacgttgatatgctccaacagggcaaaaacaatgaaagtcgttatccgcaaagtgcctacgcaaagcctagtaacactttgaaatgtctatggttggtcgctcagctattccccatagtagacctggcagatgaggctagaaataccccactggtaacagtgttctagcctgcgtggctgcctgcgcaccctccccgggtgcgaagccatatatatgacaaggtgcgaagagccccgtgtgctcactttgaatcctccggctcctgaatgtggctaaccttaaccccgcagccagtgcacataagccaatgtgtggctggtcgtaatgagcaattgtgggatgggaccaactactttggatgtccgtgtttcctgtttttcttttattcttgcttatggtgacaatatatatagtttatatatattggcatc

SEQ ID NO: 714 - DNA, 618 bp, Human rhinovirus
  misc_feature 1..618: note = C11, strain CL-170085, complete genome.1
  source 1..618: mol_type = genomic DNA
ttaaaactggatacaggttgttcccacctgtatcacccaagtggtgtggtgctcttgtatttcggtacgtttgcacgccagtttgctaccccttcccttttacgtaacttagaagtttacacaaagaccaataggcggtggtaaatccataccactaacggtcaaatacttctgtttccccggcatgcgaggaataggctccaaaagggctgaagccactagtgtcgttatccgcattggtactacgcaaagcctagtattaccttgaaaatttcttggctggtcgctccaccagataccccactggtagacctggcagatgaggcaggacttaccccactggcgacagtggtcctgcctgcgtggctgcctgcacaccccttacggggtgtgaagcccagaaacagacaaggtgtgaagagccccgtgtgctactagtgagtcctccggcccctgaatgcggctaatcttaccccacagctgttgcacgcaaaccagcgtgtatgcagtcgtaatgagcaattgtgggatggaaccgactactttgggtgtccgtgtttctttttattcctattatttgcttatggtgacaatattgatattatcagtgttgtcatc

SEQ ID NO: 715 - DNA, 619 bp, Bat picornavirus
  misc_feature 1..619: note = isolate BtRs-PicoV/YN2010 polyprotein gene,1
  source 1..619: mol_type = genomic DNA
tttcaaaaggccctgggcatacggcgttattcgtaacgtcgtatgtccagggcggtagcatcaggccaaggcctgatgctaccacgtgtggactaaaccacacactcttcttgtgacacgttgtgtcacctatccctttcttggtaacttagaagcttgtacacttacgcacgtaggtgccccacatccagtggggtttgtgcaaagcaatcttgttccccggtaaaccctgataggctgtaaccacggccgaaacaaggtttgtcgttacccgactcactactacacaaagcctagtaaagttcaatgaaagtgcgcagcgtgatccggtcaaaacccccttgaccagaaacacatgatgagggtcaccaacccccactggcgacagtgtggtgtccctgcgttggcatgtggcctcgtagaggcgttgcaatctggatttgctccgaagagccccgtgtgctagtgtttatacctccggccccttgaatgcggctaatcctaacccccgagcatgtacacacaagccagtgtgtagcatgtcgtaatgagcaatttggggatggaaccgactactttagggtgtccgtgtttctcattattctttgtttgatgtttt

SEQ ID NO: 716 - DNA, 619 bp, Echovirus
  misc_feature 1..619: note = E9, strain USA/CA/RGDS-2017-1011, complete genome.1
  source 1..619: mol_type = genomic DNA
cacacggtcaatagataactcagcaaaccagctgggtcttgaccaagcacttctgttaccccggactgagtatcaataagctgctcgcgcggctgagggagaaaacgtccgttacccggccaattacttcgagaaacccagtatcaccatgaaggttgcgcagcgtttcgttccgcacaaccctagtgtagatcaggtcgatgagccaccgcgttccccacgggcgaccgtggcggtggctgcgctggcggcctgcccatggggtgacccatgggacgcttcaacactgacatggtgcgaagagtctattgagctaattggtaatcctccggcccctgaatgcggctaatcctaactgcggagcagatacccacacaccagtgggcagtctgtcgtaatgggcaactctgcagcggaaccgactactttgggtgtccgtgtttcctcttattcttgattggctgcttatggtgacaattgggagattgttaccatatagctattggattggccatccagtgacaaacagagcaattatctactcgttcattggttttgtgccactgaattataaggttttaatcaccctcaaattcatattagcactcaacacatcaaa

SEQ ID NO: 717 - DNA, 619 bp, Human rhinovirus
  misc_feature 1..619: note = 33, strain ATCC VR-330, complete genome.1
  source 1..619: mol_type = genomic DNA
ttaaaactggatctaggttgttcccacctagatctcctacacggagttgtactctgttattccggtaactttgtacgccagttttatacccccttccccctttgtaacttagaagctgaacatactgaccaataggcggcattcaaccagaatgtcaaaggtcaagcacttctgtttccccggttaaagctgatatgctccaacagggcaaaaacagccttaatcgttatccgcaagacaactacgcaaagcctagtatcatctttgaaagtatgtggttggtcgctccgctataaactcaatagcagacctggcagatgaggctagaaactccccactggcgacagtgttctagcctgcgcggctgcctgcgtgccctatacgggtacgaagccatatatttgacaaggtgtgaagagccccgtgtgcttgtcttgagtcctccggcccctgaatgtggctaaccttaaccctgcagctggtatgcacaatccagtacatggccagtcgtaatgagcaattgcgggatgggaccaactactttgggtgtccgtgtttcctattttacctttatatttgcttatggtgacaatatatatataacatatatattggcatc

SEQ ID NO: 718 - DNA, 619 bp, Human rhinovirus
  misc_feature 1..619: note = A61, strain SC628, complete genome.1
  source 1..619: mol_type = genomic DNA
ttaaaactgggtctgggttgtccccacccagaccacccacgtggtgttgtacactgttattccggtaactttgtacgccagttttgaactccccttaccccttttgtaacttagaagttaaacaaaccgaccgatagcaggcaatcacccagattgcttatggtcaagcacttctgtctccccggtctcctttgatatgctccaccagggcaaaaacagagtagatcgttatccgcaagatgcctacgcaacgcctagtagcattttgaagtaattttggctggtcgctcatttacaaccccagtaatagacctggcagatgaggctagatactccccactggtgacagtgatctagcctgcgtggctgcctgcacaccctttccgggtgtgaagccaaacttatgacaaggtgtgaagagccacgtgtgctcatcttgagtcctccggcccctgaatgcggctaaccttaaccctgcagccattgcctacaagccagtgggtatgtggtcgtaatgagaaattgcgggatgggaccgactactttgggtgtccgtgtttcactttttaccttatatttgcttatggtgacaatatatatatagatatatattgacacc

SEQ ID NO: 719 - DNA, 619 bp, Human rhinovirus C
  misc_feature 1..619: note = isolate N4, complete genome.1
  source 1..619: mol_type = genomic DNA
ttaaaactgagtatgggttgttcccacccatactgcctacgggcgtagtactcttgtgctccggtacatttgtacgccagtttttcacccccaccccctaggtaactcttagaagcacttgcacacagacgaataggcagccaacactccacgttggtcaacgtcaagcacttctgtttccccggtattaggggttaggcttttcaagaggctgaagcctgaagtatcgttacccgcgcaattactaagcagagcctagtatcacttcgacccttccactggctggtcgttcaatgagaaaacccactcatagacctggcagatggggctggaaataccccactggcgacagtgttccagcccgcgtggctgcctgtcccccattttgggggaaagccaatgtaaggacaaggtgtgaagagccgcgtttgctaattgtgagtcctccggcccctgaatgcggctaatcttaccccacagctattgcatggaagccaccatgtggatagtcgtaacgggcaactgtgggacggaaccgactactttgggtgtccgtgtttccttttattccatttattatctcatggtgacaacgtatacagattatatgttgtttacc

SEQ ID NO: 720 - DNA, 620 bp, Human rhinovirus
  misc_feature 1..620: note = 69, strain ATCC VR-1179, complete genome.1
  source 1..620: mol_type = genomic DNA
ttaaaacagcggatgggtatcccaccatccgacccactgggtgtagtactctggtactttgtacctttgtacgcctgtttctccctcccttcccaacctaaacaatccttgtaacttagaaggtttcgattatcgcacaatagggactattgcaaccagcaatagtcagtgcaagcacttctgtttccccggagcggagtgtagatggccaccgctgtcaaaagctcttaaccgttatccgccagttaactacgcaacggctagtagtgccttgttgcttttatggcgttcgatcaggcgagatttaccccctcgctagtctggtcgatgaggctgagaattccccacgggcgaccgtgtctcagcctgcgtggcggccagcccagcctttgctgggacgccttgattgcgacatggtgtgaagacccgcgtgtgcttaactgtgagtcctccggcccctgaatgcggctaacctaaaccctggagccttgaaacacaacccagtgttcgcaaggtcgtaacgagcaattccgggacgggaccgactactttgggtgtccgtgtttcctttattctttcaattgttcttatggtcacaatataagtgttatattgtgatc

SEQ ID NO: 721 - DNA, 620 bp, Human rhinovirus A
  misc_feature 1..620: note = complete genome.1
  source 1..620: mol_type = genomic DNA
ttaaaactgggagtgagttgtccccactcactctacccacgcggtgttgtacactgttattacggtaactttgtatgccagtttttgttcccctatccccctttaaagtaacttagaagcatgaacttacagaccaaaaggtgatgatcacccagatcattaaaggtcaagcacttctgtttccccggtcaatgttgatatgcttcaacaaggcaaaaacaacagcgatcgttatccgcaagatgcctacacaaagcttagtacctcctttgatggtatttgtctggtcgctcaggtgtttccccaacactagacctggcagatgaggctagaaactccccactggcgacagtgttctagcctgcgtggctgcctgcacaccctttcgggtgtgaagccaaatactggacaaggtgcgaagagccccgtgtgctcatcttgagtcctccggcccctgaatgcggctaaccttaaacccgcagccattactcacaatccagtgagcagatggtcgtaatgagcaattgtgggatgggaccgactactttgggtgtccgtgtttcatgttttactttatgacttgcttatggtgacaatatatagagatatatattggcatc

SEQ ID NO: 722 - DNA, 620 bp, Rhinovirus C
  misc_feature 1..620: note = isolate 1570-MY-10, complete genome.1
  source 1..620: mol_type = genomic DNA
ttaaaactgagtgtgggttgttccccacccacactgtctacgggacgttgtactcttgtattccggtacacttgtacgcccagtttgccaccctaaacaccccgtaacaatagaagtctacgcacacttagaccaatagggggtgttcatccagttcacccaaggtcaagcacttctgtttccccggcataggggtgttaggcttcgcccgaggccaaagctctgattgtcgttatccgcacaactactggacaaagcctagtagcaccctacgatgtagcatggttggttgttccgccagtatcccctggtaaacctggcagatggggctagaagttcctcactggcgacagtgttctagcccgcgtggctgcctgctcccttatgggagaagccattctactgacaaggtgtgaagagccccgtacgctagttgtgattcctccggcccctgaatgcggctaatccaaccctgcagccattacatggaagccaccatgtggatggtcgtaatgagtaattgcgggacggaaccgactactttgggtgtccgtgtttcttgtttttcttttactgacgtttatggtgacaatatatatataacgtatatattgttcatc

SEQ ID NO: 723 - DNA, 621 bp, Moran virus
  misc_feature 1..621: note = polyprotein gene, complete cds.1
  source 1..621: mol_type = genomic DNA
gggggctcttcaagcccccccaaccgaattttcttcaacaactactatgtaagttgcattatactctccagatcaattcgaatttgtataatgtactttagtttttgttgtcgactacagtgattataagtaagtagcaatatgtgtccagatcaattcgaatcacaatattgttcattataattgtatgtaggtctcagttgagagaaaaattttgttttgaaaacccagttttttcacaccggaggaatgaatctcaaatcttgggttttcgaggttgtcgtgcggacacttctcgagtagttgaatgatgctgatttgactgctttggaatgttgtcttttgcgatgatgtcggattcacacgggcttcacatgccgagagatggcttcgaacacgctcgtgataatgtcagtggttgcttcgagatttacaaatgtatgcgtacccggaaacagaacttggaaattgatgtcacggtgattgagttctgcacgatggcgatagtacctctttgtactgatcgttgaactggtcaaggcccctgcaggaagtacctgtttcgggctagttgactggcattgagcaccagagtcgaagtttgcccttcaaattgcaaca

SEQ ID NO: 724 - DNA, 621 bp, Human rhinovirus
  misc_feature 1..621: note = 103, strain WA327E/09 polyprotein gene, complete1
  source 1..621: mol_type = genomic DNA
ttaaaactgagtgtgggttgtccccacccacactgtctacggacgtagtactctcatatcacggtatgtttgtacgccagtttgcctcccctcccaagtgtaacttagaagtttgtactttataaaggccaataggcgggtagtcaaccacactactcatggtcaagcacttctgtttccccggtatgcgaagaataagctttaacaaaggctgaagcttcaattatcgttatccgcatgataactacgcaaagcttagtagcattttgaaagtttattggttggtcgctccactggaaaacccccccagtagacctggcagatgaggctaagtaatccccactggcgacagtgacttagcctgcgtggctgcctgcacacctggagacaggtgtgaagccaagtaatggacaaggtgtgaagagccccgtgtgcttatcatgagtcctccggcccctgaatgcggctaatccaaccccacagctattgcacataatccaatgtgtatttagtcgtaacgggcaactgtgggacggaaccgactactttgggtgtccgtgtttcctttattctcatttaagtttcctatggtgacaaatataagtgattatatctgtcatc

SEQ ID NO: 725 - DNA, 621 bp, Human rhinovirus sp.
  misc_feature 1..621: note = isolate 12MYKLU0081 from Malaysia polyprotein1
  source 1..621: mol_type = genomic DNA
tctgcagatatcttaaaactgggttcaggttgttcccacctgaacttcccacgtggagtagtacactattattacggtaattttgtacgccagttttgcttccctccccaatggtaacttagaagatgtacacaacgaccaacaggcggtggttacccaaaccatcaaaggtcaagcacttctgtttccccggtcaacgttgatatgctccaacagggcaaaaacaaccacgatcgttacccgcaagatgcctacgcaaagcctagtaatacactggaagatttatggctggtcgctccactataccccatagtagacctggcagatgaggctagaagtaccccactggcgacagtgttctagcctgcgtggctgcctgcgcaccctatgggtgcgaagccatatattggacagggtgtgaagagccccgtgtgctcatcttgagtcctccggcccctgaatgtggctaaccttaaccccgcagccagagcacgcaatccagtgtgtttctggtcgtaatgagtaattgtgggatgggaccaactactttgggtgtccgtgtttcacttttttcctttattatgcttatggtgacaatatatacacatatatattgacacc

SEQ ID NO: 726 - DNA, 621 bp, Human rhinovirus
  misc_feature 1..621: note = 88, complete genome.1
  source 1..621: mol_type = genomic DNA
ttaaaactgggagtgagttgtccccactcactctacccacgcggtgttgtacactgttattacggtaactttgtatgccagtttttgttcccctatccccctttaaagtaacttagaagcatgaacttacagaccaaaaggtgatgatcacccagatcattaaaggtcaagcacttctgtttccccggtcaatgaggatatgctttacccaaggcaaaaaccttaaagatcgttatccgcacattaactacgcaaagcctagtatcgcctttgatgtattaagactggtcgttccctgcatacccagcagtagacctggcagatgaagctggacgttccccactggcgacagtggtccagcctgcgtggctgcctgctcacccatttgggtgagaagccttattattgacaaggtgtgaagagccccgtgtgcttaatgtgaatcctccggcccctgaatgtggctaaccttaaccccgcagccgttactcacaatccagtgaaatgacggtcgtaacgcgaaagtgtgggatgggaccaactactttgggtgtccgtgtttcctattttttccttaatgtgtgttatatggtgacaatttatagcgtataagttgtcatc

SEQ ID NO: 727 - DNA, 621 bp, Human rhinovirus
  misc_feature 1..621: note = 24, complete genome.1
  source 1..621: mol_type = genomic DNA
ttaaaactggatctaggttgttcccacctaaatctcctacatggagttgtactctattattccggtaattttgtacgccagttttatcctcccctccccttaaagtaacttagaagttggacatatcgaccaataggtaacatttatccaaaatgttaaaggtcaagcacttctgtttccccggtcaaggttgatgtgctctaacagggcaaaaacagctgcgatcgttatccgcaaagcaactacgcaaagcctagtagcattttttgagagtatgtggttggtcgctccactataaacccaatagtagacctggcagatgaggctagaaattccccactggtaacagtgttctagcctgcgtggctgcctgcgtgctccttgtgagcacgaagccatatatttgacaaggtgtgaagagccccgtgtgcttgctttgagtcctccggcccctgaatgtggctaaccttaaccctgcagctagcgtgtacaatccagtacaaagctagtcgtaatgagcaattgcgggatgggaccaactactttgggtgtccgtgtttcctgtttttcttttatatttgcttatggtgacaatatatatataacatatatattggcatc

SEQ ID NO: 728 - DNA, 622 bp, Human rhinovirus
  misc_feature 1..622: note = 35, complete genome.1
  source 1..622: mol_type = genomic DNA
ttaaaacagcggatgggttccctaccatccgacccactgggtgtagtactctggtactctgtacctttgtacgcctgtttatccactacccttttcctaaattttccacccgtgtaaccttagaagcaaacaaattgtacaatagggtgcatcacaaccagtgatgtacagtacaagcacttctgtttccccggagcggggtatagacggtcaccactgtcaaaagcccttaaccgttacccgccaaccaactacgtaacggctagtaacaccatgaatttgtcttgacgttcgatcaggtggtaaccccccactagtttggtcgatgaggctgagaactccccacgggtaaccgtgtctcagcctgcgtggcggccaacccagcttctgctgggacgccaattcattgacatggtgtgaagacctgcatgtgcttggttgtgattcctccggcccctgaatgcggctaaccctaaccccggagccacgcggcataatccaatgtcgtatgggtcgtaatgagtaattctgggatgggaccgactactttgggtgtccgtgtttcctgtttttccaaattattcttatggtcacagcatataaatagatatatactgtgatc

SEQ ID NO: 729 - DNA, 622 bp, Human rhinovirus
  misc_feature 1..622: note = 48, complete genome.1
  source 1..622: mol_type = genomic DNA
ttaaaacagcggatgggtatcccaccatccgacccactgggtgtagtactctggtactctgtacctttgtacgcctgtttctcctcaaccctcccctacccgttatatatctcagtaacttagaagatatcattaccgcacaatagggaccgttgtaaccagcaacggtcagtgcaagcacttctgtttccccggagcggagtatagacggccactgctgtcaaaagctcttaaccgttacccgccagttaactacacaacagctagtaacatcttgttgttcttagggcgttcgatcaggtgagtttaccccctcactagtctggtcgatgaggctgagaaatccccacgggtgaccgtgtctcagcctgcgtggcggccagcccagcttatgctgggacgccttaagtatgacatggtgtgaagactcgcgtgtgcttagctgtgagtcctccggcccctgaatgcggctaacctaaaccccggagccttgaggcacaatccagtgcccgcgaggtcgtaacgagaaattctgggacgggaccgactactttgggtgtccgtgtttccttttatctttttgatgttcttatggttacaatatataaagtatattgtaatc

SEQ ID NO: 730 - DNA, 622 bp, Human rhinovirus
  misc_feature 1..622: note = 68, strain ATCC VR-1178, complete genome.1
  source 1..622: mol_type = genomic DNA
ttaaaactgggtccaggttgttcccacctggatctcctacgtggagttgtactctattattccggtaattttgtacgccagttttatctcccctacccctctatgtaacttagaagtttatgcacagcggccaataggtgacatttatccaaaatgtcaaaggtcaagcacttctgttaccccggttagaattgatatgctccaacagggcaaaaacaattttgatcgttatccgcaaggcaactacgcaaagcctagtaccatttttgatgatgtgtggttggtcgctccactgtgaacccgacagtagacctggcagatgaggctagaaattccccactggtaacagtgttctagcctgcgtggctgcctgcgtacccttttgcgggtacgaagccatacatttgacaaggtgtgaagagccccgtgtgcttgccttgagtcctccggcccctgaatgtggctaaccttaaccctgcagctagtgtgcacaatccagtgcatggctagtcgtaacgagcaattgcgggatgggaccaactactttgggtgtccgtgtttcttgtttttcttttatatttgcttatggtgacaatatatacataatatatatattggcacc

SEQ ID NO: 731 - DNA, 622 bp, Human rhinovirus
  misc_feature 1..622: note = 78, complete genome.1
  source 1..622: mol_type = genomic DNA
ttcaaactgaatcatggttgttcccaccatgattacctacgggtgtagtacacttgtatcccggtacatttgtgcgccagttttatatcccctaccccaattgtaacttagaagttaagcaacacaagatcaataggcggtggttatccaaaccatcaatgatcaagtacttctgtctccccggtaggtgtgaatatgctttaaccaaggcagaagctaatcctatcgttatccgcaaggtgcctacgggaagcctattaacactttgaaagaaatttggctggtcgctcagttgcgcaatcccacgcaatagacctggcagatggggctagacaaaccccaccagcgatggtggtctagcccgcgtggctgcctgcacacccttttttgggtgtgaagccagaaattggacagggtgcgaagagcctactgtgctcaccttgagtcctccggcccctgaatgtggctaatcctaaccctgcagctgttgcacaagatccattgtgtatacagtcgtaatgagcaattgcgggatggaaccaactactttgggtgtccgtgtttccttgttttcttttatcattgcttatggtgacaagtatatatagatatatttgtcatc

SEQ ID NO: 732 - DNA, 623 bp, Duck hepatitis A virus 1
  misc_feature 1..623: note = isolate HB02, complete genome.1
  source 1..623: mol_type = genomic DNA
tttgaaagcgggtgcatgcatggccattttccagcacaggttcagctggtatggcatgcatgcatcgactgcttgggggtgtccctgacccccttaattcaacgtctagcccacgatacgggcaccctatccaatttgtatccctttacctcccatggactgacttgtatggacttggatctaaattggattatcctttacttgtggtggttagccaaccatgctctggtgtaatgattccatgtgttcatttggctaagtgccgaccttggaggtgggggtgaaattttgcaagccactagcgtcgtcaactttagcctctggagatgttggattagttgcattctggacagaccaagcctcgtctataccgtgggctaatggtcttcgttgtgaagcggattaccggtagtagcatcttagacttccaaggttgtcatgagtgtgtctgtagagtaggcacacatctgtccaggcacaagcacatctctcgatcgctccagactagttcctgagggacagatgttgtggggggcttgggaaaacccccttaacctacactaccggatagggtcgcggctggtcgagtcccacacactataatatcactagactttcatgca

SEQ ID NO: 733 - DNA, 623 bp, Human rhinovirus B102
  misc_feature 1..623: note = strain HRV-B92_p1044_sR122_2007 polyprotein1
  source 1..623: mol_type = genomic DNA
aaaacagcggatgggtatcccaccatccgacccactgggtgtagtactctggtactttgtacctttgtacgcctgttcttcccattgtaccctcccttaacttccaacccaagcaacattagaagttatcaattttcagtacaataggaagcatcacatccagtgatgttgtgtacaagcacttctgtctccccggagcgaggtataagcagtacccactgctaaaagcctttaaccgttacccgccaatcaactacgtaacagctagtatcatcatgtttttgactggacgttcgatcaggtggttcccccccactagtttggtcgatgaggctaggaataccccacgggtaaccgtgtcctagcctgcgtggcggccaacccagcatttgctgggacgcccttttaaagacatggtgtgaagactcgcatgtgcttgattgtgattcctccggcccctgaatgcggctaaccttaaccccggagccttgtgttgcaatccagcaaaagcaaggtcgtaatgagcaattctgggacgggaccgactactttgggtgtccgtgtttctcattttacattacttttcttatggtcacagcatatataataaatatactgtgatc

SEQ ID NO: 734 - DNA, 623 bp, Human rhinovirus
  misc_feature 1..623: note = 65, strain ATCC VR-1175, complete genome.1
  source 1..623: mol_type = genomic DNA
ttaaaactgggtgtgggttgcacccacccacactgtctacggacgtagtgctctcatattacggtatgcttgcacgccagtttgtttcccctttccccttttgtaactatagaagattgcacttaatctcgaccaataggcagtagtgatccacactacttacggtcaagcacttctgttaccccggtatgcggagaataggctctgaaaagggctgaagcttcaattatcgtcatccgcgcaattactacgcaaagcttagtaacttcccaagaaattctttggttggccgttccgctggtaccccaccagtaggcttggcagatgaggctgagtaatccccactggcgacagtgactcagcctgcgtggctgcctacacacctggtaacaggtgtgaagccatagaaaggacagggtgtgaagagccccgtgtgctaattgtgattcctccggcccctgaatgcggctaatctaaccccacatccaatgcgcataagccaatgcgtatttggtcgtaatgggcaactgtgggacggaaccgactactttgggtgtccgtgtttctttttattccttataattagttcatggtgacaagtataagtgtttatatttgtcatc

SEQ ID NO: 735 - DNA, 624 bp, Picornaviridae sp.
  misc_feature 1..624: note = isolate wftcra73pic2 genomic sequence.1
  source 1..624: mol_type = genomic DNA
ttttcatgttgtataattcgagttctccaattatatttaatagaagattttcatttatgatcatgcaataatataatgaattcatgtagaaaatgttatattattccttcgtcctttgtgaaccggagagttagtattggaaatgagggatttattttaaaacaaatgtcttatttcctctctttaacgttatatttattgacagtttgtgatttatatatcatggttattgagagaaaattagcttttatataaattagtgtttttatttaaaagttttaattcttggcagtgtattaatgaatttaatttggcagtataagtttattcaaaacataccttccatatgtagtagggaacttgctgtatttaatacaatactgattattaagtgtttttcttgtcgtataataattgaagtagaatcttttgttattccgactatagacttgattaataactgataatctttattttattttgtatagtattattaggttctagggaagtttccccctatgagaacctcctaaccttttggcaattaggcgaactaagaaaattgcctggacaatgggaagacccatataatattcccttttcctttataaatttaaatcaagt

SEQ ID NO: 736 - DNA, 624 bp, Salivirus A
  misc_feature 1..624: note = strain SH1 polyprotein gene, complete cds.1
  source 1..624: mol_type = genomic DNA
ttcccctgcaaccattacgcttactcgcatgtgcattgagtggtgcatgtgttgaacaaacagctacactcacatgggggcgggttttcccgccctacggcttctcgcgaggcccacccctcccctttctcccataactacagtgctttggtaggtaagcatcctgatcccccgcggaagctgctcacgtggcaactgtggggacccagacaggttatcaaaggcacccggtctttccgccttcaggagtatccctgctagcgaattctagtagggctctgcttggtgccaacctcccccaaatgcgcgctgcgggagtgctcttccccaactcaccctagtatcctctcatgtgtgtgcttggtcagcatatctgagacgatgttccgctgtcccagaccagtccagtaatggacgggccagtgtgcgtagtcgtcttccggcttgtccggcgcatgtttggtgaaccggtggggtaaggttggtgtgcccaacgcccgtactcaggggatacctcaaggcacccaggaatgccagggaggtaccccgcttcacagcgggatctgaccctggggtaaatgtctgcggggggtcttcttggcccacttctcagtacttttcagg

SEQ ID NO: 737 - DNA, 624 bp, Human parechovirus 1
  misc_feature 1..624: note = isolate 146Chzj02, complete genome.1
  source 1..624: mol_type = genomic DNA
tattagagttatggcacgccatctgccaccccacacaaatgtgggttagaaaagaaaactgtccctatgcctggtctccactattcgaaggcaacttgcaattagaagagtggaattaagacgcttaaagcatagagacagttttcttttctaacccacatttgtgtggggtggcagatggcgtgccataactctaatagtgagataccatgcttgtggaccttatgctcacacagccatcctctagtaagtttgtgagacgtctggtgacgtgtgggaacttattggaaacaacgttttgctgcaaagcatcctactgccagcggaaaaacacctggtaacaggtgcctctggggccaaaagccaaggtttaacagaccctttaggattggttctaaacctgagatgttgtggaagatatttagtacctgctgatctggtagttatgcaaacactagttgtaaggcccacgaaggatgcccagaaggtacctgtaggtaacaagtgacactatggatctgatttggggccagatacctctatcttggtgatctggttaaaaaacgtctagtgggccaaacccgggggggacccccggtttcctcttatcctattaatgccact

SEQ ID NO: 738 - DNA, 624 bp, Human rhinovirus
  misc_feature 1..624: note = 79, strain ATCC VR-1189, complete genome.1
  source 1..624: mol_type = genomic DNA
ttaaaacagcggacgggtatcccaccatccggctcactgagcgtagtactctggtattgtgtacctttgtacgcctgttttccccaaatcccctaccctttatatctcctaccccgtaacgtaagaagttttcaaacagtacaataggaagcaccacatccagtggtgttatgtacaagcacttctgtttccccggagcgaggtataggtggtcaccaccgccaaaagcctttaaccgttacccgccaaccaactacgtaatggctagtaacatcattgatttagattggcgttcgatcaggtggtatccccccactagtttggtcgatgaggctaggaataccccacgggtgaccgtgtcctagcctgcgtggcggccaacccagcatacgctgggacgccagtttactgacatggtgcgaagacttgcatgtgcttggttgagagtcctccggcccctgaatgcggctaaccttaaccccggagcctcgcagcataatccaatgttgtagaggtcgtaacgagtaattctgggatgggaccgactactttgggtgtccgtgtttcctgtttttctttaaaatgtcttatggtcacagcatatatactgtatatactgtgatc

SEQ ID NO: 739 - DNA, 624 bp, Human rhinovirus
  misc_feature 1..624: note = B86, strain SC9826, complete genome.1
  source 1..624: mol_type = genomic DNA
acagcggatggataccccaccatccgacccactgggtgtagtacactggtactctgtacctttgtacgcctgtttctccccttgcaccctccctcattatcctaacccttgtaacattagaagatgagcaacccgtgcaataggagataccacaaccagtggtgttaagcacaagtacttctgtttccccggagcggagtatagacggtccccactgtcaaaagctcttaaccgttatccgccaaccaactacgtgacgactagtagcatcattttgacactttgacgttcgatcaggtaggttcaccccacctactagtttggtcgatgaggctgggagtccctcacaggtaactgtgtcccagcctgcgtggcggccaacccagcaattgctgggacgccaatttgttgacatggtgtgaagatcctaatgtgcttggttgtgagtcctccggcccctgaatgcggctaaccttaaccccggagccttgtggcacaagccagtgacattaaggtcgtaaggagcaattctgggatgggaccgactactttgggtgtccgtgtttcctatttttctttaaattgtcttatggtcacagcatatattaattatatactgtgatc

SEQ ID NO: 740 - DNA, 625 bp, Sapelovirus A
  misc_feature 1..625: note = strain NGR_2017_NHP_SV, complete genome.1
  source 1..625: mol_type = genomic DNA
ccccatttctccccttcggcttcgtgccgtcgcacccctttacccttttccttaccctcttaagaatgattgtagattgttttagaaaggaaggttagtacacctgaaagtacaacaatttgcttctctggtttggataaaaggttaaagacattagaaggttaacacaggtccttgcaaaacctgagtacaattttgttttgacgacgagactggattatgatttcacggttggtcgccgaggttaaaagactattgtgctagctagagtaagtggttggcaattgaaagctaccaaaggggtgtaggtctacgctttgcgggctgaagctaccaatggattaatagtgagtatgttgtttttcccttctagtgatgcgcgaccgcacacaaaagagctaggggcacataggggcaaaaggaaaagtattacttatcctgaatgtgcaattgagtcggtgacgagtgcgtcagatgtgaatccagcatactggcgtatggcgcatcctcttggcattaccctaatgtgtatcttggtagggggggccctatcaacttagcctagtgctgcctgacagggttgcggctggtcatttgtgtgtggtataaccagtagtaatccctc

SEQ ID NO: 741 - DNA, 625 bp, Human rhinovirus 4
  misc_feature 1..625: note = complete genome.1
  source 1..625: mol_type = genomic DNA
ttaaaacagcggatgggtttcccaccatccgacccactgggtgtagtgctctggtattttgtacctttgcacgcctgtttcccatttgtacccttccttaatctccttcccccgtaacgttagaagttttggaattttaaagtacaataggaagcgccacatccagtggtgttgcgtacaaatacttctgtttacccggagcgaggtataggttgtacccacggccaaaagcctttaaccgttatccgccaatcaactacgtaacggctagtatcatcttgcttttgatttggtgttcgatcaggtggtatcccccactagtctggtcgatgaggctaggaattccccacgggcgaccgtgtcctagcctgcgtggcggccagcccagcttttgctgggacgccttttcaaagacatggtgtgaagacctgcatgtgcttggttgtgagtcctccggcccctgaatgcggctaaccttaaccctggagcccagcagcataatccaatgttgtttgggtcgtaatgagcaattccgggacgggaccgactactttgggtgtccgtgtttccttttattcttacattgtcttatggtcacagcatatatattatatatactgtgatc

SEQ ID NO: 742 - DNA, 625 bp, Human rhinovirus
  misc_feature 1..625: note = 99, strain ATCC VR-1299, complete genome.1
  source 1..625: mol_type = genomic DNA
ttaaaacagcgggtgggtatcccaccacccgacccactgggtgtagtacactggtattttgtacctttgtatgcctgtttgccatccctccctctcctcttacccttacccttattttgcggtaactttagaagtttgtaaatcacgcgcaatagggtataccacatccagtggtatgaagcacaagcaattcttgttccccggagctggatataaactgctaacgtggttgaaagtccttaaccgttatccgccagttaactgcgagaagactagtaactccatgtttgtttttaagcgttcgatcaggtggataccccattcactagtttggtcgatgaggctgggaatcccccacaggtaactgtgtctcagcctgcgtggcggccaacccagcttttgctgggacgcttactgacagacatggtgtgaagatcctattgcgcttaactgtgagtcctccggcccctgaatgcggctaacctcaaccccggagccttgtggtgtaaaccaacactcgcaaggtcgtaacgagtaattctgggacgggaccgactactttgggtgtccgtgtttcctttatttcttattgattgtctcctatggttacaaatttactgtaatc

SEQ ID NO: 743 - DNA, 625 bp, Human rhinovirus
  misc_feature 1..625: note = 97, strain ATCC VR-1297, complete genome.1
  source 1..625: mol_type = genomic DNA
ttaaaacagcggatgggtttcccaccatccgacccactgggtgtagtgctctggtattttgtacctttgcacgcctgtttcccctttgtacccatcctgaatttcctccctctgcaacgttagaagtttgtgaaattaaaagtacaataggaagcatcacatccagtggtgttcagtacaagcactcctgtttccccggagcgaggtataggttgtacccacgaccgaaagcctttaaccgttatccgccaatcaactacataacggctagtatcatcatgtttttgatctggcgttcgatcaggtggtttcccccactagtctggtcgatgaggctaggatttccccacgggcgaccgtgtcctagcctgcgtggcggccagcccagcttatgctgggacgcctttttaaagacatggtgtgaagacctgcatgtgcttgattgtgagtcctccggcccctgaatgcggctaaccttaaccctggagcccgacagcataatccaatgttgtttgggtcgtaatgagcaattccgggatgggaccgactactttgggtgtccgtgtttctttttattcttatattgtcttatggtcacagcatatatagtatatatactgtgatc

SEQ ID NO: 744 - DNA, 625 bp, Human rhinovirus
  misc_feature 1..625: note = 71, strain ATCC VR-1181, complete genome.1
  source 1..625: mol_type = genomic DNA
ttaaaactgagtgtgggttgttcccacccacactgtctacggacgtagtgctctcatattccggtatgtttgcacgccagtttgcctctccttttcccacgtaacgttagaagcttatgcactaaatcgaccactaggtgagtgataaaccatatcattctttggtcaagcacttctgtttccccggtatgcagggaataggccctccccagggctgaagccttaattatcgttatccgcacatttactacgcaaagcctattagcgttctggaagttcactggctggtcgttccgctagactaacccgtctagtagacctggcagatgaggctggataaaccccactggcgacagtgatccagcctgcgtggctgcctgcacacctggaaacaggtgtgaagcccatgaatggacagggtgtgaagagccccgtgtgctaagtgtgagtcctccggcccctgaatgcggctaatctaaccccacagctaatacacacaaaccagtgtggatttagtcgtaatgggtaactgtgggacggaaccgactactttgggtgtccgtgtttccttttattccttttatattgcttatggtgacaggtatatagatatatatttgttacc

SEQ ID NO: 745 - DNA, 625 bp, Human rhinovirus
  misc_feature 1..625: note = type 16 polyprotein gene, complete CDS.1
  source 1..625: mol_type = genomic DNA
ttaaaactggatctgggttgttcccacccagatcacctacatggtgttgtacactattattacggtaatcttgtacgccagttttatactccctttcccaaatgtaacttagaagcaaagcaaactgatcaataggggacaatcatccagattgtcaaagatcaagcacttctgtttccccggtcaaagttgatatgctccacaagggcaaaaacaactgagatcgttatccgcaagatgcctacgcaaagcctagtaatacattgaaagatacttggttggtcgctcagctgttaacccaacagtagacctggtagatgaggctagagattcccctccggcgacggagttctagcctgcgtggctgcctgcacacccactgggtgtgaagccaagtattggacaaggtgtgaagagccgcgtgtgctcatcttgagtcctccggcccctgaatgtggctaaccttaaacctgcagccagtgcacacaatccagtgtgtagctggtcgtaatgagcaattgcgggatgggaccaactactttgggtgtccgtgtccgtgtttcactttttttccttttattattgcttatggtgacaatatatatagcatatatatattgttatc

SEQ ID NO: 746 - DNA, 625 bp, Rhinovirus C
  misc_feature 1..625: note = isolate 2536, complete genome.1
  source 1..625: mol_type = genomic DNA
ttaaaactgggtaggggttgttcccacccctaccacccacgtggtgtagtgctcctgtattacggtacacttgcacgccagtttgcctccctacccccttcccattcacacccaaccctgcgtaacttagaagctatgcacaagaccaataggtggtaacaatccatgttactaaaggtcaagtacttctgtttccccggcatgcgtggaataaacagtgcaaacggttgaggccacaaatgtcgttacccgcgcatgaactacgcagagcctagtatccccctgaaagtccattggttggtcgctcagctaatccccatagtagacctggcagatgaggcaagacgcaccccactggcgacagtggtcttgcctgcgtggctgcctgcacacccttcggggtgtgaagccaattgatagacagggtgtgaagagccgagtgtgcttcatgtgagtcctccggcccctgaatgcggctaatccaaccccgcagctgtggcacacaatccagtgtgtatgcagtcgtaacgggcaactgcgggacggaaccgactactttgggtgtccgtgtttccttttattctttaatcaagtacttatggtgacaataataaatattgttacc

SEQ ID NO: 747 - DNA, 626 bp, Human rhinovirus
  misc_feature 1..626: note = 83, strain ATCC VR-1193, complete genome.1
  source 1..626: mol_type = genomic DNA
ttaaaacagcggatgggtatcccaccatccgacccactgggtgtagtactctggtattttgtacctttgtacgcctgtttcttccctttgtacccgccccttaaacttccaccccacgtaacgttagaagtttatacaagcagtacaataggttgcaccataaccagtggtgtttcgtacaagcacttctgtttccccggagcggggtatagacggtacccactgtcaaaagcccttaaccgttatccgccaatcaactacgtaatggctagtaacaccatgaaggtaagttgacgttcgatcaggtggtaacccccactagtttggtcgatgaggctaggaattccccacgggtaaccgtgtcctagcctgcgtggcggccaacccagcatttgctgggacgccaatttactgacatggtgtgaagacttgcatgtgcttgattgtgactcctccggcccctgaatgcggctaaccttaaccccggagccttgcagcataatccaatgttgtggaggtcgtaatgagcaattctgggatgggaccgactactttgggtgtccgtgtttcctgttttctttaagttgtcttatggtcacagcatatatactatatatactgtgatc

SEQ ID NO: 748 - DNA, 626 bp, Human rhinovirus
  misc_feature 1..626: note = 3, complete genome.1
  source 1..626: mol_type = genomic DNA
ttaaaacagcggatgggtaccccaccatccgacccactgggtgtagtactctggtacttcgtacctttgtacgcctgttcttcccattgtacccttcctgaacttccaacccaagtaacgttagaagctcaacatttagtacaacaggaagcaccacatccagtggtgtttagtacaagcacttctgtttccccggagcgaggtataggctgtacccactgccaaaaacctttaaccgttatccgccaaccaactacgtaaaagctagtagtattatgtttttaactaggcgttcgatcaggtggatttcccctccactagtttggtcgatgaggctaggaattccccacgggtgaccgtgtcctagcctgcgtggcggccaacccagcttatgctgggacgcctttttatagacatggtgtgaagactcgcatgtgcttggttgtgattcctccggcccctgaatgcggctaaccttaaccctggagccttgtgtcacaaaccagtgatgataaggtcgtaatgagcaattccgggacgggaccgactactttgggtgtccgtgtttcttatttttcttattattgtcttatggtcacagcatatatataacatatactgtgatc

SEQ ID NO: 749 - DNA, 626 bp, Rhinovirus C
  misc_feature 1..626: note = strain 20692_6_HRV-C polyprotein gene, complete cds.1
  source 1..626: mol_type = genomic DNA
aacagccgtctggttgatcccaccagcgggcacaatgtgcgttgtacactgcgatctcggtcgctttgtatgcctgtttttaccacccaccccaactttactatcttctttacttcacaagtaacatagaagcatgtacatgacgcccaataggacaacgtctcacccagagatgttaagggcaagcacttctgtttccccggatgtgtgaataggcttcacccgaggctgaaactgtagcattcgttatccgcatgactactacgcgactgctagtagcgttctgtgtgacatgtggggtttcgttcagcagagacccagtctgtagatcagggtaatgaggctacacaatccccactggtgacagtggtgtagcctgcgtggtgccctgcccgaggttcgtcctcgggaccctccatgttagacagggtgtgaagacactagtgtgctagtcatgagtcctccggcccctgaatgcggctaatcttaaacctgcagccaccacatgcacgccagcatgcaggtggtcgtaatgagcaattgcgggatggaaccgactactttgggtgtccgtgtttctctttttacatttatgtgtctcttatggttacatcattggtgtaatc

SEQ ID NO: 750 - DNA, 627 bp, Picornaviridae sp.
  misc_feature 1..627: note = isolate zftegr01hep2nc genomic sequence.1
  source 1..627: mol_type = genomic DNA
ttcaaggttcagccggccgggggttttgaggggttttggctggtccctatggaggcatagttatcgggactgtattcccgatggtttgagttagggccgacctgctcctgtattgcccacagctttgggctatcttgaggtgtttgtttgtgggaccctctcttgggtctcatttgtttttcttctgttttatgtctatcttttcccggttgtctccatacctatgctgctaccgctgcgcccggcggggttaaccctggggctagcccatggctgtggccgccaaaagtggagatgtcatgactattccatggcttgggctttgggtgtgtccagcaggtgacaggaacttagctgatcttggcaggggggtaggctacgggtgaaacccccccgtcctctcactcatattgagtgatgtcgtgtacacgtgaaccttggtggataggggtgagatcgtttggtcaaaaacccctcaacgcctggtgcgggcatgtcgtcatgtcatgcggctttgttcgtgtttcctgtctgttggcacccagtgctgaactcatggtaattggcaccctatgagtttagggctaatcaggggcatttaggtttttagcaccactgcttaatttg

SEQ ID NO: 751 - DNA, 627 bp, Human rhinovirus
  misc_feature 1..627: note = 92, strain ATCC VR-1293, complete genome.1
  source 1..627: mol_type = genomic DNA
ttaaaacagcggatgggtatcccaccatccggcccactgggtgtagtactctggtacattgtacctttgtacgcctgttttccccctcttgtacccgcccttcaagctccttgcccaagtaacgttagaagtttgaacattggtacaataggaagcatcacatccagtggtgtactgtacaaacacttctgttgccccggagcgaggtatagatggtccccaccgtcaaaagcctttaaccgttatccgccaatcaactacgtaatggctagtagcaccttggatttaagttggcgttcgatcaggtggtaacccccactagtttggtcgatgaggctaggaattccccacgggtgaccgtgtcctagcctgcgtggcggccaacccagcatccgctgggacgccaatttaatgacatggtgtgaagacctgcatgtgcttgattgtgagtcctccggcccctgaatgcggctaaccctaaccccggagccttgcagcacaatccagtgttgttaaggtcgtaatgagcaattctgggatgggaccgactactttgggtgtccgtgtttcttatttttcttgaatttttcttatggtcacagcatatatacattatatactgtgatc

SEQ ID NO: 752 - DNA, 627 bp, Human rhinovirus
  misc_feature 1..627: note = 27, complete genome.1
  source 1..627: mol_type = genomic DNA
ttaaaacagcggatgggtatcccaccatccgacccacagggtgtagtgctctggtattttgtacctttgcacgcctgtttccccattgtacccctccttaaatttcctccccaagtaacgttagaagtttaaggaaacaaatgtacaataggaagcatcacatccagtggtgttatgtacaagcacttctgtttccccggagcgaggtataagtggtacccaccgccgaaagcctttaaccgttatccgccaatcaactacgtaatggctagtattaccatgtttgtgacttggtgttcgatcaggtggttccccccactagtttggtcgatgaggctaggaactccccacgggtgaccgtgtcctagcctgcgtggcggccaacccagcttttgctgggacgcctttttacagacatggtgtgaagacctgcatgtgcttgattgtgagtcctccggcccctgaatgcggctaaccttaaccccggagccttgcaacataatccaatgttgttgaggtcgtaatgagtaattctgggatgggaccgactactttgggtgtccgtgtttccttttattctttatattgtcttatggtcacagcatatatagcatatatactgtgatc

SEQ ID NO: 753 - DNA, 628 bp, Human rhinovirus
  misc_feature 1..628: note = 93, complete genome.1
  source 1..628: mol_type = genomic DNA
ttaaaacagtggatgggtttcctaccatccgacccactgggtgtagtgctctggtatattgtacctttgcacgcctgttttcccattgtacccttccttaaattcctccccatgtaacgttagaagtttaagaacataaatgtacaataggaagcatcacatccagtggtgtatggtacaagcacttctgtttatccggagcgaggtataagcggtacccactgctgaaagcctttaaccgttaaccgccaatcaactacgtaacggctagtattaccttgtttgcaatctggcgttcgatcaggtggttccccccactagtttggtcgatgaggctaggagttccccacgggcgaccgtgtcctagcctgcgtggcggccaacccagcatttgctgggacgcctttttgtagacatggtgtgaagacctgcatgtgcttgattgtgagtcctccggcccctgaatgcggctaaccttaaccccggagccttgtgacataatccaatgtcattaaggtcgtaatgagcaattctgggacgggaccgactactttgggtgtccgtgtttctctttattctttacattgtcttatggtcacagcatatataatacatatatactgtgatc

SEQ ID NO: 754 - DNA, 628 bp, Human rhinovirus
  misc_feature 1..628: note = type 14 (HRV14), complete genome.1
  source 1..628: mol_type = genomic DNA
ttaaaacagcggatgggtatcccaccattcgacccattgggtgtagtactctggtactatgtacctttgtacgcctgtttctccccaaccacccttccttaaaattcccacccatgaaacgttagaagcttgacattaaagtacaataggtggcgccatatccaatggtgtctatgtacaagcacttctgtttcccaggagcgaggtataggctgtacccactgccaaaagcctttaaccgttatccgccaaccaactacgtaacagttagtaccatcttgttcttgactggacgttcgatcaggtggattttccctccactagtttggtcgatgaggctaggaattccccacgggtgaccgtgtcctagcctgcgtggcggccaacccagcttatgctgggacgcccttttaaggacatggtgtgaagactcgcatgtgcttggttgtgagtcctccggcccctgaatgcggctaaccttaaccctagagccttatgccacgatccagtggttgtaaggtcgtaatgagcaattccgggacgggaccgactactttgggtgtccgtgtttctcatttttcttcatattgtcttatggtcacagcatatatatacatatactgtgatc

SEQ ID NO: 755 - DNA, 630 bp, Human rhinovirus
  misc_feature 1..630: note = 72, strain ATCC VR-1182, complete genome.1
  source 1..630: mol_type = genomic DNA
ttaaaacagcggatgggttctcccaccatccgacccactgggtgtagtactctggtatgatgtacctttgtacgcctgtttattcccaaacccccacccgttattcgcccaacccctgtaacgttagaagtttggaacttaattgtacaatagggagcaccatatccaatggtgtaacgtacaagcacttctgtttccccggagcgaggtataggtggtacccactgccgaaagcctttaaccgtcatccgccaatcaactacgtaacagctagtaacatcttgttgttgattggacgttcgatcaggtggttcaccccccactagtttggtcgatgaggctgggaatcccccacgggtgaccgtgtcccagcctgcgtggcggccaacccagcttatgctgggacgccctttcaatgacatggtgtgaagactcgcatgtgcttgattgtgagtccgccggcccctgaatgcggctaaccctaaccctggagccttgcaccacaatccagtggtgtctgggtcgtaatgagtaattctgggatgggaccgactactttgggtgtccgtgtttctcatttttcttttaattgtcttatggtcacagcatatagtattatatactgtgatc

SEQ ID NO: 756 - DNA, 631 bp, Human rhinovirus
  misc_feature 1..631: note = 5, strain ATCC VR-485, complete genome.1
  source 1..631: mol_type = genomic DNA
ttaaaacagcgggtgggtatcccaccacccgacccactgggtgtggtacactggtactttgtacctttgtatgcctgtttgcttccactcccctttacctaatattcttccccaagtatattttgcggtaacgttagaagaagcaaagttagtgcaataggatgtatcacaaccagtggtataaagcacaagcaattcttgttccccggagctggatatagactgctaacgtggtcaaaagtccttaaccgttatccgccagctaactgcgagaagactagtaacaccatgtttgtttttagacgttcgatcaggtgaataccccattcactagtttggtcgatgaggctgagaataccccacaggtaactgtgtctcagcctgcgtggcggccaacccgactcatgtcgggacgcctactaatagacatggtgtgaagatcctattgcgcttagttgtgagtcctccggcccctgaatgcggctaaccctaaccccggagccttgtggtgtaaaccaacatttgcaaggtcgtaatgagtaattctgggatgggaccgactactttgggtgtccgtgtttcctttatttttattgtgtgtgtcttatggttacaaatacaatttgtaatc

SEQ ID NO: 757 - DNA, 632 bp, Duck picornavirus
  misc_feature 1..632: note = duck/FC22/China/2017, complete genome.1
  source 1..632: mol_type = genomic DNA
ttgaaaactggcccccctggggatctttgcacctttgaagtgcatatcctcaggggttaaccaggtggtggacataatgtccacctttgtttcaacatggttctttggcattttctccagagtaactaaaagataaatgccatctggatggattttctggttataaaatgactttctcgttgatcggtttttccactatcttcattgccgggtggttgccaagcccggaagtgctatcactctaggattcgagtcttcatccgtcgcggatttctagggcccatatctggtgctgaaatattgcaaggaatggtgaaccctagttgtctaacactgtaagtctcgatgtcttagaccaggtagccttggcacaattcctaaccaccaacatgtttctcgtgaaattccctcgccggggtgtagtagcgagtctcctctgttgggctcatggttaggggatgctcctaggtagagtggaacctcttcttcattttaaggtgggacctgattcagtatcccactggaagttagaggtctgggtattggggtaacccagcttggtccacactgcttgatagagtcgcggctggccgacctaggacatctttaaaaagtcagttgattttaacctt

SEQ ID NO: 758 - DNA, 633 bp, Pink-eared duck megrivirus
  misc_feature 1..633: note = polyprotein gene, complete cds.1
  source 1..633: mol_type = genomic DNA
gggggctcttccccctgggctcttttccggtaatccgattggcgaccggattatcgtgactctgctgagtcgtccgtgcctctaggaaacttgttggctccggctgacactttttctggacatcggatgggcggcttggtggggctagccaaccctgactgactttatgtgtatgacctcttttcctcttgcgctttagtctgtcgcgtctgatccacgtacggattaaatggtatgtcataaggctaagcctcgttctgaaatcccctagccaaaggggcctagtaggatcttggtgtttccttatgacctctaccgaccatgttagctagagctagggctgaataggatgcatcccagactcctttttggatatctggagcaagacaccggagtttaactatgtacgctggataaggctcgaacacacccagattgaaggtggtgctgaaatattgcaagcctaggtctgtgtagtgttagtagatgcccgccgctatagttttctccgccccctgtgggttagtagtgtacctatttggacgcagagccggcaatctctgcctttgcctagtactggttgatagacccgcggctggtcgagttaacatggtataaccagttgaaacggct

SEQ ID NO: 759 - DNA, 633 bp, Swine vesicular disease virus
  misc_feature 1..633: note = strain SVDV Itl. 2-97 polyprotein1
  source 1..633: mol_type = genomic DNA
cacccacagggcccactgggcgctagtacactggtatcacggtacctttgtgcgcctgtttgacccaccttccccaaacgtaacttagaagcacaactcaaatgatcattagacggctcagtatgccaactgggtctcgatcaagcacttctgttaccccggactgagtaccaataggctgctcacgcggctgaaggggaaaccgttcgttacccgaccaactacttcgagaaacctagtaccaccatgaaagttgcgcagcgtttcgctccgcacaaccccagtgtagatcaggccgatgagtcaccgcaaaccccacgggcgaccgtggcggtggctgcgctggcggcctgcccatgggacaactcatgggacgctacaatactgacatggtgtgaagagtctattgagctagttggtagtcctccggcccctgaatgcggctaatcctaactgtggagcagatacccacgcaccagtgggcagtctgtcgtaatgggcaactccgcagcggaaccgactactttgggtgtccgtgtttcttttattcctacgctggctacatatggtgacgatttgtaccataaagccttaaccgctcctcaacaccgtcataacacttaacacgctgag

SEQ ID NO: 760 - DNA, 633 bp, Human rhinovirus
  misc_feature 1..633: note = 1B, strain 12J7, complete genome.1
  source 1..633: mol_type = genomic DNA
ttaaaactgggtgtgggttgttcccactcacaccacccaatgggtgttgtactctgttattccggtaactttgtacgccagttttccctcccttctccccctcctacccttttacgtaacttagaagctttaaacatgagaccaatagcaggcaactttccaggttgtctaaggtcaagcacttctgtttccccggttgacgttgatatgctccaacagggcaaaaacaactgatatcgttatccgcaaagtgcctacacagagcctagtaggattctgaaagatctttggttggtcgctcagctgcatacccagcagtagacctcgcagatgaggctggacattccccactggtaacagtggtccagcctgcgtggctgcctgcacacctcttacgaggtgtgaagccaaggattcgacagggtgtgaagagccgcgtgtgctcactttgagtcctccggcccctgaatgcggctaaccttaaacctgcagccatagctcataagccaatgagtttatggtcgtaatgagtaattgcgggatgggaccgactactttgggtgtccgtgtttcattttttccttttatcaattgcttatggtgacaatatatatatatatatatattggcatc

SEQ ID NO: 761 - DNA, 634 bp, Ljungan virus
  misc_feature 1..634: note = M1146 polyprotein gene, complete cds.1
  source 1..634: mol_type = genomic DNA
agaatagccaatctgtaacttcaacacctaagcgcatcttgcccgccgttatctggtcgaaggcacttgcaataagactggttaaccctccatgcgtgattcacaatcctatctgtctctcgagtgctttacgctcgggtaggggctcacccaggaggtcccactctttacagaggtctgcgcaggtggctttcacctctcgacagcgcccctcaatcctgccttaggtgtgaaggttgcacgtattccaatgtgaacagtgcttgaattttgttggtaggtgtagcgaccacacatgagccagcggatttcccctggtggtaacaccagcctctgggcccaaaaggcatgtctttgacctcatgtgtgcacaatcccagtgatgccaatgattagtaaagcacttagtatatatatgggatataccaatctcaagcacctaagggtgtaggtatggtaggctgaaggatgccctggaggtacccgcaggtaacgattggttcactgtggatctgaccaggggcccaccggaacttcgttctgggtagaagctctcgagccttgggttaaaaaacgtctaggcctatcccccggggggacccggggtttcccttataaccccatattttgcatc

SEQ ID NO: 762 - DNA, 636 bp, Bovine viral dirrhea virus
  misc_feature 1..636: note = nonstructural proteins (p125/p80, p10,1
  source 1..636: mol_type = genomic DNA
tggagtctatacgaggaggacagcctgttaataacccagttagaaatatcaaataatttactcatatcagaagacttgccagccgctgtcaagaacataatggccaggactgatcacccagagccgatccaacttgcttacaacagttatgaggtccaggtcccagtcctgttcccaaaaataaggaacggagaggttacagacacctacgaaaactactcatttctaaacgctaggaagttaggagaggatgtgcccgtatacatctatgccactgaagatgaggacctggcagttgacctcctagggctggactggcccgaccctgggaatcagcaggtcgtggagaccagcaaagcactgaagcaagtggccggattgtcttcagctgagaatgccttgctcatagctttatttgggtatgtaggttaccaagctctatcaaagaggcatgtcccaatggtcacagatatatacactatagaggaccagagactggaagacaccacccacctccagtatgcacccaacgccataaaaaccgaagggacagagactgaattgaaggaattgccggcgggtgacgtggagaaaatcatgggagccatctcggattatgcagctggaggactggaa

SEQ ID NO: 763 - DNA, 637 bp, unidentified
  source 1..637: mol_type = unassigned DNA; note = Human coxsackievirus A16, strain shzh01-17 polyprotein gene, partial1 sequence
acttagaagcttcacacaatcacgaccatcagtaggcctggcatcccagtcacgtcttggtcaagcacttctgttccccctgactgagtatcaataaactgctcacgcgggtgaaggagaaaacgttcgttatccggctaagtacttcgagaaccccagtagcaccgtgaaagttgcggagtgtttcgctcagcacttcccccgtgtacatcaggtcgatgagttactgttaaccccacgggcgaccgtgacagtggctgcgttggtagcctgcccatggggttacccttgggacgctctcatacagacctggtgtgaagagtctattgagctagttagtagtcctccggcccctgaatgcggctaatcctaactgcggagcacgcaccctcaacccagggggcggcgtgtcgtaacgggtaactctgcagcggaaccgactactttgggtgtccgtgtttccttttattccttactggctgcttatggtgacaattgaaaagttgttaccatatagctattggattggccatccggtgtctaacagagctattgtttacctatttattggatacgtccctcttaatctcaaggccattcaaactcttaattatatattgctccttaactgtaagaa

SEQ ID NO: 764 - DNA, 638 bp, Phopivirus
  misc_feature 1..638: note = strain NewEngland_USA/2011, complete genome.1
  source 1..638: mol_type = genomic DNA
gggagtaaacctcaccaccgtttgccgtggtttacggctacctatttttggatgtaaatattaattcctgcaggttcaggtctcttgaattatgtccacgctagtggcactctcttacccataagtgacgccttagcggaacctttctacacttgatgtggttaggggttacattatttccctgggccttctttggccctttttcccctgcactatcattctttcttccgggctctcagcatgccaatgttccgaccggtgcgcccgccggggttaactccatggttagcatggagctgtaggccctaaaagtgctgacactggaactggactattgaagcatacactgttaactgaaacatgtaactccaatcgatcttctacaaggggtaggctacgggtgaaaccccttaggttaatactcatattgagagatacttctgataggttaaggttgctggataatggtgagtttaacgacaaaaaccattcaacagctgtgggccaacctcatcaggtagatgcttttggagccaagtgcgtaggggtgtgtgtggaaatgcttcagtggaaggtgccctcccgaaaggtcgtaggggtaatcaggggcagttaggtttccacaattacaatttgaa

SEQ ID NO: 765 - DNA, 639 bp, Chicken megrivirus
  misc_feature 1..639: note = strain chicken/B21-CHV/2012/HUN, complete1
  source 1..639: mol_type = genomic DNA
ttcccgaccggtctggcaaaccggacggttatcctggttagatgtctgatggttgctggaacgtggtggctactgctgccaccttctggcttcctttaatgggcatctagctgggttctttgccacaatccatcttactctcttacccattttctattacccagacttgttgttaactggtaaagttgacctactggcttcgttttgagactattctggtgttggtggacactctttccacaagtagattgtatggagttcatgctcgttttgaaccgggaatggcacaacccgtagtaggatcttgcctctgccatactaatctgcgcctgttgcttttagactatgggctgctaaggatgacattggaacccctttttggatattccatgtcaagtcaactgtttcatctggtgtacgctggaaatccttgttccgaggtcttgtctggaggtggtgctgaaatattgcaagccacaggcagttccttggacttggtgccgctatcagatgctacaccctctatgggcaaatgttgaaccttagtggacgcgtgagatgggaatccacgccggccatagactggctgataagctcgcggctgatcgagttgcaacagtaatcagttgatttgccact

SEQ ID NO: 766 - DNA, 639 bp, Human rhinovirus C
  misc_feature 1..639: note = isolate N10, complete genome.1
  source 1..639: mol_type = genomic DNA
ttaaaacagccgtgtggttgtacccaccaccgggcacattgtgcgtggtacactggaattacggttcctttgtacgcctgttttcccttcccactttctttcttccttcacttcctaattgtaacataattagaagcatgacatacagtccaataggaggcggttaatccataaccgtcatagacaagcacttctgtttccccggatgtgtgaataggcttccaccgaggctgaagctgtagcattcgttatccgcacacgtactacgcgaaaactagtaacaccttgattggtggtgtggtgtttcactcggcgctaccccagcgtagatcagggcaatggggctacggaaaccccaccggcgacggtgtcgtagcccgcgtggtgccctgcccagatccttgcgatctgggacaccatatcattgacagggtgtgaagattctagtgtgctacgtgtgagtcctccggcccctgaatgtggctaaccttaaccccgcagctatggtgtgcaaaccagcacattcgtagtcgtaatgggcaactgtgggatgggaccaactactttgggtgtccgtgtttccttttattcttataattttccttatggttacaagcttatggttataggtttgtaacc

SEQ ID NO: 767 - DNA, 639 bp, Rhinovirus C
  misc_feature 1..639: note = strain USA/WI/2014-20992 polyprotein gene, partial1
  source 1..639: mol_type = genomic DNA
gacataagcgccgggtttgttaaaacagctgcgtggttgttcccaccaccaggcacacagtgcgtggtacactggaatttcggttcctttgtacgcctgttttcccaccctcatgtttgtttgtctttacgcgtaacttagaagcattgcaaacagctcaataggaatagtccatccaggactgttacgagcaagcacttctgtctccccggacgtgtgaatagacctcaccaaggttgaagctgtagcgttcgttatccgctcatctactgcgcaaagactagtaactaactgaagccttaatggtgtttcgctcagcagtaccccactgtagatcagggcaatgaggctacgcattccccactggtgacagtggcgtagcctgcgtggtgccctgcccaggtttcggcctgggacaccattttgacgacagggtgtgaagaccggcgtgcgctaggtgtgagtcctccggcccctgaatgcggctaatcctaaccctgcagccattgcatgtgatccaacatgtggatggtcgtaatgagtaattgcgggatggaaccgactactttgggtgtccgtgtttcctgttttaccaattactgtctcatggttacaaatttgtgtatcaagtttgtaact

SEQ ID NO: 768 - DNA, 640 bp, Pigeon mesivirus 2
  misc_feature 1..640: note = strain pigeon/GALII5-PiMeV/2011/HUN, complete1
  source 1..640: mol_type = genomic DNA
ttttgaaaagggtcccagggggatcttttattccctctgggcccttttcacgtagtagggagtggcgcccctactgcgttactctgccaggtagtctgggtaggtaaacgggagatcggcttcgggcttatcttcttaatagcctacgtaactgggctgactggtgggggagctactagatccgggaaaggactagttaccccttgtaactctccttcgtgtcaccccatccacttaccctttttccctaccccttagaatcttaagtagatgtgcaggcctggccccccggaaatgggcaaatcggacgtttgcgtgtagggtcgttctgaaaggtggggcccactccaccgtagtaggatcttcctgtttcacgtttaaacctctccgggcaggtgtcgctagacactaggctgtataggatggcaagcacttaggtttcgcaccttcctagtgcgccaagaccccgtcttttagttttagtacatggttctttgtaagatgtctaaccagaggaggtggtgctgaaatattgcaagccactctggcgaacgtccgctgcattgcctggaacgaactttctgacgtctagcactggtagcgcggtactagattagtagggtacctatatggacagggg

SEQ ID NO: 769 - DNA, 640 bp, Rhinovirus C
  misc_feature 1..640: note = isolate 8097-MY-11, complete genome.1
  source 1..640: mol_type = genomic DNA
ttaaaacagccgtgtggttgttcccaccaccggacacactgtgtgttgtgcactggaatctcggttcctttgcatgcctgttttataaccccttcccctttactttctatcattcttttcttccaagtaacttagaagctgaacaacagtccaataggaagtgaccaacccatggtcactaaggacaagcacttctgtttccccggatgcgtgaatagactctaaaagggttgaagctgtagcattcgttatccgcacttgtactacgcgatggctagtatcatcctgctctttccattggcgtttcgctcagcgtggtatcccccacgtagatcagggtaatgaggctacatgtaccccaccggcgacggtgatgtagcctgcgtagtgccccgcctgggtcttgtgcccaggacgccataggtcagacagggtgtgaagacttgagtgtgctacaagtgagtcctccggcccctgaatgcggctaatcctaaccccgcggctatcgtacgcaatccagcgtattggtagtcgtaatgagcaattgtgggatggaaccgactactttgggtgtccgtgtttcctttatttcttgacatgttgcttatggtcacaagtttatggttataaatttgtgatc

SEQ ID NO: 770 - DNA, 641 bp, Grey squirrel kobuvirus
  misc_feature 1..641: note = isolate UK 2010 polyprotein gene, complete1
  source 1..641: mol_type = genomic DNA
ggatttaggccgtggtgcccgtgggcacgacggccacggctccagccgcactcctctccacgccttgtcccacgggacataaagtggagccctaagccctaaacccccatgttacccaattttcttatccacttccctttttccctttgactcacatttttcttgaccgcgcttgtgaggcggttcccgtacagttgagttgacgggtcccgcgcgggacctgaaaattactccatactgattaggaaaggttctagtacgcttgtacccttaaggccagcgggctacctcctttaggtcttatagccccaactggttagaaccactccagctcacctctatcggtgcgggagtgctaccacccctgcctgcgtcaagcccgtttttctagtgatctgtccacaaacacttggattcccgtcgcgactgacagaacctggcgacaggtgtctcgatgtgtgtgaccaagtggcatgagaatcggaaactaacgctggtaagatggtaagtgcccaatccctgtggggtgatgtttttctctgcataggaatgctgcgaaggtaccccggccttgagtcgggatctgatcgcaggctaattgtcctctgtgcagttcatttccttttcttttcattggcatc

SEQ ID NO: 771 - DNA, 641 bp, Human rhinovirus
  misc_feature 1..641: note = C51, isolate LZ508, complete genome.1
  source 1..641: mol_type = genomic DNA
ttaaaacagccgtgtggttgtacccaccaccggacacactgtgtgttgtgcactggaatctcggttcctttgcatgcctgttttaaaccccccttcccccactctttctatcattcttttcttcctaatgtaacttagacgttataccacagtccaataggacgtggccaatccaggccatgacggacaagcacttctgtctccccgggcgtgtgaataggcctcaacaaggctgaagctgtagcgctcgttatccgcatttgtactacgcgatggctagtatcatccttctcttggtcttggcgtttcgctcagcgtggtaaccccccacgtagatcagggcaatgaggctgcatatgccccaccggcgacggtgatgcagcctgcgtggtgccccgcctgggttaacccccaggacgccacaatcaagacagggtgagaagacctgagtgtgctacagatgagtcctccggcccctgaatgcggctaatcctaaccctgcagctatcgtatgcaaaccagcatattggtagtcgtaacgagcaattgcgggacggaaccgactactttgggtgtccgtgtttctctttttatttgaaatgttgcttatggttacaagttttggtattaaacttgtgacc

SEQ ID NO: 772 - DNA, 641 bp, Rhinovirus C
  misc_feature 1..641: note = strain 20692_95_HRV-C polyprotein gene, complete cds.1
  source 1..641: mol_type = genomic DNA
tgtgtacatctcttctagtttcggggaggggtttaaaactgaaccacggttgttcccactgtggttacctaaagggtgtagtggtcttgtattacggtacatttccatgccagttttatcacccctccccgaaattagaagagatgtacacaccgaccaatagggagtggccaaccaggtcgctaaaggtcaagcacttctgtttccccggttggtttggatatgctttacccaaggcaaaaaccgaaccagtcgttatccgcaaagtgcctacgagaagcctagtagcatcttcgaaaccaatggttggtcgctccattgcaaccccagcaatagacctggcagatgaggctgagcagtccccgccagcgatggtggctcagcctgcgcggctgcctgcgcaccccttagggtgcgaagccagaaagtggacaaggtgtgaagagcctattgtgctcactttgagtcctccggcccctgaatgtggctaatcttaaccccgcagctatcgcacataaaccaatgtgtaggtagtcgtaatgggcaactgtgggatggaaccaactactttgggtgtccgtgtttccttgttttctttacaaatgcttatggtgacaattgtgtgatatacagttgtcgcc

SEQ ID NO: 773 - DNA, 642 bp, Echovirus
  misc_feature 1..642: note = E3, strain 2-E6-TW, complete genome.1
  source 1..642: mol_type = genomic DNA
taatgtaacgtagaagttttacacactgatcaacagtaggcacagcgcaccagttgtgtctcgatcaagcacttctgtctccccggaccgagtatcaatagactgctcacgcggttgaaggagaaagcgttcgttacccggctgactacttcgagaaacctagtagcactatgaaagttgcgaagtgtttcgttcagcacttcccccgtgtagatcaggtcgatgagtcactgtattccctacgggtgaccgtagcagtggctgcgttggcggcctgcccatggggcaacccatgggacgcttcaatacagacatggtgcgaagagtctattgagctagtcagtagtcctccggcccctgaatgcggctaatcctaactgcggagcatgtgccttcgatccagagggtagcatgtcgtaatgggcaactctgcagcggaaccgactactttgggtgtccgtgtttccttttattcttatactggctgcttatggtgacaattgagagattgttgccatatagctattggattggccatccggtgagtaatagagctattatctactcctttgtgggttttgtatcattgaactataaggtcttgaagactctcaactttattttgacactcaacaccgcaaa

SEQ ID NO: 774 - DNA, 643 bp, Echovirus
  misc_feature 1..643: note = E25, strain USA/CA/RGDS-2017-1010, complete genome.1
  source 1..643: mol_type = genomic DNA
aagcgtaacttagaagcttacctcacgtggtcaataggcggctcagtacaccaactgggtcttgaccaagcacttctgttaccccggaccgagtatcaataggctgcccacgcggctgaaggagaaaacgttcgttacccggccaattacttcgagaaacctagtatcaccatggaagttgcgcggcgtttcgctccacacaaccccagtgtagatcaggctgatgagtcaccgcactcctcacgggcgaccgtggcggtggctgcgttggcggcctgcccatggggcaacccatgggacgcctcaatactgacatggtgtgaagagtctattgagctaattggtagtcctccggcccctgaatgcggctaatcctaactgcggagcagacactcacaagccagtgggcggtctgtcgtaacgggcaactctgcagcggaaccgactactttgggtgtccgtgtttccttttattcctacattggctgcttatggtgacaattgagagattgttaccatatagctattggattggccatccggtgacaaacagagcgattgtctattcatttgtcggttttgtaccattaaactccaaagtcttgaaaaccctcaacctaatcatcctacttaactcagtaaa

SEQ ID NO: 775 - DNA, 643 bp, Enterovirus sp.
  misc_feature 1..643: note = D68, isolate NY510_18 polyprotein gene, complete cds.1
  source 1..643: mol_type = genomic DNA
ccaagggcccacgtggcggctagtactctggtacttcggtacctttgtacgcctgttttatctcccttcccaatgtcaataggtggggcgcaaaccagcgctctcatgagcaagcactcctgtctccccggtgtggttgtataaactgttcccacggttgaaaacaacctatccgttatccgctatagtacttcgagaaacctagtatcacctttggattgttgacgcgttgcgctcagcacactaacccgtgtgtagcttgggtcgatgagtctggacataccccactggcgacagtggtccaggctgcgttggcggcctactcatggtgaaaaccatgagacgctagacatgaacaaggtgtgaagagtctattgagctactatagagtcctccggcccctgaatgcggctaatcctaaccatggagcaagtgctcacaggccagtgagttgcttgtcgtaatgcgcaagtccgtggcggaaccgactactttgggtgtccgtgtttcactttttacttttatgactgcttatggtgacaatttgatattgttaccatttagctgtcaaattaattgcaaaagatcctaagtcttacttaccaatttgcattttgataaccttgatttgaaaattttaata

SEQ ID NO: 776 - DNA, 643 bp, Rhinovirus B
  misc_feature 1..643: note = strain 20692_64_HRV-B polyprotein gene, complete cds.1
  source 1..643: mol_type = genomic DNA
cggataacgtttaaaacagcggatgggttcccccaccatccgacccactgggtgtagtactctggtattatgtacctttgtacgcctgtttactcccaaaccccccctcccgttacatttccaacccctgtaacgttagaagtttggaatttaacagtacaataggaggcaccatacccaatggtgtaatgtacaagcacttctgtttccccggagcgaggtataggtggtacccaccgctgaaagcctttaaccgttatccgccaatcaactacgtaacagctagtagcattttgtcgttgactggacgttcgatcaggtggtttacccccccactagtttggtcgatgaggctggaaattccccacgggtgaccgtgttccagcctgcgtggcggccaacccagctcatgctgggacgccctttcaatgacatggtgtgaagactcgcatgtgcttggttgtgaatcctccggcccctgaatgcggctaaccctaaccccggagccttgcatcgcaatccagtgatgttggggtcgtaatgagtaattctgggatgggaccgactactttgggtgtccgtgtttctcatttttctttgaattatcttatggtcacagcatatagtaatatatactgtgatc

SEQ ID NO: 777 - DNA, 644 bp, Picornaviridae sp.
  misc_feature 1..644: note = isolate thr106pic1 genomic sequence.1
  source 1..644: mol_type = genomic DNA
gaaaagagtcccaggaggaattccccctgggaacccttttccgttgggaaggcttggcaaccttcctggcgttaggctgcttagtagtctgcgtattgcgcgccagtttggcttcggctgagctgccgttcaatacactagtgggctattctaggtggctgtagttgccctacagtggccggccagtgaaaccacactgtagtttacccctaccccaaaatctctaatttatgaccgtaatccctaagtgactttcttgtttgctctcacacatgggctttggatcttgttttggattttggtatctgatctctatctggatgtatcagtaatctgaagtgcggacgcaatccgcctagtaggatgactgttgtccttttagaggaaaacctctgtggctagacatagtggtgtatagattcaacaggactcctttttggatatcctaactcccggacccttgttgaatgggctggatttccgcctagccaagggaaaccaccggaacggggatggcaactgaacctagtacggctagtaggaggtctatacatacgatgggctgggaaacccatcctggactatgactgggtgatagcctcgcggcggatcgagtcacagttgtaatccgttgttttgcactc

SEQ ID NO: 778 - DNA, 644 bp, Human rhinovirus B
  misc_feature 1..644: note = strain HRV-B70_p1085_sR469_2008 polyprotein1
  source 1..644: mol_type = genomic DNA
aattggcggataacggttaagagcttaaaacagcggatgggttccccaccatccgacccaatgggtgtagtactctggtattctgtacctttgtacgcctgtttctcccctccctcccatcctaaattgtcccagtaacttagaagacttgaattaccgtacaataggtgctgtcacatccagtgatggcttgtacaagcacttctgtttccccggagcggagtatagatggccaccgctgtcaaaagctcttaaccgttatccgccaattaactacgcaacggctagtaacatcttgttattcttagggcgttcgatcaggtgagtacacccctcactagtctggtcgatgaggctgagaattccccacgggcgaccgtgtctcagcctgcgtggcggccagcccagcttatgctgggacgccttaattgtgacatggtgtgaagacccacgtgtgcttaattgtgagtcctccggcccctgaatgcggctaacctaaaccctggagccttgagacacaatccagtgttggcaaggtcgtaatgagcaattccgggacgggaccgactactttgggtgtccgtgtttcctgttatttccaaattgttcttatggtcacaatataagctatatatattgtgatc

SEQ ID NO: 779 - DNA, 644 bp, Human rhinovirus C
  misc_feature 1..644: note = strain HRV-C42_p1053_s3040_1999 polyprotein1
  source 1..644: mol_type = genomic DNA
cgaatccttgtagtaatttatgttaaagtacttgatgagacctccattggtggcagtaatagcattctcatgtgatccggtggtattccggtacacttgtacgccagtttgccaccctaaataccccgtaacaatagaagtctacacacacttagaccaatagggggtgttcatccagttcacccaaggtcaagcacttctgtttccccggcataggggtgttaggtttcacccgagactgaagctctgattgtcgttatccgcacaactactggacaaagcctagtaacaccctacgatgtaccatggttggttgttccgccagtaccccctggtaaacctggcagatggggctagaagttcctcactggtgacagtgttctagcccgcgtggctgcctgctcccttatgggagaagccattttactgacaaggtgtggagagccccgtacgctagttgtgactcctccggcccctgaatgcggctaatccaaccctgcagccattgcatggaagccaccatgtagatggtcgtaatgagtaattgcgggacggaaccgactactttgggtgtccgtgtttcttgtttttcttttactgacgtttatggtgacaatatatatataacatatatattgttcatc

SEQ ID NO: 780 - DNA, 645 bp, Human rhinovirus C
  misc_feature 1..645: note = isolate JAL-1, complete genome.1
  source 1..645: mol_type = genomic DNA
ttaaaactgggcattggttgtccccaccaatgcacaccaagtgtgttagtgctctggaatcttcgttcctttgcacgccagtttgccctcccttccccaagtctttctatcattcttttcttcctaatgtaacttagacgttataccacagtccaataggacgtggccaatccaggccatgacggacaagcacttctgtctccccgggcgtgtgaggaataggcctcaaaaaggctgaagctgtagcgctcgttatccgcattggtactacgcgatggctagtatcatcctggaagtctcttggttggtcgctcagcgtggtaaccccccacgtagatcagggcaatgaggctgcatatgccccaccggcgacggtgatgcagcctgcgtggtgccccgcctgggttaacccccaggaagccaatgagtggacagggtgtgaagagccgcgtgtgctaccaatgagtcctccggcccctgaatgcggctaatccaaccccacagctatggcatgcaagccagcatgtgcgtagtcgtaatgagtaattgtgggacggaaccgactactttgggtgtccgtgtttcctttattctttgaaatgttgcttatggtgacaatattggtattataccattcttgtcatc

SEQ ID NO: 781 - DNA, 647 bp, Enterovirus C
  misc_feature 1..647: note = strain 04-1438, complete genome.1
  source 1..647: mol_type = genomic DNA
tgtgacctcaccggggaaacagaagtgcttgttcgtggtggtactggtttgtaccaccacgaacaagcacttctgtttccccggtgaggtcacatagactgttcccacggttgaaagtgatcaatccgttatccgctcatgtacttcgggaagcctagtatcacctttggatcttcgacgcgttgcgctcagcactcaaccccagagtgtagcttaggctgatgagtctggacgttccccactggtgacagtggtccaggctgcgttggcggcctacctgtggttcaaagccacaggacgctagttgtgaacaaggtgtgaagagcctactgagctacctgagattcctccggcccctgaatgcggctaatcctaaccacggagcaggtgatcataaaccaatgataggcctgtcgtaatgcgcaagtctgtggcggaaccgactactttgggtgtccgtgtttccttttattctttacattggctgcttatggtgacaatcatagattgttatcataaagcgaattggattggccatccggtgaaaatcagagcgattatatatttgtttattggattcactccattaacaccaatttctcctacactcattaagctagtcctattaataaggtactattatcata

SEQ ID NO: 782 - DNA, 647 bp, unidentified
  source 1..647: mol_type = unassigned DNA; note = Human coxsackievirus A22, strain BBD58 polyprotein gene, partial1
cggtacctttgtacgcctgttttatatcccctcccccatgcaactttagaagcaattcaaacagttcaatagagggggtacaaaccagtaccaccacgaacaagcacttctgtttccccggtgaagctgtatagactgtgcccacggttgaaaatggctaatccgttatccgcttaagtacttcgagaagcctagtatcaccttggaatcttcgacgcgttgcgctcagcactctaccccgagtgtagcttaggctgatgagtctgggcataccccaccggcgacggtggcccaggctgcgttggcggcctacccatggctaacgccatgggacgctagttgtgaacaaggtgtgaagagcctattgagctacttgagagtcctccggcccctgaatgcggctaatcccaaccacggagcaagtgctcacaaaccagtgagtggcttgtcgtaacgcgcaagtctgtggcggaaccgactactttgggtgtccgtgtttccttttatttttatcatggctgcttatggtgacaatctaagattgttatcatatagcgtttggattggccatccggtgatttcaaaagtgatatatttgacctatcgccttactgtgtttacctactcattacatccactcaaccata

SEQ ID NO: 783 - DNA, 648 bp, Coxsackievirus
  misc_feature 1..648: note = A1 clone V18A polyprotein gene, complete cds.1
  source 1..648: mol_type = genomic DNA
tcacggtacctttgtacgcctgttttacatcccctccccaagtaactttagaagtaaatcataaagttcaatagaagggggtgcaagccagcaccaccacgaacaagcacttctgtttccccggtgaagccgtatagactgcccccgcggttgaaaatggcagatccgttatccgctcacgtacttcgagaagcctagtatcaccttggaatcttcgacgcgttgcgctcagcactctaccccgagtgtagcttaggtcgatgagtctgggcataccccaccggtgacggtggcccaggctgcgttggcggcctacccatggttaacaccatgggacgctagttgtgaacaaggtgtgaagagcctattgagctacctgagagtcctccggcccctgaatgcggctaatcccaaccacggagcaagtgctcacaaaccagtgggtagcttgtcgtaacgcgcaagtctgtggcggaaccgactactttgggtgtccgtgtttccttttatttttatcatggctgcttatggtgacaatctaagattgttatcatatagctattggattggccatccggtgatttttgaaagtgatatttgccttgctatttcattgcatttgcttacttataatactgcaaactcaca

SEQ ID NO: 784 - DNA, 648 bp, Rhinovirus B
  misc_feature 1..648: note = take1 genomic RNA, complete genome.1
  source 1..648: mol_type = genomic DNA
tactaatacagagtactacacccagtgggtcggatgggtatcccaccatccgacccactgggtgtagtactctggtattatgtacctttgtacgcctgttcttcccattgtaccctccctaaatttccaacccaagtaacgttagaagttccacataacagtacaataggaagcaccacatccagtggtgttttgtacaagcacttctgtctccccggagcgaggtataggctgtacccactgccaaaagcctttaaccgttatccgccaaccaactacgtaaaagctagtaacatcttgtttgtaacttggcgttcgatcaggtggattccccctccattagtttggtcgatgaggctaggaattccccacgggcgaccgtgtcctagcctgcgtggcggccaacccagcatttgctgggacgcccttttatagacatggtgtgaagactcgcatgtgcttggttgtgactcctccggcccctgaatgcggctaaccttaaccccggagccttgtgttgcaagccagcaacattaaggtcgtaatgagtaattctgggacgggaccgactactttgggtgtccgtgtttccaatttttcttattattgtcttatggtcacagcatatttgacaaatatactgtgatc

SEQ ID NO: 785 - DNA, 649 bp, Echovirus
  misc_feature 1..649: note = E7, isolate Env_2016_Sep_E-7b, complete genome.1
  source 1..649: mol_type = genomic DNA
ccaccccgtcgtaacttagaagctaatcaactatggtcactaggcggcccagtatgccaactgggtcttgaccaagcacttctgttaccccggactgagtatcaataggctgctcacgcggctgaaggagaaaacgttcgttacccggccagttacttcgagaaacctagtaccaccatgaaggttgcgcagcgtttcgctccgcacaaccccagtgtagatcaggccgatgagtcaccgcatccctcacgggcgaccgtggcggtggctgcgttggcggcctgcccatggggcaacccatgggacgcttcaatactgacatggtgcgaagagtctattgagctaattggtagtcctccggcccctgaatgcggctaatcctaactgcggagcagatacccgcgtgccagcgggcagtctgtcgtaatgggcaactctgcagcggaaccgactactttgggtgtccgtgtttccttttattcttacactggctgcttatggtgacaattgaaagattgttaccatatagctattggattggccatccggtgactaacagagcgattatctatcaatttgttggttttgtgccattggatttcccaaccctaagaacccttaattttatattggtacttaacacgacaag

SEQ ID NO: 786 - DNA, 651 bp, Gallivirus A1
  misc_feature 1..651: note = isolate 518C, complete genome.1
  source 1..651: mol_type = genomic DNA
ggttaacttgtttaaccaaggcttccgtgcagggcttgcacgttaggagttcatgttgattcatgctccaatgcccaaaactttgtgtgtttgtttatgtctttcccaaagtttcccccaaggtttcggtactcaaaccttaattcctagtcccatcttttgggccttagtatctaggaaatgtacccgtgccttgacgaacgtaagaaagctgtcttttattgaacggttctaatgaactaagtataactggctcgcgccacctggtgtgtgccgttggaattcccccatggtaacatggtccaacgggcccgaaaggctagtgggcaatcggtcctccaaggaaggggttcccaccccgacctgaacaggatttgatgaagctcacctcccaggctcctaaccccaaggaagtttacttatagtaattagaatttagtatgtaattgctggcaatcttgctagtagtcaggaacgttatgaccaaatgagtagacccccagaaggtaccccattatatgggatctgatctgggcctcatactgtgtgtctccccacatatgaggttaaaaccatgaaagtttggtccaaaatattcttttccttttatcttttctttagtggtgacgccattatatcagcagtttgctg

SEQ ID NO: 787 - DNA, 651 bp, Human poliovirus 2
  misc_feature 1..651: note = complete virion genome,isolate1
  source 1..651: mol_type = genomic DNA
ccccgtaacttagaagcataaaaccaagttcagcaggaaggggtgcaaaccagtacctctatgaacaagcacttctgtttccccggtgacattgcatagactgctcacgcggttgaaagcgatcgatccgttatccgcttgtgtacttcgaaaagcctagtatcgccttggaatcttcgacgcgttgcgctcagcacccgatcccggggtgtagcttaggctgatgagtctggacgtccctcaccggcgacggtggtccaggctgcgttggcggcctacctatggctaacgccataggacgctagatgtgaacaaggtgtgaagagcctattgagctacacgagagtcctccggcccctgaatgcggctaatcctaaccacggagcaagcggtcacgaaccagtggctggcttgtcgtaacgcgcaagtctgtggcggaaccgactactttgggtgtccgtgtttcctgttatttttatcatggctgcttatggtgacaatctgtgattgttatcataaagcgatttggattggccatccggtgagtgttgtatcgaacatttgactgttcatcagaactactgtgttagattcacttcttattcaactaattaatcaaaaacagtacgaagacaaaacaacaatactaca

SEQ ID NO: 788 - DNA, 651 bp, Human enterovirus
  misc_feature 1..651: note = isolate EV/Human/CMRHP52B/CMR/2014 polyprotein1
  source 1..651: mol_type = genomic DNA
cccctaccccttgcaacatagaagcattgtaccacggatcaatagcaggtgtgtcgatccagacgcatcttgatcaagcacttctgttcccccggaccgagtatcaataagctactaacgtggctgaaggagaaaatgtccgttacccggccaactacttcgagaagcccagtaccaccatgaacgttgcagagtgtttcgctcagcacaaccccagtgtagatcaggccgatgagtcaccgcattcctcacgggcgaccgtggcggtggctgcgctggcggcctgcctatggggaaacccataggacgctctaatactgacatggtgcgaagagcctattgagctagttggtagtcctccggcccctgaatgcggctaatcctaactgcggagcatgtgctcacaatccagtgagtggcatgtcgtaacgggtaactctgcagcggaaccgactactttgggtgtccgtgtttccttttatatttatactggctgcttatggtgacaatcaaggaattgttaccatatagctattggattggccatccggtgactaatagagctataatttacctatttgttggattcgtccccctgaacacaaaaacagttcagactctacagtacatcttatttttgaacttgaagaa

SEQ ID NO: 789 - DNA, 652 bp, Enterovirus E
  misc_feature 1..652: note = strain NGR_2018, complete genome.1
  source 1..652: mol_type = genomic DNA
gggggttgtacccacccctggggcccacgtggcgccagtactctggtacgctagtacctttgtacgcctgttttcccctcccgtaaataaatcaagattgctggtcctgtggggagtagtccgactccgcaccgatacgtcgcaccagtactccggtacgcctagtaccctagtacggaggtaccagtactcctctcccgtaacttagaagcaaagcaccaaaccgacccaaaaggacgcgttgcacccagcagcgtgatggtcaagcacttctgtttccccggccgcaaggtcgttacccacccgcaccactacgagaagcctattagacagccaagcttgcaaagcgttgcgttcaaccacaaccccagtggtagctctgagagatgggactcgtcgttcccccatggcaacatggtgacttgtccgcgtgtgctctcgggttcgccaataggcgttcacgccgcacaagtgtaactgttgaagagcctattgtgctggagcggttttcctccggagccgtgaatgctgctaatcccaacctccgagcgtgtgcgcacaaaccagtgttgctacgtcgtaacgcgtaagttggaggcggaacagactactttcggtactccgtgtttccttattttatattactcaatct

SEQ ID NO: 790 - DNA, 652 bp, Human rhinovirus A
  misc_feature 1..652: note = strain HRV-A44_p1191_sR1286_2009 polyprotein1
  source 1..652: mol_type = genomic DNA
gagcctggtggagcgtatcaatctaaaccggggagacagaagtgcttgaccgttaatgacttggatagccatctcctacatggagttgtactctattattccggtaatcttgtacgccagttttatatcccttccccctttgtaacttagaagttaagcacacagaccaataggtgatggctatccaagtcattaacggtcaagcacttctgtctccccggtttagattgatacgctccaccagggcgaaaacaatctaaatcgttatccgcaaagtgactacgcaaagcctagtaataccttgaagaacttatggttggtcgctccactaaaccccatagtagacctggcagatgaggctagaagtaccccactggtaacagtgttctagcctgcgtggctgcctgcacaccctttgggtgtgaagccatatttttgacaaggtgtgaagagccccgtgtgctcactttgagtcctccggcccctgaatgtggctaaccttaaccctgcagctagtgcatgcaatccagcatgttgctagtcgtaacgagcaattgcgggatgggaccaactactttgggtgtccgtgtttcactttttaccttttatttgcttatggtgacaatatatatagtacatatatattggcatc

SEQ ID NO: 791 - DNA, 654 bp, Simian enterovirus J103
  misc_feature 1..654: note = isolate cg8227 polyprotein gene, partial1
  source 1..654: mol_type = genomic DNA
tttgtacgcctattttaaaacccctacccccgtaacttagaagcatttgacacaagttcaatagtaggaccatcatccaggtggttcatcgaacaagcacttctgttaccccggtcctagtacctgtgaagctgtacccacggcggaaggggaaaacgatcgttacccggctatctacttcgagaagcctagtaacagcattgaaactcttgagcgttgcgttcagcacagtaacccctgtgtagctttggctgatgagtctgggcattccccactggcgacagtggcccaggctgcgttggcggccaaccgatccgggcaaccgggtcggacgcttatttgtggacatggtgtgaagagcctattgagctagatagtagtcctccggcccctgaatgcggctaatcctaactccggagcaaatgcacgcaacccagcgtgtagtttgtcgtaacgcgtaagtctggagcggaaccgactactttgggtgtccgtgtttcctgttttaccttatttggctgcttatggtgacaatatagtattgttaccatatagctattggattggccatccggtgaacagatttcgacaaactctattttactgttgttcacagcctaaagttacaaatcttactctgactcagtagtaatc

SEQ ID NO: 792 - DNA, 655 bp, Human parechovirus 1
  misc_feature 1..655: note = isolate 152478, complete genome.1
  source 1..655: mol_type = genomic DNA
ctggatttctctaggagagtccctttcccagccctgaggcggctggtaaataaaagcctcaattgtaacaaacatctaagaacactacattaaccccatgcctggtctccactagttgaaggcgacttgcaataagatgagtggaaacaagacgcttaaagcatggtgtaaatcaacttttctaacctgtacattgtatggggtggcagatggcgtgccataattctatcagtgagataccacgcttgtggaccttatgctcacacagccatcctctagtaagtttgtgagacgtctggagacgtgtgggaacttattggaaacaacattttgctgtaaagcatcctactgccagcggaacaacacctggtaacaggtgcctctggggccaaaagccaaggtttaacagaccctctaggattggtttaaaacctgagatgttgtggaaaatattcagtacctaccaatctggtagtagtgcaaacactagttgtaaggcccacgaaggatgcccagaaggtacccgtaggtaacaagtgacactacggatctgatctggggccaggtacctctatctaggtgacctggttaaaaaacgtctagtgggccaaacccgggggggaccccggtttccttttattttatcaatgccact

SEQ ID NO: 793 - DNA, 655 bp, Simian enterovirus 46
  misc_feature 1..655: note = isolate cg4119 polyprotein gene, partial cds.1
  source 1..655: mol_type = genomic DNA
ctgttttatctcccctcccccgtaacgttagaagattaaacaaatgacaaatagcaaatccaccaacccaggtgggttttcgtcaagcacttctgtttccccggacctagtaccaataggctgtacccacggctgaaagggaaaacgttcgttacccggctacctacttcgagaagcctagtaccatcattgaatgtctcaagtgttacgctcagcacaaccccagtgcagttcaggctgatgagtcaccgaatcccccacgggcgaccgtgtcggtggctgcgttggcggcctgcctgcgagttccactcgcaggacgcttgattcatgacatggtgcgaagagcctattgagctaggtagtagtcctccggcccctgaatgcggctaatcccaaccacggagcatccactgacaaaccagtcagcagggtgtcgtaatgggcaactctgtggcggaaccgactactttgggtgtccgtgtttcctgttttatttactctggctgcttatggtgacaatttacggattgttaccatatagctattggattggccatccggattacaagcaagtaatattactgtttgtgggatttttacccttgaatcacattaactacttcattctactaatagtcttgaagttaagtacatc

SEQ ID NO: 794 - DNA, 656 bp, Rhimavirus A
  misc_feature 1..656: note = complete genome.1
  source 1..656: mol_type = genomic DNA
cgaattccggacatctcctttcgggggcgagcgtcaccgtgcccctcatggaggcaactgtgcctctaatcggtgacccactgagaaaattttctttctacgtggctaaacaatgcaactttataataacacaaatttaatgcttaatcttaacaccaaagatttgaacatatgtttggaaagtggcacacttcaaacattgcatagttgctaggggtgaagtccctttaaggggttgcagaggatctttcctctttatgagcggctaggagtatcttcttgatattatgtggtcgtgcaactcacttcccagatgtatgacggtgtactaagcgattggaactagtcataacctctttgaattttggtattgcgagtctagcagggggatatttaccgctaaagggtgacacactcgtgagggtggcctttggtgtgtgtatatttattccgcccatcttgcatggggtgctaaaattctaatgctgtgaaataaccattttctgaatacattctctacatttggagtcaaatatgaggaatgccactcaggtacccttgacatgatcttggatctgagagtgggctaattatctaattatttggcgactttctaaaatcttctgtttttagtggtgacaatttatggttataaa

SEQ ID NO: 795 - DNA, 656 bp, Rhinovirus C
  misc_feature 1..656: note = strain 20693_83_HRV-C polyprotein gene, complete cds.1
  source 1..656: mol_type = genomic DNA
gaaaggaggggaaggggttttaaaacagtcgaccggttgttcccaccggcgagcacactgtgcgttgtacactggaattacggttcctttgtatgcctgttttataaccccttcccctcctttctatcacctctaacttccatgtaacttagaagcaacgtacatgagcccaataggagcggctaatccacagccgtatagggcaagcacttctgttaccccggatgtgtgaatagacttctcacgaggttgaagctgaagcattcgttatccgcgcttgtactgcacggaaattagtagcactcttgccagcctcatggtgtttcgctcagcgtttcccccacgtagatcagggcaatggggctacacaacccccaccggcgacggtggtgtagcccgcgtggtgccccgcccgagctactagctcgggacgccatgatgaagacagggtgtgaaggttcgagtgcgctacaagtgagtcctccggcccctgaatgcggctaaccttaaccccgtagctgtggtgtgcatgccagtacaaacacagtcgtaatgggtaactacgggatgggaccgactactttgggtgtccgtgtttcactttttcctttaaatttgtcttatggttacaggtttatgcaaatagatctgtaatc

SEQ ID NO: 796 - DNA, 657 bp, Human enterovirus 73
  misc_feature 1..657: note = isolate 2776-82 polyprotein (pol) gene,1
  source 1..657: mol_type = genomic DNA
gcggccccctcccccactgtaacttagaagcaatgcataccgatcaacagtgggcgtggcaaaccagccatgtcttgatcaaacacttctgtttccccggactgagtatcaatagactgctcgcgcggttgaaggagaaaacgttcgttatccggccaactacttcgagaagcttaagtaacatcatgaaagttacggagcgtttcgttcagcacatccccagtgtagatcaggccgatgagtcactgctctccccacgggcgaccgtggcagtggctgcgctggcggcctgcccatggggtgacccatgggacgctctaagatggacatggtgcgaagagcctattgagctagttggtagtcctccggcccctgaatgcggctaatcccaactgcggagcatgtgtcttcactccagaagatagcatgtcgtaacgggcaactctgcagcggaaccgactactttgggtgtccgtgtttccttttattcctacactggctgcttatggtgacaattcaagaattgttaccatatagctattggattggccatccggtgagcaatagagcaattatctaccaatttgttggatttgtacccctcgattttacagccattggaacacttaaatacatcttagtactcaacacgacaaa

SEQ ID NO: 797 - DNA, 660 bp, Enterovirus SEV-gx
  misc_feature 1..660: note = complete genome.1
  source 1..660: mol_type = genomic DNA
acatgggccagcccaccacacccactgggtgtagtagtctggttctatggaacctttctacgcctcttttgcttccctcccccatttctccttcgattgctccacctgtgatctttgcaacttagaagaaataatgaacccgcacaatagcgggcgctgagccacagcgtcaatgtgcaagcacttctgtttccccggaatgggcccataggctgtacccacggctgaaagggaccggcccgttacccgccttggtactgcgagaatgttagtaactccctcgatagctttaggcgttacgctcagccctttgagcccgaagggtagttcgggtcgatgaggctcgtcattccccactggcgacagtgtgacttgcctgcgttggcggcccggggtggggggcaacccccatccacgcctactgaaggacagggtgtgaaggcgctattgcgctactaaggagtcctccggcccctgaatgcggctaacccgaaccccgagcccacggtggtaaacccgccacaagtgggtcgtaatgagtaatttggggcagggaccgactactttgggtgtccgtgtttcctgtttttccatacgatggctgcttatggtgacaaccataagcaattggattggccatccggtgttcatattgcgaat

SEQ ID NO: 798 - DNA, 662 bp, Encephalomyocarditis virus
  misc_feature 1..662: note = isolate SG-G15150-19, complete genome.1
  source 1..662: mol_type = genomic DNA
ctctttccgagggaaaggaagcgccccagtctgcattcacaagctggtgcttccccgcccagactaagcgccgcacggagggaatcagggtcccggtgccccccctccctaacagtactggtcgaaaccacttgggataagaccggtgtcttgtttagtctatatgttatttctactcatctggtttctttgccagatgatgggcagtgtaaccttgccctcgcttcttgcggagaattcctagtggtctttccactctcgacaaaggaattcatgttccaccaaaagttgtgaagaaagcaagtcctatggaagctttctgatgactgatgatgactgtagcgaccctttgcaggcagcggactcccccacctggtaacaggtgcctctgcggccaaaagccacgtgtttgacagacacctgcaaaggcggcacaaccccagtgcctcatcaaaagtctgatgactgtggaaatggtcaactggcttttcttaagcaaatttggtgtttggggctgaaggatgcccggaaggtaccacactggttgtgatctgatccggggctttagtgcatgtgctttacacatgtagctaaggttaaaaaacgtctaggccccccaaccacggggacgtggttttcctttgaaaaccacaatttataat

SEQ ID NO: 799 - DNA, 663 bp, Norway rat hunnivirus
  misc_feature 1..663: note = isolate NrHuV/NYC-E21 polyprotein gene,1
  source 1..663: mol_type = genomic DNA
gccctcacctgtcaattgggaccaccactttcagtgaccccatgcgaagtgctgagagaaggaagctttcttacccttcatttgtgaacccactagtctaagccgcttggaatacgatgagtggaaaagttcattctaaatggagtgaaacatgcttaatttttctagtcaggcacacccttgtgtgtctgagcgccactgtcttggcgtaagtcttcagagtgtcacgccgtgcttgcggatctcacgtggcacatgacgaggctctcgctggaactgtgagtctggaacaagtgaagtaacagtgaaaagtgcatgatcacacattgtgtgggctatgagcctgcggaacaacaactggtaacagttgccccaggggccgaaagccacggtgttaacagcaccctcatagtttgatccatcccaggatggtgatgttgtgtacctagtaattgccaatttgcttgttttggtatcatggcataccggagagtttgcgggtgaaggatgcccagaaggtacccgtaggtaaccttaagagactatggatctgatctggggccctgtctggagtgctttacacacagctcagggttaaaaaacgtctagcccgcatcaacccgagggattcgggttttccctttaaaaacccgactggcattt

SEQ ID NO: 800 - DNA, 663 bp, Human enterovirus 109
  misc_feature 1..663: note = isolate NICA08-4327, complete genome.1
  source 1..663: mol_type = genomic DNA
tttaaaacagcctgggggttgttcccacccccagggcccactgggcgttagtactctggtatcgcggtaccttagtatgcctgttttatgtctcctttcccccgcaactttagaagtaatcaagttatggctcaacagtcgccacacccccagtgtggttccgagcaagcacttctgttccccggttgcgtcttatatgctgtgtgaacggcagaaagggacaatatcgttatccgctcaactactacgggaagcctagtaccaccatggattgacctgaaagttgcgttcagcgcacccccagcgcagctcaggccgatgaggctccgaataccccacgggcgaccgtgtcggagcctgcgttggcggcctgcccacgttgcaaaacgtgggacgctcatttcatgacatggtgcgaagagcctactgtgctagttgagagtcctccggcccctgaatgtggataatcctaaccactgaacctacgggcgcaaaccagcgtctggtaggccgtaacgcgcaagtcggtggcggaaccaactactttgggtgtccgtgtttccttttatctttttgaatgtttatggtgacaattgttgtgtacagttgttaccatagtttgcattcagaaataaacctaacactttccaattatttgttaca

SEQ ID NO: 801 - DNA, 664 bp, Swine picornavirus
  misc_feature 1..664: note = Tottori-WOL gene for polyprotein, complete cds.1
  source 1..664: mol_type = genomic DNA
cccctttacgtaactgcaacttaaagagtaccctactgcattggatgtgtggtaaacttttacgcacacatttgtagtagtgttagttatgttctacctaatgagtatgcatgcacccgtcgaaacacgcttgtgataagataggtgagtccatgtgactaatctcattaagataaataagcaccctacaacgcacggcacgctcgtgtcttccgtgcggggccgggacaacagcggcctaaatcttctaggtgaccaccatgcttttgggactatggcaccactgtggacgtgagtacctggcagtaagtctgtgaaaagatggaaggtgtcccaagctatggggcgtatgcatatagcctgcggaacaaacaacggcgacgttgtccccagggcccaaaaggcacgtggataagatccacctatatgtttaccccatagtgtaagtcactggaagtcctagtaatggatgtctggagtaaggctcacggggtagggcgaaggatgcccagaaggtacccgtaggtaaccttaagagactatggatctgatctggggaccggatggcgccatcaccatgacgtggaggccggtttaaaaaacgtctaagcccgaccaacaacctaggggactaggttttccttttttattcatgtatgacgtt

SEQ ID NO: 802 - DNA, 664 bp, WUHARV Enterovirus 1
  misc_feature 1..664: note = polyprotein gene, complete cds.1
  source 1..664: mol_type = genomic DNA
ccacgcggcgttagtactctggtatcacggtacctttgtatgcctgttttatctcccttcccccgtaacgttagaagaaaacacaaccgacaactagcagattcaccaatccaggtgagtcttcgtcaagcacttctgtttccccggacttagtaccaataggctgtacccacggctgaaggggaaaacgttcgttatccggctacctacttcgagaagcctagtaccaccattgaatgtctcaagtgttacgttcagcacaaccccagtgtagttcaggtcgatgagtcaccgaattccccacgggcgaccgtgtcggtggctgcgttggcggcctgcctgcgggtttcacccgcaggacgcttgattcatgacatggtgcgaagagcctattgagctaggtagtagtcctccggcccctgaatgcggctaatcctaaccacggagccatgcgttacaatccagtaacgttgtggtcgtaacgagtaattctgtggcggaaccgactactttgggtgtccgtgtttcctgttttactcattttggctgcttatggtgacaatctagggttgtcatcatatagcgattggattggccatccggatttgtctttgtgtgatttatctcttgctcacaagcaattttcataggtcatagcatcatc

SEQ ID NO: 803 - DNA, 665 bp, Pelodiscus sinensis picornavirus 1
  misc_feature 1..665: note = strain CNSR2011, complete1
  source 1..665: mol_type = genomic DNA
ttcaaatggcccctgggttgatacccagtggtcatttggacactttggtaaggaggtgtaattatccttcccatgtggaacctagtgcttaggtttactttatatgttctttgtttgtcctttgtactttctatcgggcaatcttgttgttcaatacaatatgtatttgaactgcctaagataaattcagttttcaaccaacccctctcttggggttgtgtctttctttctttcttatatcctcttaagctgacttacttgctaatccgactcctcgtcaacgggagggtaaagcagtatcactagggtattgtgatgtaggagaaaaagtaagtagagatagtgcatgtaacgaaagtgacttggtactttaaactctcttaatcccaaagtgtggtattggtcatgttggagtaggctacgggtgaaactccttcacatttagtaatgtgttcacacgctaacgctacggtagatgacagactaggtcttattctcaacgtagggggacgggtgtatgttcatgattagccacatattaaggttttgaggggctgagtcatataagtatgtgcattaatttctggtactggtccctggggactggcccttttctaggttgattttagtttccccaatttttaaaaactaatgagatttacgac

SEQ ID NO: 804 - DNA, 666 bp, Niviventer confucianus hunnivirus
  misc_feature 1..666: note = strain Wencheng-Nc42-11
  source 1..666: mol_type = genomic DNA
cggcggctgagatgatgttcattctaatggagtgaaacatgtctttgattttctagtgcgtgttaggctttctagcacgcagcggcactgtcttgccgtaactctccagaccgtcacgccgtgcttgcggatctcacgtgccggatgacaaggctgtagctggaactgagtgtctagtgcacattgtgtaacagtgaaaactttgtgatcaccgaaaggtgggctagtagcctgcggaacaacaactggtaacagttgcctcaggggccaaaagccacggtgttaacagcaccctactagtttgatggaagcaattcctgatgttgcagagctagtaattgccaagctttgtacattagtatctcggcataccgtgcagtctgtgccagtgaaggatgccctgaaggtacccgtaggtaaccttaagagactatggatctgatcaggggctctctccgtactgctttacaggcggctgagagttaaaaaacgtctagctggccccagcccaagggattgggctttccctttaaagcccacaactcgcatatggtgacaataattgctgttcagacgaacagtgttattgttgtctattctcagagctttttccagacgcactcacacaacggaacttcttggcaagcaaatccaacaacagtcaat

SEQ ID NO: 805 - DNA, 666 bp, Seneca valley virus
  misc_feature 1..666: note = isolate SVV-001 polyprotein gene, complete cds.1
  source 1..666: mol_type = genomic DNA
tttgaaatggggggctgggccctgatgcccagtccttcctttccccttccggggggttaaccggctgtgtttgctagaggcacagaggggcaacatccaacctgcttttgcggggaacggtgcggctccgattcctgcgtcgccaaaggtgttagcgcacccaaacggcgcacctaccaatgttattggtgtggtctgcgagttctagcctactcgtttctcccccgaccattcactcacccacgaaaagtgtgttgtaaccataagatttaacccccgcacgggatgtgcgataaccgtaagactggctcaagcgcggaaagcgctgtaaccacatgctgttagtccctttatggctgcaagatggctacccacctcggatcactgaactggagctcgaccctccttagtaagggaaccgagaggccttcgtgcaacaagctccgacacagagtccacgtgactgctaccaccatgagtacatggttctcccctctcgacccaggacttctttttgaatatccacggctcgatccagagggtggggcatgacccctagcatagcgagctacagcgggaactgtagctaggccttagcgtgccttggatactgcctgatagggcgacggcctagtcgtgtcggttctataggtagcacatacaaat

SEQ ID NO: 806 - DNA, 666 bp, Simian enterovirus SV4
  misc_feature 1..666: note = strain 1715 UWB, complete genome.1
  source 1..666: mol_type = genomic DNA
ttaaaatagctgctgggttgttcccatccagcaggcccactgggcgtgatactctggtattgcggtacctttgtatgcctattttacctcccttccccctgaaacttagaagaaagaaacaaacacgctcactaggtacactgcatccagcagtgtaatgagcaagcacttctgtttccccggaagggatatatggtacgctgtgcaaacggcggaaattaatcctaccgttaaccgcccatctactccgagaagcctagtacctaattgaacttatcaatggagttgcgctcagcaggtgaccctgacctgccagctccggctgatggacctgggcatcccccacaggcgactgtggcccaggtcgcgtggcggccggcccactcttttgagtgggacgccttgataatgacaaggtgggaagagcctattgggctagctggtttcctccggcctcctgaatgcggctaaccctaaccccggagcatatggtggcaacccagccactggtatgtcgtaacgcgtaagtctgggatgggaccgactactttggagagtccgtgtttccattattttctttattgaatcttatggtgacaaattgggagttactcgggtgacgattgattattacttctgaaaacgtagagatatagaatcaacaca

SEQ ID NO: 807 - DNA, 667 bp, Picornaviridae sp.
  misc_feature 1..667: note = rodent/RL/PicoV/FJ2015 polyprotein gene,1
  source 1..667: mol_type = genomic DNA
gggtttctctgccctgtgctttggacgcccgccatggcgttaaactggcaatccccccttttccctacccgtaactaagtttttcctcggtcctttaggctgctaagacgcttgttgctacagcatattggaaccaccgagtcctccataagtaatcatttccacctctttgggtgtctatgcccttagagacggtttggagccccgttgactatgtcagagtgtgtcggtagcaggctttctgctctggacccatgccggccacacctcccagtagtgttgtgaaggaagtaagggattagtgaaaagattaggaatgttgccttggaatgtagcgattactgtaggtgagcggacttccccgggtggtaacacccgcctctcaggccaaaagccacggtgttaacagcacccctacagtaggccactaccccgtggtctccaagaatacagacctcttcttagtaactatccccctagctttcctgaagcatgctgctgtaaaggctaaggatgccctgaaggtacccgcaggtaacgttaagacactgtggatctgatcaggggcttgagtactgaagctttacagaagtagctcaagttaaaaaacgtctatgcctttcccccacgggagtgggggttcccccacacaatttcaacaggcact

SEQ ID NO: 808 - DNA, 667 bp, Canine picornavirus
  misc_feature 1..667: note = strain 6D, complete genome.1
  source 1..667: mol_type = genomic DNA
ttatttttcaaaatgccactggcattacaccatattcgtatggtgtaatgtcagtggttggatgctcagtcctgagggactgtgcatccagtggttaagagccacattctttatttatcaactattgatctttgtaactaagtttaagccagagttctattatggttccacatccagtgggattcagaacaagtacttctgttaccccggtcattattagctgttaagacgtacccacgtctgaaggctgagaagatcgttacccggctgttgtctacgggaaggttagtaacttttagtgaaaggtgatttcattgatccgagaggtgaccccgacctctcagaaactagtgatgagtgtccacatccctcttatggtaacataaggtggtcgctgcgctggcactagggcccaaaaggcatgaatgaaccaagatctgattgtgaagacccaactgtgcacttcagtattcctccggcccctgaatgcggctaatcctaacccatctgcatgtgcctacaacccagtaggtagcatgtcgtaatgcgtaagagatggatggaaccgactactttgggtgaccgtgtttcttttatttttatcaagtctcttatggtcacaagcatagaaaacaagatgcctgtgatcacacgtgagacatccaat

SEQ ID NO: 809 - DNA, 667 bp, Human parechovirus 17
  misc_feature 1..667: note = isolate 157Chzj058, complete genome.1
  source 1..667: mol_type = genomic DNA
cttgtttccactcattttattgcaagttgccttcaactagtggagaccaggcatgaggttaatgctataatcttagatgtttgttacagttgaggtttttattaacctcatgcctggtctccactagttgaaggcaacttgcaataaaatgagtggaaacaagacgcttaaagcatggtgtaaattagcttttctaacccacactttgtgtggggtggcagatggcgtgccataactctattagtgagataccacgcttgtggaacttatgctcacgcagccatcctctagtaagtctgtgagatgtctggtgacgtgtgggaacttattggaaacaacattttgctgtaaagcatcctattgccagcggaacaacacctggtaacaggtgcctctggggccaaaagccaaggtttaacagaccctttaggattggttcataacctgaaatgttgtggaagatacttagtacctaccgatctggtagtattgcagacactagttgtaaggcccacgaaggatgcccagaaggtacccgtaggtaacaagagacactatcgatctgatctggggccaggtacctctatcttggtggcctgttaaaaaaacgtttggggggccagcccggggggggtccccgggtttcttttatcttacaactgctata

SEQ ID NO: 810 - DNA, 668 bp, Picornaviridae sp.
  misc_feature 1..668: note = isolate cra070pic1 genomic sequence.1
  source 1..668: mol_type = genomic DNA
ctgtctcttatacagatgtcagtcagccaacaggctggctgggatgtgcccattttggacgcatgcccccgcgagagtggggcaccttgggggcgggtgagccccccatgttcgccaggtgttactgtcggcccttttatagaggcttttgtgggtatcagaagccgtttttgggtttggtgatggcgaccagcattgtcttgctggttgtgactgtctttttctcctgtttcttttcttattatctccaggctgtctccatgccaatgctgctaccgctgcgcccggcggggttaacccctggattagccaggggctgtggccgctagaagtggagatgcggtgactaatgtagtgtcatgggtaattgatgaggtcatggctgtggtgtggattggtgatcttccattgggggtaggctacgggtgaaacccccacgattgcaccatactatgtatggtgtccggtggtacgtgaaccccctggataggtttgagttttacgacaagaaagcctcaacagggagcgcaggcacggtacgcgtggatgcgccctccactaagcagtcatgcatcatttgttgtctgtcacactactaagccgtaccctatgagtttagggctactcaggggcatttaggtttttaaagcgcatgttgtaaatcactt

SEQ ID NO: 811 - DNA, 671 bp, Human parechovirus 1
  misc_feature 1..671: note = isolate 2007-863, complete genome.1
  source 1..671: mol_type = genomic DNA
cgtcgggccttataccccgatttgctgagcttctctaggagagtccctttccccagccagaggtggctggtcaaataataccaattgtaacaaaacatctaagatacaacaaccacacacctggtctccaccagtcgaaggcaactagcaataagataggtgggttgagacgcttaaagtgtgtagtacatttacttttccaacctgtgctttgcacagggtggcagatggcgtgccataactctaatagtgagataccacgcttgtggaccttatgctcacacagccatcctctagtaagtttgcaagacgtctgatgacgtgtgggaacttgttggaaataatagtttgctgtaaagcatcccattgccagcggaatcacatctggtaacaggtgcctctggggccaaaagccaaggtttaacagaccctttgggattggttcaaacctgaactattatggaaaatatttagtacctgccgatttggtagtagtgcaaacactagttgtaaggcccacgaaggatgcccagaaggtacccgtaggtaacaagtgacactatggatctgatctggggccaactacctctatcttggtgagttggttaaaaaacgtctagtgggccaaacccgggggggaccccggtttccttttatttaataatgccact

SEQ ID NO: 812 - DNA, 672 bp, Ista virus
  misc_feature 1..672: note = isolate OTU18 RNA-dependent RNA polymerase gene,1
  source 1..672: mol_type = genomic DNA
gggagagcttattgctctcccgccgtcttgcctatctataggtccaatctgtgtgatattccctaattaattaggtttgtcagttttcagatggatataatagtcattaatttatatttaatcatattagttcaaagggctataacttacccctgaatagtaacaaaatataaaatactcggtaccgaccggggtccgatctaatactaattattatatgatttgaccttatgataagttcaagaagtttctcttgattccagataaacccccctggaatttccccttatctttttcatataataactagtaatttcggatgcataaatactagttgtaagtcaaggtataattattaaaccgaacatttaattacttattagcactaatgaatgcccccatataaatagttatgggtatgagttcgcgattttcaacaacgatgcatgatttagagtaatgttaataagtgattttattagtaaagttttctaatgtatatgtcggcagttgcctacaacacgttaacctctgtgttaaaacctcgatgatatgtttatccatagacttcgggcatatacttctaaagtatgcgtgttcttctgaaaactcggtatgattgtcgcatgagtaagatagcgttccaatcaattccttttaatttctttcacg

SEQ ID NO: 813 - DNA, 672 bp, Senecavirus A
  misc_feature 1..672: note = isolate Sichuan HS-01, complete genome.1
  source 1..672: mol_type = genomic DNA
ccctttttgaatggggggctgggccctcatgtccagcccttcctttccccttccggggggtaaaccggctgtgtttgctagaggcacagaggagcaacatccaacctgcttttgtggggaacggtgcggctccaattcctgcgtcgccaaaggtgttagcgcacccaaacggcgcatctaccaatgctattggtgtggtctgcgagttctagcctactcgtttctcccctgctcactcatttacacacaaaaactgtgttgtaactacaagatttggccctcgcacgggatgtgcgataaccgcaagactgactcaagcgcggaaggcgctgtaaccacatgctgttagtccctttatggctgcgagatggctatccacctcggatcactgaactggagttcgaccctccttagtaagggaaccgagaggccttcccgcaacaagctccgacacagagtccacgtgattgctaccaccatgagtacatggttctcccctctcgacccaggacttctttttgaatatccacggctcgatccagagggtggggcatgatccccctagcatagcgagctacagcgggaactgtagctaggccttagcgtgccttggatactgcctgatagggcgacggcctagtcgtgtcggttctataggtagcacatacaaat

SEQ ID NO: 814 - DNA, 672 bp, Human enterovirus C117
  misc_feature 1..672: note = strain LIT22, complete genome.1
  source 1..672: mol_type = genomic DNA
tttaaaacagcttgagggttgttcccaccctcaaggcctactgggcgctagtacaccggtatctcggtacccttgtacgcctgttttatcttccctccccaaaagtaactttagaagcaagtaaactcacagctcaatagccgtcgcaccgccagtgcgactatgagcaagcactcctgtttccccggttgcgtcctatatgctgtggaaacggcagaaggggacaatatcgttacccgcttatctactacgggaagcctagtaacaccattgaacactttgagggttgcgttcagcgccaaacccggcgtagctcaggccgatggggcttcggaatccccacgggtgaccgtgtcgaagcccgcgttggcggcctgcccacaccaatgggtgtgggacgctcaatttgtgacatggtgcgaagagcctactgtgctaggtgagagtcctccggcccctgaatgtggctaatcccaaccaccgaacccgtggttgcaatccagcaactagcgggccgtaatgcgcaagtcggtgacggaaccaactactttgggtgaccgtgtttcctttatctcttatattgcaattttatggtgacatttatagtatttaagtgttaccatatattgcgcaaacatattgtaataatacagagttactactgcagaaatc

SEQ ID NO: 815 - DNA, 673 bp, Falcovirus A1
  misc_feature 1..673: note = strain kestrel/VOVE0622/2013/HUN, complete genome.1
  source 1..673: mol_type = genomic DNA
taaaaggggacgcggtgtggcagctttggctgtcatgccgtgttctccttttaccccaaggactagccttgggggttttccaaattcctttccctgtaggctttacttctctttatctatcttttctgtaactaagttttgcctattctaaaaatattttagaatgtgtttggatgtaactaagtttgtgcctgccctaaaaatattttagggcttgtttggataacctcgtcccttgtgttcagtgccgcacaatttgctaggcactgttcacttcctttgtttgtccattatgtatgctaaggtatgaattccatcatatgcttagcctctacatgcataatcttattccctccctggtgcaaactacgcccccaacatatgtgaatcttttaagcatattcctgaccccacacatatatatgtgttctcgtgaattcccccaccgtgaggtggtcacttggacgtggtgtgtgtcacacagcatatatatgatgcaggatgttgtttttaagataagcatatgtccttagtgctttgcatcatttcctccacaccccgtgaatgcggctaatcttaaccctgttgggtccgtgggtaaaccaacccattaaccacaggacggaaccgactactttcgggagtgtgtgtttctttttcttcttttgtcact

SEQ ID NO: 816 - DNA, 673 bp, Enterovirus J
  misc_feature 1..673: note = strain Sev-nj1, complete genome.1
  source 1..673: mol_type = genomic DNA
agggcccacgtggcgtagtactctggtatcacggtacctttgtacgcctattttacccccccttccccattgtaacttagaagataatcaaacagttcaatagtcgggctgccacccaggtagcttactgaacaagcacttctgttaccccggtcttagtacctgagaagctgtacccacggcggaaggggaaagtgatcgttacccggctatctacttcgagaagcctagtaacaccattgaacttgctgagtgttgcgctccacacagtaaccccctgtgtagctttggctgatgagtctgggcattccccactggcgacagtggcccaggctgcgttggcggccaaccgatccaggcaactgggtcggacgctgagtaacggacatggtgtgaagagcctattgagctagatagtagtcctccggcccctgaatgcggctaatcctaaccccggagcaggtacgcacaatccagtgtggagcctgtcgtaatgcgtaagtccgggacggaaccgactactttgggtgtccgtgtttcctgttttatttaccttggctgcttatggtgacaaactagtgttgtcatcatatagcgtttggattggccatccggttttgtacacgagtgtttcactacccgagactctatcacctctaccttattgagaaaa

SEQ ID NO: 817 - DNA, 675 bp, Human enterovirus
  misc_feature 1..675: note = isolate EV/Human/CMRHP35A/CMR/2014 polyprotein1
  source 1..675: mol_type = genomic DNA
gtattggtactggtttatactcccttcccctgtaacttagaagatataaaccaagttcaatagaagggggtacaaaccagtaccaccacgaacaagcacttctgtttccccggtaaagttgcatagactgtacccacggttgaaggcgactgatccgttatccgctcttgtacttcgagaagcctagtaacatcttggaatcttcgatgcgttgcgctcatcactcaaccccagagtgtagcttaggtcgatgagtctggacattccccaccggtgacggtggtccaggctgcgttggcggcctacctgtggtccaaagccacaggacgctagttgtgaacaaggtgtgaagagcctattgagctacaagagagtcctccggcccctgaatgcggctaatctcaaccacggagcaagtgctcacaaaccagtgagtggcttgtcgtaacgggtaactctgtggcggaaccgactactttgggtgtccgtgtttccttttatttttataatggctgcttatggtgacaatcacagattgttatcataaagcgaattggattggccatccggtgaaagtgagatatattatttatctttttgttggatttactccgattacttctttcacttacaaaatcatcaccacagttttgctaattagaaatacataccata

SEQ ID NO: 818 - DNA, 679 bp, Enterovirus C
  misc_feature 1..679: note = isolate 5-05 polyprotein gene, complete cds.1
  source 1..679: mol_type = genomic DNA
ggtacctttgtgcgcctgttttatactcccttccccgagtaactttagaagcaattcaacaagttcaatagagggggtgcaatccagcgccaccacaacaagcacttctgtctccccggtgactttacataagctgtacccacggctgaaagtgaatgatccgttatccgcttgtgtacttcgagaagcctagtaccaccttggaatctccgacgcgttgcgctcagcactctaccccgagtgtagcttaggttgatgagtctgggcattccccaccggcgacggtggcccaggctgcgttggcggcctacccatagctaacgctatgggacgctagttgtgaacaaggtgtgaagagccgattgagctactcaagagtcctccggcccctgaatgcggctaatcccaaccacggagcaagtgccttcaaaccagagggtggcttgtcgtaatgcgcaagttcgtggcggaaccgactactttgggtgtccgtgtttccttttattccattactggctgcttatggtgacaatcatagattgttatcataaagcgacttggattggccatccggtgaaatataaacacattgtctacttgtttgtcgggtttaccccactcactcagtccaccctcagcataataaacattgtgtcactgataagatattactactaca

SEQ ID NO: 819 - DNA, 682 bp, Human echovirus 1
  misc_feature 1..682: note = polyprotein precursor, gene, partial cds.1
  source 1..682: mol_type = genomic DNA
ggtacctttgtgcgcctgttttatatacccttccccctctacagtaacttagaagtttgaatcatacggtcaatagacaacccagtgcaccagctgggccctgaccaagcacttctgttgccccggaccgagtatcaataagctgctcacgcggctgaaggagaaaacgttcgttacccggccatttacttcgagaaacctagtaacaccatgaaggtagcgcagcgtttcgctccgcacaaccccagtgtagatcaggtcgatgagccaccgcactccccacgggtgaccgtggcggtggctgcgttggcggcctgcccatggggcaacccatgggacgcttcaatactgacatggtgcgaagagtctattgagctaaatggtagtcctccggcccctgaatgcggctaatcccaactgcggagcagatacccacacaccagtgggcagtctgtcgtaacgggcaactctgcagcggaaccgactactttgggtgtccgtgtttccttttattctcacattgactgcttatggtgacaattgaaagattgttaccatatagctattggattggccatccagtgacaaacagagcaattgtgtatctttttgttggtttcataccactgaactgcaaagttttgaaaacccttgacctcattttgctactcaacacaacaaa

SEQ ID NO: 820 - DNA, 683 bp, Caprine kobuvirus
  misc_feature 1..683: note = isolate 12Q108, complete genome.1
  source 1..683: mol_type = genomic DNA
tttgaaaagggggtggggggggcctcggccccctcaccctcttttccggtggccacgcccgggccaccgatacttcccttcactccttcgggactgttggggaggaacacaacagggctcccctgttttcccattccttcccccttttcccaaccccaaccgccgtatctggtggcggcaagacacacgggtctttccctctaaagcacaattgtgtgtgtgtcccaggtcctcctgcgtacggtgcgggagtgctcccacccaactgttgtaagcctgtccaacgcgtcgtcctggcaagactatgacgtcgcatgttccgctgcggatgccgaccgggtaaccggttccccagtgtgtgtagtgcgatcttccaggtcctcctggttggcgttgtccagaaactgcttcaggtaagtggggtgtgcccaatccctacaaaggttgattctttcaccaccttaggaatgctccggaggtaccccagcaacagctgggatctgaccggaggctaattgtctacgggtggtgtttcctttttcttttcacacaactctactgctgacaactcactgactatccacttgctctcttgtgcctttctgctctggttcaagttccttgattgtttttgactgcttttcactgcttttcttctcacaatccttgctcagttcaaagtc

SEQ ID NO: 821 - DNA, 683 bp, Foot-and-mouth disease virus
  misc_feature 1..683: note = - type SAT 2, isolate ZIM_22/20031
  source 1..683: mol_type = genomic DNA
cccccccataaagaacgttaccgtcttttccgacgttaaagggatgcaaccaaacgcctcttaccgtcctttccgacgttaaaggattgcaaccatacgacttgccttcttttccgaagtaaaaggatacaagcatacagttttgcccgttttcatgagaaatgggacgtccgcgcacgaaacgcgccgttgctctttgcattcttgtacaaacacgatcttgacgcaggaatcctagaccaacccaacccgtgcaactgcgagtttcgcccggtctttccgggtcttgagagacaaacagatgtactgagaccaactccacgattggtctactagcgggtactagtaacactcattttgcttcgtagcggagcacatgagcggtggggactcccccatggtaacatggacccaccgggccaaaagccacgcctcacggcctcatgtgtgtgcaaccccagcacggcaacttgtttgtgaaccacaccttaaggtaacactgagactggtacttggtttctggagacaggctaaggatgcccttcaggtaccccgaggtaacacgagacactcgggatctgagaaggggaccgggagttctatcaaactgcccgatttaaaaagcttctatgcctgaataggtgaccggaggccggcaccttttctttattttaaaccacttt

SEQ ID NO: 822 - DNA, 685 bp, Didelphis aurita hepatitis A virus
  misc_feature 1..685: note = complete genome.1
  source 1..685: mol_type = genomic DNA
cttttggagttctttggtctggggaactaaaataccagacccgcgtttgcctagcgatataggctttaattgttgtttgtcattgtgcgtttgatatgtgttttaatgtaaataataattctagcaggttctagttcttgatcatgtcctctttaaggcactcatttcaacttgctatctttcttttcttccttggttctccctacaccaaatgcactggccgctgcgcccggcggggtcaaccacatgattagcatgtggctgtaggtgttgaaggctgggacatgaacatcaatggaatagtgcgcatgcttactggggtccattgaagtagtgggatctttctattggggtaggctacgggtgaaaccccttaggttaatactcatattgagagataccttggataggttaactgtgctggatatggttgagtttaacgacaaaaagccatcaacagctgtggacagaacctcatccttagattgctcactatggatatgtgctctgggcgtgtttcttgcatgatggccattggtcaattcatgcctgggccaatgtaggattagccttaaattactttttaaaagtagcctcatttagctggactaatggtggggcgtatgatcctgcatttggcctctggggtaatcaggggcatttaggtttccacataatagcaaat

SEQ ID NO: 823 - DNA, 686 bp, Human enterovirus
  misc_feature 1..686: note = 113, isolate BBD-83 polyprotein gene, complete1
  source 1..686: mol_type = genomic DNA
caccccagaggcccacgtggcggccagtactctggtatcacggtacctttgtacgcctgttttatatcccttccccatgtaactttagaagcaattcacatagttcaatagagggggtacaaaccagtgccaccacgaacaagcacttctgtttccccggtgaagctgtatagactgtccccacggtcaaaaacggcagatccgttatccgctcatgtacttcgagaagcctagtagcatcttggaatcttcgatgcgttgcgttcagcactctaccccgagtgtagcttaggtcgatgagtctgggcataccccaccggcgacggtggcccaggctgcgttggcggcctacccatggctaacgccatgggacgctagttgtgaacaaggtgtgaagagcctattgagctacatgagagtcctccggcccctgaatgcggctaatcctaaccacggagcaagtactcacaacccagtgagcagcttgtcgtaacgcgtaagtctgtggcggaaccgactactttgggtgtccgtgtttccttttatttttgatatggctgcttatggtgacaatcaaagattgttatcatatagcttttggattggccatccggtgatttttgagactataacgtttacttgccttaccacacaacttagtactttgctacattcacacagtcata

SEQ ID NO: 824 - DNA, 687 bp, Echovirus
  misc_feature 1..687: note = E14, isolate ETH_P19/E14_2016 polyprotein gene, complete1
  source 1..687: mol_type = genomic DNA
tggtatcacggtacctttgtgcgcctgttttatctacccctccccaatgtaatttagaagcatatgaaaagcggtcaatagccggctcagtatgccaactgagtcttgaccaagcacttctgttaccccggactgagtatcaataagctgctcgcgcggctgaaggagaaaacgttcgttacccggccaattacttcgagaaacccagtaccaccatggaggttgcgcggcgtttcgctccacacaaccccagtgtagatcaggtcgatgagtcaccgcgttccccacgggcgaccgtggcggtggctgcgttggcggcctgcccatgggttagcccatgggacgcttcaatactgacatggtgcgaagagtctattgagctaattggtagccctccggcccctgaatgcggctaatcctaactgcggagcagacgcctacatgccagtgggtagtctgtcgtaacgggcaactctgcagcggaaccgactactttgggtgtccgtgtttccttttatctttgtattggctgcttatggtgacaattgaaagattgttaccatatagctattggattggccatccagtgacaaacagagcgattgtttactcatttataggttttgtaccacttgactacaaggccctaatcactctcaattatatattgatactaaatacgacaaa

SEQ ID NO: 825 - DNA, 687 bp, Enterovirus B
  misc_feature 1..687: note = complete genome.1
  source 1..687: mol_type = genomic DNA
tggtatcacggtacctttgtgcgcctgttttatttaccctctccccagtgtaacttagaagcacgcttcatgcggtcaataggcggctcagtataccaactgagtctcgaccaagcacttctgttaccccggaccgagtatcaataagctactcacgtggctgaaggagaaaacgtccgttacccggccaactacttcgagaaacctagtaccaccatgaatgttgcgcggcgtttcgctccgcacaaccccagtgtagatcaggtcgatgagtcaccgcatccctcacgggcaaccgtggcggtggctgcgctggcggcctgcctatggggcaacccataggacgcttcaatacggacatggtgagaagagtctattgagctagttggtagtcctccggcccctgaatgcggctaatcctaactgcagagcagattcccacacgccagtgggtagtctgtcgtaacgggcaactctgcagcggaaccgactactttgggtgtccgtgtttccttttattcttgtactggctgcttatggtgacaattgaaagattgttaccatatagctattggattagccacccagtgtctaatagagcaattatttatctttttgttggatttatcccacttgactataaagcacttgtaacgctcaagtatattatagatctcaacacaacaa

SEQ ID NO: 826 - DNA, 689 bp, Human enterovirus sp.
  misc_feature 1..689: note = C116 polyprotein gene, complete cds.1
  source 1..689: mol_type = genomic DNA
ttcccactccagaggcccacgtggcggctagtactctggtattgcggtacctttgtacgcctgttttataccccctccccaagtaactttagaagcaattcacaaagttcaatagagggggtacaaaccagtaccaccacgaacaagcacttctgtttccccggtgaagctacatagactgtccccacggtcgaaggtggcagatccgttatccgctcaagtacttcgagaagcctagtaccaccttggaatcttcgatgcgttgcgctcagcactctaccccgagtgtagcttaggtcgatgagtctgggcatgccccaccggtgacggtggcccaggctgcgttggcggcctacccgtggctaacgccatgggacgctagttgtgaacaaggtgtgaagagcctattgagctacttgagagtcctccggcccctgaatgcggctaatcctaaccacggagcaagtgctcacaaaccagtgagtggcttgtcgtaacgcgtaagtctgtggcggaaccgactactttgggtgtccgtgtttccttttattttcattatggctgcttatggtgacaatctaagattgttatcatatagcttttggattggccatccggtgatttgaaagagatatatttaccttattgttctaccatatctaattactcatcacagccacataatcaca

SEQ ID NO: 827 - DNA, 689 bp, Human enterovirus
  misc_feature 1..689: note = isolate EV/Human/CMRHP45/CMR/2014 polyprotein1
  source 1..689: mol_type = genomic DNA
gacagttgggtagcattgtgcgcctgttttatacaccctttcccacaatgcaacttagaattataactaaaccggccaatagaaagctcggcaaaccagccgagttctggtcaagcacttctgttgccccggactgagtatcaataagctgctcgcgcggctgaaggagaaaacgttcgttacccgaccaactacttcgagaaacccagtatcaccatgaaagctgcgtagcgtttcgttccgcacaaccccagtgtagatcaggccgatgagtcaccgcaatccccacgggcgaccgtggcggtggctgcgctggcggcctgcccatggggcgacccatgggacgcttcaataccgacatggtgtgaagagtctattgagctagttggtagtcctccggcccctgaatgcggctaatcccaactgcggagcagacgcttgcataccagcaagtagtctgtcgtaacgggcaactctgcagcggaaccgactactttgggtgtccgtgtttccttttattttttatactggctgcttatggtgacaattgaaagattgttgccatatagctattggattggccatccggtgacgaacagagctatcatatactcttttgttgggtttgtcccattgaactacaaggcattgaataccctcaatttcattctagcactaaatacaataaa

SEQ ID NO: 828 - DNA, 691 bp, Human cosavirus
  misc_feature 1..691: note = isolate Cosavirus-zj-1, complete genome.1
  source 1..691: mol_type = genomic DNA
tggaatactgcaaagatgtcaccgtgctatacacggtctttgaaccacacaccggctacttggcacttgcagcgcagtaagtttattttccacttatccttgatttttagccgtacagtttctctctgcatgggcggcgtgatactcccgttccttcttggacagattgcctccgcgttctctgtggatctcaaggtggtcaagtcactggtgagtagagcgaaggttaaggagatctgaggcattcccacgtggcgttgccgggagttgtagcaatgctgcgtgtgtgtacggatctcgcctcatggcgtcatgagcctcacacgccaaaagctctgtccgagaggacctacacagtcgagcaaccctagctccttcctacaaagccttgtgtgaatgagctcacgtttactcaactttattctctactcacatcaggcgccaaagatgtcttgaaggtacctcgtgtatctgggcacgagcaccatcgactacccggacttgcacttcggtgcagacacatgtggtgtcccagcccccttgctccggcaagggggctctgctcgctcagcacgagatctgatcaggagtctcccccggtgtaaagcaccttgacagggatttaaaaattgaccaaggccttgcacacaacctaggggactaggttttcctttttatttacaaggttttc

SEQ ID NO: 829 - DNA, 693 bp, Coxsackievirus
  misc_feature 1..693: note = A12, isolate 283 polyprotein gene, complete cds.1
  source 1..693: mol_type = genomic DNA
gttgtacccactcacagggcccactgggcgttagcactctggtaccccggtacctttgtgcgcctgttttatatccccccaagtaatgcacctcgatcaatagcgggcgtggcgcaccagccacgtcatgatcaagcacttctgtttccccggaccgagtatcaatagactgctaacgcggttgagggagaaaacgtccgttacccggccaactgcttcgagaaatccagtaacatcatgaaaattgcagagtgtttcgctcagcacttccccagtgtagatcaggtcgatgagtcaccgcgttccccacgggcgaccgtggcggtggctgcgttggcggcctgcctgtggggcaacccgcaggacgctctaatatggacatggtgtgaagaatctattgagccagttggtagtcctccggcccctgaatgcggctaatcctaactgcggagcacgcgccttcaatccagtgggtagcgtgtcgtaatgggtaactctgcagcggaaccgactactttgggtgtccgtgtttccatttattcttacattggctgcttatggtgacccatatagctattggattggccatccggtatcgaatagagcgattatctatcagtttgttggatttattccgttgagtgtgcagcagtatcgcactttgcttttaatagtgagactgaatagtgcaaa

SEQ ID NO: 830 - DNA, 693 bp, Coxsackievirus
  misc_feature 1..693: note = A2 clone V18A polyprotein gene, partial cds.1
  source 1..693: mol_type = genomic DNA
ctgattctgcggaatctttgtgcgcctgttttatactccctcccccaacacagtaacttagaagtcataaactcacatgaccaatagtgggcatgacgcaccagtcatgtctcggtcaagcacttctgtctccccggactgagtatcaataagctacttgcgtggctgaaggagaaaacgttcgttatccggctaactacttcgagaagcttagtagcaccatgaaagttgcggagtgtttcgctcagcacttcccccgtgtagatcaggtcgatgagtcactgcgttcctcacgggagaccgtggcagtggctgcgttggcggcctgcctatggggcaacccataggacgctctaatatggacatggtgtgaagagcctattgagctagttagtggtcctccggcccctgaatgcggctaatcctaactgcggagcacataccctcaacccagggggcagtgtgtcgtaacgggcaactctgcagcggaaccgactactttgggagtccgtgtttccttttattcttatattggctgcttatggtgacaattgagagattgttaccatatagctactggattggccacccggtgtctaatagagccctggtttaccaatttattggatttgtgcctttatcacccacagtttattcaaccttagtatttttgatatatcttaacaataggcg

SEQ ID NO: 831 - DNA, 693 bp, Coxsackievirus
  misc_feature 1..693: note = A20, isolate ETH_P16/A20_2016 polyprotein gene,1
  source 1..693: mol_type = genomic DNA
tacgttatcgcggtacccttgtacgcctgttttatactcccttcacccgtaacttagaagcaagcaaaccaagttcaatagaagggggtacaaaccagtaccaccacgaacaagcacttctgtttccccggtgaggttgcatagactgtacccacggtcaaaagcgattgatccgttatccgctctagtacttcgagaagcctagtatcaccttgggatcttcgatgcgttgcgctctgcactcgaccccggagtgtagcttaggtcgatgagtctggacacccctcaccggtgacggtggtccaggctgcgttggcggcctacctgtggcccaaagccacaggacgctagttgtgaacaaggtgtgaagagcctattgagctaccagagagtcctccggcccctgaatgcggctaatcccaaccacggagcaagtgctctcaaaccagagagtggcttgtcgtaacgcgcaagtctgtggcggaaccgactactttgggtgaccgtgtttccttttatttttatcatggctgcttatggtgacaatctcagattgttatcataaagcaaattggattagccatccggtgaaagtcaaatcgattatttacttatttattggtttttctccactaacaccacaaacacttaaaattattgaaatagtgctgctaattagataccactatcata

SEQ ID NO: 832 - DNA, 694 bp, Human rhinovirus A
  misc_feature 1..694: note = strain HRV-A82_p1126_sR1024_2009 polyprotein1
  source 1..694: mol_type = genomic DNA
cgtcgaccggggagacagaagtgcttgaccttatacagctggtatgctgcttgctattggtctgtgtgcaaaacttctaagttaaaattgggtctgggttgctcccacccagatcacccacgtggtgttgtgctctgttattccggtaactttgcacgccaattttataaccccttcccccatgtaacttagaagttttgcacacagaccaatagcaagcagcataccagctgtataaggtcaagcacttctgtctccccggtcgacgttgatatgcttcaacaaggcaaaaacaacagagatcgttatccgcaagatgcctacacaaagcctagtacctcctttgacggtgtttgtctggtcgctcaggtgcttccccagcactagacctggcagatgaggctagaaactccccactggcgacagtgttctagcctgcgtggctgcctgcacacccttctgggtgtgaagccaaatactagacaaggtgtgaagagccccgtgtgctcatcttgagtcctccggcccctgaatgcggctaaccttaaacccgcagccattgctcacaatccagtgggtagatggtcgtaatgagcaattgtgggatgggaccgactactttgggtgtccgtgtttcatgttttactttatgatttgcttatggtgacaatatatagtgatatatattggcatc

SEQ ID NO: 833 - DNA, 694 bp, Coxsackievirus
  misc_feature 1..694: note = A13 clone V7B polyprotein gene, partial cds.1
  source 1..694: mol_type = genomic DNA
tccggtattacggtacccttgtacgcctgttttatactcccctcccccgtaacttagaaaacttcaaaatcaaagttcaataggagggggtacaaaccagtaccaccacgaacaagcacttctgtttccccggtgatgttgtatagactgtctccacggttgaaaacgactgatccgttatccgctctagtacttcgagaagcccagtaccaccttggaatcttcgatgcgttgcgctcagcactcaatcccagagtgtagcttaggttgatgagtctggacatccctcaccggcgacggtggtccaggctgcgttggcggcctacctgtggcccaaagccacaggacgctagttgtgaacaaggtgcgaagagcctattgagctactagagattcctccggcccctgaatgcggctaatcccaaccacggagcaggtactcacaacccagtgagcagcctgtcgtaacgcgcaagtctgtggcggaaccgactactttgggtgtccgtgtttccttttatttttatatggctgcttatggtgacaatcattgattgttatcataaagcgaattggattggccatccggtgaaagttagacttatcatttacttgtttgttggattcactcctttgactaaattcacccctgacatcatcttagttgtgatactgattaggagacttcatcata

SEQ ID NO: 834 - DNA, 695 bp, Enterovirus sp.
  misc_feature 1..695: note = A71 gene for polyprotein, complete cds, isolate: 10857.1
  source 1..695: mol_type = genomic DNA
tctgattctgcggaatccttgtgcgcctgttttatatcccctttcccaatttgaaacatagaagtgatgcgcaccattgatcaatagtaggcgtaacgcgccagttacgtctcgatcaagcacatctgtttccccggaccgagtatcaatagactgctcacgcggttgaaggagaaagcgttcgttacccggctaactacttcgagaaacccagtagcaccatggaagctgcagggtgtttcgctcagcacttcccccgtgtagatcaggtcgatgagccactgcaatccccacgggcgaccgtggcagtggctgcgttggcggcctgcctatggggagacccataggacgctctaatgtggacatggtgcgaagagtctattgagctagttagtagtcctccggcccctgaatgcggctaatcctaactgcggagcacatgccttcaacccagaaggtggtgtgtcgtaacgggcaactctgcagcggaaccgactactttgggtgtccgtgtttcctttcattcttatatcggctgcttatggtgacaattacggaattgttaccatatagctattggattggccatccggtgtgtaatagagctattatatatctgtttgttggctttgtgccattaactttaaagtctacaactactcttgattttatattgaccctcaacacagttaaac

SEQ ID NO: 835 - DNA, 696 bp, Encephalomyocarditis virus
  misc_feature 1..696: note = EMCV-30 polyprotein gene, complete cds.1
  source 1..696: mol_type = genomic DNA
ttgccagtctgctcgatatcgcaggctgggtccgtgactacccactccccctttcaacgtgaaggctacgatagtgccagggcgggtactgccgtaagtgccaccccaaacaacaacaacaaaacaaactccccctccccccccttactatactggccgaagccacttggaataaggccggtgtgcgtttgtctacatgctattttctaccgcattaccgtcttatggtaatgtgagggtccagaacctgaccctgtcttcttgacgaacactcctaggggtctttcccctctcgacaaaggagtgtaaggtctgttgaatgtcgtgaaggaagcagttcctctggaagcttcttaaagacaaacaacgtctgtagcgaccctttgcaggcagcggaaccccccacctggtgacaggtgcctctgcggccaaaagccacgtgtataagatacacctgcaaaggcggcacaaccccagtgccacgttgtgagttggatagttgtggaaagagtcaaatggctctcctcaagcgtattcaacaaggggctgaaggatgcccagaaggtaccccattgtatgggatctgatctggggcctcggtgcacgtgctttacacgtgttgagtcgaggtgaaaaaacgtctaggccccccgaaccacggggacgtggttttcctttgaaaaccacgattacaat

SEQ ID NO: 836 - DNA, 697 bp, Echovirus
  misc_feature 1..697: note = E2, strain USA/2013-19511, complete genome.1
  source 1..697: mol_type = genomic DNA
ctagcactccggtattgcggtacccttgtgcgcctgttttatcctccctccccctaacgtaatttagaagcaagactttaacggtcattaggtggctcagcacaccagccgagtcaagaccaagcacttctgttaccccggactgagtatcaataagctgctcacgtggctgaaagagaaaacgttcgttacccggccaattacttcgagaaacctagtaccaccatggaggttgcgcagcgtttcgctccgcactaccccagtgtagatcaggtcgatgagtcaccgcattccccacgggcgaccgtggcggtggctgcgttggcggcctgcccatggggaaacctatgggacgcttcaatactgacatggtgtgaagagtctattgagctaattggtaatcctccggcccctgaatgcggctaatcctaactgcggagcagacacccacaagccagtgagcagtctgtcgtaacgggcaactctgcagcggaaccgactactttgggtgtccgtgtttccttttattccattactggctgcttatggtgacaattgagagattgttaccatatagctattggattggccatccggtgagcaacagagcacttatatatctctttgttggattcataccactagacaccaggagttttacgtctttggtttatattttaaggttgaacacagcaaa

SEQ ID NO: 837 - DNA, 697 bp, Human rhinovirus A
  misc_feature 1..697: note = strain HRV-A38_p1266_s3799_1999 polyprotein1
  source 1..697: mol_type = genomic DNA
aacagaagtgcttgaccattgacaatttggttaattgccgcctattggtcgttatgtactttcttctaagttacaaggggggggtgttaaaactggatctgggttgttcccactcaggtctcccacgtggagttgtactctattattccggtaatcttgtacgccagtttttacacccccccccttgtaacttagaagaaagtacataacgaccaataggcggcaattaaccaaattgtcaatggtcaagcacttctgtttccccggtcaagattgatacgctccaacagggcgaaaacaatcgagatcgttatccgcaaagtgcctacgcaaagcttagtaacattttggaaagtttatggttggtcgctcagctaaaccccatagtagacctggcagatgaggctagagactccccactggcgacagtgttctagcctgcgtggctgcctgcacaccctcacgggtgtgaagccatatactcgacaaggtgcgaagagccccgtgtgctcactttgagtcctccggcccctgaatgtggctaaccttaaccccgcagctagcgcatgcaaaccagtatgtagctagtcgtaatgagcaattgtgggatgggaccaactactttgggtgtccgtgtttcactttttaccttttatttgcttatggtgacaatatatatatagtatatattgacacc

SEQ ID NO: 838 - DNA, 697 bp, Human rhinovirus A
  misc_feature 1..697: note = strain HRV-A19_p1294_s6535_2000 polyprotein1
  source 1..697: mol_type = genomic DNA
ggcaccttgcggataacgatcgctgttgtttttgccctgttggagcatatcaacattgaccggggaaacagaagtgcttgacctattaaaactggatctgggttgttcccacccagatcatccacgtgatgttgtgctctattattccggtaattttgcacgccagtttttcatccctttccctttgtaacttagaagattgaacaaatgaccaataggacgcaacaaaccagttgtaataggtcaagcacttctgtttccccggtcaatgttgatatgctccaacagggcaaaaacaacagcgatcgttatccgcaaggtgcctacgcaaagcctagtagcactcttgaaattgcttggttggtcgctcaggtgcaaacccagcactagacctggcagatgaggctagaaaatccccactggtgacagtgttctagcctgcgtggctgcctgcacacccatttgggtgtgaagccaaacaatggacagggtgtgaagagccccgtgtgctcatcttgattcctccggcccctgaatgcggctaaccttaaacctgcagccattactcacaatccagtgagttggtggtcgtaatgagtaattgcgggatgggaccgactactttgggtgtccgtgtttcactttttaccttattttatgcttatggtgacaatatattgtaatatatattgacacc

SEQ ID NO: 839 - DNA, 698 bp, Simian enterovirus SV43
  misc_feature 1..698: note = strain OM112t (P12), complete genome.1
  source 1..698: mol_type = genomic DNA
ttaaaacagcctgtgggttgttcccacccacagggcccactgggcgctagtactctggtattacggtacctttgtacgcctgttttacaacccttcccccatgtaacttagaagcaacaaataaacgaccaatagcacactcaccaatccagatgagtgatggtcaagcacttctgttaccccgggcttagtaccaatagactgccatcgcggttgaaggggaaaacgctcgttatccggctctctactgcgagaagcctagtaacgccttagaaatgctcaagcgttgcgctcagcacaaccccagtgtagctcaggtcgatgagtcactgcattccccacgggcgaccgtggcagtggctgcgtttgcggcctgcctacagctctacgctgtaggacgcttgtgtatggacatggtgtgaagagcccattgcgctagggagtagtcctccggcccctgaatgcggctaatcctaaccccggagctggtgcttgtaaaccaacaagtggccagtcgtaatgggcaactctgggatggaaccgactactttgggtgtccgtgtttcctgttttatttaccttggctgcttatggtgacaatctagtgttgttgccatatagcgattggattggccatccggatattgttttagacacttgtgtttgtgagtagatctcttctgacataggatataaca

SEQ ID NO: 840 - DNA, 698 bp, Enterovirus sp.
  misc_feature 1..698: note = D68, isolate CF569939-FRA-2018, complete genome.1
  source 1..698: mol_type = genomic DNA
ttaaaacagccttggggttgttcccactccaagggcccatgtggcggctagtactctggtacttcggtacctttgtacgcctgttttatctcccttcccaatgtaatttagaagctcttaaatcaaggctcaataggcggggcgcaacccagcgctctcatgagcaagcacttctgtctccccggtgtggttgtataaactgttcccacggttgaaaacaacctatccgttatccgctatagtacttcgagaaacctagtatcacctttggattgttgacgcgttgcgctcagcacactaacccgtgtgtagcttgggtcgatgagtctggacataccccactggcgacagtggtccaggctgcgttggcggcctactcatggtgaaaaccatgagacgctaaacatgaacaaggtgtgaagagtctattgagctactatagagtcctccggcccctgaatgcggctaatcctaaccatggagcaagcgctcacaagccagtgagttgcttgtcgtaatgcgcaagtccgtggcggaaccgactactttgggtgtccgtgtttcactttttacttttatgactgcttatggtgacaatttgatattgttaccatttagcttgtcaaattaattacaaaaggttctaaatcttacttaccaacctgcattttgataaccttgatttgaaaattttaata

SEQ ID NO: 841 - DNA, 699 bp, Enterovirus J
  misc_feature 1..699: note = strain 1631, complete genome.1
  source 1..699: mol_type = genomic DNA
ttaaaatagcctcagggttgttcccaccctgagggcccacgtggcgtagtactctggtatcaaggtacctttgtacgcctattttatttcccttcccccacagtaacttagaagcttatctcatagttcaacagtagggtcactaaccaagtggctcagcgaacaagcacttctgtttccccggtcctagtacctgtgaagctgtacccacggcggaaggggaaaaagatcgttatccggccccctacttcggaaagcctagtaacaccattgaagcaatcgagtgttgcgctcagcacagtaacccctgtgtagctttggttgatgagtctgggcactccccactggcgacagcggcccaggctgcgttggcggccaaccgactcgggcaaccgggtcggacgctcgtttgtggacatggtgtgaagagcctactgagctagagggtagtcctccggcccctgaatgcggataatcctaaccccggagcacccacactcaatccagagtgcaggatgtcgtaacgcgtaagtctgggacggaaccgactactttgggtgtccgtgtttcctgttttacttactttggctgcttatggtgacaatctagtgttgttaccatatagctattggattggccatccggtgttttgaattgtgtgtttatactaattcttttacatatcacagacaaccaaat

SEQ ID NO: 842 - DNA, 699 bp, Enterovirus C
  misc_feature 1..699: note = strain 04-1450, complete genome.1
  source 1..699: mol_type = genomic DNA
tagtactccggtatcgcggtacccttgtacgcctgttttatactcccttcccccgtaacttagaagcaatcaaaccaagttcaatagaagggggtacaaaccagtaccaccacgaacaagcacttctgtttccccggtgaggttgcatagactgtacccacggttgaaagcgactaatccgttatccgctcaagtacttcgggaagcctagtaccaccttcggatcttcgatgcgttgcgctcagcactcaaccccagagtgtagcttaggctgatgagtctggacattcctcactggcgacagtggtccaggctgcgttggcggcctacctgtggcccaaagccacaggacgctagttgtgaacaaggtgtgaagagcctactgagctacttgagattcctccggcccctgaatgcggctaatcccaaccacggagcaggtggtcataaaccaatggctggcctgtcgtaatgcgcaagtctgtggcggaaccgactactttgggtgtccgtgtttccttttatcttttcattggctgcttatggtgacaatcatagattgttatcataaagcaaattggattggccatccggtgaaaatcagagcgattatatatttgtttactggatttacatcactgacaccatactctccaatactcattaggttggttttattaataaggtattattaccata

SEQ ID NO: 843 - DNA, 700 bp, Simian enterovirus SV19
  misc_feature 1..700: note = strain M19s (P2), complete genome.1
  source 1..700: mol_type = genomic DNA
ttaaaacagcctgtgggttgtacccacccgcagggcccactgggcgctagtacactgatatcacggtacctttgtacgcctgttttatctccctacccccatcgtaacttagaagcttaacaatacagatcaatagcctctgcaccaaaccaggtgtggaatgatcaagcatttctgttaccccggacctagtaccaataggctgtgtcaaacggctgaaggggaaaaagttcgttacccggccacctacttcgagaagcctagtagcatcactgaagctgtgaagcgttacgatcagcacaaccccagtgtagttcaggtcgatgagtcactgcattccccacaggcgactgtagcagtggctgcgttggcggcctgcccttggtctctgaccaagggacgctttggagtggatatggtgcgaagagcctattgagctaggtggtagtcctccggcccctgaatgcggctaatcctaaccccggagctggtgcacacaaaccagtgtgtggccagtcgtaatgagcaattctgggatggaaccgactactttgggtgtccgtgtttcctgtttcacttaccttggctgcttatggtgacaattgtatagttgtcatcatatagctattggattggccatccggatattattcttgtgtttatttgtgtaatttgatataatttagaaccctgtataaga

SEQ ID NO: 844 - DNA, 702 bp, Coxsackievirus
  misc_feature 1..702: note = A16, isolate CVA16/Shenzhen189/CHN/2017, complete1
  source 1..702: mol_type = genomic DNA
gcgttagcacactgattctacggaatctttgtgcgcctgttttataaccccttccccaagcagcaacttagaagcttcgcgccaccacgaccagtagtgggcgtgacacaccagtcacgttttggtcaagcacttctgtttccccggactgagtatcaatagactgctcacgcggttgaaggagaaaacgttcgttatccggccaactacttcgagaaacctagtagcatcgtggaagttgcggagtgtttcgctcagcacttcccccgtgtagatcaggtcgatgagtcactgtaaaccccacgggcgaccgtgacagtggctgcgttggcggcctgcccatggggcaacccatgggacgctctaatacagacacggtgtgaagagtctattgagctagttggtagtcctccggcccctgaatgcggctaatcctaactgcggagcgcgcaccctcaacccagggggcagtgcgtcgtaacgggtaactctgcagcggaaccgactactttgggtgtccgtgtttccttttattctctattggctgcttatggtgacaattgaaaagttgttaccatatagctattggattagccatccggtgaccaacagagctattatttacctgtttgttgggtatatccctctcactctcaaggccattcaaactcttaactatatattactccttaactgtaagag

SEQ ID NO: 845 - DNA, 704 bp, Mengo virus
  misc_feature 1..704: note = strain 3761IMP, complete genome.1
  source 1..704: mol_type = genomic DNA
tgtgctcttccgatctgggagatccagattgccagtctgctcgatatcgcaggctgggtctgtgactacccactccctctttcaacgtgaaggctacgatagtgccagggcgggtactgccgaaagtgccaccccaaagtacacaaccccccccgtacattactggccgaagccgcttggaataaggccggtgtgtgtctgtctacatgttatttctactacattgtcgtctatggcaatgtaagggcccggaacctggccctgtcttcttgacgaatattcctaggggtctttcccctctcgacaaaggaatataaggtctgttgaatgtcgtgaaggaagcagttcctctggaggcttcttgaagacaaacagtgtctgtagcgaccctttgcaggcagcggaaacccccacctggtaacaggtgcctctgcggccaaaagccacgtgtataagatacacctgcaaaggcggcacaaccccagtgccacactgtgcgttggatagttgcggaaagagccaaatggctctccttaagcgtattcaacaaggggctgaaggatgcccagaaggtaccccactagttgggatctgatctggggcctcggtgcacgtgctctacacgtgttgagtcgaggttaaaaaacgtctaggccccccgaaccacggggacgtggttttcctttgaaaaccacgatgacaat

SEQ ID NO: 846 - DNA, 704 bp, Human poliovirus 2
  misc_feature 1..704: note = strain CHA1219346, complete genome.1
  source 1..704: mol_type = genomic DNA
tagtactccggtatcacggtacccttgtacgcctgttttaaactcccttccctcgtaacttagaagcaaacaaaccaagttcaatagaaaggggtacaaaccagtaccaccacgaacaagcacttctgttgccccggtgatgtcgtatagattgtacccacggtcgaaaacgattgatccgttatccgcttttgtacttcgagaagcctagtaccaccttggaatcttcgatgcgttgcgctcggcactcaatcccagagtgtagcttaggtcgatgagtctggacataccccaccggtgacggtggtccaggctgcgttggcggcctacctgtggcccaaagccacaggacgctagttgtgaacaaggtgtgaagagcatattgagctacaaaagagtcctccggcccctgaatgcggctaatcctaaccacggagcaagggtgcacaaaccagtgtataccttgtcgtaacgcgtaagtctgtggcggaaccgactactttgggtgtccgtgtttcctgttattttttatcatggctgcttatggtgacaatcagagattgttatcataaagcaaattggattggccatccggtgagtgttgtgtcaagtatacaactgtttgttggaaccactgtgttagcttcacttctcatttaaccaattaatcaaaaacaatacgaggataaaacaataatactaca

SEQ ID NO: 847 - DNA, 704 bp, Echovirus
  misc_feature 1..704: note = E7, strain Nigeria/AFP/2014, complete genome.1
  source 1..704: mol_type = genomic DNA
atgggcgctagcacactggtatcccggtacctttgtgcgcctgttttatctacccctccccaaacgtaacttagaagcacatcacacatggtcaacaggtggcacagtacaccaactgggccgtgaccaagcacttctgttaccccggaccgagtatcaatagactgctcgcgcggttgaaggagaaaacgttcgttacccggccaattacttcgagaaacccagtaccaccgtgaaggttgcgcagcgtttcgctccgcacaaccccagtgtagatcaggtcgatgagccaccgcattccccacgggtgaccgtggcggtggctgcgttggcggcctgcccatggggcaacccatgggacgcttcaatactgacacggtgcgaagagtctattgagctaattggtattcctccggcccctgaatgcggctaatcctaactgcggagcagatacccacaagccagtgggcagtctgtcgtaacgggtaactctgcagcggaaccgactactttgggtgaccgtgtttccttttattcttatattggctgcttatggtgacaattgaaagattgttgccatatagctattggattggccacccagtgacaaacagagctattgtttacctatttgttggctttataccactgaatcttaaagttttagaaactctcaacctgatcttattactcaattcggtaaa

SEQ ID NO: 848 - DNA, 705 bp, Echovirus
  misc_feature 1..705: note = E9, strain 61253-70985 polyprotein gene, complete cds.1
  source 1..705: mol_type = genomic DNA
cacggggcgcaagcacactggtattacggtacctttgtgcgcctgttttacccacccttccccaatgaaatttagaagcttgacttaaacggtcagtagacaacccagtatgccaactgggtcccgaccaagcacttctgtctccccggactgagtatcaataggctgcttgcgcggctgaaggagaaaacgttcgttacccgaccaactacttcgagaaacctagtaccaccatgaacgttgcgcagcgtttcgctccacacaaccccggtgtagatcaggtcgatgagtcaccgcaatccccacgggcgaccgtggcggtggctgcgctggcggcctgcccatggggcaacccatgggacgcttcaacactgacatggtgcgaagagtctattgagctagttggtagtcctccggcccctgaatgcggctaatcctaactgcggggcagatacccacataccagtgggcagtctgtcgtaacgggcaactctgcagcggaaccgactactttgggtgtccgtgtttccttttatccttatattggctgcttatggtgacaattgaaagattgttaccatatagctattggattggccatccagtgagcaacagagcgatcatactcctctttgttgggtttataccacttgactacagcagttacaacaccttgttgtacatcgtttatttgaatacgagaaa

SEQ ID NO: 849 - DNA, 707 bp, Enterovirus C
  misc_feature 1..707: note = strain 04-4491, complete genome.1
  source 1..707: mol_type = genomic DNA
aggctagtacaccgggtaccgtgataccggtgtactagcctgttttatactcccttcccccgtaacttagaagtaaataacacaagttcaatagaagggggtacaaaccagtaccaccacgaacaagcacttctgttcccccggtgaggtcacatagactgtctccacggttgaaagtgactgatccgttatccgctcttgtacttcgggaagcctagtagcatcttcggatcttcgatgcgttgcgctcagcactcaatcccagagtgtagcttaggtcgatgagtctggacatccctcactggcgacagtggtccaggctgcgttggcggcctacctgtggcccaaagccacaggacgctagttgtgaacaaggtgtgaagagcctactgagctacttgagagtcctccggcccctgaatgcggctaatcccaaccacggagcaaatgactgcaatccagcagttagtttgtcgtaatgcgtaagtctgtggcggaaccgactactttgggtgtccgtgtttccttttatattttatattggctgcttatggtgacaatcactgattgttatcataaagcgacttggattggccatccggtgaaaataagagttattatctacttatttgttggatttactccactatcaacctacacaccagagctcatacgcattgttatagtactaagaaatatacatcaca

SEQ ID NO: 850 - DNA, 707 bp, Coxsackievirus
  misc_feature 1..707: note = A19, strain BBD66 polyprotein gene, complete cds.1
  source 1..707: mol_type = genomic DNA
taaaacagctctggggttgttcccaccccagaggccacgtggcggccagtactctggtatcaaggtacctttgtacgcctgttttatatcccctcccccaagtaactttagaagcaattcaaacagttcaatagagggggtacaaaccagtaccaccacgaacaagcacttctgtttccccggtgaggctgtatagactgttcccacggttgaaaatggctgatccgttatccgctcatgtacttcgagaagcctagtatctccttggaatcttcgatgcgttgcgctcagcactctaccccgagtgtagcttaggctgatgagtctgggcataccccaccggtgacggtggcccaggctgcgttggcggcctacccatggctaacgccatgggacgctagttgtgaacaaggtgtgaagagcctattgagctacttgagagtcctccggcccctgaatgcggctaatcccaaccacggagcaagtgcctgcataccagcaggtagcttgtcgtaacgcgcaagtctgtggcggaaccgactactttgggtgtccgtgtttccttttattcttatcatggctgcttatggtgacaatctaagattgttatcatatagcttttggattggccatccggtgattgtttgatatttgaacacttgtttaccttatcttattacacaccaatttacatacctaacttcatt

SEQ ID NO: 851 - DNA, 708 bp, Coxsackievirus
  misc_feature 1..708: note = B5 polyprotein gene for polyprotein, VP4 and VP2 and1
  source 1..708: mol_type = genomic DNA
cccactgggcgctagcacactggtattacggtacctttgtgcgcctgttttatctaccctccccccaacgcaacttagaagcataacttaaatggtcaacagataactcagtatgccaactgagccctgaccaagcacttctgttatcccggactgagtaccaataggctgctcacgcggccgaaggggaaaccgttcgttacccggccaattacttcgagaaacctagtaccaccatgaaagttgcgcagtgtttcgctccgcacaaccccagtgtagatcaggtcgatgagtcaccgcaaaccccacgggcgaccgtggcggtggctgcgttggcggcctgcccatggggcaacccatgggacgcttcaatactgacatggtgcgaagagtctattgagctaattggtagtcctccggcccctgaatgcggctaatcccaactgcggagcagatacccacacaccagcgggcagtctgtcgtaatgggcaactctgcagcggaaccgactactttgggtgtccgtgtttccttttattctcatactggctgcttatggtgacaattgagagattgttaccatatagctattggattggccatccggttacaaacagagcaattatttacttatttgttggttttgtaccactgaactacagagtcctgaaaaccctcaatctcattataacactcaatacgttaaa

SEQ ID NO: 852 - DNA, 708 bp, Enterovirus sp.
  misc_feature 1..708: note = B69 isolate 15_491 polyprotein gene, complete cds.1
  source 1..708: mol_type = genomic DNA
gcccactgggcgttagcactctggtattaaggtacctttgtgcgcctgttttataatcccttcccaacttgcaacttagaagtaacacactatgaccaatagggggcgtggcaaaccagccatgccttggtcaagcacttctgtttccccggactgagtatcaataagctgtccacacggctgaaggagaaaacgtccgttacccggccagttacttcgagaaacctagtaccaccatgaaagttgcgtagcgtttcgctccgcacatccccagtgtagatcaggtcgatgagtcaccgcaatccccacgggcgaccgtggcggtggctgcgctggcggcctgcccatggggcaacccatgggacgctacaatactgacatggtgtgaagagtctattgagctaactggtagtcctccggcccctgaatgcggctaatcctaactgcggagcagatacccacacgccagtgggcagtctgtcgtaacgggcaactctgcagcggaaccgactactttgggtgtccgtgtttccttttattcatattttggctgcttatggtgacaattgagagattgttaccatatagctattggattggccatccggtgacaaacagagctatcatctatcttttcatcggcttcgtaccgctgaaccacaaagtatttaacaccctcaatttagtattggccttcaatatagcaaa

SEQ ID NO: 853 - DNA, 708 bp, Enterovirus B
  misc_feature 1..708: note = isolate E0-150 polyprotein gene, partial cds.1
  source 1..708: mol_type = genomic DNA
ccactgggcgttagcacactggtatcacggtacccttgtgcgcctgttttatatacccttccccgtagagtaacttagaagcttgactacgacggtcaataggaaacccagtgcaccaactggggcgcgaccaagcactcctgtaaccccggactgagtatcaataagctgcttgcgtggctgaaggagaaaacgttcgttacccggccaattacttcgagaaacctagtaccaccatgaaagttgcgcagcgtttcgctccgcacaaccccagtgtagatcaggccgatgagtcaccgcattccccacgggcgaccgtggcggtggctgcgttggcggcctgcccatgggataacccatgggacgcttcaatactgacatggtgcgaagagtctattgagctaattggtagtcctccggcccctgaatgcggctaatcctaactgcggagcagacacccacaagccagtgggcagtctgtcgtaacgggtaactctgcagcggaaccgactactttgggtgtccgtgtttccttttatttctatactggctgcttatggtgacaattgaaaggttgttaccatatagctattggattggccatccggtgtctaacagagcaatcatttatttatttgttggattcgtacccctaaatcctaaagtctttaacactctcaacttcatattacgattaaatacagcaag

SEQ ID NO: 854 - DNA, 709 bp, Coxsackievirus
  misc_feature 1..709: note = A9 polyprotein gene for polyprotein, VP4 and VP2 and1
  source 1..709: mol_type = genomic DNA
gggcccactgggcgctagcactctggtattacggtacctttgtgcgcctgttttacgctccttcccccaagtgcaacttagaagccaaacaccacgaccaatagtaggcaaggcgcaccagccgtgtctcggtcaagcacttctgtctccccggactgagtatcaataaactgctcacgtggttgaaggagaaaacgttcgttacccggctaattacttcgagaagcctagtaacaccatggaggttgcgaggcgtttcactcagcacgcccccggtgtagttcaggtcgatgagtcaccgcgttccccacaggcgactgtggcggtggctgcgttggcggcctgcccatggggcaacccatgggacgcttcaatgtcgacatggtgtgaagagcctattgagctagttagcagtcctccggcccctgaatgcggctaatcctaactgcggagcacgcgcccccaacccagagggtagcgtgtcgtaacgggtaactctgcagcggaaccgactactttgggtgtccgtgtttctttttatcttttattggctgcttatggtgacaattgagagattgttaccatatagctattggattggccatccggtgacgaacagagctataatttaccaatttgtaggatttattccattaagtttgaaagccttaaagacccttagtttaatactattgctcaatagtgtaaa

SEQ ID NO: 855 - DNA, 709 bp, Echovirus
  misc_feature 1..709: note = 5 polyprotein gene for polyprotein, VP4 and VP2 and VP31
  source 1..709: mol_type = genomic DNA
ggcccactgggcgccagcacactggtatcacggtacccttgtgcgcctgttttatttacccccccccaacgtaacttagaagcacaacctaatcggtcaatagataactcagtacaccaactgagtccagaccaagcacttctgttaccccggaccgagtatcaataagctgctcgcgcggctgaaggagaaaaggttcgttacccgaccaattacttcgagaaacccagtaccaccatggaagttgcgcagtgtttcgctccgcacaaccccagtgtagatcaggtcgatgagtcaccgcgttccccacgggcgaccgtggtggtggctgcgttggcggcctgcccatgaggtaacccatgggacgcttcaatactgacatggtgcgaagagtctattgagctaattggtagtcctccggcccctgaatgcggctaatcctaactgcggagcagatacctacacgccagtaggcagtctgtcgtaatgggcaactctgcagcggaaccgactactttgggtgtccgtgtttccttttattcttacattggctgcttatggtgacaattgagagattgttaccatatagctattggattggccatccagtgacaaacagagcgatcatctacttgtttgttggttttataccactaaattacaaagtcttaaacacactcaatttcattctgtcacttaatacattgag

SEQ ID NO: 856 - DNA, 710 bp, Encephalomyocarditis virus
  misc_feature 1..710: note = strain pEC9, complete genome.1
  source 1..710: mol_type = genomic DNA
ttgaaagccgggggtgggagatccggattgccagtctgctcgatatcgcaggctgggtccgtgactacccactccccctttcaacgtgaaggctacgatagtgccagggcgggtactgccgtaagtgccaccccaaaataacaacagaccccccccctaacgttactggccgaagccgcttggaataaggccggtgtgcgtttgtctatatgttattttccaccatattgccgtcttttggcaatgtgagggcccggaaacctggccctgtcttcttgacgagcattcctaggggtctttcccctctcgccaaaggaatgcaaggtctgttgaatgtcgtgaaggaagcagttcctctggaagcttcttgaagacaaacaacgtctgtagcgaccctttgcaggcagcggaaccccccacctggcgacaggtgcctctgcggccaaaagccacgtgtataagatacacctgcaaaggcggcacaaccccagtgccacgttgtgagttggatagttgtggaaagagtcaaatggctctcctcaagcgtattcaacaaggggctgaaggatgcccagaaggtaccccattgtatgggatctgatctggggcctcggtgcacatgctttacatgtgtttagtcgaggttaaaaaacgtctaggccccccgaaccacggggacgtggttttcctttgaaaaacacgatgataat

SEQ ID NO: 857 - DNA, 710 bp, unidentified
  source 1..710: mol_type = unassigned DNA; note = Human coxsackievirus A22, strain ban99-10427, complete genome.1 sequence
ttaaaacagctctggggttgttcccaccccagaggcccacgtggcggctagtactctggtattgcggtacctttgtacgcctgttttatacccccttccccagtaactttagaagcaattcattcagttcaatagagggggtacaaaccagtaccaccacgaacaagcacttctgtttccccggtgaagccgtatagactgtacccacggttgaaaatggcagatccgttatccgctcatgtacttcgagaagcctagtatcatcttggaatcttcgatgcgttgcgctcagcactctaccccgagtgtagcttaggctgatgagtctgggcataccccaccggcgacggtggcccaggctgcgttggcggcctacccatggctaacgccatgggacgctagatgtgaacaaggtgtgaagagcctattgagctacttgagagtcctccggcccctgaatgcggctaatcctaaccacggagcaagcgcttacaaaccagtaagtagcttgtcgtaacgcgcaagtctgtggcggaaccgactactttgggtgtccgtgtttccctttatttttattgtggctgcttatggtgacaatctaagattgttatcatatagctattggattggccatccggtgatttgtcgagtttcaaacgcttgtttatttctccacaacacttgcctactcaatacatttacaaaccata

SEQ ID NO: 858 - DNA, 710 bp, Enterovirus sp.
  misc_feature 1..710: note = D68, isolate 2016-R5080, complete genome.1
  source 1..710: mol_type = genomic DNA
tttaaacgcttctaaggttgtttacattgggggaggggagataaaaaccgtatttctgggtcttcggtacctttgtacgcctgttttatctccctccccaatgtaacttagaagctttcaaatcaaagctcaataggtggagcgcaaaccagcgctttcgtgagcaagcactcctgtttccccggtgcggttgtatagactgttcccacggttgaaaacaacctatccgttatccgctatagtacttcgagaaacctagtatcacctttggattgttgatgcgttgcgctcaacacactaacccgtgtgtagcttgggtcgatgagtctggacataccccactggtaacagtggtccaggctgcgttggcggcctactcatggtgaaaaccatgagacgctagacatgaacaaggtgtgaagagtctattgagctactatagagtcctccggcccctgaatgcggctaatcttaaccatggagcaagtgctcacaaaccagtgagttgcttgtcgtaatgcgcaagtccgtggcggaaccgactactttgggtgtccgtgtttcactttttacttttatgactgcttatggtgacaatttaatattgttaccattcagctagtcgaaataatcgcataaaactttaaatcctatctaacaattcacatttggatagtttcattttgaggactttaaacctacttacaaag

SEQ ID NO: 859 - DNA, 711 bp, Rodent hepatovirus
  misc_feature 1..711: note = RMU101637Micarv2010 polyprotein gene, complete1
  source 1..711: mol_type = genomic DNA
ttcaaagggtggtgggcggtttccccgccctcccctctttggatgcccatagtgcgggggtataaataccgcactccctttagctgttccgagggtatcggaacctatatgtttgttttctgtctgtctgtcagctttatgtgtgctcgtcccctttagggcactcatttcagcttgctttcattcttttcttccccggttctcaccttaccggaggcactggccgttgcgcccggcggggtcaacctagtgattagcactaggctgtaggtgtctaaagtggtgacattaagacttggtaactgatttcagcactgttaactgatgttggggatgacttgattgatcttctggaaggggtaggctacgggtgaaaccccttatcttaataccactatgtagagatagattcagtaggttaagggcagtggataaggttgagttcattttggacaataaaccttcaacactggtggacccaatctcactgaccagatgctttcttgactgatccttcagaggggtgattcttctgaataggttgccttgacactgatgcctgagacccattgggtcgggccttaaatcatggaactccactggactttcatggcctagcttctgccttagacagactctggggccccacgaccctctgggcccttcggggtactcaggggcatttaggtttttccacaattaaaagagtta

SEQ ID NO: 860 - DNA, 711 bp, Rodent hepatovirus
  misc_feature 1..711: note = KEF121Sigmas2012 polyprotein gene, complete cds.1
  source 1..711: mol_type = genomic DNA
ttcaaagggtggctgggattttgtcccagcctccctttggagttccttggctctggggaactaaattaccaggcccgcgtttacctagcgcttaggttaaaacccccatcccttatttgtaaatattgatttctgcaggttcagagtttcttaatcatgttccctttaggacactcactccacttgctttcattcttgtttccgtggttctcccatcaccacaagcactgaccattgcgcccggtggggttaaccatatgattagcatatggctgtaggtgtttaagggtgggacaataatggaaggtcaaatagcaggcttgtttaacttccttttgtttcatctcatgtatctttctgaaggggtaggctacgggtgaaaccccttaggttaatactcatattgagagatacctgtggtaggttaattgccctggataaacttgagttgttagacaataaagtttcaacaggggtggacaagatctcaccaccagactggcatgttgtgggacatctgggaggcaagtttcttcctgtgatgttggcctttacatattgcctgggtgttaagaaggagcccttaaattcacttttctgtgagcctagcttccgctggacggactttgggggcagcatccttcttgatgcttctggggtactcaggggcatttaggtttttccacattataaatatatagatgaatagag

SEQ ID NO: 861 - DNA, 711 bp, unidentified
  source 1..711: mol_type = unassigned DNA; note = Human coxsackievirus A22, strain USA75-10624, complete genome.1 sequence
ttaaaacagctctggggttgttcccaccccagaggcccacgtggcggctagtactctggtatcgaggtacctttgtacgcctgttttacaccccttcccctgtgcaactttagaagcaaatcacaaagttcaatagagggggtgcaaaccagcaccaccacgaacaagcacttctgtttccccggtgatgctgtatagactgttcccacggtcaaaaatggcagatccgttatccgcttgagtacttcgagaagcctagtaccaccttggaatcttcgatgtgttgcgctcagcactctaccccgagtgtagcttaggctgatgagtctgggcataccccaccggcgacggtggcccaggctgcgttggcggcctacccatggctaacgccatgggacgctagttgtgaacaaggtgtgaagagcctattgagctactcaagagtcctccggcccctgaatgcggctaatcctaaccacggagcaagtactcacaaaccagtgagcggcttgtcgtaacgcgtaagtctgtggcggaaccgactactttgggtgtccgtgtttccttttatttttattgtggctgcttatggtgacaatctaagattgttatcatatagcttttggattggccatccggtgattgttgagattatattactcatttgttttactacggttcttgcccaattgttacatttgcactaacata

SEQ ID NO: 862 - DNA, 711 bp, unidentified
  source 1..711: mol_type = unassigned DNA; note = Human coxsackievirus A1, isolate KS-ZPH01F/XJ/CHN/2011, complete1 sequence
ttaaaacagctctggggttgttcccaccccagaggcccacgtggcggctagtacactggtatcacggtacctttgtacgcctgttttatatcccctcccccatgcaactttagaagtaattcaaatagttcaatagagggggtacaaaccagtaccaccacgaacaagcacttctgtttccccggtgaggctatatagactgttcccacggtcgaaggtggctgatccgttatccgcttgagtacttcgagaagcctagtaccacctttggatcttcgatgcgttgcgctcagcactctaccccgagtgtagcttaggctgatgagtctgggcataccccaccggcgacggtggcccaggctgcgttggcggcctacccgtggctaacgccatgggacgctagttgtgaacaaggtgtgaagagcctattgagctacttaagagtcctccggcccctgaatgcggctaatcccaaccacggagcaagtgctcacaaaccagtgggtggcttgtcgtaacgcgcaagtctgtggcggaaccgactactttgggtgtccgtgtttccttttatttttatcatggctgcttatggtgacaatctaagattgttgtcatatagcgtttggattggccatccggtgacttcgaaagcgatatatttgactcattgtcttactgaatttacctatttattacacttgtataacaata

SEQ ID NO: 863 - DNA, 711 bp, unidentified
  source 1..711: mol_type = unassigned DNA; note = Human coxsackievirusA1, strain Tompkins, complete genome.1 sequence
ttaaaacagctctggggttgttcccaccccagaggcccacgtggcggccagtactctggtattgcggtacctttgtacgcctgttttatatcccctccccaagtaactttagaagcaattcacaaagttcaatagagggggtacaaaccagtaccaccatgaacaagcacttctgtttccccggtgaagctgtatagactgttcccacggtcgaaaatggcagatccgttatccgctcacgtacttcgagaagcctagtatcatcttggaatcttcgacgcgttgcgctcagcactctaccccgagtgtagcttaggccgatgagtctgggcataccccaccggcgacggtggcccaggctgcgttggcggcctacccatggctaatgtcatgggacgctagttgtgaacaaggtgtgaagagcctattgagctacttgagagtcctccggcccctgaatgcggctaatcctaaccatggagcaagtgcccacaagccagtgggtggcttgtcgtaatgcgcaagtctatggcggaaccgactactttgggtgtccgtgtttccttttattcttattatggctgcttatggtgacaacctaagattgttgtcatatagcttttggattggccatccggtgatctttgagattaatataccttccttattacttcatagtactcatttattcattacactactgtagttaca

SEQ ID NO: 864 - DNA, 711 bp, Enterovirus sp.
  misc_feature 1..711: note = D68, isolate 2012-12225, complete genome.1
  source 1..711: mol_type = genomic DNA
ttaaaacagccttggggttgttcccacctcaagggcccacgtggcggctagtactctggtatttcggtacccttgtacgcctgttttatctccctccccaatgtaacttagaagctttcaaatcaaagctcaataggtggagcgcaagccagcgcttccgtgagcaagcactcctgtttccccggtgcggttgtatagactgttcccacggttgaaaacaacctatccgttatccgctatagtacttcgagaaacctagtatcacctttggattgttgatgcgttgcgctcagcacactaacccgtgtgtagcttgggtcgatgagtctggacataccccactggtgacagtggtccaggctgcgttggcggcctactcatggtgaaaaccatgagacgctagacatgaacaaggtgtgaagagtctattgagctactatagagtcctccggcccctgaatgcggctaatcttaaccatggagcaagtgctcacaaaccagtgagttgcttgtcgtaatgcgcaagtccgtggcggaaccgactactttgggtgtccgtgtttcactttttacttttatgactgcttatggtgacaatttaatattgttaccatttagctagtcaaattaatcacataaaaactttaaatcctatctaacaattcacatttggatagcttcattttgaggactttaaacctatttacaaag

SEQ ID NO: 865 - DNA, 711 bp, Coxsackievirus
  misc_feature 1..711: note = A9, isolate 2-MRS2013 polyprotein gene, complete cds.1
  source 1..711: mol_type = genomic DNA
agggcccactgggcgctagcacactggtatcacggtacctttgtgcgcctgttttatttccccatccccgccgtaacttagaagtctcacttaagcggtcaatagatagcccagtaaaccaactgggttccgaccaggcacttctgttaccccggaccgagtatcaataggctactcacgtggccgaaggagaaaacgttcgttacccggccaattacttcgagaaacttagtaacaccatggaagttgcgcagtgtttcgctccgcacaaccccagtgtagatcaggtcgatgagtcaccgcgtaccccacgggcgaccgtggcggtggctgcgttggcggcctgcccatggggcaacccatgggacgcttcaataccgacatggtgcgaagagtctattgagctaattggtagtcctccggcccctgaatgcggctaatcctaactgcggagcagacgcctacgaaccagtgggtagtctgtcgtaacgggcaactctgcagcggaaccgactactttgggtgtccgtgtttccttttattcttacactggctgcttatggtgacaattgagagattgttaccatatagctattggattggccatccggtgacaaacagagctattgtttatctatttattggtttcataccactaaacttcaaggtcctaggaaccctcaatttaatattactacttaatagtgcaaa

SEQ ID NO: 866 - DNA, 712 bp, Canine kobuvirus 1
  misc_feature 1..712: note = isolate DD2 polyprotein mRNA, complete cds.1
  source 1..712: mol_type = genomic DNA
tcaccctcttttccggtggtccggacccagaccaccgttactccattcagcttcttcggaacctgttcggaggaattaaacgggcacccactcaccctctcccccctctcgtaaccaagtgtgtgcccaatctcttcactcctgctggcttcaccgaccagcagtgtccaaaatgctaggtgaacctcctccctcccccactgggctcttgcccagtttcctccccccagcctgacgtgtcacaggctgtacaaagaccccgcgaaagctgccaaaagtggcaattgtgggtcccccctttgtgaaggcgtcgagtctttctcccttaaggctagacccgccagtgaattctgtcgggcaactagtgacgccactgcatgcctccgacctcggccgcggagtgctgccccccaagtcgagcccctaagccacaagttgtgctgtctggcaaacactgtctgtgagaatgttccgctgcggctgccaagcctggcaacaggctgccccagtgtgcgtagttctcatccagacctcggtctggcaacttgctgttaagacacggcgtaaggggcgtgtgccaacgccctggaacgagtgtccactctaataccccgaggaatgctacgcaggtacccctggcccgccagggatctgagcgtaggctaattgtctaagggtattttcatttcccactctttttctcttgttcata

SEQ ID NO: 867 - DNA, 712 bp, Canine kobuvirus
  misc_feature 1..712: note = US-PC0082, complete genome.1
  source 1..712: mol_type = genomic DNA
tcacgcacttttccggtggtccggacccagaccaccgtcactccattcagcttcttcggaacctgttcggaggaattaaatgggcacccactcacccttcccctcttctcgtaactaagtgtgtgcccaatctcttgactcctactggctccaccgaccggtagtgtccaaaatgctaggtggacttcctcccttcccttctgggcatcttgcccagcttcctccccccagcctgacgtgtcacaggctgtgcaaagaccccgcgaaagctgccaaaagtggcaattgtgggtcccccctttgtcaaggcgtcgagtctttctcccttaaggctagtcccatcagtgaattctgatgggcaactagtgacgccactgcatgcctccgacctcggccgcggagtgctgccccccaagtcgtgcccctgaccacaagttgtgctgtctggcaaacattgtctgtgagaatgttccgctgtggctgccaagcctggtaacaggctgccccagtgtgcgtagttctcatccagacttcggtctggcaacttgttgttaagacacggcgtaaggggcgtgtgccaacgcccaggaacgagtgtccactctaataccccgaggaatgctacgcaggtacccctggtccaccagggatctgagcgtaggctaactgtctaagggtattttcatttcccactctctctttctcgttcata

SEQ ID NO: 868 - DNA, 712 bp, Bluegill picornavirus
  misc_feature 1..712: note = isolate 04-032, complete genome.1
  source 1..712: mol_type = genomic DNA
tttaaatggtgaccttaaacgggaaatgcgttttccgttctttggatatccatttaacgtgtaccctatacgataattggggtggattctggatgcctagttccagtgattggttaagaactcgtttactacgtatagtatgattagcaaagtgctcgattgatcacgtaatgatctatgtggttaaaaacccagtagtatggtatatactcagtagtgtacactgtgagtacaactcttggcgtagagagaacaattcacccgaatccgtggcgtatccatggaaataagtttacctaattgtatgttacaaggcatatgagacatttatgagatatggtttattttgactaaacgagtgtagaggtggtggagtctatccaacttcaagccatgcaattgttgtgttgattgatatcattgaccatttttgtggattgtgtacacatacaatttgaaaattaaccccctcaagaataagacatgggaccattcgtggtagataccgtgctcggatgcttgagattagatgggttagactagttttggaatgagattgccgagaaagtcccgctagacatgttttacaagtcgtggtattccgctagactttttcgcagacacatggaagggtccatgtgttgtgcaattgcagggtgacagcccaactgcagagttttccttactagaataaaaatctgttgtcaatttt

SEQ ID NO: 869 - DNA, 712 bp, unidentified
  source 1..712: mol_type = unassigned DNA; note = Human coxsackievirus A22, strain 438913, complete genome.1 sequence
ttaaaacagctctggggttgatcccaccccagaggcccacgtggcggctagtactctggtattacggtacctttgtacgcctgttttatatcccctcccccaagtaactttagaagcaattcaaacagttcaatagagggggtacaaaccagtaccaccacgaacaagcacttctgtttccccggtgaagctgtatagactgttcccacggttgaaaatggcagatccgttatccgcttgagtacttcgagaagcctagtatcaccttggaatcttcgacgcgttgcgctcagcactctaccccgagtgtagcttaggtcgatgagtctgggcataccccaccggcgacggtggcccaggctgcgttggcggcctacccatggccaacgccatgggacgctagttgtgaacaaggtgagaagagcctattgagctacttaagagtcctccggcccctgaatgcggctaatcccaaccacggagcaagtgctcacaaaccagtgagtagcttgtcgtaacgcgcaagtctgtggcggaaccgactactttgggtgtccgtgtttccttttatttttactatggctgcttatggtgacaatctaagattgttatcatatagctgttggattggccatccggtgatttattgagatttaacgttcgcctgtttttcttactacatctacccaccagtttcactcatataacaaca

SEQ ID NO: 870 - DNA, 712 bp, Human poliovirus 2
  misc_feature 1..712: note = gene for polyprotein, genomic RNA, strain1
  source 1..712: mol_type = genomic DNA
cccacgtggcggccagtactccggtatcacggtacccttgtacgcctgttttatactcccttcccccgtaacttagaagcaatgaaaccaagttcaatagaagggggtacaaaccagtaccaccacgaacaagcacttctgtttccccggtgacgttgcatagactgtccccacggttgaaggcggctgatccgttatccgcttgtgtacttcgagaagcctagtaccatcttggaatctccgatgcgttgcgctcagcactcaaccccagagtgtagcttaggctgatgagtctggacattccccaccggcgacggtggtccaggctgcgttggcggcctacctgtggtccaaaaccacaggacgctagttgtgaacaaggtgtgaagagcctattgagctacatgagagtcctccggcccctgaatgcggctaatcccaaccacggagcaggtgtttgcaatccagcaaatagcctgtcgtaacgcgcaagtctgtggcggaaccgactactttgggtgtccgtgtttccttttattttcatactggctgcttatggtgacaatctcggattgttatcatagagcaaattggattggccatccggtgaaaatcagattgattatttaactttttgttggatttacatctttgacatcacatactccgaatctcattaagatagtgctcttgatacgacatcatcgtcatt

SEQ ID NO: 871 - DNA, 713 bp, Canine kobuvirus 1
  misc_feature 1..713: note = isolate 12D049, complete genome.1
  source 1..713: mol_type = genomic DNA
tcacgcacttttccggtggtccggtctcagaccaccgttactccattcagcttcttcggaacctgttcggaggaattaaacgggcacccactaaccccaacccccttctcgtaactaagtgtgtgcccaatctcttgactcctgctggaaccaccgaccagtagtgtccaaaatgccaggtggaaaatcctcccttcccctctgggctacatgcccagcatcctccccccagcctgacgtgccacaggctgtgcaaagaccccgcgaaagctgccaaaagtggcaattgtgggtcccccctttgtcaaggcgtcgagtctttctcccttaaggctagccccgtcagtgaactctgtcgggcaactagtgacgccactgcatgcctccgacctcggccgcggagtgctgccccccaagtcatgcccctgaccacaagttgtgctgcctggcaagcactgcccgtgagaatgttccgctgtggctgccaagcctggtaacaggctgccccagtgtgcgtagttctcatccagacctcggtctggcaacttgctgttaagacatggcgtaaggggcgtgtgtcaacgccctggaacgagtgtccactctaataccccgaggaatgctacgcaggtacccctggctcgccagggatctgagcgtaggctaattgtctaagggtattttcatttcccactctctctttcttgttcata

SEQ ID NO: 872 - DNA, 713 bp, Hepatovirus A
  misc_feature 1..713: note = isolate 2ID, complete genome.1
  source 1..713: mol_type = genomic DNA
atttaaaccctctcccttttggacttctctagtctggggaagtaaaataccagactcccgtttgcctagggtataggctattatttatgtttgttttgttatgtttgtcttttaatgttttgtaaatattaattccagcaggttctggtttctgaatttgtcctctttaaggcactcataatgctttctttcatcttcatttccctggctctcaccttgccagatggactgacccatgcgcccgtgggggttaaccacaggactagcctgtggctgtaggttctgaaagaggtgacattaagactatggttgtgattccacatgttttaactggtatgatgtagtagcaattgatctttggtatggggtaggctacgggtgaaaccccataggttaatactaatatttagagatacctccagtaggtgaagtgcacaggataagattgagttattttgacaaaagatcttcaactgtggtggacaccatctcactgggccaatgcttttgttatgaaaccatattgggcatgtctcttggatgagcattcatggacactgatgcctagactagggtgaatattgccttaaatcatagagttctttgggattttatggccttgcttctgttgaacagacactggggcttatggtattcaccctggcctctggggtaatcaggggcatttaggttttccacatttatataatgct

SEQ ID NO: 873 - DNA, 713 bp, Senecavirus A
  misc_feature 1..713: note = strain USA/IN_Purdue_4914-26/2015, complete genome.1
  source 1..713: mol_type = genomic DNA
gctcctctgtgcctctagcaaacacagccggtttaccccccggaaggggaaaggaaggactgggcatgagggcccggccccccctttccccttccggggggtaaaccggctgtgtttgctagaggcacagaggagcaacatccaacctgcttttgtggggaacggtgcggctccaattcctgcgtcgccaaaggtgttagcgcacccaaacggcgcatctaccaatgctattggtgtggcctgcgagttctagcctactcgtttctcccctattcactcactcacgcacaaaaagtgtgttgtaactacaagatttagccctcgcacgggatgtgcgataaccgcaagattgactcaagcgcggaaagcgctgtaaccacatgctgttagtccctttatggctgcgagatggctatccacctcggatcactgaactggagctcgaccctccttagtaagggaaccgagaggccttcttgcaacaagctccgacacagagtccacgtgattgctaccaccatgagtacatggttctcccctctcgacccaggacttctttttgaatatccacggctcgatccagagggtggggcatgatccccctagcatagcgagctacagcgggaactgtagctaggccttagcgtgccttggatactgcctgatagggcgacggcctagtcgtgtcggttctataggtagcacatacaaat

SEQ ID NO: 874 - DNA, 713 bp, Echovirus
  misc_feature 1..713: note = E9 gene for polyprotein, partial cds,strain: 31170222.1
  source 1..713: mol_type = genomic DNA
acagggcccactgggcgtcagcactctggtattgaggtacctttgtgcgcctgttttataaccctctccccatttgaaaattagaagcaatacacaatggtcagtagctggcatggcaaaccagtcatgttttgaccaagcacttctgtttccccggaccgagtatcaatagactgctcacgcggttgaaggagaaagcgttcgttacccgaccaactacttcgagaaacctagtaacgccatgaaagttgcagagcgtttcgctcagcacatccccagtgtagatcaggccgatgagtcaccgcattccccacgggcgaccgtggcggtggctgcgctggcggcctgcttgtggggcgacccacaagacgctccaaaacagacatggtgtgaagagtctattgagctagttggtagtcctccggcccctgaatgcggctaatcctaactgcggagcacgtgcctccaacccaggaggtggcgtgtcgtaacgggtaactctgcagcggaaccgactactttgggtgaccgtgtttccttttattcttatattggctgcttatggtgacaattgaaaggttgttaccatatagctattggattggccatccggtgacaaacagagcaattatatatctctttgttgggtatattccactcgattacaaggaattcagaactctcaattatatactgtctttaaactccgcaag

SEQ ID NO: 875 - DNA, 714 bp, unidentified
  source 1..714: mol_type = unassigned DNA; note = Human coxsackievirus A21, strain USA-Ga95-10622 polyprotein gene,1 sequence
ttaaaacagcctgtgggttgttcccaccccagaggcccacgtggcggctagtactctggtatcacggtacctttgtacgcctgttttatatcccttcccccgcaactttagaagcttaacaaaagttcaacagcaggggtacaaaccagtgcctctacgaacaagcacttctgtttccccggtgaaatcacatagactgtacccacggtcaaaagtgattgatccgttatccgcttgagtacttcgagaagcctagtatcaccttggaatcttcgacgcgttgcgctcaacactctaccccgggtgtagcttaggctgatgagtctgggtactccccaccggtgacggtgacccaggctgcgttggcggcctacccatggctaatgccatgggacgctagttgtgaacaaggtgtgaagagcctattgagctactcaagaatcctccggcccctgaatgcggctaatcctaaccacggagcaatcgctcacgacccagtgagtaggttgtcgtaatgcgtaagtccgtggcggaaccgactactttgggtgtccgtgtttcccttttttattcatattggctgcttatggtgacaatttacagattgttaccatatagctattggattggccatccagtattgtgtcatacatattaaaatacttttctacaagcaataacaacattgtatttgaaccacaatagccattacaa

SEQ ID NO: 876 - DNA, 714 bp, Human enterovirus sp.
  misc_feature 1..714: note = 94, isolate E210, complete genome.1
  source 1..714: mol_type = genomic DNA
ttaaaacagcctgtgggttgttcccaccccagaggcccacgtggcggccagtactctggtatcacggtacctttgtacgcctgttttatatccccttcccccgcaacttagaagaaaacaaatcaagttcactaggagggggtacaaaccagtaccaccacgaacaagcacttctgtttccccggtgatgtcgtatagactgtaaccacggttgaaaacgattgatccgttatccgctcttgtacttcgaaaagcccagtatcaccttggaatcttcgatgcgttgcgctcagcactcaaccccagagtgtagcttaggtcgatgagtctggacactcctcaccggcgacggtggtccaggctgcgttggcggcctacctgtggtccaaagccacaggacgctagttgtgaacaaggtgtgaagagcctattgagctacaagagaatcctccggcccctgaatgcggctaatcctaaccacggagcaagggtacacaaaccagtgtatatcttgtcgtaacgcgcaagtctgtggcggaaccgactactttgggtgtccgtgtttccttttgtttttatcatggctgcttatggtgacaatctaagattgttatcatatagctgttggattggccatccggtaatttattgagatttgagcatttgcttgtttcttcaacaatttcacctattcattgcatttcagcagtcaaa

SEQ ID NO: 877 - DNA, 714 bp, Echovirus
  misc_feature 1..714: note = E25, strain 61243-1564 polyprotein gene, partial cds.1
  source 1..714: mol_type = genomic DNA
cacagggcccactgggcgctagcactctggtattgcggtacctttgtgcgcctgttttatggcccccccccagttggaacttagaagtgaagcctctcgaccaatagtgggcgtggcacaccagccacgtcttggtcaagcacatctgtttccccggactgagtatcaataaactgctcgcgcggttgaaggagaaaacgttcgttacccggctaactacttcgggaaacccagtagtatcatggaaattgcgaggcgtttcgctcagcactccccccgtgtagatcaggtcgatgagtcactgcaccccccacgggtgaccgtggcagtggctgcgttggcggcctgcctatggggtgacccataggacgcttcaaaatggacatggtgcgaagagtctactgagctagttagtagtcctccggcccctgaatgcggctaatcctaaccgcggagcaagtgtccacaaaccagtgggttgcttgtcgtaatgggtaactctgcggcggaaccgactactttgggtgtccgtgtttccttttatcttttattatggctgcttatggtgacaattgagagattgttaccatatagctattggattggccatccggtgaacaacagagcgatcatttacctctttgttggtttcgttccattgagtcccaaagtttttacgacactcaaatttattctcctacttaacaaagcaaa

SEQ ID NO: 878 - DNA, 714 bp, Coxsackievirus
  misc_feature 1..714: note = B4, strain 61256-70969 polyprotein gene, partial cds.1
  source 1..714: mol_type = genomic DNA
cagggcccactgggcgccagcacactggtatcaaggtacctttgtgcgcctgttttgcttccctttttccccagaggcaacttagaagcaatactccacgaccaatagcaggcgtggcacaccagccatgtctcggtcaagcacttctgtggccccggactgagtatcaataaactgctcacgcggtcgaaggagaaaacgtccgttacccggctagctacttcgagaaacctagtaacgccatgaaaattgcgaggcgtttcgctcagcacatccccagtgtagatcaggtcgatgagtcaccgcattccccacaggtgactgtggcggtggctgcgttggcggcctgcccatggggtaactcatgggacgcttcaatacggacatggtgtgaagagtctattgagctagttagtattcctccggcccctgaatgcggctaatcctaactgtggagcatgcgcccccattccagagggtagcatgtcgtaacgggtaactccgcagcggaaccgactactttgggtgtccgtgtttccttttattttatcattggctgcttatggtgacaattgaaagattgttaccatatagctattggattggccatccggtgacgaacagagctataatttaccaatttgtgggatttgttcctataagtttgaaagtcttaaagacccttaatttaatattactactcaatagtgcaag

SEQ ID NO: 879 - DNA, 714 bp, Coxsackievirus
  misc_feature 1..714: note = A19 clone V4C polyprotein gene, partial cds.1
  source 1..714: mol_type = genomic DNA
tattaaaacagctctggggttgttcccaccccagaggcccacgtggcggccagtacactggtattacggtacctttgtacgcctgttttatatccccttacccagtaactttagaagtaattcacacagttcaatagagagggggtacaaaccagtaccaccacgaacaagcacttctgtttccccggtgaagctacatagactgtccccacggttgaaagtggcagatccgttatccgcttaagtacttcgagaagcctagtatcaccttggaatcttcgacgcgttgcgctcagcactctaccccgagtgtagcttaggctgatgagtctgggcataccccaccggcgacggtggcccaggctgcgttggcggcctacccatggctaacgccatgggacgctagttgtgaacaaggtgtgaagagcctattgagctacttaagagtcctccggcccctgaatgcggctaatcctaaccacggagcaagtgcccacaaaccagtgggtggcttgtcgtaacgcgtaagtctgtggcggaaccgactactttgggtgtccgtgtttccttttatttttatcatggctgcttatggtgacaatctaagattgttatcatatagctattggattggccatccggtgattcacagagacttgaaagctaactcaccttcctataacactcatttgtttatcaatcttatagcacaca

SEQ ID NO: 880 - DNA, 714 bp, Coxsackievirus
  misc_feature 1..714: note = B4 VP4 gene, partial sequence; VP2 (VP2) gene,2
  source 1..714: mol_type = genomic DNA
ggcttaccaactatgcttacaccaggcagcacgcagtttttgacgtcagatgattttcaatcaccatcagctatgccacagtttgatgtgaccccagagatgaacattccagggcaagtgaggaacctgatggaaattgcggaagttgattctgtggtaccaatcaataacttgaaagctaatctgatgacgatggaggcttaccgggtgcaggttaggtccactgacgagatgggaggacagatatttggcttccccttacagccaggggcatcaagcgtgttacaaagaacactactgggagagatattaaattactacactcattggtcagggagcctcaagttaacatttgtgttctgtgggtcggcaatggcaactggcaaattcttactagcatactcaccacctggagcaggggcaccagacagcaggaagaacgctatgttagggacccacgtcatatgggacgttggactgcaatccagctgtgtgctctgtgtaccgtggatcagccagacgcactacaggtatgttgttgatgacaagtacacggctagtggtttcatttcgtgctggtaccaaactaatgtcatagtcccagctgaagctcagaaatcgtgctacataatgtgctttgtgtcagcatgcaacgatttctctgtacgcatgttgagggacacgcaattcattaagcaaacaaacttttatcag

SEQ ID NO: 881 - DNA, 715 bp, Ovine hungarovirus
  misc_feature 1..715: note = OHUV1/2009/HUN, complete genome.1
  source 1..715: mol_type = genomic DNA
tctttcccccctcccctttccctttacctcttgcaacgaaacagtttttgacaaggaccctcacctgtcaatcgggaccaccactttcagtgaccccgtgcgaagtgttgagagaaagtgagctttcttacccttcatttgtgaacccttcagtcgaagccgcttggaataagatggaaggaaatgttcattctaaatggagtgaaacatatacttaatttccagtgtttagtggtctttccactagacaacggcactgtcttgccggaactctacacaccaacattccacgcttgtgggactcaaatgttggatgacacagttgtagctggaactgagtgtttagtgcactctgtgtaacagtgaaaacaatgtgatcacttcggtgggctagtagcctgtggactaacaactggtaacagttgcctcaggggccaaaagccacggtgttaacagcaccctactagtttgattggagcaatccatgatgttacagagttagtaactgccaaacagattgtactggtatcttggcataccgtgcaacttaggatagtgaaggatgccctggcggtacccataggtaacaagtgacactatggatctaaacaggggctcactctacgttgctttacaactagctgtgagttaaaaaacgtctaactatccacaacctaggggactaggttttcctttttatttttatacacaacta

SEQ ID NO: 882 - DNA, 715 bp, unidentified
  source 1..715: mol_type = unassigned DNA; note = Human coxsackievirus A19, strain 8663, complete genome.1
ttaaaacagctctggggttgttcccaccccagaggcccacgtggcggctagtactctggtattacggtacctttgtacgcctgttttacactcccttccctacgcaactttagaagtttaacataaagttcaatagagggggtacaaaccagcaccaccacgaacaagcacttctgtttccccggtgaaactgcatagactgtaaccacggttgaaagcggttgatccgttatccgcttgagtacttcgagaagcctagtaccaccttggaatctccgatgcgttgcgctccacactctaccccgagtgtagcttaggccgatgagtctgggcgttccccaccggcgacggtggcccaggctgcgttggcggcctacccatggttaacgccatgggacgctagttgtgaacaaggtgtgaagagcctattgagctactcaagagtcctccggcccctgaatgcggctaatcccaaccacggagcgagtgctcacaatccagtgagtggcttgtcgtaacgcgcaagtctgtggcggaaccgactactttgggtgtccgtgtttccttttatttttactatggctgcttatggtgacaatctaggattgttatcatatagcttttggattggccatccggtgacttctaacgttcaagtagtttactcgcttaattttctaaacacattctcagttgttgaattataaacttcaca

SEQ ID NO: 883 - DNA, 715 bp, unidentified
  source 1..715: mol_type = unassigned DNA; note = Human coxsackievirus A22, strain Chulman, complete genome.1 sequence
ttaaaacagcctggggttgttcccaccccagaggcccacgtggcggccagtactctggtattacggtacctttgtacgcctgttttatatcccctcccctgagtaactttagaagcaattcaaaaggttcaatagagggggtacaatccagtaccaccatgaacaagcacttctgtttccccggtgaggctacataaactgtacccacggttgaaagtggctaatccgttatccgctcaagtacttcgagaagcctagtaataccttggaatcttcgacgcgttgcgctcagcactctaacccgggtgtagcttaggtcgatgagtctgggcataccccaccggtgacggtggcccaggctgcgttggcggcctacccatggctaacgccatgggacgctagttgtgaacaaggtgtgaagagcctattgagctacttgagagtcctccggcccctgaatgcggctaatcctaaccacggagcaagtgctctcaaaccagagagtggcttgtcgtaacgcgtaagtctgtggcggaaccgactactttgggtgtccgtgtttccttttatttttatcatggctgcttatggtgacaatctaagattgttatcatatagcttttggattggccatccggttgttgtttagagcgtttcatctgtgctttgtttgtttgaccagatcaatataaacactacatcctatttgttcata

SEQ ID NO: 884 - DNA, 715 bp, Coxsackievirus
  misc_feature 1..715: note = B4, strain EPV3715, complete genome.1
  source 1..715: mol_type = genomic DNA
acagggcccactgggcgttagcacactggtatctcggtacccttgtgcgcctgttttatacacccttcccccaaaagaaacttagaagcttgactataacggtcaataggaaacccagtataccagctgggttacgaccaagcacttctgtaaccccggactgagtatcaataggctgctcacgcggctgaaggagaaaacgttcgttacccggccaattacttcgagaaacctagtaccaccatgaaagttgcgcggcgtttcgctccgcacaatcccagtgtagatcaggtcgatgagccaccgcgttccccacgggtgaccgtggcggtggctgcgttggcggcctgcccatggggcaacccatgggacgcttcaatactgacatggtgcgaagagtctattgagctaattggtagtcctccggcccctgaatgcggctaatcctaactgcggagcagatacccacataccagtgggctgtctgtcgtaacgggtaactccgcagcggaaccgactactttgggtgtccgtgtttccttttattcttatactggctgcttatggtgacaattgagagattgttaccatatagctattggattggccatccggtgtctaacagagcgatcatctatctgtttgttggtttcatacccttgaattttaaagtcctcaacactcttaaccttgtgctacaactaaactcggtaaa

SEQ ID NO: 885 - DNA, 715 bp, Human poliovirus 3
  misc_feature 1..715: note = isolate EST02-E252 polyprotein mRNA, partial1
  source 1..715: mol_type = genomic DNA
tgttcccaccccagaggcccacgtggcggctagtactctggtatcacggtacctttgtacgcctgttttatacccccttcccccgcaacttagaagcatgaaatcttaagctcaacaggaggggtgcaaaccagcacctctacgagcaagcactactgtctccccggtgaggttacatagactgttcccacggttgaaagtagccgatccgttatccgctcatgtacttcgagaagcctagtattgctctggaatcttcgatgcgttgcgctcaacactcgaccccggagtgtagcttaggccgatgagtctggacattccccactggcgacagtggtccaggctgcgttggcggcctacctgtggtccaaagccacaggacgctagttgtgaacagggtgtgaagagcctattgagctacatgagagtcctccggcccctgaatgcggctaatcccaaccatggagcaggcaactgcaacccagcagtcagcctgtcgtaacgcgcaagtccgtggcggaaccgactactttgggtgtccgtgtttccttttatcttttgaatggctgcttatggtgacaatcatagattgttatcataaagcgaattggattggccatccagagaattactaccgtgtttattgagtctactcttgaaaaacctaactcctcaacgtactagaattatttgaagacaggatatcgacacgaca

SEQ ID NO: 886 - DNA, 716 bp, Hepatitis A virus
  misc_feature 1..716: note = isolate CP-IND, complete genome.1
  source 1..716: mol_type = genomic DNA
ttcaagaggggtctccggagatttcctgagtccctcttgggagtccatggtgaggggacttgatacctcaccgccgtttgcctaggctataggctaaacttccctttcccctttccctttattgttgtaaatattaattcctgcaggttcaggtctcttggatttgttccactttatggacactcatttcacgctttctgtctgcttttcttccagggctctccccttgccctaggctctggccgttgcgcccggcggggtcaactccatgattagcatggagctgtaggagtctaaattggggacacagatgttgggaacgtcaccttgcagtgttaacttggctttcatgaagctttttgatcttccacaagaggtaggctacgggtgaaacctcttaagctaatacttctatgaagagatgctttggatagggtaacagcggcggatattggtgagttgtttgacaaaaaccattcaacgccggaggactggctctcatccagtggatgcattaagtggattgtctgtcagggctgtctctaggtttaattcctggcctctctgtgcttagggcaaacaaaacttggccttaaatgaggtcctgtgagaggggacctcgccattgaatgctggacatttctttggggccttatgttttgtttgcctctgaggtactcaggggcatttaggtttttcctcatcaataaataatt

SEQ ID NO: 887 - DNA, 716 bp, Hepatitis A virus
  misc_feature 1..716: note = genomic RNA, complete genome, sub_strain:1
  source 1..716: mol_type = genomic DNA
ttcaagaggggtctccgggtttttccggagcccctcttgggagtccatggtgaggggacttgatacctcaccgccgtttgcctaggctataggctaattttcccttttccttttccctgtgttattgtaaatattaattcctgcaggttcagggttcttgaatttgttctgctgtacggacactcttttcacgctctctgtctgcttttcttccagggctctccccttgccctaggctctggccgttgcgcccggcggggtcaactccatgattagcatggagctgtaggagtctaaattggggacacagatgttgggaacgtcaccttgcagtgttaacttggctttcatgaaactccttgatcttccacaagaggtaggctacgggtgaaacctcttaagctaatacttctatgaagagatgctttggatagggtaacagcggcggatattggtgagttgtatgacaaaaaccattcaacgccggaggactggctctcatccagtggatgcattgagtgaattgactgtcagggctgtctttaggcttaattcctgacctctctgtgcttagggcaaacaaaatttggccttaaatgaggctctgtgagagggggcctcgccattgaatgctggacatttctttggggccttatgttttgtttgccgctgaggtactcaggggcatttaggtttttcctcatcaataaataaat

SEQ ID NO: 888 - DNA, 716 bp, Enterovirus J
  misc_feature 1..716: note = strain POo-1, complete genome.1
  source 1..716: mol_type = genomic DNA
aaaatagcctcagggttgttcccaccctgagggcccacgtggcgtagtactctggtatcacggtacctttgtacgcctattttacatcccttccccgtaacttagaagctttcaactataagttcactagcagggctaccaaccaggtagttcatcgaacaagcacttctgttaccccggtcctagtacctgagaagctgtacccacggcggaaggggaaaaagatcgttacccggctatctacttcgagaagcctagtaacgtcattgaaactcttgagcgttgcgttcagcacagtaccccctgtgtagctttggctgatgagtctgggcattccccactggcgacagtggcccaggctgcgttggcggccaaccgatccgggcaaccgggtcggacgctcatttgtggacatggtgtgaagagcctattgagctaggtagtagtcctccggcccctgaatgcggctaatcccaactccggagcaagtgcgcacaatccagtgtgtggcttgtcgtaatgcgtaagtctggagcggaaccgactactttgggtgtccgtgtttcctgtttttccttatttggctgcttatggtgacaatctagtgttgttaccatatagcgattggattggccatccggtgaatagctttgtgacaattccctacgttatttttcataactcaacttcacgagagtcattgagtttgactaatt

SEQ ID NO: 889 - DNA, 716 bp, Coxsackievirus
  misc_feature 1..716: note = B6 polyprotein gene for polyprotein, VP4 and VP2 and1
  source 1..716: mol_type = genomic DNA
cacagggcccactgggcgctagcacactggtatcccggtacctttgtgcgcctgttttataccccctttcccgctttgtaacttagaagtaacacaacttcggtcaatagtcgacgcaacaacccagttgcgttttgatcaagcacctctgtgaccccggactgagtatcaataggctgctcgcgcggctgaaggagaaaccgttcgttacccggctaactacttcgagaagcctagtagcatcatgaacgttgcggagtgtttcgctcagcacttcccccgtgtagatcaggtcgatgagtcaccgcgttccccacgggtgaccgtggcggtggctgcgttggcggcctgcctgtggggcaacccacaggacgctctaatacagacatggtgcgaagagtctattgagctagttagtagtcctccggcccctgaatgcggctaatcctaactgcggagcacattctcacaagccagtgagcggtgtgtcgtaacgggcaactctgcagcggaaccgactactttgggtgtccgtgtttccttttattctaatactggctgcttatggtgacaattgagagattgttaccatatagctattggattggccatccggtgtctaacagagcaattatttacctgtttgttggtttcacacccctaaatctcaaggttttaaataccctcaatttcgtactgaaactaaactcagtaaa

SEQ ID NO: 890 - DNA, 716 bp, Enterovirus sp.
  misc_feature 1..716: note = D68, isolate USA/CA/2014-RGDS-1039, complete genome.1
  source 1..716: mol_type = genomic DNA
cagccttggggttgttcccactccaagggcccacgtggcggctagtactctggtacttcggtacctttgtacgcctgttttatctcccttcccaatgtaacttagaagttcttaaatcaatgctcaataggtggggcgcaaaccagcgctctcatgagcaagcactcctgtctccccggtgaggttgtataaactgttcccacggttgaaaacaacctatccgttatccgctatagtacttcgagaaacctagtaccacctttggattgttgacgcgttgcgctcagcacactaacccgtgtgtagcttgggtcgatgagtctggacatacctcactggcgacagtggtccaggctgcgttggcggcctactcatggtgaaagccatgagacgctagacatgaacaaggtgtgaagagtctattgagctactatagagtcctccggcccctgaatgcggctaatcctaaccatggagcaagtgctcacaggccagtgagttgcttgtcgtaatgcgcaagtccgtggcggaaccgactactttgggtgtccgtgtttcactttttacttttatgactgcttatggtgacaatttgatattgttaccatttagcttgtcaaatcaattgcaaaagatcctaactcttatttatcaacttgcatctcgataactctaatttgaaaatatcatctctaaccaatttgaaaattttaaca

SEQ ID NO: 891 - DNA, 717 bp, Coxsackievirus
  misc_feature 1..717: note = A6, isolate DY003R/Shandong/China/2015, complete1
  source 1..717: mol_type = genomic DNA
acagggcccactgggcgctagcactccgattctgcggaatctttgtgcgcctgttttataaccctcccccgaaacttgcaacttagaagttatgtacgttactgatcaacagcaggcgtggcacaccagccatgtcttgatcaagcacttctgtaaccccggactgagtatcaatagactgctcacgtggtcgaaagagaaaacgttcgttatccggctaactacttcgagaaacttagtagcaccactgaaactgcggagtgtttcgctcagcacttcccccgtgtagatcaggtcgatgagtcactgcttaccccacgggtgaccgtggcagtggctgcgttggcggcctgcctatggggcaacccataggacgctctaaagtggacatggtgtgaagagtctattgagctagttagtagtcctccggcccctgaatgcggctaatcctaactgcggagcacatgccctcaatccagggggtggtgtgtcgtaacgggcaactctgcagcggaaccgactactttgggtgtccgtgtttcttttattctcataatggctgcttatggtgacaattgaggaattgttgccatatagctattggattggccatccagtgacaaacagagctttgatatacttgttcgtgggtttcgttccactcaccagtcgtacagttcatactctaaagtacattctgattctgaacaatagaaa

SEQ ID NO: 892 - DNA, 717 bp, Human enterovirus sp.
  misc_feature 1..717: note = C104, strain Pavia259-7712, complete genome.1
  source 1..717: mol_type = genomic DNA
ttaaaacagcttgggggttgttcccacccccagggtccaatggacgctagtacaccggtatcacggtacccttgtacgcctgttttataatccccttcccccgtaacattagaagcacaaaagcaaccgctcaatagacaccatacatccagtgtggttacgagcaagcacttctgtctccccggttgcgccctatatgctgtgcgaacggcaaaaaggggcaatatcgttacccgcttgactactacgggaaacccagtatcatcttcgattgatttgagagttgcgttcagcgccttacccccggcgtagctcaggctgatgaggctccgaacaccccacaggcgactgtgtcggagcctgcgttggcggcctgcccataccctgcggtatgggacgctcacttcatgacatggtgcgaagagtctactgtgctagtcaagattcctccggcccctgaatgtggataatcccaaccactgatcctacgttcgcaatccagcgttcagtaggtcgtaacgcgcaagtcggtggcggaaccaactactttgggtgtccgtgtttcctttatttcctactgaatgcttatggtgacaattgttttgatcagttgttgccaatactcgcgttcagtgtgtaattacaaaaacaagattatcagttattacaatccctcacgttcagtgcacaattacgaaaacgagattttctgtcata

SEQ ID NO: 893 - DNA, 719 bp, Coxsackievirus
  misc_feature 1..719: note = A10, strain 61217-2276 polyprotein gene, partial cds.1
  source 1..719: mol_type = genomic DNA
acagggcctactgggcgctagcactctgattctacggaacctttgtgcgcctgttttataacccctcccccaaactatgtaacttagaagttatgcactctaccgatcaacagcaggcatggcgctccagccatgtctcgatcaagcacttctgtttccccggactgagtatcaatagactgctcacgtggtcgaaggagaaaacgttcgttatccgactaactacttcgagaagcctagtagcaccatcgagactgcggagcgtttcgttcagcactccccccgtgtagatcaggtcgatgagtcactgcataccccacgggcgaccgtggcagtggctgcgttggcggcctgcctatggggtgacccataggacgctctaaagtggacatggtgtgaagagcctattgagctagttagtagtcctccggcccctgaatgcggctaatcctaactgcggagcgcatgccctcgaaccagagggtagtgcgtcgtaacgggcaactctgcagcggaaccgactactttgggtgtccgtgtttctttttattcacttattggctgcttatggtgacaatcaaggaattgttaccatatagctgttggattggccatccggtgtgtaatagagcaattatctatttgtttgttggttacattccattaacatttaagtccctcaatacattacactacattttaaccctaaacgcaagaag

SEQ ID NO: 894 - DNA, 719 bp, Human poliovirus 1
  misc_feature 1..719: note = strain NIE1116622, complete genome.1
  source 1..719: mol_type = genomic DNA
ccagaggcccacgtggcggctagtactccggtattacggtacccttgtacgcctgttttatactcccttccccgtaacttagaagaaccaaaccaagttcaatagaagggggtacaaaccagtaccaccacgaacaagtacttctgtttccccggtgaagttgtatagactgtacccacggttgaaaacgactgatccgttatccgctttcatacttcgagaagcctagtatcatcttggaatcttcgatgcgttgcgctcaacactcaaccccagagtgtagcttaggctgatgagtctggacgtccctcaccggcgacggtggtccaggctgcgttggcggcctacctgtggcccaaagcctcaggacgctagttgtgaacaaggtgtgaagagcctattgagctatgaaagagtcctccggcccctgaatgcggctaatcccaaccacggagcgagagtgtgcaaaccagcgcatttatcgtcgtaacgcgcaagtctgtggcggaaccgactactttgggtgtccgtgtttccttttatttttctacattggctgcttatggtgacaatcatagattgttatcataaagcgaattggattggccatccggtgaaagtgaaacatattattcacctccttgttggatttactccaatcaacctctccacttataagattatcatcacagtcttaccaaatagaagcatattcaaca

SEQ ID NO: 895 - DNA, 720 bp, Chicken picornavirus 1
  misc_feature 1..720: note = isolate 55C, complete genome.1
  source 1..720: mol_type = genomic DNA
ctgcttaaggacgttcccggtgctgttgatgctttccgtcaggcagtggccgacttgcagaacttcctaccgaaccaccacctcacccccataactccttccctctacaccttccgctatggtggttaccactgctttattgccttgactgagaatggccaccccctcgacacctgccccctactgccccaccgcgcaaccttttgcttgtccactcggttggagaggcatgggggccccgttcatatccccagtccagttggtgaccttccccctccccgtccggtagatggtccagagggctttgccgacgccctctatgatgcttgcttgtctttcctccgtcagcgcgagcatgcacttgtcgagcccacggaaacacagcctagcttttgcttctctcaccctgcgtaccctgggcgccttccgctcgagattcgctttgttcgacaccctggcgtccccccaccgctacgtgattttactcgtggcatacaccgccctggcgttcagtacattccactgcctaatttgggtggcctccctcaatctcccgcaccccccattgcgcacgtcatcaccgccgccgctaacgcgatccggcgcggttctcactggcactgtcccctcgtccgccgggtttccactcatggttggcttttcacttattctggttactggtgttccatcctacttcatgatggtcgccatgaccatgac

SEQ ID NO: 896 - DNA, 721 bp, Rosavirus C
  misc_feature 1..721: note = strain RASK8F polyprotein gene, complete cds.1
  source 1..721: mol_type = genomic DNA
gggatgggtctggtgctgcgccgcgtgtgtcttgacaccgcgctgctcaggatgcttctgccccgtgctttggacgcctaccagggcgttaaactggtcccccccttaccctttccccgtaactaagtttgtacctcccccatataggctgctaagacgcttgttgctacagcatatgtggatcagggagttctccatgagtaatcttttccaccctctctagtgtctatgctattgaggacgggttggagccccgttgacctagtgtcagagtgtgtcggtagcaggctttctgctctcgccccatgccggccacacctcccgtcagtaatgtgaagactgcaagttgcatgtgaaaaggtttctaatatttgagctgaatgtagcgattacccaaggtgagcggacttccccacgtggtaacacgtgcctctcaggccaaaagccaaggtgttaaaagcaccccttgggtagaccactaccccgtggtctcagttctcttagaagattcacttagtaatgtgtatactggcagctcccaagcagagctggcgagcgggctaaggatgccctgaaggtacccgcaggtaacgttaagacactgtggatctgatcaggggctcgagtgctgaagctttacagaggtagctcgagttaaaaaacgtctatgcccctcccccacgggagtgggggttcccccacaccaattttagattgcact

SEQ ID NO: 897 - DNA, 721 bp, Picornaviridae sp.
  misc_feature 1..721: note = isolate nut157pic2 genomic sequence.1
  source 1..721: mol_type = genomic DNA
aaactattgggtgtcaattcagaaactgcagccaaagctgaggtggtaactgactcctcaagagcagcagctgttgcagcagcattctgggcaatttgatccaaaccagtcactctatcagttgccatttttcacaccatacataaaattttcaatggaataaaagggaaaatgctcaaacatgtttttcataattttaaacccataacctggtaaagccaaactatgggtcccagatcagattcataaaatgagtaccttttggagcttggaaactccttgggaaagatgctaaaggagtatctgttacaaggttggtaacctgtcctcttttataggcaaacaactcatacataaatgaccaagacaagatctcctttgacagaacttggatgagttacttttgttccctctgtgcccagggccttaggtatggtaacatacaccctgggggccaaaagcctagtgagtcgaaactcacctggaggtgggcctttacggccacttgtccattagtatgcattggatgctgtcctgtctgaactcatttatgtgtgcaagtcttgaacatgttgagtagacccccagaaggtactcattttatgaatctgatctgggacccatagtttggctttaccaggttatgggtttaaaattatgaaaaacatgtttgagcattttcccttttattccattgaaaattttatgtatggtgtgaaaa

SEQ ID NO: 898 - DNA, 721 bp, Coxsackievirus
  misc_feature 1..721: note = A4, isolate C019/CHW/AUS/2016 polyprotein gene,1
  source 1..721: mol_type = genomic DNA
ccacccacagggcccactgggcgctagcacactgattctacggaaactttgtgcgcctgttttatacccctccccaaatgagtaacttagaagtttaatatgttcatgaccaatagcaggcgtgacacaccagtcacgtcttggtcaagcactcctgtttccccggactgagtatcaataagctgctcacgcggctgaaagagaaaacgttcgttacccggctaactacttcgagaaacctagtaacaccatgaaagttgcagagtgtttcgttcagcacttcccccgtgtagatcaggtcgatgagtcactgcaaaccccacgggtgaccgtggcagtggctgcgttggcggcctgcccatggggtaacccatgggacgctctaatacagacatggtgcgaagagtctattgagctagttagtagtcctccggcccctgaatgcggctaatcctaactgcggagcacataccctcaatccagagggcagtgtgtcgtaacgggcaactctgcagcggaaccgactactttgggtgtccgtgtttccttttatctcattatggctgcttatggtgacaattgaagaattgttaccatatagctattggattggccatccggtgtctaacagagcaattgtatttctatttgttggatttgttcctttgtcgcacacatctctcaatactttatactacattataaagttaaatacaggaag

SEQ ID NO: 899 - DNA, 721 bp, Echovirus
  misc_feature 1..721: note = E24, strain VEN/2018-23086, complete genome.1
  source 1..721: mol_type = genomic DNA
cccacccatagggcccactgggcgctagcacactggtatcacggtacctttgtgcgcctgttttatttaccctcccccaactgaaaattagaagccaaactcaaacggtcaataggaaacccagtgaaccaactgggctgcgaccaagcacttctgttaccccggactgagtatcaataggctgctcgcgcggctgaaggagaaaacgttcgttacccggccaattacttcgagaaacctagtaccaccatgaaagttgcgaaacgtttcactccgcacaaccccagtgtagatcgggtcgatgagtcaccgcattccccacgggtgaccgtggcggtggctgcgttggcggcccgcccatggggcaacccatgggacgcttcaatactgacatggtgtgaagagtctattgagctaattggtagtcctccggcccctgaatgcggctaatcctaactgcggatcagacacccacacgccagtgggcagtctgtcgtaatgggcaactctgcagcggaaccgactactttgggtgtccgtgtttctttttatccttatactggctgcttatggtgacaattgaaagattgttaccatatagctattggattggccatccggtatctaacagagctattatttacttatttgttggtttcgtacctctcagtatcagagttttgagaacacttaacttcatactactgctaaacactgcaag

SEQ ID NO: 900 - DNA, 722 bp, Simian agent 5
  misc_feature 1..722: note = strain B165, complete genome.1
  source 1..722: mol_type = genomic DNA
ttaaaatagcctgtgggttgctcccacccacagggcccaagtggcgtagtacttggtattccggtacctttgtacacctatttacaaaccctaccccttgtaaccttagaagcaattatttaaccgctcactagggggtgtgctatccaagcacatcaagagcaagcacttctgtctccccgggaggggctaatggtacgctgtgcccacggcggaaatgagccctaccgttaaccggcagtctacttcgggaagcccagtaactacattgaaactttgaggcgttacactcagcacataaccccaatgtgtagttctggtcgatgagccttggcatcccccacaggcgactgtggccaaggctgcgttggcggccagcctgcggaccaaaagtccgtaggacgcctaattgtggacatggtgtgaagagcctactgagctagactgtagtcctccggcccctgaatgcggctaatcctaaccctggagcatccgcgtgcaacccagtacgtagggtgtcgtaatgcgtaagtctgggatggaaccgactactttgggtgtccgtgtttcttgtttttcatactgggtcgcttatggttacaactaattgttgtaatcattggcagtgcgcgctgaccacgcgattattgatatttccatttgttggatactccaatagtgtcaactcatatacacaacttttaccactgatcaagataaaa

SEQ ID NO: 901 - DNA, 723 bp, Bat hepatovirus
  misc_feature 1..723: note = BUO2BF86Colafr2010 polyprotein gene, complete cds.1
  source 1..723: mol_type = genomic DNA
ttcaaaagtccctccgggaatttcccggaggacttttgggccaccattgcaaggggtggttttaaccttgcacgcgtttaccgtgcgttaacggttttccatgtttgtatgtcttgtttgtattatgtgttttgtaaatattaattcctgcaggttcagggttctttaatcatgttgggctgtacccacactcaacttttggccataagtgagtttcttaacgaaccttttaacacaggatgttattagggcccaatattttccctgaggccttctttggcctctattttttccccttttctatctccttgtattccgggctcacgtgatgccaatggactgacccatgcgcccgtgggggttaactactggagtagccagtagctgtaggtgctaaaagtcacgtacgtgtaagactggacgagacctctcagctataactgaaagtagtaagtatgtctgaacttcttgaaggggtaggctacgggtgaaaccccttaggttaatactcatattgagagatacctctgataggtgaaggtttccggtagaggtgagtttaacgacaaagcctctcaacggatgtgggcccacctcatcagcaagatgctttcatacccaataccgtaggggctgggttgttgagttcagtcccaagcgtccctcccgcaaggttgtaggggtactcaggggcatttaggtttccacaattaaacaaataca

SEQ ID NO: 902 - DNA, 723 bp, Coxsackievirus
  misc_feature 1..723: note = A5, isolate C026/CHW/AUS/2016 polyprotein gene,1
  source 1..723: mol_type = genomic DNA
ccacccacagggcccactgggcgttagcactctggtaccacggtacctttgtgcgcctgttttatccccccaaacccccgtaacactacactagaagatagacaatgcgaccaatagccagtggggcaacccagcctcaccttggtcaagcacctctgttttcccgggcttagtaccaataagctgctcgcgtggctgaaggggaacgcgctcgttatccggctaactacttcgagaaacctagtatcaccatggaagttgcagagtgtttcgatcagcacaaccccagtgtagatcaggccgatgagtcaccgtgtaccccacgggcgaccgtgacggtggctgcgttggcggcctgcccatggagtacaccatgggacgctctaatacagacatggtgcgaagagtctattgagctagttagtagtcctccggcccctgaatgcggctaatcctaactgcggagcacgcgctctcaacccagagagtagcgtgtcgtaacgggcaactctgcagcggaaccgactactttgggtgtccgtgtttctctttattcttacattggctgcttatggtgacaattgaaagattgttaccatatagctattggattggccatccggtgtgcaacagagctatcatatattcttttgttggctttgtgccactagattatactgcaattattactttaaggtatatcttgcttttgaacacagcaaa

SEQ ID NO: 903 - DNA, 723 bp, Echovirus
  misc_feature 1..723: note = E11, isolate E11-NHP-RD31, complete genome.1
  source 1..723: mol_type = genomic DNA
ggttgcccacccacagggcccactgggcgctagcacactggtatcacggtacctttgtgcgcctgttttatccaccctccccaacgtaacttagaagcttatttaaaccgaccaacagacggtccagcataccagctgggttacggtcaagcacttctgttaccccggactgagtatcaataggccgctcgcgcggctgaaggagaaaacgttcgttacccggccaattacttcgagaaacctagtaccaccgtggaggtcgcgaagtgtttcgctccgcacaaccccagtgtagatcaggtcgatgagtcaccgcattccccactggcgacagtggcggtggctgcgtggcggcctgcccatggggtaacccatgggacgcttcaatactgacacggtgtgaagagtctattgagctaattggtagtcctccggcccctgaatgcggctaatcctaactgcggagcagatatccacgagccagtggacagtctgtcgtaatgggtaactctgcagcggaaccgactactttgggtgtccgtgtttccatttattcctatactggctgcttatggtgacaattgagagattgttaccatatagctattggattggccatccggtgacaaacagagcaattatatatctctttgttggttatattccactcaacattaaggttttaagaacgcttaattacatcctattgttaaacacattaag

SEQ ID NO: 904 - DNA, 723 bp, Echovirus
  misc_feature 1..723: note = E3, strain HAI/2016-23050 polyprotein gene, complete cds.1
  source 1..723: mol_type = genomic DNA
ttcccactcacagggcccactgggcgctagcacactggtatcccggtacctttgtgcgcctgttttataccccctcctccaaccgtaacctagaagcagcaccatatggccaatagtagacgtggcgcaccagccacgttttggtcaagcacttctgtttccccgggccgagtatcaataggctgctcacgcggctgaaggagaaagcgtccgttacccggccaattacttcgagaaacctagtaccaccatggaagttgcgcggcgtttcgctccacacaaccccagtgtagatcgggtcgatgagtcaccgcatttccccacgggtgaccgtggcggtggctgcgttggcggcctgcccatgaggaaactcatgggacgcttcaatactgacatggtgtgaagagtctattgagctaattggtagtcctccggcccctgaatgcggctaatcctaactgcggagcagatgctcacaaaccagtgggtggtctgtcgtaatgggcaactctgcagcggaaccgactactttgggtgtccgtgtttccttttattttcacactggctgcttatggtgacaattgaaggattgttaccatatagctattggattggccatccggtgacaaacagagcgattgtctatctatttgttggttttgtaccattagatttcaaagtcctgaaaaccctcaatttcgtcttaacactcaattcggcaag

SEQ ID NO: 905 - DNA, 723 bp, Enterovirus B
  misc_feature 1..723: note = isolate HB92, complete genome.1
  source 1..723: mol_type = genomic DNA
tgatcccacccatagggcccactgggcgccagcacactggtattacggtacctttgtgcgcctgttttatctaccccccccaacgcaactcagaagctcaactgaaccgaccaatagatgacccggcaagccagcagggccctggtcaagcacttctgttaccccggactgagtatcaataagctgctcgcgcggctaaaggagaaaacgttcgttacccggccaattacttcgagaaacccagtaccaccgtgaaagttgcgcagtgtttcgctccgcacaaccccagtgtagatcaggccgatgagtcaccgcattccccactggtgacagtggcggtggctgcgttggcggcctgcccatggggcaacccatgggacgcttcaatactgacacggtgcgaagagtctattgagctaattggtagacctccggcccctgaatgcggctaatcctaactgcggagcagatacccacgcgccagtgggcagtctgtcgtaatgggcaactctgcagcggaaccgactactttgggtgtccgtgtttccttttattcttatactggctgcttatggtgacaattgaaagattgttgccatatagctattggattggccatccagtgactaacaaagcaattgtctatctatttgttggttttataccattaaactacaaagctataagcacactcaaatttatattggtactcaactcagcaaa

SEQ ID NO: 906 - DNA, 724 bp, Coxsackievirus
  misc_feature 1..724: note = A5, isolate C027/CHW/AUS/2016 polyprotein gene,1
  source 1..724: mol_type = genomic DNA
ccacccgcagggcccactgggcgccagcactctgattctgcggaatctttgtgcgcctgttttataaccccttccccaaatttgcaatttagaagcaaagcacactaacgatcaacagcaggcgtggcataccagctacgtcacgatcaagcacttctgtttccccggactgagtatcaataagctgcttgcgcggctgaaggagaaaatgtccgttatccggctaactacttcgagaaacctagtagcaccattgaagctgcagagtgtttcgctcggcacttcccccgtgtagatcaggtcgatgagtcactgcactccccacgggcgaccgtggcagtggctgcgttggcggcctgcctatggggcaacccataggacgctctaatgtggacatggtgtgaagagtctattgagctagttagtagtcctccggcccctgaatgcggctaatcctaactgcggagcgcatgcccccaaaccagggggaggtgcgtcgtaatgggcaactctgcagcggaaccgactactttgggtgtccgtgtttccttttatctttatattggctgcttatggtgacaattgagagattgttaccatatagctattggattggccatccggtgagcaatagagcaattatttattcctttattggatttgtaccgttgaattatactgcttttattacactgaaacacatcctattgttgaacacaataaa

SEQ ID NO: 907 - DNA, 724 bp, Enterovirus sp.
  misc_feature 1..724: note = C96, isolate 3499/BRA-PA/10, complete genome.1
  source 1..724: mol_type = genomic DNA
ggggttgttcccaccccagaggcccacgtggcggccagtacaccggtatcacggtacccttgtacgcctgttttatactcccttccccgtaacttagaagtaacaaacctatgttcaatagaagggggtacaaaccagtaccaccacgaacaagcacttctgtttccccggtgagatcacatagactgttcccacggttgaaagtgatcgatccgttatccgctcttgtacttcgagaagcctagtattatcttgggaccaacgatgcgttgcgatcagcactcgaccccagagtgtagcttaggtcgatgagtctggacattcctcaccggtgacggtggtccaggctgcgttggcggcctacctgtggcccaaagccacaggacgctagttgtgaacaaggtgtgaagagcctattgagctacatgagagtcctccggcccctgaatgcggctaatcctaaccacggagcaggcgattgcaaaccagcaattagcttgtcgtaatgcgtaagtctgtggcggaaccgactactttgggtgtccgtgtttccttttattttatcaatggctgcttatggtgacaatcatagattgttgtcataaagcgaattggattggccatccggtgacgttcagagttatttgtttgtgaaattcattctctcaatcctgtccacatttgacatacttccttaaatctttatacagaacaccttaacaca

SEQ ID NO: 908 - DNA, 724 bp, Enterovirus sp.
  misc_feature 1..724: note = C99, strain 10L1 polyprotein gene, complete cds.1
  source 1..724: mol_type = genomic DNA
caccccagaggcccacgtggcggctagtactccggtatcacggtacccttgtacgcctgttttatgctcccttccccttgtaacttagaagcaaacaacactagttcaataggagggggtacaaaccagtaccaccacgaacacgcacttctgtttccccggtgaagctgcataagctgttcccacggctgaaagcgactgatccgtcatccgctcaggtacttcgggaagcctagtaccatcttggaatcttcgatgcgttgcgctcagcactcaaccccagagtgtagcttaggctgatgagtctggatgtgcctcactggtgacagtggtccaggctgcgttggcggcctacccatggcccaaagccatgggacgctagttgtgaacaaggtgtgaagagcctactgagctacctgagagtcctccggcccctgaatgcggctaatcccaaccacggagcgagtgcccacaatccagtgagtggctcgtcgtaatgcgcaagtctgtggcggaaccgactactttgggtgtccgtgtttccttttaaccttattatggctgcttatggtgacaatcatagattgttatcataaagcgaattggattggccatccggtgaaagtcagaacgctaatttatctgtttgttggatacaccaaagttaactgcaatacactaaccttgattcgcatagtgttgttaattagatatcattaccaca

SEQ ID NO: 909 - DNA, 725 bp, Tasmanian devil-associated sapelovirus
  misc_feature 1..725: note = isolate1
  source 1..725: mol_type = genomic DNA
tggggaggtgcctcctccccattgcagagtgctttgtcctacgggtcaagtacctgccgttgttggtgttcccacgggtgcagtcagcaaagcccccttttcgccccttccccctcacctaacctttttcccctctctttggcaagcgatgaaaggattacgagcaaggtttgcggaagaattgttatggcgattgcggaagaatatggattaaggattttccacgtaccttagatgatcataggtggctttcacctctggaccagtgatcaaacgtggaccatagtttaagtgaagtaagcatgttccaggtgaaaacgcatattgaaatgaacgtgtctgtagcgacctccaagtgcgcatggcctcccatgatggtgacatcatccatgcggaccaaaagtcaagtgtgcagtgacgtgcgaataatagactgtacccacggttgaagattcgcacggcatgagttcaccacttggagcggccgaccccgggccacacgggattggagatgtgcttgagtaatctggaagaggcttatataaacactctatgggggctgtgaagaatgccatgcaggtaccctcacacagaggatctgagcattgggccacggagacgatctataaactcgaagtggttgaaaagtatctaagcagcccgcaaggggcccatggttgggcccctctattttccccttattattttatcagtggtgacaatag

SEQ ID NO: 910 - DNA, 725 bp, Coxsackievirus
  misc_feature 1..725: note = A4 gene for polyprotein, polyprotein region,strain1
  source 1..725: mol_type = genomic DNA
ttcccacccacagggcccactgggcgctagcacactgattctacggaaactttgtgcgcctgttttatacctcctccccgaagagtaacttagaagcttaacatacccatggccagcagcaggcgtgacataccagtcatgccccggtcaagcacttctgtctccccggactgagtatcaatagactgctcgcgcggttgaaggagaaaacgttcgttatccggctaactacttcgagaaacctagtaacaccatgaaagttgcagagtgtttcgttcagcacttcccccgtgtagatcaggtcgatgagtcactgcaaaccccacgggcgaccgtggcagtggctgcgttggcggcctgcccatgggaccacccatgggacgctctaatacagacatggtgtgaagagtctattgagctagttagtagtcctccggcccctgaatgcggctaatcctaactgtggagcacacgccctcaacccagggggtagtgtgtcgtaatgggcaactctacagcggaaccgactactttgggtgtccgtgtttccttttatctttatattggctgcttatggtgacaattgaagaattgttaccatatagctattggattggccatccggtgtctaatagagcaattgtatacctatttgttggatttgtccccttgtcatacacatctataaacaccctacaatatattgtaaaattgaatacaggaaa

SEQ ID NO: 911 - DNA, 725 bp, Coxsackievirus
  misc_feature 1..725: note = A4, isolate C040/CHW/AUS/2016 polyprotein gene,1
  source 1..725: mol_type = genomic DNA
ccacccacagggcccactgggcgttagcacactgattctaaggaatctttgtgcgcctgttttatatccctcccccccaaaagtgtaacgtagaagtttaatacactcacgaccaatagcaggcgtgacgcaccagtcacgtcttggtcaagtacttctgtctccccgggccaagtatcaatagactgcttacgcggttgaaggagaaaacgctcgttacccggctaactacttcgagaaacccagtagcaccatgaaagttgcagggtgtttcgttcagcacttcccccgtgtagaccaggtcgatgagtcactgcaaaccccacgggcgaccgtggcagtggctgcgttggcggcctgcccatggggtaacccatgggacgctctaatacagacatggtgtgaagagtctattgagctagttagtagtcctccggcccctgaatgcggctaatcctaactgcggagcacacaccctcaacccagggggcggtgtgtcgtaacgggtaactctgcagcggaaccgactactttgggtgtccgtgtttccttttatatttattatggctgcttatggtgacaattgaagaattgttaccatatagctattggattggccatccggtgtctaacagagcaattgtatacctatttgttggatttgtccctctgtcacacacacctctcaataccctatactatattatagagttgaatacaggaag

SEQ ID NO: 912 - DNA, 725 bp, Coxsackievirus
  misc_feature 1..725: note = A10, strain 13-2591-2, complete genome.1
  source 1..725: mol_type = genomic DNA
ttgctcccacccacagggcccactgggcgctagcaccctggtgccacggcacctttgtgcgcctgttttatcaccctaccccatatgaaacttagaagtaatacatagccgaccaatagcaggtgtggcgtgccagccacatcttggtcaagcacttctgtttccccgggtcgagtatcaataagctgttcacacggctgaaggagaaaacacccgttatccggccaactacttcgagaaacctagtaccaccatgaacgttgcaaggtgtttcgctcagcacttcccccgtgtagatcaggccgatgagtcaccgcataccccacgggtgaccgtggcggtggctgcgttggcggcctgcctatgggttaacccataggacgccttaatactgacatggtgcgaagagtctattgagctagttggtagtcctccggcccctgaatgcggctaatcctaactgcggagcacacactcacaaaccagtgagcggtgtgtcgtaacgggcaactctgcagcggaaccgactactttgggtgtccgtgtttccttttacctttatattggctgcttatggtgacaatcagagaattgttaccatatagctattggattggccatccggtgtctaatagagctattgtatatctgtttgttggattcactccgctgacctacaaatctctaaacaccttgtgctatattttgaatctaaatacacgaaa

SEQ ID NO: 913 - DNA, 725 bp, Enterovirus sp.
  misc_feature 1..725: note = isolate CPML_8109/08, complete genome.1
  source 1..725: mol_type = genomic DNA
ttaaaatagcctgagggttgttcccacccacagggcccacgtggcgcagtactctggtatcacggtacctttgcacgcctattttataccccttccccatcgtaacttagaagcaacaaacaaactgcccaatagcagcacaacacccagttgtgttaggggcaagcacttctgtttccccggaagggtctgacggtatgctgtacccacggcagaagtatgacctaccgttaaccggccatgtacttcgagaagcctagtaccattatgaaggttgattgatgttacgctccccagcaaccccagctggtagttctggtcgatgagtctcggcattccccacgggcgaccgtggccgaggctgcgttggcggccagcctacaccatacggtgtaggacgtcaagatactgacatggtgtgaagagcctattgagctacgtggtagtcctccggcccctgaatgcggctaatcctaactccggagcatccgccagtaagcccactggaagggtgtcgtaatgcgaaagtctggagcggaaccgactactttgggtgtccgtgtttcctgttttacttattgtttggctgcttatggtgacaacttatagttatcatcataagctacttggtcttgccaaccggagaattatttggttatttgttggtttcataaacctacagtcgtattttcctgtcttattaattgttctcaaaattaacaaca

SEQ ID NO: 914 - DNA, 725 bp, Enterovirus sp.
  misc_feature 1..725: note = D, isolate EV-D111_CAF-NGB-06-107 polyprotein gene,1
  source 1..725: mol_type = genomic DNA
ttcccaccctagaggcccacgtggcggctagtactctggtattacggtacctttgtacgcctgttttatattccttcccctatcgtaacttagaagtttcaaacacagctcaacagacagtagtacataccagtactgctacgagcaagcacttctgttaccccggtgaagtcacatagactgtgcccacggttgaaagtgactgatccgttacccgctttagtacttcgagaagcctagtaatatcttggaatcttcgatgcgttgcgctcaacactcaaccccagagtgtagcttaggtcgatgagtctggacactccccaccggcgacggtggtccaggctgcgttggcggcctacctgtggcccaaagccacaggacgctagttgtgaacaaggtgtgaagagcctattgagctactaaagagtcctccggcccctgaatgcggctaatcccaaccacggagcaagtgctcacaatccagtgagtggcttgtcgtaacgagcaattctgtggcggaaccgactactttgggtgtccgtgtttccttttatttttatcattggctgcttatggtgacaatctaagattgccatcatatagcttttggattggccatccggtgatattttgaattactcagcttgctgttcacagcactcttcaaatagtaattatttattaccacctgcagtttgttcttaaattgtctccagacagtcaaa

SEQ ID NO: 915 - DNA, 725 bp, Enterovirus sp.
  misc_feature 1..725: note = B, isolate E-19_CAF-BAN-05-150a polyprotein gene,1
  source 1..725: mol_type = genomic DNA
atcccacccacagggcccattgggcgctagcacaccggtattacggtacccttgtgcgcctgttttatacaccctacccccaaaacgtaatttagaagcaagtcaacaaagaccaatagcaagcacggcacaccagctgtgttttggtcaagcacttctgttaccccggactgagtatcaataggctactcacgtggctgaaggagaaaacgttcgttatccgtccaattacttcgagaagcctagtaacaccatagaggttgcgcagcgtttcgctccgcactaccccagtgtagatcaggtcgatgagtcaccgcattccccacgggtgaccgtggcggtggctgcgttggcggcctgcccatggggcaacccatgggacgcttcaatactgacatggtgcgaagagcctattgagctaattggaagtcctccggcccctgaatgcggctaatcctaactgcggagctggtacccacaaaccagtgggtggccagtcgtaacgggcaactctgcagcggaaccgactactttgggtgtccgtgtttcattttattcctatactggctgcttatggtgacaattgaaagattgttgccatatagctattggattggccatccggtgacaaataaagcgattgtttatcagttcattggtttcgtaccgctaaactacacaacattaaacaccctcaactttatcctattgctcaacacaacaag

SEQ ID NO: 916 - DNA, 726 bp, Coxsackievirus
  misc_feature 1..726: note = A6 gene for polyprotein, polyprotein region,strain1
  source 1..726: mol_type = genomic DNA
gtacccaccctcagggcccactgggcgctagcactctgattctgcggaatccttgtgcgcctgttttataaccctcccccgattcgtaacttagaagcaatgagcctcactgatcaacagtaggcgcggcgcaccagccgtgtcttgatcaagcactcctgtttccccgggctgagtatcaatagactgcttgcgcggttgaaggagaaaacgctcgttacccggctaactacttcgagaaacctagtagcaccatcgaaattgcagagtgtttcgctcagcacttcccccgtgtagatcaggtcgatgagtcactgcaacccccacgggcgaccgtggcagtggctgcgttggcggcctgcctatggggcaacccataggacgctctaaaatggacatggtgtgaagagtctattgagctagttagtagtcctccggcccctgaatgcggctaatcctaactgcggagcgcatgcccccaaaccagagggtggtgcgtcgtaacgggcaactctgcagcggaaccgactactttgggtgtccgtgtttccttttattcttactatggctgcttatggtgacaattgaagaattgttaccatatagctattggattggccatccggtgtctaatagagctattgtatatttatttgttggatttgttccattgacatatacatcacttaatacattaaacttcattgtgagattaaacacaagaaa

SEQ ID NO: 917 - DNA, 726 bp, Enterovirus sp.
  misc_feature 1..726: note = C96, strain XZ94-XZ-CHN-2012, complete genome.1
  source 1..726: mol_type = genomic DNA
ttaaaacagctctggggttgttcccaccccagaggcccacgtggcggccagtacaccggtatcacggtacccttgtacgcctgttttatactccctaccccgtaacttagaagcattgactcaagttcaatagtaggggtacaaaccagtaccaccacgaacaagcacttctgtttccccggtgatgtcgtatagactgtacccacggttgaaagtgacagatccgttacccgcttttgtacttcgagaagcccagtaccaccttggaatcttcgatgcgttgcgctcagcactcaatcccagagtgtagcttaggtcgatgagtctggacgttcctcaccggcgacggtggtccaggctgcgttggcggcctacctgtggcccaaagccacaggacgctagttgtgaacaaggtgtgaagagcctattgagctacaaaagagtcctccggcccctgaatgcggctaatcctaaccacggagcaggtgatcacaagccagtgattagcctgtcgtaatgcgcaagtctgtggcggaaccgactactttgggtgtccgtgtttccttttatttcatttatggctgcttatggtgacaatcatagattgttgtcataaagcgaattggattggccatccggtgagagtttagcgctttatttgtctgctcatcgaacttgcacttttgaattcttaccccttgcaccttattagacagtggtatcatc

SEQ ID NO: 918 - DNA, 726 bp, Enterovirus sp.
  misc_feature 1..726: note = C96, isolate SZ/GD/CHN/2015, complete genome.1
  source 1..726: mol_type = genomic DNA
gttcccaccccagaggcccacgtggcggccagtacaccggtattacggtacccttgtacgcctgttttatactccctaccccgtaacttagaagcaaaaactcaagttcaatagcaggggggtacaaaccagtaccaccacgaacaagcacttctgtttccccggtgacttcgcataaactgtacccacggttgaaagcgatagatccgttatccgcttttgtacttcgagaagcctagtaccatcttggaatcttcgatgcgttgcgatcagcactcaaacccagagtgtagcttaggtcgatgagtctggacgatcctcaccggcgacggtggtccaggctgcgttggcggcctacctgtggtccaaagccacaggacgctagttgtgaacaaggtgtgaagagcctattgagctacaaaagagtcctccggcccctgaatgcggctaatcccaaccacggagcaggcgatcacaacccagtgactagcctgtcgtaatgcgcaagtctgtggcggaaccgactactttgggtgtccgtgtttctctttattccattaatggctgcttatggtgacaatcatagattgttatcataaagcgattcggattggccatccagtgaaaatcaagtgtactactcacttatttattgagtttacaactctaacccatcactcactacaacccattttattgtgtcactatccagacagtggtatcatc

SEQ ID NO: 919 - DNA, 726 bp, Echovirus
  misc_feature 1..726: note = E7, strain HAI/2016-23084 polyprotein gene, complete cds.1
  source 1..726: mol_type = genomic DNA
ttcccacccacaaggcccaccgggcgttggcacactggtatcacggtacctttgtgcgcctgttttaaaacccctacccccaaacgcaacttagaagataagcacacagtccaatagagggcgtggcactccagccatgtcttggacaggcactcctgttaccccggactaagtaccaataaactgctcacgcggttgaaggggaaaacgttcgttatccggctaactacttcgaggaacctagtaacaccgtgaaagttgcagagtgtttcgctcagcacaaccccagtgtagatcaggtcgatgagtcaccacgttccccacgggcgaccgtggtggtggctgcgctggcggcctgcctatgggtcaacccataggacgctctaacacagacacggtgtgaagagtcgattgagctagttagtagtcctccggcccctgaatgcggctaatcctaactgcggagcgtgcgtccccaaaccaggagatagcgcgtcgtaacgggcaactctgcagcggaaccgactactttgggtgtccgtgtttccttttttttacctctatttggctgcttatggtgacaattgaagaattgttaccatatagctattggattggccatccggtgactaatagagctattgtttacctctttgttggttttgtaccactgaacctcatagttctaaatacccttaatttgattttagtgcttaacacatcaaa

SEQ ID NO: 920 - DNA, 727 bp, Human enterovirus 70
  misc_feature 1..727: note = strain J670/71, complete genome.1
  source 1..727: mol_type = genomic DNA
ttaaaacagctctggggttgttcccaccccagaggcccacgtggcggctagtactccggtaccccggtacccttgtacgcctgttttatactccctttcccaagtaactttagaagaaataaactaatgttcaacaggagggggtacaaaccagtaccaccacgaacacacacttctgtttccccggtgaagttgcatagactgtacccacggttgaaagcgatgaatccgttacccgcttaggtacttcgagaagcctagtatcatcttggaatcttcgatgcgttgcgatcagcactctaccccgagtgtagcttgggtcgatgagtctggacaccccacaccggcgacggtggtccaggctgcgttggcggcctacccatggctagcaccatgggacgctagttgtgaacaaggtgcgaagagcctattgagctacctgagagtcctccggcccctgaatgcggctaatcccaaccacggagcaaatgctcacaatccagtgagtggtttgtcgtaatgcgcaagtctgtggcggaaccgactactttgggcgtccgtgtttccttttatttttattatggctgcttatggtgacaatctgagattgttatcatatagctattggattagccatccggtgatatcttgaaattttgccataactttttcacaaatcctacaacattacactacactttctcttgaataattgagacaactcata

SEQ ID NO: 921 - DNA, 728 bp, Enterovirus sp.
  misc_feature 1..728: note = D, isolate EV-D111_CAF-BAN-06-150 polyprotein gene,1
  source 1..728: mol_type = genomic DNA
ttcccaccctagaggcccacgtggcggctagtactctggtattacggtacctttgtacgcctgttttatatccctttccccattgtaacttagaagtttcaaagtacagttcaatagacagtagtacaaaccagtactgctacgaacaagcacttctgttgccccggtgtagttgcatagactgtacccacggttgaaagcaactgatccgttatccgctttagtacttcgagaagcctagtagcaccttgggatcttcgatgcgttgcgctcagcactcaaccccagagtgtagcttgggtcgatgagtctggacattcctcaccggcgacggtggtccaggctgcgttggcggcctacctgtggcccaaagccacaggacgctagttgtgaacaaggtgtgaagagcctattgagctactaaagagtcctccggcccctgaatgcggctaatcctaaccacggagcaagtgctcacagtccagtgagtagcttgtcgtaatgagcaattctgtggcggaaccgactactttgggtgtccgtgtttccttttatttttatcattggctgcttatggtgacaatctaaggttgccatcatatagcttttggattggccatcccggtgatatttcgaattattcaatttgctgtttgcagctccttttaaacagtattcactcaccagcattcatattttactcttgagttattaacaaatagtcaaaa

SEQ ID NO: 922 - DNA, 729 bp, Bovine kobuvirus
  misc_feature 1..729: note = strain SC1 polyprotein gene, complete cds.1
  source 1..729: mol_type = genomic DNA
attcccaaggcccactcggttcaacttcggtttccggacaaatataaagaacctcagtcctcttggtactttctcgcctgagtcaacaaagcgagaaacctgcccctccagcgccagacgagcggcataaaacttgaacttctggcatgctccaccacccttttccccattccaacccccattgcgctctcaaggtcgcgctttttcgagactagctcggattcaaaagttcctggcaccctttgccccttcaggcccttaaggtaggaactgaccttgtgctgtgccctcggtgcggaagtgctactgcgtagcgattgtaagatccctttgtggttctgccctggcaaggttatagagtactgtgatccgctgcggatgccatcctggtaacaggacccccagtgtgcgcaacagtatgttcacggtcttccgtgtccaccacattcggaacactgctctcgtgaaacagtgtgtgtccaatccctgcaatcagtatcaactacaccacctaggaatgctaggaaggtaccccggtccgccgggatctgatcctaggctaattgtctacggtggtgctcctttttattttccacttcaattcattggttacaactgctcgatccctgtgtttgctgcccttctctgctctcatcgccattctcaagtgttcacactgtccaagttcctttggttgttcgcttccacttgccactgtcaactcttgtc

SEQ ID NO: 923 - DNA, 729 bp, Coxsackievirus
  misc_feature 1..729: note = A10, strain 17-118-2, complete genome.1
  source 1..729: mol_type = genomic DNA
gttgcacccacccacagggcccaccgggcgctagcactctgattttacgaaatctttgtgcgcctgttttatatccccttccctattcgtaacttagaagtaatgagcaacaacgatcaatagcaggcgtggcgcaccagccatgtcttgatcaagcacttctgttaccccggactgagtatcaatagactgctcacgcggttgaaggagaaaacgttcgttacccggctaaccacttcggaaaacctagtagcaccattgaagctgcagagtgtttcgctcagcacttcccccgtgtagatcaggtcgatgagtcactgcaacccccacgggcgaccgtggcagtggctgcgttggcggcctgcctatggggtaacccataggacgctctaatgtggacatggtgtgaagagtctactgagctggttagtagtcctccggcccctgaatgcggctaatcctaactgtggagcgcacactctcaaaccagggagcagtgcgtcgtaacgggcaactccgcagcggaaccgactactttgggtgtccgtgtttccttttatccttatattggctgcttatggtgacaatcacggaattgttgccatatagctattggattggccatccggtgtctaatagagctattgtgtacctatttgttggatttactccactgtcatataaatctctgaacactttgtgctttatattgaacttaaacacacgaaa

SEQ ID NO: 924 - DNA, 729 bp, Human poliovirus 3
  misc_feature 1..729: note = isolate Env08_E2886 polyprotein gene, complete1
  source 1..729: mol_type = genomic DNA
ttaaaaacagctctggggttgttcccaccccagaggcccacgtggcggctagtactctggtattacggtacctttgtacgcctgttttatatcccctttcccctgtaactcagaagcatgaagtttaagctcaacaggaggggtgcaaaccagcacctctacgagcaagcactactgtttccccggtgaagttacatagactgttcccacggttgaaagtgattgatccgttatccgctcatgtacttcgagaagcctagtatcgctctggaatcttcgatgcgttgcgctcaacactcgaccccggagtgtagcttaggccgatgagtctggacattccccactggcgacagtggtccaggctgcgttggcggcctacctgtggtccaaagccacaggacgctagttgtgaacagggtgtgaagagcctattgagctgcatgagagtcctccggcccctgaatgcggataatcctaaccatggagcaggcaactgcaacccagcagtcagcctgtcgtaacgcgtaagtccgtggcggaaccgactactttgggtgtccgtgtttccttttatttttgaatggctgcttatggtgacaatcacagattgttatcataaagcaaattggattggccatccagtgaatcactaccgagtttgttaaatctatttcagagacacacaactcctcaacgcactatacctaaacagaggattatactacagcg

SEQ ID NO: 925 - DNA, 729 bp, Coxsackievirus
  misc_feature 1..729: note = A9, strain USA/2015/CA-RGDS-1050, complete genome.1
  source 1..729: mol_type = genomic DNA
catgctcccacccatagggcccactgggcgtcagcacactggtattgcggtacctttgtgcgcctgttttatccaccccaccccctcaacgtaacttagaagcacatcccacacggtcaatagttggctcgataagccaatcgagtctggatcaagcacttctgttaccccggactgagtatcagtaagctgcttgcgcggctgatggagaaaacgttcgttacccggccatttacttcgggaaacctagtaccaccatgaatgttgcgcagcgtttcgctccacactaccccagtgtagatcaggtcgatgagtcactgcataccccacgggcgaccgtggcagtggctgcgctggcggcctgcccatggggcaacccatgggacgcttcaatactgacatggtgcgaagagtctactgagctaagtggtagtcctccggcccctgaatgcggctaatcctaactgcggagcagatacccacgaaccagtgggcagtctgtcgtaatgggcaactctgcagcggaaccgactactttgggtgtccgtgtttccttttattctaatactggctgcttatggtgacaattgaacgattgttaccatatagctattggattggccatccggtgacaaacagagcgattatatactcatttgttgggttcgtaccacttaattacaaagttctaaacacccttaactatatactagcactcaacacatcaaa

SEQ ID NO: 926 - DNA, 730 bp, Hedgehog hepatovirus
  misc_feature 1..730: note = isolate Igel68Erieur2014 polyprotein gene,1
  source 1..730: mol_type = genomic DNA
ttcaaaggcggtgtcccggattgtttccgggccgcctttgggcaaccatgatgaggggttgtaaatcacctcatccccgtttgcctagggtgataggctttttatgttttatgtttgttggtctagttcgtcaattgtaaatattgatttctgcaggttcagagttcttaattatgttcctctataaggacactctctttaagtctaggccataagtgatcctagagataggtgaacctttcatatctggtctatgttagggcctttatatccctaggggcaatctttgtgccccttatttctcctatctttcttcttttcttccgggctctcacggtgccaatggaacgaccggtgcgcccgccggggttaactccaagattagcttggagctgtagttgctaaaagccgtgatgaaggaagcagactatcaagttagttaggtgttaactgaaacatgaattctattatgatctttgtgagtgggtaggctacgggtgaaacccactaggttaatactcatattgagagatacctccattaggctaaggttggcggtaaaggtgagtttaacgacgtatcctttcaacgcctgtgggccggtctcaatggcacaatgcgtagtagatgaagtgtgtagggcctactaaggagatgctctgtggaattcaccctcccgaaaggtcgtaggggtactcaggggcatttaggtttccacattttaaatttc

SEQ ID NO: 927 - DNA, 730 bp, Simian enterovirus 46
  misc_feature 1..730: note = strain RNM5, complete genome.1
  source 1..730: mol_type = genomic DNA
tttaaaacagcctgtgggttgtacccactcacagggcccacgtggcgttagtactctggtatcacggtacctttgtatgcctgttttatctcccttcccccgtaacgttagaagaataaacaaatgacaactagcaaatccaccaacccaggtgggttttcgtcaagcacttctgtttccccggacttagtaccaataggctgtacccacggctgaaggggaaaatgttcgttacccggctacctacttcgaaaagcctagtaccaccaatgattgtctcaagtgttacgttcagcacaaccccagtgtagttcaggccgatgagtcaccgaattccccacgggcgaccgtgtcggtggctgcgttggcggcctgcctgcgggtttcacccgcaggacgcttgattcatgacatggtgcgaagagcctattgagctaggtagtagtcctccggcccctgaatgcggctaatcctaaccacggagcattcactggcaaaccagccagcagaatgtcgtaatgggtaactctgtggcggaaccgactactttgggtgtccgtgtttcctgttttacttattttggctgcttatggtgacaatttacggattgttaccatatagctattggattggccatccggattattgcaatactactatttgtgggatttctccctttgtgttataataactaccccattctaacattagctctcaagtttaatacact

SEQ ID NO: 928 - DNA, 730 bp, Coxsackievirus
  misc_feature 1..730: note = A2, strain 63041-775 polyprotein gene, complete cds.1
  source 1..730: mol_type = genomic DNA
tgcacccacccacggggcccactgggcgccagcactctgattctacggaatccttgtgcgcctgttttataaccccccccctcaattaggtaacatagaagttagaaacatatatggccaatagcaggcgtggcgcaccagtcgcgtctcggtcaagcacttctgtttccccggactgagtatcaataagctgctcgcgcggctgaaggagaaaacgttcgttatccggctaactacttcgagaaacctagtagcaccatgaaagttgcggagtgtttcgctcagcacttcccccgtgtagatcaggtcgatgagtcactgcattccccacgggcgaccgtggcagtggctgcgttggcggcctgcctatggggtaacccataggacgctctaatacggacatggtgcgaagagtcaattgagctagttagtagtcctccggcccctgaatgcggctaatcctaactgcggagcacataccctcaatccagggggcggtgtgtcgtaatgggcaactctgcagcggaaccgactactttgggtgtccgtgtttccttttattcttatattggctgcttatggtgacaattgagagattgttaccatatagctattggattggccatccggtgtccaacagagctctggtttacttgttcgttggctttatacctctgtcacccacagtttattcaactctagtgttcttaatacgccttaacagtaagag

SEQ ID NO: 929 - DNA, 730 bp, Coxsackievirus
  misc_feature 1..730: note = A10, strain 61216-2814 polyprotein gene, complete1
  source 1..730: mol_type = genomic DNA
gttgcacccacctacagggcctactgggtgctagcactctgattctacggaatctttgtgcgcctgttttataaccccctccccaatttgtaacttagaagcaatgaaccccatcgatcaatagcaggcataacgcaccagttatgtctcgatcaagcacttctgttttcccggactgagtatcaatagactgcttgcgcggtcgaaggagaaaacgttcgttacccggctaactacctcgagaagcctagtagcaccactgaaactgcagagtgtttcgttcaacacttcccccgtgtagatcaggtcgatgagtcactgctctccccacgggtgaccgtggcagtggctgcgttggcggcctgcctatggggtaacccataggacgctctgaagtggacatggtgtgaagagcctattgagctagttagtagtcctccggcccctgaatgcggctaatcctaactgtggagcgcatgccctcaaaccagggggtggtgcgtcgtaacgggtaactccgcagcggaaccgactactttgggtgtccgtgtttccttttattatcctattggctgcttatggtgacaattaaagaattgttaccatatagctattggattggccatccggtgtgtaatagagcgattatctacctatttgttggatacattccgttaacattcaaatctctcaacacattatactacattctgaccttgaacacaagaaa

SEQ ID NO: 930 - DNA, 730 bp, Enterovirus C
  misc_feature 1..730: note = strain EQG1419332, complete genome.1
  source 1..730: mol_type = genomic DNA
ggggttgttcccaccccagaggcccacgtggcggctagtacactggtatcacggtacctttgtacgcctgttttatactccttcccccgcaatttagaagcatacaattcaagctcaataggagggggtgcaagccagcgcctccgtgggcaagcactactgtttccccggtgaggccacatagactgttcccacggttgaaagtgtccgatccgttatccgctcatgtacttcgagaagcctagtatcgctctggaatcttcgacgcgttgcgctccacactcagtcccagagtgtagcttaggctgatgagtctggacattcctcaccggcgacggtggtccaggctgcgttggcggcctacctgtggcccaaagccacaggacgctagatgtgaacaaggtgtgaagagcctattgagctataagagagtcctccggcccctgaatgcggctaatcccaaccatggagcaggcagccgcaatccagcagccagcctgtcgtaacgcgcaagtctgtggcggaaccgactactttgggtgaccgtgtttccttttattatttcaatggctgcttatggtgacaatcatagattgttatcataaagcgagttggattggccatccagtgtgaatcggattatttactcccttgtttgttggattcactcccgaaacgttttaccccttaacttattgaaattgtttgaagacaggatttcagtgtcaca

SEQ ID NO: 931 - DNA, 731 bp, Salivirus A
  misc_feature 1..731: note = strain YZ01, complete genome.1
  source 1..731: mol_type = genomic DNA
gtgtttctcccccctttcgaccgccctatggcaggcgggcttgtggacggcttcggcccacccacagcaagaatgccatcatctgtcctcacccccatcttcccctttcttcccctgcaaccgtcacgcttactcacatgtgcattgagtggtgcacgtgttgaacaaacagctacactcacatggggcgggttttcccgccttgcggcctctcgcgaggcccacccctccctctcctcccataactacagtgctttggtaggtaagcatcctgatcccccgcggaagctgctcacgtggcaactgtggggacccagacaggttatcaaaggcacccggtctttccgccttcaggagtatccctgctagtgaattctagtagggctctgcttggtgccaacctcccccaaatgcgcgctgcaggagtgctcttccccaactcaccctagtatcctctcatgtgtgtgcttggtcagcatatctgagacgatgttccgctgtcccagaccagtccagtaatggacgggccagtgtgcgtagtcgtcttccggcttgcccggcgcatgtttggtgaaccggtggggtaaggttggtgtgcccaacgcccgtactttggtgatacctcaagaccacccaggaatgccagggaggtaccccgcttcacagcgggatctgaccctgggctaattgtctacggtggttcttcttgcttccacttctttctactgttt

SEQ ID NO: 932 - DNA, 731 bp, Enterovirus sp.
  misc_feature 1..731: note = isolate CPML_3961/08, complete genome.1
  source 1..731: mol_type = genomic DNA
ttaaaatagcctgagggttgctcccacccacggggtccacgtgacgtagtactctggtatctcggtacctttgtacgcctattttatatccccttccccctttgtaacttagaagaaataagcaaactgcccaatagcggcacaatacccaattgtgttacgggcaagcactcctgtttccccggaagggtctatcggtatgctgtacccacggcagaagtatgacctaccgttaaccggccatgtacttcgagaagcctagtaccaccatgaaggttgattgatgttacgttccccagcaaccccagctggtagttctggtcgatgagtctcggcatcccccacgggcgaccgtggccgaggctgcgctggcggccagcctacacctctttggtgtaggacgtcaagatattgacatggtgtgaagagcctattgagctacgtggtagtcctccggcccctgaatgcggctaatcctaactccggatcgtccgctggcaatcccgccagaagggcgtcgtaatgcgcaagtctggagcggaaccgactactttgggtgtccgtgtttcctgttttatttactgtttggctgcttatggtgacaacttatagttatcatcataagctacttggtcttgccaaccggagaataatttggttatttgttggttttacaaacctacaagagtcagtactcatcctattaattgttctaagaataaacacacaag

SEQ ID NO: 933 - DNA, 732 bp, Bovine hungarovirus 1
  misc_feature 1..732: note = strain BHUV1/2008/HUN, complete genome.1
  source 1..732: mol_type = genomic DNA
tcgcccctcctttccccccttattttcccttttccctctctccctccctttgtaacttaacgtttggcaagaaccctcacctgtcaattgggaccaccactttcagtgaccccatgcgaagtagtgagagagaataagctttcttacccttcatttgtgaacccttcagtcgaagccgcttggaataagataggaggaaaagttcattctaaatggagtgaaacatgtacttcagaatttctagcacgcgctgggctttcttgcgtgtgacggcactgtcttgccggagctctccacactgacaccccacgcttgtggaccttggtggcagatgacaacactgcagctggaattgagtgtctggtacactctgtgtaacagtgaaaacaatgtgatcacttcggtgagctagtagcctgtggaccaacaactggtaacagttgcctcaggggccaaaagccacggtgtttacagcaccctactggtttgattggagcaatccaagatgtcacagagttagtaattgccaagcagtccgtactggtatcttgacataccgtgcagttttggatagtgaaggatgccctgacggtacccataggtaacaagtgacactatggatctaagcaggggctcactctacgctgctttacagctggctgtgagttaaaaaacgtctagctatccacaacctaggggactaggttttccttttatttagattacaattat

SEQ ID NO: 934 - DNA, 732 bp, Human poliovirus 2
  misc_feature 1..732: note = strain NIE0811454, complete genome.1
  source 1..732: mol_type = genomic DNA
ttaaaacagctctggggttgttcccaccccagaggcccacgtggcggctagtacaccggtattgcggtacccttgtacgcctgttttatactcccttttccctgtaacttagaagaaacaaaccaagttcaatagaagggggtacaaaccagtaccaccacgaacaagcacttctgtttccccggtgatgttgcatagactgtacccacggttgaaagcgattgatccgttacccgctcttgtacttcgagaagcctagtatcatcttggaatcttcgatgcgttgcgctcagcactcaaccccagagtgtagcttaggtcgatgagtctggacattcctcaccggcgacggtggtccaggctgcgttggcggcctacctgtggcccaaagccacaggacgctagttttgaacaaggtgtgaagagcctattgagctacatgagagtcctccggcccctgaatgcggctaatcccaaccacggagcaagggtgcacatgccagtgtataccttgtcgtaacgcgcaagtctgtggcggaaccgactactttgggtgtccgtgtttccttttatttttacattggctgcttatggtgacaatcgaagattgttatcataaagcgagttggattggccatccggtgaaagtaaagcatattatttacttggttgttgggattataccactcaatccttttactaacaatacgaggataaaacaacaatactaca

SEQ ID NO: 935 - DNA, 732 bp, Human echovirus
  misc_feature 1..732: note = 32, strain PR-10 complete genome.1
  source 1..732: mol_type = genomic DNA
tgtgggttgttcccacccacagggcccactgggcgctagtacactggtaccaaggtacctttgtacgcctgttttataccccctccccgatccgaaacttagaagtaaagcaaacccgatcaatagtaggtgcgacactccagtcgtatctcgatcaagcacttctgtttccccggactgagtatcaatagactgcccacgcggttgaaggagaaaacgtccgtcatccggctaactacttcgagaaacccagtagcaccatggaagttgcagagtgtttcgctcagcactaaccccgtgtagatcaggctgatgagtcaccgcattccccacgggtgaccgtggcggtggctgcgttggcggcctgcctatggggcaacccataggacgctctaatacggacatggtgtgaagagtctattgagctagttagtaatcctccggcccctgaatgcggctaatcctaactgcggagcacatactcctactccaaggagcagtgtgtcgtaacgggcaactctgcagcggaaccgactactttgggtgtccgtgtttcctattaacatatcactggctgcttatggtgacaattgaaagattgttaccatatagctattggattggccatccggtgtcaaacagagcaatagtgtacctattcgctgggtttatcccattgactgttaaagatatacaaactctctacttgataatacaactaaacactgtaaa

SEQ ID NO: 936 - DNA, 732 bp, Enterovirus sp.
  misc_feature 1..732: note = B, isolate BG/521_2017/CSF/2017 polyprotein gene,1
  source 1..732: mol_type = genomic DNA
ctgtgggttgttcccactcacagggcccactgggcgttagcacactggtattgcggtacctttgtgcgcctgttttatccaccctttccccatagtaacttagaagtacgttcaaatggtcaataggcggctcagtataccaactgagtctcgaccaagcacttctgttaccccggaccgagtatcaataagctactcacgtggctgaaggagaaaacgttcgttacccggccaactacttcgagaaacctagtaccaccatggatgttgcgcggcgtttcgctccgcactaccccagtgtagatcaggtcgatgagtcaccgcattcctcacgggcgaccgtggtggtggctgcgctggcggcctgcccatggggcaacccatgggacgcttcaatacagacatggtgtgaagagtctattgagctagttggtagtcctccggcccctgaatgcggctaatcctaactgcggagcagatccccacacaccagtgggcagtctgtcgtaatgggtaactctgcagcggaaccgactactttgggtgtccgtgtttccttttattcttatactggctgcttatggtgacaattgaaagattgttaccatatagctattggattggccatccagtgtctaacagagcaataatctatctttttgttggattcgtcccacttgactacagagcacttgcaacgctcaattacattatagatctcaacacaacgaa

SEQ ID NO: 937 - DNA, 733 bp, Enterovirus sp.
  misc_feature 1..733: note = A, isolate E0-67 polyprotein gene, partial cds.1
  source 1..733: mol_type = genomic DNA
cttgtacccactcacagggcccactgggcgctagcactctgattccacggaatctttgtgcgcctgttttataaccccttccccaacttgaaacgtagaagcaatacacataaccgatcaatagcaggcgtgacgcaccagtctcgtctcgatcaagcacttctgtttccccggaccgagtaacaatagactgctaacgcggttgaaggtgaaaacgttcgttatccggctaactacttcgagaagcccagtaacactatgaaagctgcggagcgttacgttcagcactcccccccgtgtagttcaggccgatgagtcactgcgatccctacgggcgaccgtagcagtggctgcgctggcggcctgcctatggggcaacccataggacgctctaaagtggacatggtgcgaagagctaattgagctagttagtagtcctccggcccctgaatgcggctaatcctaactgcggagcgcacgcctccaacccagggggtggtgcgtcgtaacgggcaactctgcagcggaaccgactactttgggtgtccgtgtttccttttattcttatattggctgcttatggtgacaatcacagagttgttaccatatagctattggattggccatccggtgtgcaacagagctatcatttatctatttataggttttgtaccattaactttgagatctacgaccaccctagagtacatattggttttaaattcaattagac

SEQ ID NO: 938 - DNA, 733 bp, Human enterovirus sp.
  misc_feature 1..733: note = 79, strain 17-2255-1_E79, complete genome.1
  source 1..733: mol_type = genomic DNA
ctgtgggttgttcccacccacagggcccactgggcgccagcactctgattccacggaatctttgtgcgcctgttttacaaccctccccaatttgtaacgtagaagcaatacacactactgatcaatagtaggcatggcgcgccagtcatgtcatgatcaagcacttctgttccccggactgagtatcaatagactgctcacgcggttgaaggagaaaacgttcgttacccggctaactacttcaagaaacctagtagcaccatggaagctgcggagtgtttcgctcagcacttcccccgtgtagatcaggtcgatgagtcactgcaatccccacgggcgaccgtggcagtggctgcgttggcggcctgcctatggggtaacccataggacgctctaatgtggacatggtgcgaagagtctattgagctagttagtagtcctccggcccctgaatgcggctaatcctaactgcggagcacatgccttcaacccaggaggtggtgtgtcgtaacgggtaactctgcagcggaaccgactactttgggtgtccgtgtttccttttatccttatattggctgcttatggtgacaatcacggaattgttgccatatagctattggattggccatccggtgtctaacagagctattgtatacctatttgttggatttgtaccactaaattacaaggttttaaacactctcaaccttataatactactcaactcagcaaa

SEQ ID NO: 939 - DNA, 733 bp, Enterovirus sp.
  misc_feature 1..733: note = D68, strain USA/CA/2002-23233, complete genome.1
  source 1..733: mol_type = genomic DNA
ttaaaacagccttggggttgttcccacctcaagggcccacgtggcggccagtactctggtatctcggtacctttgtacgcctgttttaattccctccccaacgtaacttagaagcttttaaaccaaagctcaataggcggagcgcaaaccagcgctcttatgagcaagcacttctgtctccccggtgtggttgtatagactgtccccacggttgaaaacaacttatccgttaaccgctatagtacttcgagaaacctagtattgccttcggagtgtcgatgcgttgcgctcagcacactaacccgtgtgtagcttgggtcgatgagtctggacgtaccccactggcgacagtggtccaggctgcgttggcggcctactcgtggtgaaaaccatgagacgctagacatgaacaaggtgtgaagagtctattgagctactatagagtcctccggcccctgaatgcggctaatcctaaccatggagcaagtgctcacaaaccagtgggttacttgtcgtaatgcgcaagtccgtggcggaaccgactactttgggtgtccgtgtttcactttttacttttatgactgctaatggtgacaatttaatattgttaccatttggcttgtcgaattgatcacataagatctatagttttgttcactgatttgctttcaaataatctcacctcaaaacctccagtacataacatttaaagagtttaaacttatttataaca

SEQ ID NO: 940 - DNA, 734 bp, Picornaviridae sp.
  misc_feature 1..734: note = isolate rfb199pic1 genomic sequence.1
  source 1..734: mol_type = genomic DNA
ctccagcacatgtctattggtgcacttgagctgatccaagcaacggatgtacacacccggttcactaacactttcgcgacagctacccctcactgggaccggttcacaacaacgggccacggggttgcccccggtggtacggcacgtctggaataccggcaatgtgtaccacacactcaggtgagactgccactacttgagttagctactaggagtagccgcacccgccgaatgtcacaacccgcgcagttctgcattcccccgcacctggcggggagctggatggtgttgtaatgctcaccaccgctaatccgggaatcctaggactgacctgttgtgttttagacctcaagaagttaatcactacgagatcgcctagtgcccagttcgcgcgctggagcaggacccaccacggcctttgtgatgggggaatgcagaactgcgcgggttgtgacattcggcgggtgcggctactcctagtagctaactcaagtagtggcagtctcacctgagtgtgtggtacacattgccggtattccagacgtgccgtaccaccgggggcaaccccgtggcccgttgttgtgaaccggtcccagtgaggggtagctgtcgcgaaagtgttagtgaaccgggtgtgtacatccgttgcttggatcagctcaagtgcaccaatagacatgtgctggaggtacccgtaaggatctgaccagtagctaattagtccctgttggtgt

SEQ ID NO: 941 - DNA, 734 bp, Orivirus A
  misc_feature 1..734: note = strain chicken/Pf-CHK1/2013/HUN, complete genome.1
  source 1..734: mol_type = genomic DNA
ttctctcccccctctgggccgccatccttggccagaaaccctcacgagtgcttgtggtaggtcccaggccaatattcttcgtaaggcttggttccaattttccaccactcgtgtttgggttctggcctatggtacccagaggggcggtttgggggaattaactccccctcccctgtggtcctataccaccccacacctctgtgggctttctttactatcttcttgttttccgacttttaaacactaggcaggcgcgcctagtcatacaccgcccggctggtctttccagctcttgtgggcggtgcgcgctggtccatcgtgcccagcgacatagcaccttgtggacacctccgaacgccctcccctgtatggggtggtgcccaggggtttcagtgtggtgacacactccctggggcccgaaaggctagtgtgcaacaggtgaggtacagccagctgcccccgtggctggagggaccaagcttgtgaagcacacctcaccttcttgggggtgggctagtaagtggtgaaagcatagtgtccgtgtcgctggccaacactttgggtcaagtccagccactcagtgagtagatgcccaggaggtacccctagtggatctgacttggggcctgttacttaatgcaggttaaaaactatgaaagctgagtagtgtagcccggctggtggcttctcttccttattcattctattttatggtgacaaacgcaactgaagcc

SEQ ID NO: 942 - DNA, 734 bp, Coxsackievirus
  misc_feature 1..734: note = A10, strain 09-1895-1, complete genome.1
  source 1..734: mol_type = genomic DNA
gcctgtgggttgtacccacccacagggcccactgggcgctagcactctggcaccacggtacctttgtgcgcctgttttatcaccctaccccattcggaacttagaagcaatacacaaccgaccaatagtgggtgtggcacaccagccgcatcttggtcaagtacttctgtttccccgggttgagtatcaataagctgctcacacggctgaaggagaaaacacccgtcacccggccaactacttcgagaaacctagtaccactatgaatgttgcaaggcgtttcgctcagcacttcccccgtgtagatcaggtcgatgagtcaccgcattccccacgggcgaccgtggcggtggctgcgttggcggcctgcctatgggttaacccatgggacgccttaatactgacatggtgcgaagagtctattgagctagttggtagtcctccggcccctgaatgcggctaatcctaactgcggagcacatactcacaagccagtgagcggtgtgtcgtaacgggtaactctgcagcggaaccgactactttgggagtccgtgtttccttttatccttatattggctgcttatggtgacaattggagaattgttaccatatagctattggattggccatccggtgtctaatagagctattatatacctatttgttggatttactccactaacacacaaatccctaaacactttgtgctttatcttaaacttaaatacacgaaa

SEQ ID NO: 943 - DNA, 734 bp, Enterovirus sp.
  misc_feature 1..734: note = C99, isolate 3291/BRA-PA/10, complete genome.1
  source 1..734: mol_type = genomic DNA
gggggttgttcccaccccagaggcccacgtggcggctagtactccggtatcacggtacccttgtacgcctgttttatacccccttcccccgtaacttagaagcaataatccaagttcaatagaagggggtacaaaccagtaccaccacgaacaagcacttctgttaccccggtgaagttgtatagactgtgcccacggttgaaagcgaccgatccgttatccgctcttgtacttcgagaagcccagtatcatcttggaatcttcgatgcgttgcgctcagcactcaaccccagagtgtagcttaggtcgatgagtctggacggtcctcaccggtgacggtggtccaggctgcgttggcggcctacctgtggtccaaagccacaggacgctagttgtgaacaaggtgtgaagagcctattgagctacatgagagtcctccggcccctgaatgcggctaatcctaaccacggagcaagtgctcacaacccagtgagtggcttgtcgtaacgagcaattctgtggcggaaccgactactttgggtgtccgtgtttcctttattttattatatggctgcttatggtgacaatcattgattgttatcataaagcgagttggattggccatccggtgaaagtaaagcacattatttatctttttgttggatttactccattgagtgtttttactccagacgtgattcgagcagtcttattgattagaagcatctgccaca

SEQ ID NO: 944 - DNA, 734 bp, unidentified
  source 1..734: mol_type = unassigned DNA; note = Human coxsackievirus A15strain G9, complete genome.1 sequence
ttaaaacagctctggggttgttcccaccccagaggcccacgtggcggctagtacaccggtattacggtacccttgtacgcctgttttatactccctcccccccgtaacttagaagtacaaaactcaagttcaataggagggggtacaaaccagtaccaccacgaacgagcacttctgtctccccggtgaggttacatagactgtccccgcggttgaaagtaaccgatccgttatccgctcttgtccttcgagaagcccagtaccatcttggaatcttcgatgcgttgcgctcaacactcaaccccagagtgtagcttaggtcgatgagtctggacactccccaccggcgacggtggtccaggctgcgttggcggcctacctgtggcccaaagccacaggacgctagttgtgaacaaggtgtgaagagcctattgagctacaagagagtcctccggcccctgaatgcggctaatcccaaccacggagcaggtgacttcaagccagaagttggcctgtcgtaacgcgtaagtctgtggcggaaccgactactttgggtgtccgtgtttccctttattcttacaatggctgcttatggtgacaatcatagattgttatcataagccgaattggattggccatcgggtgagaatcagatcagttacttacctgtttgttggattcactccgttgacactttacatactaacccttgtcaatacacctgtattatcata

SEQ ID NO: 945 - DNA, 734 bp, Echovirus
  misc_feature 1..734: note = E7 clone V10B polyprotein gene, complete cds.1
  source 1..734: mol_type = genomic DNA
gcctgtgggttgttcccacccacagggcccactgggcgttagcacactggtattccggtacctttgtgcgcctgttttatccaccctccccaatgtaacgtagaagctacgctcaaacggtcaacagatagtccagtaatccagctgggccacgaccaagcacttctgtttccccggacagagtaccaataagctgctcgcgcggctgaaggggaaaacgttcgttacccggccaattacttcgagaaacctagtaccgccatggacgttgcgcagcgtttcgctccacacaaccccagtgtagatcaggtcgatgagccaccgcattccccacgggcgaccgtggcggtggctgcgttggcggcctgcccatggggtaacccatgggacgcttcaatacagacatggtgcgaagagtctattgagctaattggtagtcctccggcccctgaatgcggctaatcctaactgcggagcaggtacccacaacccagtgggtcacctgtcgtaatgggcaactctgcagcggaaccgactactttgggtgtccgtgtttccttttaacctttacactggctgcttatggtgacaattgaaagattgttaccatatagctattggattggccatcctgtgagtaatagagcgattgtatacttatttgttggctttataccactcaatttgaaagctttacagacactgaattatattgtggcattaaacacagcaaa

SEQ ID NO: 946 - DNA, 734 bp, Echovirus
  misc_feature 1..734: note = E6, strain HAI/2016-23034 polyprotein gene, complete cds.1
  source 1..734: mol_type = genomic DNA
cctgtgggttgtccccactcacagggcccactgggcgccagcacactggtatcaaggtacctttgtgcgcctgttttatagccccttccccgaatgtaacgtagaagctgaacccaagcggtcaacaggcggctcagaacaccatctgggtcttgaccaagcacttctgttaccccggactgagtatcaataagctgctcacgcggctgaaggagaaaatgttcgttatccggccaattacttcgagaaacctagtaccaccatgaaggttgcgcagtgtttcgctccgcacaatcccagtgtagatcaggtcgatgagtcaccgcgttcctcacgggcgaccgtggcggtggctgcgctggcggcctgcccatggggcaacccatgggacgcttcaatactgacatggtgcgaagagtcaattgagctaattggtagtcctccggcccctgaatgcggctaatcctaactgcggagcagatgcccaagctccagtgggtagtctgtcgtaacgggtaactctgcagcggaaccgactactttgggtgtccgtgtttccttttattcttacattggctgcttatggtgacaattgagaaattgttgccatatagctattggattggccatccggtgacgaatagagcaattgtgtatctttttgttggattcataccactagataatacaaacttcaaaaccttgtgttacatcattaggttaaacacagcaag

SEQ ID NO: 947 - DNA, 735 bp, Feline kobuvirus
  misc_feature 1..735: note = isolate FKV/18CC0503, complete genome.1
  source 1..735: mol_type = genomic DNA
ggggggcctcggccccctcaccctcttttccggtggtctggtcccggaccaccgttactccattcagcttcttcggaacctgttcggaggaattaaacgggcacccactcacccccatctccccctgtaacttgaagtgtgtgctcgtgaccttgactcctgcgggcttcaccgacccgtccagtgaacaaactgctaggtgatttcttcccctcccctagcctggatgttccacatccaggtcttcttcccccagcccgacatgtcatgggctgtttggaatccccgcgaaagctgctaacgtggcaattgtgggtcccccttccaacaagacaccgagtctttctcccttaaggctagccccgtgtggtgaattccaccgggcaactagtggtgtcaatgcatgcctccgacctcggccgcggagtgctgccccccaagttgcgaaactgaccaaggattgtgctgcctggcaagcatagtctgaggagatgttccgctgtggttgccaaacctggtaacaggtgccccagtgcgcgtagtctccttccggttcgtccggctgtcctttggtaaagacacaatgtaaggggcgtgtgccaacgccctggaaagagtgaacttctactgccctaggaatgccacgcaggtacccctggtttcttaccagggatctgagcgtgggctaattgtctaacgggtagtttcatttccctcccttcttttgttgacatc

SEQ ID NO: 948 - DNA, 735 bp, Aichivirus A
  misc_feature 1..735: note = strain rat08/rAiA/HUN, complete genome.1
  source 1..735: mol_type = genomic DNA
gggtgggggggtgtcggccccctcaccctcttttccggtggtctggacccggaccaccgttactccattcagcttcttcggaacctgttcggaggaattaaacgggcacccactttcctgtcctctccccttttctgtaactccaagtgtgtgctcgtaatcttgactcccgcggattgaccgctccgctggtgaacaaactgctaggtcatctcctccccacccttgggcgtccttccgggcgtccacaccctccccccagcctgacgtgtcacaggctgtacaaagaccccgcgaaagctgctaacgtggcaattgtgggtcccccctttgtaaaggaaccgagtctttctcccttaaggctagacccctgtgtgaattcacaggtggcaactagtggttccactgcatgctcccgacctcggccgcggagtgctgttccccaagtcgtaacactgaccttcacttatgtgcctggcaagcatatctgagaagatgttccgctgtggctgccaaacctggtaacaggtgccccagtgtgcgtagtcttcttccgtcttcggacggtaggtgttaggtaaagatgcggcgtaaggttcaagtgccaacgccctggaagggatgacccttctactgccctaggaatgccgcgcaggtaccccaggttcgcctgggatctgagcgcgggctaattgtctacgggtagtttcatttccctcttcttccactggcatc

SEQ ID NO: 949 - DNA, 735 bp, Echovirus
  misc_feature 1..735: note = E13, strain GHA:VOL:KRN/2017 polyprotein gene, complete1
  source 1..735: mol_type = genomic DNA
cttgtgggttgttcccacccacaaggcccactgggcgctagcacactggtattacggtacccttgtgcgcctgttttattcaccccctccccctacgtaacttagaagcgatacctacatggtcaacaggtgccccagcataccagctgggtcatgaccaagcaattctgttaccccggactgagtatcaataagctgctcgcgcggctgaaggagaaaacgttcgttacccggccagttacttcgagaaacccagtaccaccatgaaggttgcgcagtgtttcgctccgcacaaccccagtgtagatcaggtcgatgagtcaccgcgttccccacgggtgaccgtggcggtggctgcgttggcggcctgcccatggggcaacccgtgggacgcttcaatactgacatggtgtgaagagtctattgagctaactggtagtcctccggcccctgaatgcggctaatcctaactgcggagcagatgcccacatgccagtgggtggtctgtcgtaacgggcaactctgcagcggaaccgactactttgggtgtccgtgtttccttttattcctaaactggctgcttatggtgacaattgagagattgttaccatatagctattggattggccatccggtgacgaacagagctatcatttatttatttgttggttttgtgccgttgaaccgcaaagttctacacaccatcaatttcatcctactgcttaactcgacaaa

SEQ ID NO: 950 - DNA, 735 bp, Coxsackievirus
  misc_feature 1..735: note = B2, strain 13-2380-2_B2, complete genome.1
  source 1..735: mol_type = genomic DNA
agcctgtgggttgcacccacccacagggcccactgggcgccagcactctggtactgcggtacctttgtgcgcctgttttatcaccccaccccatccggaacgtagaagctagacttaaatggtcaatagacggcccagtatgccaattgggtctcgaccaagcactcctgtttccccgggtttagtatcaataagctgctcacgtggctgaaggagaaaacacccgttatccggccaactacttcgagaaacttagtaccgctatgaacgttgcaaggcgtttcgctcagcacttcccccgtgtagatcaggccgatgagtcaccgcattcctcacgggcgaccgtggcggtggctgcgctggcggcctgcctatgggcttgcccataggacgccttaatactgacatggtgcgaagagtctattgagctagttggtagtcctccggcccctgaatgcggctaatcctaactgcggagcacatactcacaaaccagtgagcagtgtgtcgtaacgggcaactctgcagcggaaccgactactttgggtgtccgtgtttccttttattcctacactggctgcttatggtgacaattaaagaattgttaccatatagctattggattggccatccggtgtctaacagagctattatatacttgtttgttggattcataccacttgattccaatagctataacaccctactttacatcgttcatttgaacacgagaaa

SEQ ID NO: 951 - DNA, 736 bp, Aichivirus A
  misc_feature 1..736: note = strain Wencheng-Rt386-2 polyprotein gene, complete1
  source 1..736: mol_type = genomic DNA
gggtgggggggcctcggccccctcaccctcttttccggtggtctggacccggaccaccgttactccattcagcttcttcggaacctgttcggaggaattaaacgggcacccactttcctgtcctctccccctttctgcaactcaagtgtgtgctcgtaatcctgactcccacgggttgaccgccccgttggtgaacaaacagctaggtcattccctccctacccctgggcgccatttcagtggcgttcatatcctccccccagcctgacgtgtcacaggctgtgcaaagtccccgcgaaagctgctcacgtggcaattgtgggtcccccctttgtgaaggaaccgagtctttctcccttaaggctagacccctgtgtgaactcacaggtggcaactagtggttccactgcatgctcccgacctcggccgcggagtgctgttccccaagtcgtgacactgacctccacttatgtgcctggcaagcatatctgagaagatgttccgctgtggctgccaaacctggtaacaggtgccccagtgcgtgtagtcttcttccgtctccggacggtaagtgtgtggtaaagatgcggcgtaaggttcaagtgccaacgccctggaagggatgacccttctactgccctaggaatgccgcgcaggtaccccaggttcgcctgggatctgagcgcgggctaattgtctacgggtagtttcatttccctctcttttcactggcatc

SEQ ID NO: 952 - DNA, 736 bp, Coxsackievirus
  misc_feature 1..736: note = A24 clone V5B polyprotein gene, complete cds.1
  source 1..736: mol_type = genomic DNA
cccactggaggatattcactatatcctccagtgtttcccactggaggatatggtactgcggtatcacggtacccttgtacgcctgttttatactccccttccctgcaacttagaagattgtgaaaacctgtgttcaataggaagggggtacaaaccagtaccaccacgaacaagcacttctgtttccccggtgaagttgtataaactgtatccacggttgaaaacgactgatccgttacccgctctagtacttcgagaagcctagtatcatcttggaatcatcgatgcgttgcgttcatcactcaaccccagagtgtagcttaggctgatgagtctggacaatcctcaccggtgacggtggtccaggctgcgttggcggcctacctgtggcccaaagccacaggacgctagatgtgaacaaggtgtgaagagcctattgagctactagagagtcctccggcccctgaatgcggctaatcccaaccacgaagcaagtgctcacaacccagtgagtagcttgtcgtaatgcgcaagtttgtggcggaaccgactactttgggtgtccgtgtttcctttttacttttgtatggctgcttatggtgacaatcattgattgttatcataaagcgaattggattggccatccggtgagagcgagcacaatcacttatttgttcgttggattcactcctttaacaaaattttattgttctcttaattagaaaacatcatcaca

SEQ ID NO: 953 - DNA, 736 bp, Coxsackievirus
  misc_feature 1..736: note = A21, strain NIV17-608-2, complete genome.1
  source 1..736: mol_type = genomic DNA
ccggggttgttcccaccccggaggcccacgtggcggctagtactctggtaccacggtacccttgtacgcctgttttatatcccctccccacgcaactttagaagaaattcaccaagttcaatagggggggtacgaaccagtaccaccacgaacaagcacttctgtttccccggtgattttacataggctgtacccacggctgaaagtgaatgatccgttacccgcttgagtacttcgagaagcctagtaccaccttggaatctccgatgcgttgcgttcagcactctaacccgagtgtagcttaggctgatgagtctgggcgatccccaccggcgacggtggcccaggctgcgttggcggcctacccgtggctaacgctacgggacgctagttttgaacaaggtgtgaagagcctattgagctacccaagaatcctccggcccctgaatgcggctaatcccaaccatggagcaagtgccctcaagccagggggtggcttgtcgtaacgcgtaagtctgtggcggaaccgactactttgggtgtccgtgtttccttttatttcatatttggctgcttatggtgacaatcacagattgttatcataaagcgaattggattggccatccagtgaaatataagctcattgtttatctccttgttggatttgttctgttaggaaattcctcaataaagttgactcgggtaatcttagtgattagaagtcatcatttcaaca

SEQ ID NO: 954 - DNA, 736 bp, Echovirus
  misc_feature 1..736: note = E20, strain HAI/2016-23041B polyprotein gene, complete1
  source 1..736: mol_type = genomic DNA
agcctgtgggttgttcccacccacagggcccaccgggcgctagcacactggtatcccggtacctttgtgcgcctgttttacacaccctcccccgatggcaacttagaagatttccacacacggtcaataggcggctcagtataccaactgggtcatgaccaagcacttctgttcccccggactgagtatcaataagctgctcacgtggctgaaggagaaaacgttcgttatccggccaattacttcgagaagcttagtaccaccatagaggttgcgcagtgtttcgctccgcacaaccccagtgtagatcaggtcgatgagtcaccgcactcctcacgggcgaccgtggcggtggctgcgctggcggcctgcccatggggcaacccatgggacgcttcaatactgacatggtgcgaagagcctattgagctaattggtattcctccggcccctgaatgcggctaatcctaactgcggagcagatacccacgagccagtgggcagtctgtcgtaatgggtaactctgcagcggaaccgactactttgggtgtccgtgtttccttttattcctatattggctgctaatggtgacaattgagagattgttgccatatagctattggattggccatccggtgacaaacagagcgattatctatctatttgttggcttcataccattaaaccttagagtcctaaagaccctcaacttaattatacaatttaactctgcgaa

SEQ ID NO: 955 - DNA, 737 bp, Marmot kobuvirus
  misc_feature 1..737: note = strain HT9, complete genome.1
  source 1..737: mol_type = genomic DNA
ggggcttcggccctcacaccctcttttccgatggtctggtcccggaccaccgtcactccattcagcttcttcggaacctgttcggaggaattaaacgggcaccccacttcccccccccaccctcgcaacttcaagtgtgtgtgcccataaccttgacccctgccggtatgccgcccggttcagtggacaaactgctaggcaaattcccccctccccctgtggctggtccttcaaccagccactctcttccccccagccggacgtgctacaggctgtgcaaagcccccgcgaaagctgctcacgtggcaattgtgggtcccccctttgtcaaggcttcgagtctttctcccttaaggctagtcccgtactgtgaaatcagtgtgggcaactagtgaagccactgcacgctcccgaccacggacgcggagtgctgtcccccaagtcatgacactaacaccaagctgtgctgcctggcaagcatagcctgggaaggtgttccgctgtggctgccaaacctggtaacaggtgccccagtgtgtgtaaccttcctccagtcttcggactggcagctttgtgtgaagacgtgacgtaaggttcaagtgccaactccctggaagggatgacccctctactgccctaggaatgctacgcaggtacccctggttcgccagggatctgagcgtaggctaattgtctacgggtagtttcatttcccacctttttatttctttagcatc

SEQ ID NO: 956 - DNA, 737 bp, Coxsackievirus
  misc_feature 1..737: note = A10 CV-A10/HVN11_028_Bac_GiangVNM/2011 genomic1
  source 1..737: mol_type = genomic DNA
ccgatctgttgtacccacccacagggcccactgggcgctagcactccgattctgcggaatctttgtgcgcctgttttatgaccctcccccgaaacttgtaacttagaagttatgtacatcaccgatcaatagcaggcgtggcgcaccagccatgtcttgatcaagcacttctgtacccccggactgagtatcaatagactgctcacgcggttgaaggagaaaatgttcgttacccggctaactacttcgagaaacctagtaacaccattgaaactgcggagtgtttcgctcagcattccccccatgtagatcaggtcgatgagtcactgcttaccccacgggcgaccgtggcagtggctgcgttggcggcctgcctatggggcaacccataggacgctctaaagtggacatggtgcgaagagtctattgagctagttagtagtcctccggcccctgaatgcggctaatcctaactgcggagcgcatgtcctcaaaccagagggtggtgcgtcgtaatgggtaactctgcagcggaaccgactactttgggtgtccgtgtttcttttgttcttaaaatggctgcttatggtgacaatcgaggaattgttaccatatagctattggattggccatccggtgtgcaacagagctattatctacttgtttgtcggatacatccccttaacacctaaatcctttaatacattgcattatattttaacattgaacgcgagaaa

SEQ ID NO: 957 - DNA, 737 bp, Enterovirus sp.
  misc_feature 1..737: note = C99, isolate 3944/BRA-PA/11, complete genome.1
  source 1..737: mol_type = genomic DNA
ctgggggttgttcccaccccagaggcccacgtggcggctagtactccggtattacggtacccttgtacgcctgttttatactccctttccccgtaacttagaagcaacaatccaagttcaatagaagggggtacaaaccagtaccaccacgaacaagcacttctgtttccccggtgaagttgcatagactgtacccacggttgaaagcgactgatccgttatccgctcttgtacttcgagaagcctagtatcactttggaatcttcgatgcgttgcgctcagcacccaaccccggggtgtagcttaggtcgatgagtctggacgttcctcaccggcgacggtggtccaggctgcgttggcggcctacctgtggcccaaagccacaggacgctagttgtgaacaaggtgtgaagagcctattgagctacatgagattcctccggcccctgaatgcggctaatcccaaccacggagcaaatgcccacaacccagtgggtggtttgtcgtaacgagcaattctgtggcggaaccgactactttgggtgtccgtgtttccctttttattattatgtggctgcttatggtgacaatcattggttgttatcataaagcgaattggattggccatccggtaagagtaaaacatatcatttacctttttgttggatttactccattgagtgttttcaccccagacgtaattcgtgtggttctgctgattagaagtttctatcaca

SEQ ID NO: 958 - DNA, 737 bp, Enterovirus sp.
  misc_feature 1..737: note = J, strain N125, complete genome.1
  source 1..737: mol_type = genomic DNA
ttaaaatagcctcagggttgttcccaccctgagggcccacgtggcgtagtactctggtattacggtacctttgtacgcctattttacccccttccccttgtaacttagaagcaaagcaaaccagttcaatagtaagcaacacaacccagtgttgtgacgaacaagtacttctgtttccccgggagggtctgacggtaagctgtacccacggctgaagtatgacctaccgttaaccggctacctacttcgagaagtctagtaataccattgaagttttgttggcgttacgctcaacacactaccccgtgtgtagttttggctgatgagtcacggcattccccacgggcgaccgtggccgtggctgcgttgcggccaaccaaggggcgcaagctccttggacgtcacttaacagacatggtgtgaagaacctattgagctaggtagtagtcctccggcccctgaatgcggctaatcctaactccggagcacatcagtgcaacccagcatttggtgtgttgtaatacgcaagtctggagcggaaccgactactttgggtgtccgtgtttcctgttttaccttatttggctgcttatggtgacaatttgatattgttaccatatagctgttggattggccatccggatttttgaaagagacccaaaactttcttctctacttcagattcaagtgcgaagttttccttttcatatattacttactaatttgaagtaccaaag

SEQ ID NO: 959 - DNA, 737 bp, Enterovirus sp.
  misc_feature 1..737: note = J, strain N203, complete genome.1
  source 1..737: mol_type = genomic DNA
ttaaaatagcctcagggttgttcccaccctgagggcccacgtggtgtagtactctggtattacggtacctttgtacgcctattttatacccccttccccaagtaatttagaagcaagcacaaaccagttcagtagtaagcagtacaatccagtactgtaatgaacaagtacttctgttaccccggaagggtctatcggtaagctgtacccacggctgaagaatgacctaccgttaaccggctacctacttcgagaagcctagtaatgccgttgaagttttattgacgttacgctcagcacactaccccgtgtgtagttttggctgatgagtcacggcactccccacgggcgaccgtggccgtggctgcgttggcggccaaccaaggagtgcaagctccttggacgtcatattacagacatggtgtgaagagcctattgagctaggtggtagtcctccggcccctgaatgcggctaatcctaactccggagcatatcggtgcgaaccagcacttggtgtgttgtaatacgtaagtctggagcggaaccgactactttgggtgtccgtgtttcctgttttaacttttatggctgcttatggtgacaatttaacattgttaccatatagctgttgggttggccatccggattttgttataaaaccatttcctcgtgccttgacctttaacacatttgtgaacttctttaaatcccttttattagtccttaaatactaaga

SEQ ID NO: 960 - DNA, 738 bp, Human poliovirus 1
  misc_feature 1..738: note = isolate P1W/Bar65 (19276), complete genome.1
  source 1..738: mol_type = genomic DNA
ttaaaacagctctggggttgttcccaccccggaggcccacgtggcggctagtactctggtatcacggtacccttgtacgcctgttttatactcccctccccgtaatttagaagttcaaaacttaagttcaatagaagggggtacaaaccagtaccaccacgaacaagcacttctgtttccccggtgaggttgcatagactgtacccacggttgaaggcgactgatccgttatccgctcttgtacttcgggaagcccagtatcatcttcggatcttcgatgcgttgcgctcagcactcaaccccagagtgtagcttaggctgatgagtctggacaatcctcactggtgacagtggtccaggctgcgttggcggcctacctgtggcccaaagccacaggacgctagatgtgaacaaggtgtgaagagcccactgagctacaagagagtcctccggcccctgaatgcggctaatcccaaccacggagcaggtagttgcaaaccagcagccggcctgtcgtaacgcgcaagtctgtggcggaaccgactactttgggtgaccgtgtttccttttatcttttcaatggctgcttatggtgacaatcattgattgttatcataaagcgacttggattggccatccggtgaaatttaagtgcgtcagctatccatttattggatttaccccactaaaaccacatacgcctggccttagtgttgttggtgagacgctaccatcaaa

SEQ ID NO: 961 - DNA, 738 bp, Echovirus
  misc_feature 1..738: note = E18, isolate Jena/ST9524/10 polyprotein gene, complete1
  source 1..738: mol_type = genomic DNA
cagcctgtgggttgtacccacccacagggcccacgtggcgctagcacactggtattccggtacctttgtgcgcctgttttatccaccccgtcccccactgtaacttagaagatatgcaaccctgatcaacagcaggtgtgacactccagtcacatcacgatcaagcacttctgttgccccggaccgagtatcaataagccactcgcgtggctgaaggagaaaacgttcgttatccgaccaactacttcgagaaacctagtaccaccctggaagttgcgtagcgtttcgctccacacaaccccagtgtagatcgggtcgatgagtcaccgcgttcctcacgggcgaccgtggcggtggctgcgttggcggcctgcccatggggcaacccatgggacgcttcaatactgacatggtgcgaagagtctattgagctagttggtggtcctccggcccctgaatgcggctaatcctaactgcggagcagatacccacatgccagtgggcgatctgtcgtaatgggtaactctgcagcggaaccgactactttgggtgtccgtgtttccttttattcttatattggctgcttatggtgacaattgagaagttgttaccatatagctattggattggccatccggtgacaaatagagcgattgtttatttgtttgttggatttataccactgaacttcaaggttttaaacaccctcaattttgtactagttcttaatacatcaaa

SEQ ID NO: 962 - DNA, 739 bp, Enterovirus sp.
  misc_feature 1..739: note = C, strain Saukett serotype 3, partial genome.1
  source 1..739: mol_type = genomic DNA
acagctctggggttgtacccaccccagaggcccacgtggcggctagtactctggtgtcacggtacctttgtacgcctgttttataccccctcccccgtaacttagaagctataaaccaagttcaatagaagggggtacaagccagtaccaccacgaacaagtacttctgttaccccggtgacgttgtatagactgctcgcgcggtcgaaagcgacagatccgttacccgcttgtgtacttcgagaagtctagtaccaccttggaatcttcgatgcgttgcgctcagcactttaccccagagtgtagcttaggctgatgagtctgggcgctccccatcggcgacgatggcccaggctgcgttggcggcctacctatggctaacgccataggacgctagtagtgaacaaggtgtgaagaacctattgagctacacaagagtcctccggcccctgaatgcggctaatcctaaccatggagcaagtgatcacaatccagtgatattcttgtcgtaacgcgcaagtccgtggcggaaccgactactttgggtgtccgtgtttccctttatttttattatggctgcttatggtgacaatcattgattgttatcatagagcgaattggattggccatccggtgaaagtgaaactcattatctacttatttgttggattcactccatcaaacacattcacttatagtatcatcttgacagtgattagaattagacagtcgtatcaca

SEQ ID NO: 963 - DNA, 739 bp, Echovirus
  misc_feature 1..739: note = 9 (strain Hill), complete genome.1
  source 1..739: mol_type = genomic DNA
ttaaaacagcctgtgggttgtacccacccacagggcccactgggcgccagcactctggtatcgcggtacctttgtgcgcctgttttgtttccctttaccccgaatggaacttagaagtaatgcacactgatcaatagcaggcgtggcaccagccacgtgatgatcaagcactactgtttccccggaccgagtatcaatagactgcttgcgcggttgaaggagaaaacgttcgttatccggctaactacttcgagaaacccagtaacaccatgaaggttgcaggcgatttcgctcagcacatccccagtgtagatcaggtcgatgagtcaccgcgttcccacgggcgaccgtggcggtggctgcgttggcggcctgcctatggggtaacccataggacgctctaatacggacatggtgcgaagagtctattgagctagttagtgttctccggcccctgaatgcggctaatcctaactgtggagcacatgcccctaatccaaggggtagtgtgtcgtaacgggcaactccgcagcggaaccgactactttgggtgtccgtgtttccttttattcttacattggctgcttatggtgacaattgagagattgttgccatatagctattggattggccatccggtgtctaatagagcgataatctaccagtttgttggatttgtaccactcaacttttcaacactcaagacactcaactacatactagcactcaacacagtaaa

SEQ ID NO: 964 - DNA, 739 bp, Human enterovirus sp.
  misc_feature 1..739: note = 81, strain USA/CA68-10389, complete genome.1
  source 1..739: mol_type = genomic DNA
ttaaaacagcctgtgggttgtacccacccacagggcccattgggcgcttgcacactggtattccggtacctttgtgcgcctgttttatacatcctacccccgtaacttagaagcaagatcacccgatcaccaggaaatgtggcaaaccagtcacattctgatcaagcacttctgtttccccggactgagtatcaataggctgttcacacggctgaaggagaaaacgttcgttacccggccaactacttcgaaaaacctagtatcaccgtgaacgttgcagagtgtttcgctcagcactttccccgtgtagatcaggtcgatgagtcaccgcattccccacgggcgaccgtggcggtggctgcgttggcggcctgcctgcggggcaacccgtaggacgctctaatacagacacggtgtgaagagtctattgagctagttggtagtcctccggcccctgaatgcggctaatcctaactgcggagcgagcgcttgtaatccaacaggtagctcgtcgtaacgggtaactctgcagcggaaccgactactttgggtgaccgtgtttccttttatttcattactggctgcttatggtgacaatcacagagttgttaccatatagctattggattggccatccggtgtcaaatagagcaattgtgtttctttttgttgggtttgtaccacttgacttgaccagctacaacactctgtgctacattgttagattgaacacagcaaa

SEQ ID NO: 965 - DNA, 740 bp, Coxsackievirus
  misc_feature 1..740: note = A12, isolate D89 polyprotein gene, complete cds.1
  source 1..740: mol_type = genomic DNA
ttaaaacagcctgtgggttgcacccactcacagggcccactgggcgtcagcactctggtacctcggtacctttgtgcgcctgttttatatcccccccccattgaaacttagaagcaatgcacttcgatcaatagcgggcgcggcgcaccagccacgtcatgatcaagcacttctgtttccccggaccgagtatcaatagactgctaacgcggttgagggagaaaacgtccgttacccggccaactgcttcgagaaatccagtaacatcatgaaaattgcagagtgtttcgctcagcacttccccagtgtagatcaggtcgatgagtcaccgcgttcctcacgggcgaccgtggcggtggctgcgttggcggcctgcctgtggggcaacccgcaggacgctctaatatggacatggtgtgaagaatctattgagccagttggtagtcctccggcccctgaatgcggctaatcctaactgcggagcacgcgccctcaatccagtgggtagcgtgtcgtaatgggtaactctgcagcggaaccgactactttgggtgtccgtgtttccttttattcttacattggctgcttatggtgacaattgagagattgttaccatatagctattggattggccatccggtatcgaatagagcggttatctatcaatttattggatttactccgttgagtgtgcagcagtatcgcactttgcttttaatagtgagactgaatagtgcaaa

SEQ ID NO: 966 - DNA, 740 bp, Enterovirus sp.
  misc_feature 1..740: note = A76, strain 17-1936-1_A76, complete genome.1
  source 1..740: mol_type = genomic DNA
tgtgggttgttcccacccacagggcccactgggcgccagcactctgattccatggaatctttgtgcgcctgttttataacccttccccaatttgcaacttagaagtaatacacactacagatcaatagtaggcatggcgcgccagtcatgtctcgatcaagcacttctgtttccccggactgagtatcaatagactgcccacgcggttgaaggagaaaacgtccgttacccggctaactacttcgagaaacctagtagcaccaaataagctgcagagcgtttcgctcagcacctcccccgtgtagatcaggctgatgagtcactgcaatccccacgggcgaccgtggcagtggctgcgctggcggcctgcctatggggcaacccataggacgctctaatgtggacatggtgcgaagagtctattgagctagttagtagtcctccggcccctgaatgcggctaatcctaactgcggagcacataccttcaatccaggaggtggtgtgtcgtaacgggtaactctgcagcggaaccgactactttgggtgtccgtgtttccttttatccttatattggctgcttatggtgacaatcacggaattgttgccatatagctattggattggccatccggtgtctaatagagctattgtatacctatttgttggatttaccaagttaaatatcaccaactacaccacccttctttatattatattactgaatattagaaagagaaa

SEQ ID NO: 967 - DNA, 740 bp, Human echovirus
  misc_feature 1..740: note = 18, strain Metcalf polyprotein gene, complete cds.1
  source 1..740: mol_type = genomic DNA
ttaaaacagcctgtgggttgtacccacccacagggcccactgggcgctagcactctggtattacggtacctttgtgcgcctgttttacatcccttcccaatcgtaatttagaagccaaacactacgatcaatagtgggcgtggcacgccagccatgtctcgatcaagcactcctgtttccccgggccgagtatcaatagactgctcacgtggttgaaggagaaaacgctcgttatccggctaactacttcgagaaacctagtaacaccatggaagttgcagagtgtttcgttcagcacttccccagtgtagatcaggccgatgagtcaccgcgttccccacgggtgaccgtggcggtggctgcgttggcggcctgcccatggggtaacccatgggacgctctaatatggacatggtgtgaagagtctattgagctagttggtagtcctccggcccctgaatgcggctaatcctaactgcggagcatgtacctccaatccaggaggtggcgtgtcgtaatgggcaactctgcagcggaaccgactactttgggagtccgtgtttccttttattcttacactggctgcttatggtgacaattgagagattgttaccatatagctattggattggccatccggtgactaacagagcagttatctaccagttcgttggtttcattccattgtgtactcgcgaatacaacactcttcttttaatactagatttaaacaaagcaaa

SEQ ID NO: 968 - DNA, 741 bp, Simian sapelovirus 1
  misc_feature 1..741: note = strain 2383, complete genome.1
  source 1..741: mol_type = genomic DNA
ctcacactcatttcccccctcgcctgtcacaggcaacccccaccccttctcttacgggagttagggccaaggatctgttgcataggcgttgtatcccctaaccttttacctacccatcccaataggactggtatttcggttttgattgagtaatggatactgattctatacctgttacccattcaggggaaaaatggagtttctttcatggatctgacttgatatgaccaagagtcaacactttgcgtgttggccgtatggaatgctttaaggtttattctttggattatgacttcagggttggccgcccaggataaaaggcaattgtggtaagtgatgttagtcattggtggttgaaacctgcctaagacgtcctaggtctacgctgtgcgggccgaagtaagcttaggaataacagggagtatgccattttctgctttcacccaacacgaccgtacacgaaagagctagaggcactttggggcaaagggaaaagctttgcttagcccgaatgttcatttgagtccttgacgaatgcgtcccgtctgtcccgacggtgaggcgtatggcgcatgctcatggcattacccaatggtgtatctgtgaggggggggctcctcacacttagtctagtgctacctgacagggccgcggctggtcgtttgtgtatggtataaccagtagtaatcccccatggattgctttaacttcccctcctcccttaccaagacattctctaag

SEQ ID NO: 969 - DNA, 741 bp, Coxsackievirus
  misc_feature 1..741: note = A10, strain 12-2067-2, complete genome.1
  source 1..741: mol_type = genomic DNA
ccgatgtgtgggttgtacccacccacagggcccactgggcgctagcactctaatcctacgggattcttgtgcgcctgttttataaccccttccccgatttgtaacttagaagcaatttacattagcgatcaatagacgacatggcacgccagccatgtcttgatcaagcacttctgtttccccgggctgagtatcaatagactgcttacgcggttgaaggagaaaacgctcgttacccggctaactacttcgagaaacctagtagcatcatgaaaactgcagagcgtttcgttcagcactccccccgtgtagatcaggtcgatgagtcactgcaatccccacgggtgaccgtggcagtggctgcgttggcggcctgcctatggggcaacccataggacgctctaatgtggacatggtgcgaagagtctattgagctagttagtagtcctccggcccctgaatgcggctaatcctaactgcggagcgcatactcccaacccagggggtggtgcgtcgtaatgggcaactctgcagcggaaccgactactttgggtgtccgtgtttccttttatccttttattggctgcttatggtgacaattagagaattgttaccatatagctattggattggccatccggtgagcaacagagcaattgtgtatctttttgttggatacgtccccttgacacttagaacctacaacacgctacactatattctaatcttgaactcgagacg

SEQ ID NO: 970 - DNA, 741 bp, unidentified
  source 1..741: mol_type = unassigned DNA; note = Human coxsackievirusA5, strain Swartz, complete genome.1 sequence
ttaaaacagcctgtgggttgcacccacccacagggcccactgggcgccagcactctggtatcgcggtacctttgtgcgcctgttttatgacccctccccaaccgaaacttagaagttacacataccgatcaatagtgggcatagcacgccagctgtgtcttgatcaagcacttctgtttccccggaccgagtatcaatagactgctcacgcggttgaaggagaaagcgttcgttatccggctaactacttcgagaaacctagtaacaccatgaaagttgcggagtgtttcgctcagcacttccccagtgtagatcaggtcgatgagtcaccgcgttccccacgggcgaccgtggcggtggctgcgctggcggcctgcctatgggatgacccataggacgcttcaacacagacatggtgtgaagagtctattgagctagttagtagtcctccggcccctgaatgcggctaatcctaactgcggagcacgtgccctcaagccagagggtggcgtgtcgtaacgggcaactctgcagcggaaccgactactttgggagtccgtgtttccttttattcttacactggctgcttatggtgacaattgagagattgttaccatatagctattggattggccatccggtgagcaacagagcgattgtatactcttttgtgggttttgtgccattaaatcttactgtgattaccacactgaaactcatcttgcagtttaatacagcaaa

SEQ ID NO: 971 - DNA, 741 bp, Coxsackievirus
  misc_feature 1..741: note = A10, isolate 2015-XMCDC-85-CA10, complete genome.1
  source 1..741: mol_type = genomic DNA
gcattggaggctagcccccattggggcgtagcacttccactgggggctagcactccgattctgcggaatctttgtgcgcctgttttataaccctcccccaacttgcaacttagaagttatgtacgttgatcaatagcaggcgtggcacaccagccatgtcttgatcaagcacttctgtaaccccggactgagtatcaatagactgctcacgtggtcgaaagagaaaatgttcgttatccggctaactacttcgagaaacctagtagcaccactgaaactgcggagtgtttcgctcagcacttcccccgtgtagatcaggtcgatgagtcactgcttaccccacgggtgaccgtggcagtggctgcgttggcggcctgcctatggggcaacccataggacgctctaaagtggacatggtgtgaagagtctattgagctagttagtagtcctccggcccctgaatgcggctaatcctaactgcggagcgcatgcccccaaaccagagggtggtgcgtcgtaacgggtaactctgcagcggaaccgactactttgggtgtccgtgtttcttttattctcataatggctgcttatggtgacaattgaggaattgttaccatatagctattggattggccatccggtgtgcaacagagctattatctacttgtttgttggatacattccattgacacctaaatccttcaatacattgcactatattctaacgttgaacgcaagaaa

SEQ ID NO: 972 - DNA, 741 bp, Echovirus
  misc_feature 1..741: note = E9, strain UW1, complete genome.1
  source 1..741: mol_type = genomic DNA
taaaacagcctgtgggttgttcccacccacagggcccactgggcgctagcacactggtatcacggtacccttgtgcgcctgttttatccacccgccccctatgtaacttagaagcacatcacaaacggtcaacaggcagctcagtaaaccaactgagccacgaccaggtacttctgttaccccggaccgagtatcaatagactgctgacgcggtcgaaggagaaaacgttcgttacccggccaactacttcgagaaacccagtaccaccatggaggttgcgtggcgtttcgctccacacaaccccagtgtagatcaggtcgatgagtcaccgcattccccacgggcgaccgtggcggtggctgcgttggcggcctgcccatgaggtaactcatgggacgctacaataccgacatggtgcgaagagtctattgagctagttggtagtcctccggcccctgaatgcggctaatcctaactgcagagcggacacctacaaaccagtgggcagtccgtcgtaacgggcaactctgcagcggaaccgactactttgggtgtccgtgtttccttttattctcatattggctgcttatggtgacaattgagagattgttgccatatagctattggattggccatccggtgactaacagagctattgtctacttatttgttggttacgcaccgctcaatttcaaagtcttaaacacgattaatttcatattatcactcaacacaacaaa

SEQ ID NO: 973 - DNA, 741 bp, Human echovirus
  misc_feature 1..741: note = 31, strain Caldwell complete genome.1
  source 1..741: mol_type = genomic DNA
ttaaaacagcctgtgggttgttcccacccacagggcccatgggcgctagcacactggtatcgtggtacctttgtgcgcctgttttatacaccctccccatttgtaacttagaagtaaagcaatattgatcaatagcaagcatggcacaccagccgtgttcagatcaagcacttctgtaaccccggactgagtatcaataggctgccaaagcggctgaaggagaaaacgttcgttaaccggccaactacttcgagaagcccagtatcaccatgaaagttgcagagcgtttcgctcagcactccccccgtgtagattaggtcgatgagtcaccgcatcccccacaggcgactgtggcggtggctgcgttggcggcctacctacggggcaacccgtaggacgctctaatacagacatggtgagaagagcctattgagctagttggtagtcctccggcccctgaatgcggataatcctaactgcggagcatgtgctcgcaatccagcgagaggcatgtcgtaacgggcaactctgcagcggaaccgactactttgggtgtccgtgtttccttttattccttgtttggctgcttatggtgacaattgaaagattgttgccatatagctattgggtcggccacctggtatctaacagagcaattatttacttgtttgttggttttgtacccttaaatctcaaggttcttgaaacccttaactacacattgaaactcaattcattgaa

SEQ ID NO: 974 - DNA, 741 bp, Echovirus
  misc_feature 1..741: note = E11, strain 520k/YN/CHN/2010 polyprotein gene, complete1
  source 1..741: mol_type = genomic DNA
ttaaaacagcctgtgggttgttcccactcacagggcctactgggcgctagcactctggtatcacggtacctttgtgcgcctgttttacacacccccctccctaggaatttagaagcaatacacaatgatcaatagtaggcgtggtacgccaaccatgtcttgatcaagcacttctgttcccccggactgagtatcaatagactgctcacgcggttgaaggagaaaacgttcgttacccggccagctacttcgagaaacccagtaacaccatggaaatagcggggcgtttcgctcggcacatccccagtgtagatcaggtcgatgagtcaccgcattccccacgggtgaccgtggcggtggctgcgttggcggcctgcctacagggcgacctgtaggacgcttcaatatggacatggtgcgaagagtctattgagctagctggtagtcctccggcccctgaatgcggctaatcctaactgcggagcgcgcgcctccaatccagggggtggtgcgtcgtaatgggtaactctgcagcggaaccgactactttgggtgtccgtgtttccatttatccttatattggctgcttatggtgacaattgaaaggttgttaccatatagctattggattggccatccagtgtctaacagagcgattgtattcctcttcgttggatttgttccacttaacaaaacaaattaccaaactttgtgttatattgtcaaactaaacacagcaaa

SEQ ID NO: 975 - DNA, 741 bp, Human echovirus
  misc_feature 1..741: note = 21, strain Farina complete genome.1
  source 1..741: mol_type = genomic DNA
ttaaaacagcctgtgggttgttcccacccacagggcccaccgggcgctagcacactggtatcgcggtacctttgtgcgcctgttttatttaccctgccctgatgtaacttagaagcatgacaccaacgatcaatagcaggctcaatgcaccaattgggtcaagatcaagcacttctgttaccccggactgagtatcaataagctgctagcgcggctgaaggagaaaaagttcgttacccggccagctacttcgagaaacctagtatcaccatgaaagttgcgtggcgtttcgctccgcacaaccccagtgtagatcaggtcgatgagtcaccgcattccccacgggcgaccgtggcggtggctgcgttggcggcctgcccgtggagcaatccatgggacgctataatacagacatggtgtgaagagtctattgagctagctggtagtcctccggcccctgaatgcggctaatcctaactgcggagcaggtacccacgaaccagtgggcagtctgtcgtaatgggcaactccgcagcggaaccgactactttgggtgtccgtgtttccttttatttcaacttggctgcttatggtgacaattgagagattgttaccatatagctattggattggccatccggtgactaacagagctatcatatacctttttattggctttgtgccacttactctgaaagaggtcaagactctgcattatatcatactattgaatgctataaa

SEQ ID NO: 976 - DNA, 741 bp, Human echovirus
  misc_feature 1..741: note = 26, strain Coronel complete genome.1
  source 1..741: mol_type = genomic DNA
ttaaaacagcctgtgggttgttcccacccacagggcccactgggcgctagcacaccggtatcacggtacccttgtgcgcctgttttatccacctcccccgttgtaacttagaagctcaatacaaatggtcgatagccagcccgatacgccaattgggttttgaccaagcacttctgttaccccggactgagtaccaataggctgccaaagcggctgaaggggaaaacgttcgttaccccaccaactacttcgagaaacctagtaccaccatgaagattgcgcagcgtttcgctcagcacaaccccagtgtagatcaggtcgatgagtcaccgcattccccacaggcgactgtggcggtggctgcgttggcggcctgcccatggggctacccatgggacacttcaatatcgacatggtgcgaagagtctattgagctagttggtagtcctccggcccctgaatgcggataatcctaactgcggagcaggcacccacaagccagtgggcagcctgtcgtaacgggcaactctgcagcggaaccgactactttgggtgtccgtgtttctttttattcttacactggctgcttatggtgacaattgaagaattgttaccatatagctattggattggccatccagcgactaacagagctattatcttcttgtttgtggggtacgtaccactcaatttcacagtagtaaggactctcaatttcattttgtgcttgaataaggcgaa

SEQ ID NO: 977 - DNA, 741 bp, Echovirus
  misc_feature 1..741: note = E3, isolate 123-R2, complete genome.1
  source 1..741: mol_type = genomic DNA
ttaaaacagcctgtgggttgtacccactcacagggcccactgggcgctagcacactggtatcacggtacctttgtgcgcctgttttataatcccttccccaccgtaacatagaagctacacacactgatcaacagcaggcacagcacaccagttgtgtctcgatcaagcacttctgtctccccggaccgagtatcaatagactgcttacgcggttgaaggagaaaacgttcgtcacccggctgactacttcgaaaagcctagtagtaccatgaatgttgcggagtgtttcgctcagcacttcccccgtgtagatcaggctgatgagtcactgcattccccacgggtgaccgtggcagtggctgcgttggcggcctgcccatggggcaacccatgggacgcttcaatacagacatggtgcgaagagtctattgagctagtcagtagtcctccggcccctgaatgcggctaatcctaactgcggagcatgcgcctccgacccagggggtagcatgtcgtaatgggcaactctgcagcggaaccgactactttgggtgtccgtgtttccttttattcttatattggctgcttatggtgacaattgagagattgttgccatatagctattggattggccatccggtgagtaatagagctattatatactcctttgtgggttttgtgccactggatcacaaggtcttgaaaactctcacttttgtcataatactaaacactgcaaa

SEQ ID NO: 978 - DNA, 741 bp, Coxsackievirus
  misc_feature 1..741: note = B1 gene for polyprotein, complete genome, strain1
  source 1..741: mol_type = genomic DNA
taaaacagcctgtgggttgttcccacccacagggcccattgggcgctagcacactgatatcacggtacctttgtgcgcctgttttatctacccctccccgatgcaacttagaagcatgttacaaacggtcaataggtggttcagttaaccaactgagcctcgaccaagcacttctgttaccccggactgagtatcaataggctgctcgcgtggctgatggagaaaacgtccgttacccggccaattacttcgagaaacctagtaccaccatggaagttgcgcagcgtttcgctccgcacaaccccagtgtagatcaggtcgatgagtcactgcgttccccacgggtgaccgtggcagtggctgcgttggcggcctgcccatggggtatcccatgggacgcttcaatactgacatggtgtgaagagtctattgagctaattggtagtcctccggcccctgaatgcggctaatcctaactgcggagcagatacccacgcaccagtgggcagtctgtcgtaacgggcaactctgcagcggaaccgactactttgggtgaccgtgtttccttttattttaatattggctgcttatggtgacaattgaaagattgttgccatatagctattggattggccatccggtaacaaacagagcaattatttacctgtttattggttttatacctctcaaccacaaggttataagtactctcaaccttgttttagcatttaacacagcaaa

SEQ ID NO: 979 - DNA, 741 bp, Human enterovirus
  misc_feature 1..741: note = 74, strain Rikaze-136/XZ/CHN/2010, complete1
  source 1..741: mol_type = genomic DNA
ttaaaacagctctggggttgttcccacccacagggcccactgggcgctagcatactggtatcacggtacctttatgcgcctgttttatccacccctccccaacgtaacctagaagacactcatggatgatcaataggaggctcggcatgccagctgagtctggatcaagcacttctgttgccccggaccgagtatcaataggctgctcacgcggctgaaggagaaaaagttcgttatccggccaattacttcgagaaacccagtaccaccatgaaggttgcgtggcgtttcgctccgcacagccccagtgtagatcaggtcgatgagtcaccgcgttccccacgggcgaccgtggcggtggctgcgttggcggcctgcccatggggtaacccatgggacgcttcaatactgacatggtgcgaagagtctattgagctaattggtagtcctccggcccctgaatgcggctaatcctaactgcggagcagacgtccacaaaccagtgggtggtctgtcgtaacgggcaactctgcagcggaaccgactactttgggtgtccgtgtttcctttattcttatattggctgcttatggtgacaattgagagattgttgccatatagctattggattggccatccggtttgcaatagagcgattatactcctctttgttgggtttgtacctctcaacctcaatagttacaggacattattatacattatccagctgaacacgaaaag

SEQ ID NO: 980 - DNA, 741 bp, Enterovirus sp.
  misc_feature 1..741: note = B, strain LEV14, complete genome.1
  source 1..741: mol_type = genomic DNA
taaaacagcctgtgggttgttcccacccacagggcccactgggcgctagcacactggtatcacggtacctttgtgcgcctgttttatttaccctcccccaacgtaacttagaagcatgactcaaatggtcaacagacaactcagcatgccagctgagcctcgaccaagcacttctgttaccccggactgagtaccagtaagctgctcacgcggctgagagggaaaccgttcgttacccggccaattacttcgagaaacctagtaccaccatgaaagttgcgcagtgtttcgctccgcacaaccccagtgtagatcaggtcgatgagtcaccgcaaaccccacgggtgaccgtggcggtggctgcgctggcggcctgcccatggggcagcccatgggacgcttcaatactgacatggtgcgaagagtctattgagctaattggtgatcctccggcccctgaatgcggctaatcctaactgcggagcagatacccacgcaccagtgggcagtctgtcgtaatgggcaactctgcagcggaaccgactactttgggtgtccgtgtttccttttattcttatactggctgcttatggtgacaattgagagattgttgccatatagctattggattggccatccggttacaaacagagcaattacttacctatttgttggttttgtaccactgaactacaaagtcttgaacaccctcaatttcattacaacacctaacacgttaaa

SEQ ID NO: 981 - DNA, 741 bp, unidentified
  source 1..741: mol_type = unassigned DNA; note = Human coxsackievirus B4, strain BM24G/NM/CHN/2010, complete genome.1 sequence
ttaaaacagcctgtgggttgttcccacccacagggcccactgggcgctagcacactggtatcatggtacctttgtgtgcctgttttatttcccttccccagatgcaacttagaagcaacactccacgaccactagcaggcgtggcacaccagccatgtcttggtcaagcacttctgtaaccccggactgagtatcaataaactgctcacgcggtcgaaggagaaaacgtccgttacccggccaactacttcgagaaacctagtaacgccatgaaaattgcgaggtgtttcgctcagcacatccccagtgtagatcaggtcgatgagtcaccgcattccccacaggtaactgtggcggtggctgcgttggcggcctgcccatggggtgacccatgggacgcttcaatacggacatggtgtgaagagtctattgagctagttggtagtcctccggcccctgaatgcggctaatcctaactgtggagcatgcgcccccactccagagggtagcgtgtcgtaacgggtaactccgcagcggaaccgactactttgggtgtccgtgtttctttttattcttatattggctgcttatggtgacaattgaaagattgttaccatatagctattggattggccacccagtgacaaacagagcaataatttaccaatttgtgggatttattccaataagtttgaaagtcttgaagacacttaatctagtattacaactcaatagcgcaaa

SEQ ID NO: 982 - DNA, 741 bp, Enterovirus
  misc_feature 1..741: note = B, isolate NL/17-470/FAE/2017 polyprotein gene, complete1
  source 1..741: mol_type = genomic DNA
ccagggggccctgtgggtgggtgcaacccacagggcccactgggcgctagcacactggtattacggtacctttgtgcgcctgttttatacacccttaccctatgcaatatagaagcaaaacgacaaggtcaatagagagcccagtgagccaactgggtcgagaccaagcacttctgtttccccggaccgagtatcaataggctgcttacgcggctgaaggagaaaacgttcgttacccggctaactacttcgaaaaacctagtaacgccatggaagttgcgaaccgtttcgctcggcacttccccagtgtagatcaggtcgatgagtcaccgcattccccacgggcgaccgtggcggtggctgcgttggcggcctgcctatggggcaacccataggacgcttcaatatggacatggcgtgaagagtctattgagctagttagtagtcctccggcccctgaatgcggctaatcctaactgcggagcacatgcccccaacccaggaggtggtgtgtcgtaatgggtaactctgcagcggaaccgactactttgggtgtccgtgtttccttttatcccaatgttggctgcttatggtgacaattgaaagattgttaccatatagctattggattggccatccggtgactaacagagcaatcgtttacctattcattggttacgttccattaaatctcaaggaactaacgactctcaattacattttgctcttgaactctgcaaa

SEQ ID NO: 983 - DNA, 741 bp, unidentified
  source 1..741: mol_type = unassigned DNA; note = Human coxsackievirus B1, isolate CVB1Nm polyprotein gene, complete1 sequence
ttaaaacagcctgtgggttgttcccacccacagggcccattgggcgctagcactctggtatcacggtacctttgtgcgcctgttttacatcccctccccaaattgtaatttagaagtctcacacaccgatcaatagcaagcgtggcacaccagccatgttttgatcaagcacttctgttacccggactgagtatcaatagaccgctaacgcggttgaaggagaaaacgttcgttacccggccaactacttcgaaaaacctagtaacaccatggaagttgcggagtgtttcgctcagcactaccccagtgtagatcaggtcgatgagtcaccgcgttccccacgggcgaccgtggcggtggctgcgttggcggcctgcctacggggaaacccgtaggacgctctaatacagacatggtgcgaagagtctattgagctagttggtaatcctccggcccctgaatgcggctaatcctaactgcggagcacataccctcaaaccagggggcagtgtgtcgtaacgggcaactctgcagcggaaccgactactttgggtgtccgtgtttcattttattcctatactggctgcttatggtgacaattgacgggttgttaccatatagttattggattggccatccggtgactaacagagcaattatatatctctttgttgggtttataccacttagcttgaaagaggttaaaacactacatctcatcattaaactaaatacaacaaa

SEQ ID NO: 984 - DNA, 741 bp, unidentified
  source 1..741: mol_type = unassigned DNA; note = Human coxsackievirus B1, strain MSH/KM9/2009, complete genome.1 sequence
ttaaaacagcctgtgggttgttcccacccacaggcccattgggcgctagcactctggtatcacggtacctttgtgcgcctgttttatacacccttcccaagtgtaacttagaagcttaccacacacggtcaataggcgactcagtaagccaactgggtcttgatcaagcacttctgtttccccggactgagtatcaataagctgctcacgcggctgaaggagaaaacgttcgttaaccggccaattacttcgagaaacctagtaacaccatggaggttgcgcagcgtttcgctccgcacaaccccagtgtagatcaggccgatgagtcaccgcactcctcacgggcgaccgtggcggtggctgcgctggcggcctgcccatggggtaacccatgggacgcttcaatactgacatggtgcgaagagtctattgagctaattggtagtcctccggcccctgaatgcggctaatcctaactgcggagcagatacccacatgccagtgggcagtctgtcgtaatgggcaactctgcagcggaaccgactactttgggtgtccgtgtttccttttattcttatactggctgcttatggtgacaattgagagattgttaccatatagctattggattggccatccagtgacaaacagagcgattatttatttgtttgttggttatatcccattaagccaaaaagtcttagccactctcaatttcatactattgcttaatacaacgaa

SEQ ID NO: 985 - DNA, 742 bp, Coxsackievirus
  misc_feature 1..742: note = A16, isolate CV-A16-A13-BLR-IN, complete genome.1
  source 1..742: mol_type = genomic DNA
ttaaaacagcctgtgggttgttcccacccacagggcctactgggcgctagcacactggtatcccggtacctttgtgcgcctgttttatctacccctccccaagtgaaacttagaagatcatcacatatggtcaataggcggctcagtacaccaactgcgtctcgaccaagcacttctgtatccccggactgagtatcaatagactgctcacgcggttgaaggagaaaacgttcgttatccggctaactacttcgggaagcctagtagcaccttgaaagttgcggagtgtttcgctcagcacttcccccgtgtagatcaggccgatgagccactgtaaaccccacgggcgaccgtgacagtggctgcgctggcggcctgcccatgggggaacccatgggacgctctaatactgacatggtgtgaagagtctactgagctagttagtagtcctccggcccctgaatgcggctaatcctaactgcggagcacacaccctcaacccagggggcagtgtgtcgtaatgggtaactctgcagcggaaccgactactttgggtgaccgtgtttccttttattccttattggctgcttatggtgacaattgaaaagttgttaccatatagctattggattggccatccggtatctaatagagctattgtttacttatttattggatacgtccctcttaatttcaaggctatccaaactcttgattatatattgctccttaattataagaa

SEQ ID NO: 986 - DNA, 742 bp, Coxsackievirus
  misc_feature 1..742: note = A16, isolate Wh16, complete genome.1
  source 1..742: mol_type = genomic DNA
ttaaaacagcctgtgggttgttcccactcacagggcccactgggcgctagtacactggtatctcggtacctttgtacgcctgttttataccccctccctgatttgcaacttagaagcaacgcaaaccagatcaatagtaggtgtgacataccagtcgcatcttgatcaagcacttctgtatccccggaccgagtatcaatagactgtgcacacggttgaaggagaaaacgtccgttacccggctaactacttcgagaaacctagtaacgccattgaagttgcagagtgtttcgctcagcactccccccgtgtagatcaggtcgatgagtcaccgcattccccacgggcgaccgtggcggtggctgcgttggcggcctgcccatggggtaacccatgggacgctctaatatagacatggtgcgaagagtctattgagctagttagcagacctccggcccctgaatgcggctaatcctaactgcggagcgcgcaccctcaacccagggggcggcgtgtcgtaatgggtaactctgcagcggaaccgactactttgggtgtccgtgtttccttttattctttattggctgcttatggtgacaattgaaaagttgttaccatatagctattggattggccatccggtgtctaacagagctattgtctacctatttattggatacgtccctcttaatctcaaggccattcaaactcttgattatatattgctcctcaactgtaggaa

SEQ ID NO: 987 - DNA, 742 bp, unidentified
  source 1..742: mol_type = unassigned DNA; note = Human coxsackievirus A7, strain Parker, complete genome.1 sequence
tttaaaacagcctgtgggttgtccccacccacagggcccactgggcgttagcactctggtattacggtacctttgtgcgcctgttttataacccctccccaactgtaaattagaagcaacacacgtcgatcaatagtaggcgtgacgcaccagtcacgtcttgatcaagcacttctgtttccccggaccgagtatcaatagactgctcacgcggttgaaggagaaaacgttcgttacccgaccaactacttcgaaaaacctagtagcaccatgaaggttgcggagtgtttcgctcggcacttccccagtgtagatcaggtcgatgagtcaccgcattccccacgggcgaccgtggcggtggctgcgctggcggcctgcctatggggtaacccataggacgctctaatacggacatggtgcgaagagtctattgagctagttggtagtcctccggcccctgaatgcggctaatcctaactgcggagcgcgcgcccccattccaggaggtagcgcgtcgtaacgggcaactctgcagcggaaccgactactttgggtgtccgtgtttccttttatctttattctggctgcttatggtgacaattgacagattgttaccatatagctattggattggccatccggtcacaagcagagcgattatctaccaatttattggatttatcccactgcacactcgtgaatataacacattactgctgatactgagtttggacaaagcaaa

SEQ ID NO: 988 - DNA, 742 bp, unidentified
  source 1..742: mol_type = unassigned DNA; note = Human coxsackievirus A2, strain Fleetwood, complete genome.1 sequence
ttaaaacagcctgtgggttgcacccacccacagggcccactgggcgctagcactctggtatcacgatacctttgtgcgcctgttttatatccccaccccgagtaaacgttagaagttacgcaaccccgatcaatagtaggtgtagcactccagctgcatcgagatcaagcacttctgtctccccggaccgagtatcaatagactgctaacgcggttgaaggagaaaacgttcgttacccggccaattacttcgagaagcccagtagtgccgtgaaagttgcggagtgtttcgctcagcacttcccccgtgtagatcaggctgatgagtcaccgcgatccccacaggtgactgtggcggtggctgcgttggcggcctgcctatggggcaacccataggacgctctaatacagacatggtgcgaagagcctattgagctaattggtagtcctccggcccctgaatgcggctaatcctaactgcggagcacatgccctcaaaccagggggtggtgtgtcgtaacgggtaactctgcagcggaaccgactactttgggtgtccgtgtttctttttattcttataatggctgcttatggtgacaattaaagaattgttaccatatagctattggattggccatccggtgactaacaaatcgctcatataccagtttgttggttttgttcccttatcacatacagctcataacaccctcttatatttactacaattgaatagcaagaa

SEQ ID NO: 989 - DNA, 742 bp, unidentified
  source 1..742: mol_type = unassigned DNA; note = Human coxsackievirusA3, strain Olson, complete genome.1 sequence
ttaaaacagcctgtgggttgtacccacccacagggcccactgggcgctagcacactggtattacggtacctttgtgcgcctgttttataccccccccaacctcgaaacttagaagtaaagcaaacccgatcaatagcaggtgcggcgcaccagtcgcatcttgatcaagcacttctgtaaccccggaccgagtatcaatagactgctcacgcggttgaaggagaaaacgttcgttacccggctaactacttcgagaaacccagtagcatcatgaaagttgcagagtgtttcgctcagcactacccccgtgtagatcaggccgatgagtcaccgcacttccccacgggcgaccgtggcggtggctgcgttggcggcctgcctatggggcaacccataggacgctctaatacggacatggtgcgaagagtctattgagctagttagtagtcctccggcccctgaatgcggctaatcctaactgcggagcacatacccttaatccaaagggcagtgtgtcgtaacgggtaactctgcagcggaaccgactactttgggtgtccgtgtttccttttaatttttactggctgcttatggtgacaattgaggaattgttgccatatagctattggattggccatccggtgactaacagagctattgtgttccaatttgttggatttaccccgctcacactcacagtcgtaagaacccttcattacgtgttatttctcaactcaagaaa

SEQ ID NO: 990 - DNA, 742 bp, Human enterovirus sp.
  misc_feature 1..742: note = 80, isolate HZ01/SD/CHN/2004, complete genome.1
  source 1..742: mol_type = genomic DNA
ttaaaacagcctgtgggttgatcccacccacagggcccactgggcgctagcacactggtatcccggtacctttgtgcgcctgttttatttacccttccccaatgtaatttagaagtttatcccaaatggtcaatagacaacccagcacgccagctgggcttcgaccaagcacttctgttaccccggaccgagtatcaataggctgctcacgcggctgaaagagaaaatgttcgttacccggccaaccacttcgagaaacttagtatcaccatgaaagttgcgcagtgtttcgctccgcacagccccagtgtagatcaggtcgatgagtcaccgcgttccccacgggcgaccgtggcggtggctgcgttggcggcctgcccatggggcaacccatgggacgcttcaatactgacatggtgcgaagagtctattgagctggttggtagtcctccggcccctgaatgcggctaatcctaactgcggagcagatacctacacaccagtgggcagtctgtcgtaacgggcaactctgcggcggaaccgactactttgggtgtccgtgtttccttttattcttatattggctgcttatggtgacaattgaaagattgttaccatatagctattggattggccatccagtgacaaacagagctatcgtgtacctatttgttggttttgtaccactgaaccgtaaggtgttagacactctaaacctcataattctgttcaattcagcaaa

SEQ ID NO: 991 - DNA, 742 bp, Enterovirus sp.
  misc_feature 1..742: note = B80, isolate HT-LYKH203F/XJ/CHN/2011, complete genome.1
  source 1..742: mol_type = genomic DNA
ttaaaacagctctggggttgttcccacccacagggcccaccgggcgccagcactctggtatcacggtacctttgtgcgcctgttttatacccccgtccccggttgtaacttagaagtaacactccacgaccgatagtaggtgtggcacgccagccatgtcttggtcaagcacttctgtttccccggattgagtatcaataggctgttcacacggccgaaggagaaaacatccgttatccggccaactacttcgagaaacctagtaccaccatgaaggttgcgcagtgtttcgctccgcacaaccccagtgtagatcaggccgatgagtcaccgctttccccacgggcgaccgtggcggtggctgcgttggcggcctgcccatggggaaatccatgggacgcttcaatactgacatggtgcgaagagtctattgagctagttggtattcctccggcccctgaatgcggctaatcctaactgcggagcagacacccacatgccagtgggcagtctgtcgtaacgggcaactctgcagcggaaccgactactttgggtgtccgtgtttccttttattcttatactggctgcttatggtgacaattgaaagattgttaccatatagctattggattggccatcctgtgactaacagagctattgtatacctatttgttggttttgtgccactgaattacaaggctttaaacaccctcaactttataatactactcaactcattaaa

SEQ ID NO: 992 - DNA, 742 bp, Enterovirus sp.
  misc_feature 1..742: note = B80, isolate KOUAN67/XZ/CHN/2010, complete genome.1
  source 1..742: mol_type = genomic DNA
ttaaaacagctctggggttgttcccacccacagggcccactgggcgccagcactctggtattccggtaccctagtgcgcctgttttatcctcccctccccgttgaaacttagaagcaagtcacatgcggtcaatagggggcctagtatgccaactaggtcacgaccaagcactcctgttaccccggactgagtatcaataagctgctcgcgcggctgaaggagaaaacgttcgttacccggctaattacttcgagaaacccagtaccaccgtgaaggttgcgcagcgtttcgctccgcacaaccccagtgtagatcaggtcgatgagtcaccgcaatccccacaggcgactgtggcggtggctgcgttggcggcctgcccatgggacaacccatgggacgcttcaatactgacatggtgcgaagagtctattgagctaattagtaatcctccggcccctgaatgcggctaatcctaactgcggagcagatacccacacaccagtgggcagtctgtcgtaacgggcaactctgcagcggaaccgactactttgggtgtccgtgtttccttttattcttatactggctgcttatggtgacaattgacagattgttaccatatagctattggattggccatccggtgacgaacagagcgattatttacctgtttgttggttttataccacttaattacaaggttctaaacactctcaacttcattctaacactcaactcaacaaa

SEQ ID NO: 993 - DNA, 742 bp, unidentified
  source 1..742: mol_type = unassigned DNA; note = Human coxsackievirus A24, strain BRA87-10629 polyprotein gene,1 sequence
ttaaaacagctctggggttgttcccaccccagaggcccacgtggcggctagtactccggtatcacggtacccttgtacgcctgttttatactccctgccccgtaacttagaagcaaaccaaacaagttcaataggagggggtgcaagcccgcaccaccacgaacaagtactcctgtctccccggtgaggttgtatagactgtacccacggttgaaaacgactgatccgttatccgctctagtacttcgggaagcctagtagcattttggaatcttcgatgcgttgcgctcagcactcaaccccggagtgtagcttaggtcgatgagtctggacatcccccaccggtgacggtggtccaggctgcgttggcggcctacctgtggtccaaagccacaggacgctagttgtgaacaaggtgtgaagagcctactgagctactagagagtcctccggcccctgaatgcggctaatcctaaccacggagcaggtagttgcaacccagcaaccagtctgtcgtaatgcgcaagtctgtggcggaaccgactactttgggtgaccgtgtttccttttattttcatatatggctgcttatggtgacaatcattgattgttatcatatagcgacttggattggccatccggtgagaattagaactactgtttacccgtttgctgatttttgataacactccacacacttaccatttgagaattgtactgttggcaagacagcaccattata

SEQ ID NO: 994 - DNA, 742 bp, Human echovirus
  misc_feature 1..742: note = 9, strain Barty, complete genome.1
  source 1..742: mol_type = genomic DNA
ttaaaacagcctgtgggttgttcccacccacagggcccattgggcgctagcacactggtatcacggtacccttgtgcgcctgttttatccacccctccccatcgtaacctagaagcatgactccaacggtcaatagacagctcagtaaaccaattgagccttgaccaagcacttctgttaccccggactgagtatcaataggctgctcacgcggccgaaggagaaaatgttcgttacccggccaattacttcgagaaacctagtaccaccatgaaggttgcgcggtgtttcgctcagcacaaccccagtgtagatcaggccgatgagtcaccgcattccccacgggtgaccgtggcggtggctgcgctggcggcctgcccatggggcaacccatgggacgcttcaatactgacatggtgtgaagagtctattgagctaattggtagtcctccggcccctgaatgcggctaatcctaactgcggagcagatacccacgcaccagtgggcagtctgtcgtaacgggcaactctgcagcggaaccgactactttgggtgtccgtgtttccttttattcttgtactggctgcttatggtgacaattgagagattgttaccatatagctattggattggccatccagtgtcaaacagagcgattgtctacttgttcattggttttataccattgagttacaaggttctagccactcttaacttcattttaacactcaatacatcaaa

SEQ ID NO: 995 - DNA, 742 bp, Human echovirus
  misc_feature 1..742: note = 9, isolate DM, complete genome.1
  source 1..742: mol_type = genomic DNA
ttaaaacagcctgtgggttgttcccacccacagggcccatggggcgcaagcacactggtattgcggtacctttgtgcgcctgttttatccacccttccccaatgaaacttagaagcttgactcaaacggtcaatagacagcccagtgcaccaactgggtctcgaccaggcactcctgtttccccggactgagtatcaataggctgcttgcgcggctgaaggagaaaacgttcgttacccggccaattacttcgagaaacctagtaccaccatggacgttgcgcagtgtttcgctccacacaaccccggtgtagatcaggtcgatgagtcaccgcaatccccacgggcgaccgtggcggtggctgcgctggcggcctgcccatggggcaacccatgggacgcttcaatactgacatggtgcgaagagtctattgagctaattggtagtcctccggcccctgaatgcggctaatcctaactgcggagcagatacccacataccagtgggcagtctgtcgtaacgggcaactctgcagcggaaccgactactttgggtgtccgtgtttccttttattcttatattggctgcttatggtgacaattgaaaggttgttaccatatagcttttggattggccatccagtgagcaacagagcgatcatactcctttttgttgggtttgtaccacttgattatagtagttacaacaccttgctatacgtcattcatttaaacacgagaaa

SEQ ID NO: 996 - DNA, 742 bp, Human enterovirus sp.
  misc_feature 1..742: note = 101, strain CIV03-10361, complete genome.1
  source 1..742: mol_type = genomic DNA
ttaaaacagcctgtgggttgttcccacccacagggcccactgggcgccagcactctggtattacggtacctttgtgcgcctgttttatatccccctccccacttgaaacttagaagtgaaacacactgatcaatagttgacatggcaagccagccatgtcttgatcaagcacctctgtttccccggacctagtatcaatagactgctcgcgcggttgaaagagaaagcgttcgttacccggctaactacttcgagaaacttagtaacaccatggaagttgcggagtgtttcgctcagcacatccccagtgtagatcaggccgatgagtcaccgcattccccacgggcgaccgtggcggtggctgcgttggcggcctgcctgtggggcaacccacaggacgctctaatacaaacatggtgcgaagagtctattgagctagttagtagtcctccggcccctgaatgcggctaatcctaactgcggagcacgtgcttccaatccaggaggtggcgtgtcgtaacgggtaactctgcagcggaaccgactactttgggtgtccgtgtttccttttattcttgcattggctgcttatggtgacaattgagagattgttaccatatagctattggattggccatccggtgacaaacagagcaattatatatctctttgttggatacattccattgaactacaaggagttaaaaaccctcaattatattctgttcttgaattccgcaag

SEQ ID NO: 997 - DNA, 742 bp, Human echovirus
  misc_feature 1..742: note = 16, strain Harrington complete genome.1
  source 1..742: mol_type = genomic DNA
ttaaaacagcctgtgggttgttcccacccacagggcccactgggcgcaagcacactggtattacggtacctttgtgcgcctgttttacatcccctctcccattataacttagaagcacatacaaaacgaccaataggtggtccagcactccagctgggctctggtcaagtacttctgttaccccggactaagtatcaataagcggctaacgcggctgaaggagaaagcgtccgttacccggccaactacttcgggaaatctagtaacaccatgaaggttgcgcagtgtttcgctccgcacaaacccagtgtagatcaggtcgatgagtcaccgcattccccacaggcgactgtggcggtggctgcgttggcggcctgcccatggggcaacccatgggacgcttcaatactgacatggtgcgaagaatctactgagctagttggtagtcctccggcccctgaatgcggctaatcctaactgcggagcacatacccctaacccaaggggcagtgtgtcgtaacgggcaactctgcagcggaaccgactactttgggtgtccgtgtttccttttattcttatactggctgcttatggtgacaattgagaaattgttaccatatagcttttggattggccatccagtgactaacagagctattatttacttgtttgttggctttgtaccactcaaccttagagttttaaggactctcaatttggttctgctatcgaatacaacaaa

SEQ ID NO: 998 - DNA, 742 bp, Enterovirus sp.
  source 1..742: mol_type = genomic DNA
ttaaaacagcctgtgggttgttcccacccacagggcccactgggcgctagcacactggtatcacggtacctttgtgcgcctgttttatatccccctccccactgtaacttagagaaatcacataaacgatcaatagaaggcgcagcacaccagctgagtcttgaccaagcacttctgtttccccggactgagtatcaatagactgctcacgcggttgaaggagaaaacgttcgttacccggccaactacttcgagaaacctagtaccaccatgaaagttgcgcagtgtttcgctcagcacaaccccagtgtagatcaggtcgatgagtcaccgcattccccacgggcgaccgtggcggtggctgcgttggcggcctgcctatggggcaacccatgggacgcttcaatactgacatggtgcgaagagtctattgagctagttggtagtcctccggcccctgaatgcggctaatcctaactgcggagcaagtgcccacaaaccagtgggtagcttgtcgtaacgggcaactctgcagcggaaccgactactttgggtgtccgtgtttccttttattcttattctggctgcttatggtgacaattgagagattgttaccatatagctattggattggccatccggtgactaacagagcaatcatattcctctttgttggatttataccacttgattccactagttacaacactctgctacacattatttacttaaaaccaagaag

SEQ ID NO: 999 - DNA, 742 bp, Echovirus 5
  misc_feature 1..742: note = complete genome.1
  source 1..742: mol_type = genomic DNA
ttaaaacagcctgtgggttgcacccacccacagggcccactgggcgctggtacactggtattaaggtacccttgtacgcctgttttatatccctcccccgatttgtaacttagaattaaagcaaacccgatcaatagtaggtgtggcaaaccagccacatcttgatcaagcacttctgtttccccggaccgagtatcaatagactgctgacgcggttgaaggagaaaacgttcgttacccggccaactacttcgggaaacctagtaccaccatgaaggttgcgcagtgtttcgctccgcacaaccccagtgtagatcaggtcgatgagccaccgcattccccacaggcgactgtggcggtggctgcgttggcggcctgcccatggggtaacccatgggacgcttcaatactgacatggtgcgaagagtccactgagctagttggtattcctccggcccctgaatgcggctaatcctaactgcggagcaggcacccacgagccagtgggcagcctgtcgtaatgggtaactctgcagcggaaccgactactttgggtgtccgtgtttccattttctttttattggctgcttatggtgacaatcacggaattgttaccatatagctattggattggccatccagtgactaacagagcagtaatattcctttttgttggttttgtaccactcaccgtcacgagcctcagaacactcgtattcatcttaacccttaacaagataaa

SEQ ID NO: 1000 - DNA, 742 bp, Human echovirus
  misc_feature 1..742: note = 19, strain Burke complete genome.1
  source 1..742: mol_type = genomic DNA
ttaaaacagcctgtgggttgtacccacccacagggcccaatgggcgctagcactccggtattacggtacccttgtgcgcctgttttatttccccttccccaactgaaacttagaagaaatacacaatgatcgacagtaagcgtggcgcaccagccatgttttgatcaagcacttctgtttccccggaccaagtatcaatagactgctcacgcggttgaaggagaaagcgttcgttaaccggctaactacttcgagaaacccagtaacaccatgaaagttgcagagtgtttcgctcagcactcccccagtgtggatcaggtcgatgagtcactgcgttccccacgggtgaccgtggcagtggctgcgttggcggcctgcctgtggggcaacccacaggacgctctaatacggacatggtgtgaagagtctattgagctagttagtagtcctccggcccctgaatgcggctaatcctaactgtggagcacatgcccctaacccaaggggtggtgtgtcgtaatgggtaactccgcagcggaaccgactactttgggtgaccgtgtttccttttatttttacattggctgcatatggtgacgattgagagattgttgccatatagctattggattggccatccagtgtctaacagagctattgtatatctttttgttggatttgtaccacttgacttgaaagaggtcaggacactacaatacattatactgctgaatactgcaaa

SEQ ID NO: 1001 - DNA, 742 bp, Human echovirus
  misc_feature 1..742: note = 24, strain DeCamp complete genome.1
  source 1..742: mol_type = genomic DNA
ttaaaacagcctgtgggttgcacccacccacagggcccacagggcgctagcactctggtatcacggtacctttgtgcgcctgttttattaccccttccccaattgaaaattagaagcaatgcacaccgatcaacagcaggcgtggcgcaccagtcacgtctcgatcaagcacttctgtttccccggaccgagtatcaatagactgctcacgcggttgaaggagaaagtgttcgttatccggctaaccacttcgagaaacccagtaacaccatgaaagttgcagggtgtttcgctcagcacttccccagtgtagatcaggtcgatgagtcaccgcgttccccacgggcgaccgtggcggtggctgcgttggcggcctgcctatgggttaacccataggacgctctaatacagacatggtgcgaagagtttattgagctggttagtatccctccggcccctgaatgcggctaatcctaactgcggagcacgtgcctccaatccagggggttgcatgtcgtaacgggtaactctgcagcggaaccgactactttgggtgtccgtgtttccttttattcttatactggctgcttatggtgacaatcgaggaattgttaccatatagctattggattggccatccggtgtctaacagagcgattatatacctctttgttggatttatgcagctcaataccaccaactttaacacattgaaatatatcttaaagttaaacacagcaaa

SEQ ID NO: 1002 - DNA, 742 bp, Coxsackievirus
  misc_feature 1..742: note = B3 clone CV-B3/28 2A C107S, complete genome.1
  source 1..742: mol_type = genomic DNA
ttaaaacagcctgtgggttgatcccacccacagggcccattgggcgctagcactctggtatcacggtacctttgtgcgcctgttttataccccctcccccaactgtaacttagaagtaacacacaccgatcaacagtcagcgtggcacaccagccacgttttgatcaagcacttctgttaccccggactgagtatcaatagactgctcacgcggttgaaggagaaagcgttcgttatccggccaactacttcgaaaaacctagtaacaccgtggaagttgcagagtgtttcgctcagcactaccccagtgtagatcaggtcgatgagtcaccgcattccccacgggcgaccgtggcggtggctgcgttggcggcctgcccatggggaaacccatgggacgctctaatacagacatggtgcgaagagtctattgagctagttggtagtcctccggcccctgaatgcggctaatcctaactgcggagcacacaccctcaagccagagggcagtgtgtcgtaacgggcaactctgcagcggaaccgactactttgggtgtccgtgtttcattttattcctatactggctgcttatggtgacaattgagagattgttaccatatagctattggattggccatccggtgaccaatagagctattatatatctctttgttgggtttataccacttagcttgaaagaggttaaaacattacaattcattgttaagttgaatacagcaaa

SEQ ID NO: 1003 - DNA, 742 bp, Enterovirus sp.
  misc_feature 1..742: note = B111, strain Q0011/XZ/CHN/2000, complete genome.1
  source 1..742: mol_type = genomic DNA
ttaaaacagcctgtgggttgttcccacccacagggcccactgggcgccagcacactggtatcacggtacccttgtgcgcctgttttataaacccttccccaatgcaacttagaagctcaactttaccggtcaatagacagtccagtacgccaactgggcttcgatcaagcacttctgttaccccggactaagtatcaataggctgctcacgcggctgaaggagaaaacgttcgttacccggccaattacttcgagaaacccagtaacactatggaggttgcgcagtgtttcgttccacacaaccccagtgtagatcaggtcgatgagtcaccgctttccccacgggcgaccgtggcggtggctgcgttggcggcctgcccatggggcaacccatgggacgcttcaatactgacatggtgtgaagagtctattgagctaattggtattcctccggcccctgaatgcggctaatcctaactgcggagcagatactcacgagccagtgggcagtctgtcgtaacgggtaactctgcagcggaaccgactactttgggtgtccgtgtttccttttattcatatattggctgcttatggtgacaattgagagattgttaccatatagctattggattggccatccggtgactaatagagcaattgtttacctatttgttggctttgtgccgttgaactacaaggttttaaaaactattaactacatcctagtacttaacacgttgaa

SEQ ID NO: 1004 - DNA, 742 bp, Human echovirus
  misc_feature 1..742: note = 7, strain Wallace polyprotein gene, complete cds.1
  source 1..742: mol_type = genomic DNA
ttaaaacagcctgtgggttgttcccacccacagggcccattgggcgtcagcaccctggtatcacggtacctttgtgcgcctgttttatatcccttcccccaattgtaacttagaagaaacacacaccgatcaacagcaagcgtggcacaccagccatgttttggtcaagcacttctgttaccccggactgagtatcaatagactgctcacgcggttgaaggagaaagcgtccgttatccggccagctacttcgagaaacctagtaacaccatggaagttgcggagtgtttcgctcagcactaccccagtgtagatcaggtcgatgagtcaccgctttccccacgggcgaccgtggcggtggctgcgttggcggcctgcctatgggggaacccataggacgctctaatacagacatggtgcgaagagtctattgagctagctggtattcctccggcccctgaatgcggctaatcctaactgtggagcacatgcccctaatccaaggggtagtgtgtcgtaatgagcaattccgcagcggaaccgactactttgggtgtccgtgtttcctcttattcttgtactggctgcttatggtgacaattgagagattgttaccatatagctattggattggccatccggtgactaatagagctattgtgtatctctttgttggatttgtaccacttaatttgaaagaaatcaggacactacgctacattttactattgaacaccgcaaa

SEQ ID NO: 1005 - DNA, 742 bp, Human echovirus
  misc_feature 1..742: note = 3 gene for polyprotein, genomic RNA,strain1
  source 1..742: mol_type = genomic DNA
ttaaaacagcctgtgggttgtacccacacacagggcccactgggcgctagcacactggtatcacggtacctttgtgcgcctgttttataaccccttccccaaacgtaacgtagaagccacacacactgatcaacagtgggcacagcgcaccagccgtgtctcgatcaagcacttctgttttcccggactgagtatcaatagactgctcacgcggttgaaggagaaaacgttcgttacccggctgactacttcgagaagcttagtaacgctatgaaagttgcgaagtgtttcgttcagcactccccccgtgtagatcaggtcgatgagtcaccgcattccccacgggtgaccgtggcggtggctgcgctggcggcctgcccatggggtgacccatgggacgcttcaatacagacatggtgcgaagagcctattgagctagtcagtagtcctccggcccctgaatgcggctaatcctaactgcggagcatgtgccctcaatccagagggtagcgtgtcgtaacgggcaactctgcagcggaaccgactactttgggtgtccgtgtttctttttattcttatattggctgcttatggtgacaattgagagattgttgccatatagctattggattggccatccggtgagtaacagagctattatttactccatcgtaggcttcgtgccattgaactacaaggtcttgaaaactctcaactttgttataatacttaataccacaaa

SEQ ID NO: 1006 - DNA, 742 bp, Enterovirus sp.
  source 1..742: mol_type = genomic DNA
ttaaaacagcctgtgggttgttcccacccacagggcccactgggcgctagcacactggtatcacggtacccttgtgcgcctgttttatcttcccctccccactgtaacttagaagaatgacataaacggtcaacagatagctcagtacaccaactgagccccgaccaagcacttctgttaccccggaccgagtaacaataggctgctcgcgcggctgaaggtgaaaacgttcgttacccggccaattacttcgagaaacctagtaccaccatgaaggttgcgcagcgtttcgctccgcacaaccccagtgtagatcaggtcgatgagtcaccgcactccccacgggcgaccgtggcggtggctgcgctggcggcctgcctatggggcaacccatgggacgcttcaatactgacatggtgcgaagagtctattgagctaattggtagtcctccggcccctgaatgcggctaatcctaactgcggggcaagtgcccacaaaccagtgggtggcttgtcgtaacgggtaaccctgcagcggaaccgactactttgggtgtccgtgtttccttttattcttattctggctgcttatggtgacaattgagagattgttgccatatagctattggattggccatctggtgagtaacagagcaatcatattcctctttgttggatttataccacttgattccactagttacaacactctgctacatattatttgcttaaatacaagaag

SEQ ID NO: 1007 - DNA, 742 bp, Echovirus
  misc_feature 1..742: note = E19, strain NGR_2014, complete genome.1
  source 1..742: mol_type = genomic DNA
ttttaaagcctgtgggttgttcccacccacagggcccattgggcgctagcactctggtattgcggtacctttgtgcgcctgttttatatccccctcccccatttgaaacttagaagcaagacacaccgatcaatagctgatatggcaagccagccatatcttgatcaagtacttctgtttccccggaccgagtatcaatagactgcttgcgcggtcgaaggagaaagcgttcgttacccggctaattacttcgagaaacctagtaacaccatgaaagttgcagagtgtttcgctcagcacaaccccagtgtagatcaggctgatgagtcaccgcattccccacgggtgaccgtggcggtggctgcgttggcggcctgcctgtggggcaacccacaggacgctctaatacagacatggtgtgaagagtctattgagctaattagtagtcctccggcccctgaatgcggctaatcctaactgcggagcacgtacccccattccaggaggtggcgtgtcgtaacgggtaactctgcagcggaaccgactactttgggtgtccgtgtttccttttatctttacactggctgcttatggtgacaattgaaagattgttaccatatagctattggattggccatccggtgacaaatagagcgattgtatatttgttcattggatttgtaccactaagctataaagcattaaacactcttaaccttatcctagtgcttaactcaacaaa

SEQ ID NO: 1008 - DNA, 742 bp, Echovirus
  misc_feature 1..742: note = E9, strain MSH/KM812/2010, complete genome.1
  source 1..742: mol_type = genomic DNA
ttataaacagcgggctgggttgctcccactacagggcccacggcgcgcaagcacactggtatcacggtacttttgtgcgcctgttttatccaccctcccccaatgaaacttagaagcttgattcaaacggtcaatagacaacccagtacaccaactgggtctcgaccaagcacctctgtttccccggactgagtatcaataggctgcttacgtggctgaaggagaaaacgttcgttacccggccaattacttcgagaaacctagtaccaccatgaacgttgcgcagtgtttcgctccacacaaccccagtgtagatcaggtcgatgagtcaccgcattccccacgggtgaccgtggcggtggctgcgctggcggcctgcccatggggtaacccatgggacgctacaatactgacatggtgtgaagagtctattgagctaattggtagtcctccggcccctgaatgcggctaatcctaactgcggagcagatactcacatgccagtgggcagtctgtcgtaacgggcaactctgcagcggaaccgactactttgggtgtccgtgtttccttttattctcatctggctgcttatggtgacaatcgaaagactgttaccatatagctattggattggccatccagtgagtaacagagcgatcattttcctttttgttgggtttataccacttgattacaatagttacaataccttgctatacatcgttcatttgaacacaacaag

SEQ ID NO: 1009 - DNA, 742 bp, Enterovirus sp.
  misc_feature 1..742: note = B84, isolate AFP452/GD/CHN/2004, complete genome.1
  source 1..742: mol_type = genomic DNA
ttaaaacagcctgtgggttgttcccacccacagggcccactgggcgctagcacactggtatcacggtacccttgtgcgcctgttttatcaaccccttcccgatgtaacttagaagccaaatcttaccggtcaacaggtggtccagtatgccaactgggctctgaccaagcacttctgttaccccggactgagtatcaataggctgctcacgcggctgaaggagaaaatgtccgttacccggccaattacttcgagaaacctagtaccaccatgaaggttgcgcggcgtttcgctccacacaaccccagtgcagatcaggtcgatgagccaccgcttcccccacgggcgaccgtggcggtggctgcgttggcggcctgcccatgggacaacccatgggacgcttcaatactgacatggtgcgaagagtctattgagctaattggtagtcctccggcccctgaatgcggctaatcctaactgtggagcagatgcccgcaagccagcgggtggtctgtcgtaacgggcaactccgcagcggaaccgactactttgggtgaccgtgtttccttttatttttatactggctgcttatggtgacaattgaaagattgttaccatatagctattggattggccatccggtgactaacagagctatcatatatctatttgttggttacgtcccacttgactatagagttctacgcaccttatatttcattttagatctgaacaaagcgag

SEQ ID NO: 1010 - DNA, 742 bp, Human enterovirus sp.
  misc_feature 1..742: note = 106, isolate 148/YN/CHN/12, complete genome.1
  source 1..742: mol_type = genomic DNA
ttaaaacagcctgtgggttgttcccacccacagggcccatggggcgccagcacactggtattgcggtacctttgtgcgcctgttttattcaccctttcccaatgaaacttagaagcttaactcaaccggtcgatagacagcccagtacaccaactgggttttgaccaagtactcctgtttccccggactgagtatcaataagctgctcgcgcggctgaaggagaaaacgttcgttacccggccaattacttcgagaaacctagtaccaccatgaacgttgcgcagtgtttcgctccgcacaaccccagtgtagatcaggtcgatgagtcaccgcaatccccacgggcgaccgtggcggtggctgcgctggcggcctgcccatggggcatcccatgggacgcttcaatactgacatggtgcgaagagtctattgagctaattggtaatcctccggcccctgaatgcggctaatcctaactgcggggcagacacccacacgccagtgggcagtctgtcgtaacgggtaactccgcagcggaaccgactactttgggtgtccgtgtttccttttatctttatattggctgcttatggtgacaattgaaagattgttgccatatagctattggattggccatccggtgtctaatagagcaattatatatctctttgttggcttcatcccgttaaataaagtgagctaccagaccctgtgctatattatcaaattgaacacaataaa

SEQ ID NO: 1011 - DNA, 742 bp, Human echovirus
  misc_feature 1..742: note = 6, strain Charles, complete genome.1
  source 1..742: mol_type = genomic DNA
ttaaaacagcctgtgggttgcccccacccgcagggcccattgggcgctagcacactggtatcacggtacctttgtgcgcctgttttatcctccctccccaagtgcaacgtagaagcaagacacaaaaggtcaacagatagcccagcacaccagttgggtttcgaccaagcacttctgtctccccggaccgagtatcaataagctgctcacgcggctgaaggagaaagcgttcgttacccggctagttacttcgagaaacccagtaccaccatgaaggttgcgcagcgtttcgctccgcacaaccccagtgtagatcaggtcgatgagtcaccgcgttccccacgggcgaccgtggcggtggctgcgttggcggcctgcccatggggcaacccatgggacgcttcaatactgacatggtgcgaagagtctattgagctaactagtagtcctccggcccctgaatgcggataatcttaactgcggagcaggtgctcacaatccagtgggtggcctgtcgtaacgggcaactctgcagcggaaccgactactttgggtgtccgtgtttccttttatctctttgttggctgcttatggtgacaattgaatgattgttgccatatagctattggattggccatccggtgagcagcagatccattatttaccagtttgttggatttgtaccacttgatcacatagtctttagaacacttgtctttattctaaatcttaacaaggcaag

SEQ ID NO: 1012 - DNA, 742 bp, Human enterovirus sp.
  misc_feature 1..742: note = 85, strain BAN00-10353, complete genome.1
  source 1..742: mol_type = genomic DNA
ttaaaacagcctgtgggttgttcccacccacagggcccaccgggcgctagcacactggtattgcggtacctttgtgcgcctgttttatacacccctccttaatgtaactcagaagtacaacattaccggtcaacagatgactcagtaaaccaactgagcctcgaccaagcacttctgtttccccggaccgagtatcaataggctgctcacgcggctgaaggagaaagtgttcgttacccggccaattacttcgagaagcccagtaccaccatggaggttgcgcggcgtttcgctccgcacatccccagtgtagatcaggctgatgagtcaccgcgttccccacgggtgaccgtggcggtggctgcgctggcggcctgcccatggggtaacccatgggacgcttcaatactgacatggtgtgaagagcctattgagctaattggtagtcctccggcccctgaatgcggctaatcctaactgcggagcagatacccacacaccagcgggcagtctgtcgtaacgggcaactctgcagcggaaccgactactttgggtgtccgtgtttccttttatttttatgctggctgcttatggtgacaattgaggaattgttaccatatagctattggattggccatccagtgtccaacagagcgatcatttacctgttcgttgggttcgtaccactaaaccacaagtcactcagcacacttaattacattataactctcaacacaacaag

SEQ ID NO: 1013 - DNA, 742 bp, Human enterovirus sp.
  misc_feature 1..742: note = 97 genomic RNA, complete genome,strain:1
  source 1..742: mol_type = genomic DNA
ttaaaacagcctgtgggttgttcccatccacagggcccactgggcgctagcacactggtatcacggtacctttgtgcgcctgttttatttcccccctcccgaagtaacctagaagcaggtaatatacggtcaataggtgacacagtataccaactgggtcttgaccaagcacttctgttaccccgggctgagtatcaataagctacttacgtggctgaaggagaaaacgctcgttacccggccaattacttcgagaaacctagtaacaccatgaaggttgcgcagtgtttcgctccgcacaaccccagtgtagaccaggtcgatgagtcaccgcattccccacgggcgaccgtggcggtggctgcgttggcggcctgcccatggggcaacccatgggacgcttcaaaactgacatggtgcgaagagtctattgagctaattggtagtcctccggcccctgaatgcggctaatcccaactgcggagcaaatacccacatgccagtgggcagtctgtcgtaatgggtaactctgcagcggaaccgactactttgggtgtccgtgtttctttttattcttatactggctgcttatggtgacaattgaggaattgttgccatatagctattggattggccatccggtgacaaacagagcaattatttacttgtttgttggattcgtaccgctaaaccacagagtactaagcacccttaattttattatattacttaactcgacaaa

SEQ ID NO: 1014 - DNA, 742 bp, Coxsackievirus
  misc_feature 1..742: note = B2, strain Ohio-1 polyprotein gene, complete cds.1
  source 1..742: mol_type = genomic DNA
ttaaaacagcctgtgggttgttcccacccacagggcccactgggcgctagcacactggtattacggtacctttgtgcgcctgttttatctacccttgcccaatgcaacatagaagcttagtccaaaaggtcaataggcagcccagtgcaccaactgggtccagaccaagcacttctgttaccccggaccaagtatcagtaggctgctcacgcggctgaaggagaaaacgttcgttacccggccaactacttcgagaaacctagtagcaccatgaaggttgcgcagtgtttcgctccgcacagccccagtgtagatcaggtcgatgagccaccgcattccccacgggtgaccgtggcggtggctgcgttggcggcctgcccatggggtaacccatgggacgcttcaatactgacatggtgtgaagagtctattgagctagttggtagtcctccggcccctgaatgcggctaatcctaactgcggagcgtgcgcttgcaacccagtgagtagcacgtcgtaatgggtaactctgcagcggaaccgactactttgggtgtccgtgtttccttttattccttgtctggctgcttatggtgacaattgagagattgttgccatatagctattggattggccatccggtatctaacagggcgatcatttacctgtttgttggtttcatacccttgaatcttgaggtttataataccctcactcttataataaaactcaatacatcaag

SEQ ID NO: 1015 - DNA, 742 bp, Human echovirus
  misc_feature 1..742: note = 13, strain Del Carmen complete genome.1
  source 1..742: mol_type = genomic DNA
ttaaaacagcctgtgggttgtacccacccacagggcccactgggcgccagcacactggtatcacggtacccttgtgcgcctgttttatccacccctccccgaagtaacttagaagctctaaataagcggtcagcagccagcccagcacaccagctgggttttgaccaagtacttctgttaccccggaccgagtatcaataggctgcacacgcggctgaaggagaaaacgttcgttacccggccatctacttcgagaaacctagtaccactatgaaagttgcgaagcgtttcgctccacacaaccccagtgtagatcaggctgatgagtcaccgcattccccacaggtgactgtggcggtggctgcgttggcggcctgcccatggggcaacccatgggacgcttcaataccgacatggtgcgaagagtctattgagctagatggtagtcctccggcccctgaatgcggctaatcctaactgcggagcaggtgcacacaaaccagtgagtagcctgtcgtaatgggcaactctgcagcggaaccgactactttgggtgtccgtgtttctttttattcttatattggctgcttatggtgacaattgaaagattgttaccatatagctattggattggccatccggtgactagcagagcactgatatacctatttgtgggctttgtaccactcaactttgtcagctacaccacattgctatatattgtccaactgaacgcaagaag

SEQ ID NO: 1016 - DNA, 742 bp, Coxsackievirus
  misc_feature 1..742: note = B2 gene for polyprotein, complete cds,strain:1
  source 1..742: mol_type = genomic DNA
ataaaacagcctgtgggttgttcccacccacagggcctactgggcgctagcacactggtattgcggtacctttgtgcgcctgttttatctgcccttccccaatgtaacttagaagttaaactcagacggccaatagacagcccagtacaccaactgggtctcggccaggcacttctgtttccccggactgagtatcaataagctgctcgcgcggctgaaggagaaaacgttcgttatccggccaattacttcgagaaacctagtaccaccatggacgttgcgcagtgtttcgctccgcacaaccccagtgtagatcaggtcgatgagtcaccgcaatccccatgggcgaccgtggcggtggctgcgctggcggcctgcccatgggtcaacccatgggacgcttcaatactgacatggtgtgaagagtctattgagctaattggtagtcctccggcccctgaatgcggctaatcccaactgcggagcagatacccacacgccagtgggcagtctgtcgtaacgggcaactctgcagcggaaccgactactttgggtgtccgtgtttccttttatccttacattggctgcttatggtgacaattgagagattgttaccatatagctattggattggccatccagtgagcaacagagcaattatatttctctttgttgggtttgtaccacttgattttgatagttacaacaccctactttatattgttcgcctgaacacgagaaa

SEQ ID NO: 1017 - DNA, 742 bp, Enterovirus sp.
  misc_feature 1..742: note = D111, strain ANG/2010-23294, complete genome.1
  source 1..742: mol_type = genomic DNA
ttaaaacagctctggggttgttcccaccccagaggcccacgtggcggccagtactccggtattgcggtacccttgtacgcctgttttatactcccttcccccgtaacttagaagaaataaaccaagttcactaggagggggtacaaaccagtaccaccacgaacaagcacttctgtttccccggtgacattgcatagactgtacccacggttgaaagcgactgatccgttacccgctactgtacttcgagaagcctagtaccatcttggaatcttcgacgcgttgcgctcagcactcaaccccagagtgtagcttaggtcgatgagtctggacaatccccaccggtgacggtggtccaggctgcgttggcggcctacctgtggcccaaagccacaggacgctagttgtgaacaaggtgtgaagagcctattgagcttcagtagagtcctccggcccctgaatgcggctaatcccaaccacggagcaggtggtcataatccaatgactggcctgtcgtaacgcgcaagtctgtggcggaaccgactactttgggtgtccgtgtttccttttattttgtcaatggctgcttatggtgacaatctaagattgccatcatatagcttttggattggccatccggtattattttgagttatttgatttgttgtccacagctctttacagtatcacttaactattattgtttgtattttgctccttggatcacaaccaggtaatcaga

SEQ ID NO: 1018 - DNA, 742 bp, Human echovirus
  misc_feature 1..742: note = 20, strain JV-1 complete genome.1
  source 1..742: mol_type = genomic DNA
ttaaaacagcctgtgggttgttcccacccacagggcccattgggcgctagcactctggtattacggtacctttgtgcgcctgttttatgtcccctcccccaatcgcaacttagaagcaacacacactgatcaacagtaagcgtggcataccagccacgttttgatcaagcacttctgttaccccggactgagtatcaatagactgctcacgcggttgaaggagaaagcgttcgttatccggccaactacttcgagaaacctagtaacaccgtgaaagttgcagagtgtttcgctcagcactaccccagtgtagatcaggtcgatgagtcaccgcattccccacgggcgaccgtggcggtggctgcgctggcggcctgcctacggggaaacccgtaggacgctctaatacagacatggtgcgaagagtctattgagctagttggtagtcctccggcccctgaatgcggctaatcctaactgcggagcacacacccccaagccagggggcagtgtgtcgtaacgggtaactctgcagcggaaccgactactttgggtgtccgtgtttcattttattcctatgctggctgcttatggtgacaattgacagattgttaccatatagctattggattggccatccggtgactaatagagccattatataccactttgttgggtttataccactcaacttgaaagaggtcaaaacactacagctcatcattaaattgaacacaacaaa

SEQ ID NO: 1019 - DNA, 742 bp, Human enterovirus sp.
  misc_feature 1..742: note = 83, strain USA/CA76-10392, complete genome.1
  source 1..742: mol_type = genomic DNA
tttaaaacagcctgtgggttgttcccacccacagggcccactgggcgctagcactctggtatcacggtacccttgtgcgcctgttttatatccccaccccagtggaacattagaagcagcacacctatgatcaatagtgggcgtggcatccagtcacgttatgatcaagcacttctgtgaccccggactgagtatcaatagactgctcacgcggttgaaggagaaaacgttcgttacccggccagttacttcgagaaacccagtaacaccatgaatgttgcagagtgtttcgctcagcacttcccccgtgtagatcaggtcgatgagccactgcattccccacgggcgaccgtggcagtggctgcgttggcggcctgcctatggggtcacccataggacgctctaatactgacatggtgcgaagagtctattgagctaactggtagtcctccggcccctgaatgcggctaatcctaactgtggagcacattcccccaatccagggggcagtgtgtcgtaacgggcaactctgcagcggaaccgactactttgggtgtccgtgtttctttttattctcatattggctgcttatggtgacaattacagaattgttaccatatagctattggattggccatccggtgactaacagagcaattatttatcaattcgttggatttgtcccactcgatttcaaagcagtcaatacactctcatatatcgttacactcaacacaacaaa

SEQ ID NO: 1020 - DNA, 742 bp, Human enterovirus sp.
  misc_feature 1..742: note = 97, strain 99188/SD/CHN/1999/EV97, complete1
  source 1..742: mol_type = genomic DNA
ttaaaacagcctgtgggttgttcccacccacagggcccactgggcgctagcacactggtatcacggtacctttgtgcgcctgttttatccacccttccccaagtgacttagaagcataccacacacggtcaacaggcggctcaatgcaccaattgagtcatgaccaagtacttctgttaccccggacttagtatcaataagctgctcacgcggctgaaggagaaaacgttcgttacccggccaattacttcgagaaacctagtagcaccatggaggttgcgcggcgtttcgctccacacaaccccagtgtagatcaggctgatgagtcaccacaatcctcacgggcgaccgtggtggtggctgcgctggcggcctgcccatggggtaacccatgggacgctacaatactgacatggtgtgaagagtctattgagctaattggtagtcctccggcccctgaatgcggctaatcctaactgcggagcagatacccacacaccagtgggcagtctgtcgtaacgggcaactctgcagcggaaccgactactttgggtgtccgtgtttccttttttctcttatactggctgcttatggtgacaattgaaagattgttaccatatagctattggattggccatccagtgacaaacagagcgattgtttacctgttcattggtttcgtaccgctgaattacacagttttaaacacccttaatcttattttggcacttaatacatcaaa

SEQ ID NO: 1021 - DNA, 742 bp, Enterovirus sp.
  misc_feature 1..742: note = B, isolate EIS6B polyprotein gene, complete cds.1
  source 1..742: mol_type = genomic DNA
ttaaaacagctctggggttgtacccactcacagggcccactgggcgctagcacactggtatcacggtacctttgtgcgcctgttttataaccccttccccaaacgtaacgtagaagctacacacactgatcaatagtaggcacagcgcaccagttgtgtcccgatcaagcacttctgtctccccggaccgagtatcaatagactgctcacgcggttgaaggagaaaacgttcgttaaccggctgactacttcgagaaacctagtagtactatgaaagttgcgaagcgtttcactcagcacttcccccgtgtagatcaggctgatgagtcactgcgttccccacgggtgaccgtggcagtgactgcgttggcggcctgcccatggggtaacccatgggacgcttcaatacggacatggtgcgaagagtctattgagctagccagtagtcctccggcccctgaatgcggctaatcctaactgcggagcatgtgccctcgatccagggggtagcgtgtcgtaacgggcaactctgcagcggaaccgactactttgggtgtccgtgtttctttttattcttatattggctgcttatggtgacaattgagagattgttaccatatagctattggattggccacccggtgactaatagagctattatctactcctttataggttttgtgccgttgaactacaaggtcttaaggactctcaactttatcataatacttaatactgcaaa

SEQ ID NO: 1022 - DNA, 742 bp, Echovirus
  misc_feature 1..742: note = 25 mRNA for partial polyprotein,isolate M1262.1
  source 1..742: mol_type = genomic DNA
ttaaaacagcctgtgggttgttcccatccacagggcccactgggcgcttgcactctggtatcacggtaccattgtgcgcctgttttatatcccctatccccagttgtaacttagaagcgatgccttccgaccaatagtgggcatggcacaccagtcatgtcttggtcaagtacacctgtttccccggactgagtatcaatagactgctcacgcggttgaaggagaaaacgttcgttacccggctaactacttcgagaaacctagtaacaccatgaatattgcgaagtgtttcgttcagcaccccccagtgtagatcaggccgatgagtcaccgcgttccccacaggcggccgtggcggtggctacgctggcggcctgcctatggggcaacccataggacgcttcaatgtggacatggtgtgaagagtctattgagctagttagtagtcctccggcccctgaatgcggctaatcctaatctcggagcaggcacccacaaaccagtgggcaacctgtcgtaatgggtaactctgcggcggaaccgactactttgggtgtccgtgtttccctttattcttgtattggctgcttatggtgacaattaggagattgttaccatatagctattggattggccatccggtgtctaacagagcaattatttacctctttgttggttacgtaccattaaactttaaggttatagcaacgctcaagtttatcctacttctcaataaagtaaa

SEQ ID NO: 1023 - DNA, 742 bp, Echovirus
  misc_feature 1..742: note = E6,isolate E6/RUS/Novosibirsk/NS09-D220/2009 polyprotein1
  source 1..742: mol_type = genomic DNA
ttaaaacagcctgtgggttgttcccacccacagggcccactgggcgttagcacactggtatcaaggtacctttgtgcgcctgttttattcacccttccccttcgtaacttagaagcatagctcagacggtcaatagacagcccagcataccagctgggtcatgaccaagcacttctgttgccccggactgagtatcaataggctgcttgcgcggctgaaggagaaaagttcgttacccggccagttacttcgagaaacctagtaacaccatggaagttgcgtagtgtttcgctccgcacaaccccagtgtagatcaggtcgatgagtcaccgcataccccacgggtgaccgtggcggtggctgcgttggcggcctgcccatggggcatacccatgggacgctacaatactgacatggtgcgaagagtctattgagctaattggtagtcctccggcccctgaatgcggctaatcctaactgcggagcagatacccacacaccagtgggcggtctgtcgtaacgggtaactctgcagcggaaccgactactttgggtgtccgtgtttccttttattcctaatctggctgcttatggtgacaattgagagattgttaccatatagctattggattggccatccggtgactaacagagcgatcatctacctgtttgttggtttcattccactaaactacaaagtactaaacactctgaattacattttactgcttaactcatcaaa

SEQ ID NO: 1024 - DNA, 743 bp, Human enterovirus sp.
  misc_feature 1..743: note = 71 polyprotein gene, complete cds.1
  source 1..743: mol_type = genomic DNA
ttaaaacagctgtgggttgtcacccacccacagggtccactgggcgctagtacactggtatctcggtacctttgtacgcctgttttataccccctccctgatttgcaacttagaagcaacgcaaaccagatcaatagtaggtgtgacataccagtcgcatcttgatcaagcacttctgtatccccggaccgagtatcaatagactgtgcacacggttgaaggagaaaacgtccgttacccggctaactacttcgagaagcctagtaacgccattgaagttgcagagtgtttcgctcagcactccccccgtgtagatcaggtcgatgagtcaccgcattccccacgggcgaccgtggcggtggctgcgttggcggcctgcctatggggtaacccataggacgctctaatacggacatggcgtgaagagtctattgagctagttagtagtcctccggcccctgaatgcggctaatcctaactgcggagcacatacccttaatccaaagggcagtgtgtcgtaacgggcaactctgcagcggaaccgactactttgggtgtccgtgtttctttttattcttgtattggctgcttatggtgacaattaaagaattgttaccatatagctattggattggccatccagtgtcaaacagagctattgtatatctctttgttggattcacacctctcactcttgaaacgttacacaccctcaattacattatactgctgaacacgaagcg

SEQ ID NO: 1025 - DNA, 743 bp, Enterovirus sp.
  misc_feature 1..743: note = A71, isolate VR1432, complete genome.1
  source 1..743: mol_type = genomic DNA
ttaaaacagcctgtgggttgcacccactcacagggcccactgggcgcaagcactctggcacttcggtacctttgtgcgcctgttttatatcccctcccccaatgaaatttagaagcagcaaaccccgatcaatagcaggcataacgctccagttatgtcttgatcaagcacttctgtttccccggactgagtatcaatagactgctcacgcggttgaaggagaaaacgttcgttatccggctaactacttcggaaagcctagtaacaccatggaagttgcggagagtttcgttcagcacttccccagtgtagatcaggtcgatgagtcaccgcattccccacgggcgaccgtggcggtggctgcgttggcggcctgcccatggggtaacccatgggacgctctaatacggacatggtgtgaagagtctactgagctagttagtagtcctccggcccctgaatgcggctaatcccaactgcggagcacacgcccacaagccagtgggtagtgtgtcgtaacgggcaactctgcagcggaaccgactactttgggtgtccgtgtttccttttattcttatgttggctgcttatggtgacaattaaagagttgttaccatatagctattggattggccatccggtgtgcaacagagcgatcgtttacctatttattggttttgtaccattgacactgaagtctgtgatcacccttaattttatcttaaccctcaacacagccaaac

SEQ ID NO: 1026 - DNA, 743 bp, Coxsackievirus
  misc_feature 1..743: note = A16 gene for polyprotein,isolate1
  source 1..743: mol_type = genomic DNA
ttaaaacagcctgtgggttgtacccaccctcagggcccactgggcgccagcactctggtaccacggtacctttgtgcgcctgttttatcatcccacccctacctgaaacgtagaagcaataatcagtcgaccaatagtgggtgtggcacaccagccacatcttggtcaagcacttctgtttccccgggttgagtatcaatatgctgttcacacggctgaaggagaaaacgcccgttatccggccaactacttcgagaagcctagtatcgccatgaacattgcaaggcgtttcgctcagcacttcccccgtgtagatcaggccgatgagtcaccgcattccccacgggcgaccgtggcggtggctgcgttggcggcctgcctgtgggttgacccacaggacgccttaatatagacatggtgtgaagagcctattgagctggttggtattcctccggcccctgaatgcggctaatcctaactgtggagcacatactcacaagccagtgggtggtgtgtcgtaatgggcaactctgcagcggaaccgactactttgggtgtccgtgtttccttttatacttatactggctgcttatggtgacaatcagagaattgttaccatatagctattggattggccatccggtgtgcaacagagctattgtgtatttatttgttggatttgtcccactatcacatacatcccttaacactttgtattttattttgaaattaaacgcaagaaa

SEQ ID NO: 1027 - DNA, 743 bp, Coxsackievirus
  misc_feature 1..743: note = A10 gene for polyprotein, polyprotein region,strain1
  source 1..743: mol_type = genomic DNA
tttaaaacagcctgtgggttgcacccacccacagggcccactgggcgctagcactctggtactgcggtacctttgtgcgcctgttttatcaccccaccccatctggaacgtagaagcaatgcacaactgaccaatagtgggtgtggcgcaccagccacatcttggtcgagcacttctgtttccccgggtttagtatcaataagctgctcacgcggctgaaggagaaaacacccgttatccggccgactacttcgagaaacctagtaccgctatgaacgttgcaaggcgtttcgttcagcacttcccccgtgtagatcaggccgatgagtcaccgcattcctcacgggcgaccgtggcggtggctgcgttggcggcctgcctatgggcttgcccataggacgccttaatactgacatggtgcgaagagtctattgagctagttggtagtcctccggcccctgaatgcggctaatcctaactgcggagcacatactcacaaaccagtgagcggtgtgtcgtaacgggcaactctgcagcggaaccgactactttgggtgtccgtgtttccttttattcttatactggctgcttatggtgacaattaaagaattgttaccatatagctattggattggccatccggtgtctaacagagctattatatacttgtttgttggattcatctcgttatcacacaaatcccttaacactttgtgttttatcttgaatttgaactcaaaaag

SEQ ID NO: 1028 - DNA, 743 bp, unidentified
  source 1..743: mol_type = unassigned DNA; note = Human coxsackievirus A7,isolate 275/58, complete genome.1 sequence
tttaaaacagcctgtgggttgtacccacccacagggcctactgggcgccagcactctggtactatggtacctttgtgcgcctgttttatattcctcccccaaattgcaacttagaagacatgcactccgatcaatagcaggcgtggcgcaccagctgcgtcttgatcaagcatttctgtttccccggactgagtatcaatagactgctcacgcggttgagggagaaaacgtccgttacccggccaactacttcgagaagcctagtaacactatgaaagttgcggggcgtttcgctcagcactcccccagtgtagatcaggtcgatgagtcaccgcattccccacgggcgaccgtggcggtggctgcgttggcggcctgcctatggggcaacccatgggacgctctaatatggacatggtgtgaagagcttattgagctagttggtagtcctccggcccctgaatgcggctaatcctaactgcggagcacgtgcctccaaaccagaaggtggcgtgtcgtaatgggcaactctgcagcggaaccgactactttgggtgtccgtgtttccttttattcttactctggctgcttatggtgacaattgacagattgttaccatatagctattggattggccatccggtgacgaacagagcgattgtgtaccagtttattggtttcgtccacttgaatacacgtgaattcaataccttgctgttggtattgaatttcaatacaacaaa

SEQ ID NO: 1029 - DNA, 743 bp, unidentified
  source 1..743: mol_type = unassigned DNA; note = Human coxsackievirus A8,strain Donovan, complete genome.1 sequence
ttaaaacagcctgtgggttgcacccacccacagggcccaatgggcgtcagcactctggtaccgaggtacctttgtgcgcctgttttatttccccttcccctgatgcaacttagaagctccgaactaatgatcaatagtaggtgtggcacgccagccacatcttgatcaagcacttctgtttacccggaccgagtatcaataagctgcgcaagcggctgaaggagaaagcgttcgttatccggccaactacttcgagaagcttagtaccaccatgaacgttgcagagtgtttcgttcagcacaaccccggtgtagatcaggccgatgagtcaccgcgttccccatgggcgaccatggcggtggctgcgttggcggcctgcccatggagcaatccatgggacgctctaatactgacatggtgcgaagagcctattgagctagttggtgatcctccggcccctgaatgcggctaatcctaactgcggagcatgcgcccacaagccagtgggtggtgtgtcgtaacgggtaactctgcagcggaaccgactactttgggtgtccgtgtttccttttatctttacattggctgcttatggtgacaattgaagaattgttaccatatagctattggattggccatccggtgtgcaatagagcgattatatacctatttgttggatttgttccattgacatatagatctcttaacactctacaacacatcttgatcttgaacacgagaaa

SEQ ID NO: 1030 - DNA, 743 bp, Coxsackievirus
  misc_feature 1..743: note = A8,isolate CVA8/SZ124/CHN/2012, complete genome.1
  source 1..743: mol_type = genomic DNA
ttaaaacagcctgtgggttgtacccacccacagggcccactgggcgctagcactctgattctacggaatctttgtgcgcctgttttacaaccccctccccctatgtaacttagaagcaatgcaccaatgatcaacagcaggcgtggcgcaccagccatgtcttgatcaagcacttctgtttccccggacagagtatcaatagactgctcgcgtggtcgaaggagaaaacgtccgttacccggctaactacttcgagaaacctagtagcaccaatgaagctgcagagcgtttcgctcagcacttaccccgtgtagatcaggccgatgagtcactgcgttccccacgggcgaccgtggcagtggctgcgttggcggcctgcctatggggtcacccataggacgctctaatgtggacatggtgcgaagagtctattgagctagttagtagtcctccggcccctgaatgcggctaatcctaactgcggagcgcataccctcaaaccagggggtggtgcgtcgtaacgggtaactctgcagcggaaccgactactttgggtgtccgtgtttccttttattttcttaatggctgcttatggtgacaattgaggaattgttaccatatagctattggattggccatcaggtgtgtaacagagcaattatctacttgtttgtaggatataccccattaacgttcaaatctcttaacacactacagtacatactaactttgaacacaagaaa

SEQ ID NO: 1031 - DNA, 743 bp, Coxsackievirus
  misc_feature 1..743: note = A8,isolate CVA8/SZ266/CHN/2014, complete genome.1
  source 1..743: mol_type = genomic DNA
ttaaaacagcctgtgggttgtacccacccacagggcccactgggcgccagcactctggtaatacgttacctttgtgcgcctgttttacctccccctaccctggaacactttagaagtaaagcatatctggtcaatagaaggtgtggcgaaccagctgcatctcgaccaagcacttctgtttccccggactgagtatcaatagactgctaacgcggtcgaaggagaaaacgttcgttatccggctagctacttcgagaagcctagtaacaccatgaaagttgcagagtgtttcactcagcacttcccccgtgtagatcaggtcgatgagtcaccgcgacccccacgggcgaccgtggcggtggctgcgttggcggcctgcctgtggggcaacccataggacgctctaatacagacatggtgtgaagagcctattgagctagctagtagtcctccggcccctgaatgcggctaatcctaactgcggagcacatgctcgtgaaccagcgagtagtgtgtcgtaatgggtaactctgcagcggaaccgactactttgggtgtccgtgtttctttttattcttacattggctgcttatggtgacaattaaagaattggcaccatatagctattggattggccatcctgtgactaacagagctattatatatctctttgttggatttgttcccttgaggctcactacttataacacactttgttttatattgactctcaattcagcaaa

SEQ ID NO: 1032 - DNA, 743 bp, unidentified
  source 1..743: mol_type = unassigned DNA; note = Human coxsackievirus A2,strain CVA2/SD/CHN/09, complete genome.1 sequence
ttaaaacagcctgtgggttgtacccacccacagggcccactgggcgcgagcactctggtatcacgatacctttgtgcgcctgttttatatcccttccccattaatgtaacatagaagttatgcaccccgatcaatagcaggcatggcgctccagctatgtcttgatcaagcacttctgtttccccggactgagtatcaatagactgcttgcgcggttgaaggagaaaacgttcgttatccggctaactacttcgggaagcttagtaatgccatggaagttgcggagagtttcgctcagcacttccccagtgtagatcaggctgatgagtcaccgcattccccacgggtgaccgtggcggtggctgcgttggcggcctgcccatagggagacctatgggacgctctaatacggacatggtgtgaagagcctactgagctagttagcagtcctccggcccctgaatgcggctaatcctaactgcggagcacgcgtctccaatccaggggatagcgtgtcgtaatgggcaactctgcagcggaaccgactactttgggtgtccgtgtttccttttattcttacactggctgcttatggtgacaattgaggaattgttaccatatagctattggattggccatccggtgactaacagagctattatttaccaatttgttggatttgtacctctttcactcaccgtttaccacacccttctatacctattacaactgaatagtagaag

SEQ ID NO: 1033 - DNA, 743 bp, unidentified
  source 1..743: mol_type = unassigned DNA; note = Human coxsackievirusA17,strain BAN01-10577, complete genome.1 sequence
ttaaaacagcctgtgggttgttcccaccccagaggcccacgtggcggctagtactctggtattacggtacctttgtacgcctgttttatactccctccccatgtaactttagaagcaattcaataagttcaatagagggggtacaaaccagtaccaccacgaacaagcacttctgtctccccggtgatcttgcatagactgttcccacggttgaaagcgagtgatccgttatccgcttgagtacttcgagaagcctagtaccaccttggaatcttcgatgcgttgcgctcagcactctgccccgagtgtagcttaggctgatgagtctgggctttccccaccggcgacggtggcccaggctgcgttggcggcctacccgtggtcaacaccacgggacgctagttgtgaacaaggtgtgaagagcctattgagctactcaagagtcctccggcccctgaatgcggctaatcctaaccatggagcaggtactctcaacccagagggcagcctgtcgtaacgcgtgagtccgtggcggaaccgactactttgggtgaccgtgtttccttttatttttgactggctgcttatggtgacaatcatagattgttatcatagagcgaattggattggccatccagtgaaatataaacacgttatctacttgtttgttggatttactccactcactcagtttacccctagcataataatagcagtactactgataaggaattattgccacc

SEQ ID NO: 1034 - DNA, 743 bp, unidentified
  source 1..743: mol_type = unassigned DNA; note = Human coxsackievirus A9 genomic RNA, complete genome,strain:1 sequence
tttaaaacagcctgtgggttgttcccacccacaggcgccaccgggcgttagcacactggtatcacggtacccttgtgcgcctgttttataaccccaccccgagtaaaccttagaagcaatgcacctctggtcaatagtaggtgtgacacaccagtcacatcgtgaccaagcacttctgtctccccggactgagtatcaataggctgctcgcgcggctgaaggagaaagcgttcgttacccggccagctacttcgagaagcctagtaacaccatgaaggttgcagagtgtttcgctcagcacttcccctgtgtagatcaggccgatgagtcaccgcgttcctcacgggcgaccgtggcggtcgctgcgctggtggcctgcctatggggcaacccataggacgctctaatgctgacatggtgcgaagagtctattgagctagctggtagtcctccggcccctgaatgcggctaatcccaactgcggagcacgcaccctcaaaccagggggcagcgtgtcgtaacgggcaactctgcagcggaaccgactactttgggtgtccgtgtttctttttattcctatattggctgcttatggtgacaattgagagattgttaccatatagctattggattggccatccggtgagcaacagagctattgtgtatctgtttactggtttcataccccttaattacaaagaagtcaaaacccttcacttgatcttgttattcaatacaacaaa

SEQ ID NO: 1035 - DNA, 743 bp, Human poliovirus 1
  misc_feature 1..743: note = complete genome.isolated from faeces of1
  source 1..743: mol_type = genomic DNA
ttaaaacagctctggggttgttcccaccccagaggcccacgtggcggccagtactctggtatcacggtacctttgtacgcctgttttatactcccttcccgcaacttagacgcataaaaaccaagttcaatagaagggggtacaagccagtaccaccacgaacaagcacttctgtttccccggtgatgttgtatagactgctcgcgtggttgaaagcgacagatccgttatccgcttgtgtacttcgagaagcccagtaccaccttggaatcttcgatgcgttgcgctcagcactcaaccccagagtgtagcttaggctgatgagtctggacatcccccaccggtgacggtggtccaggctgcgttggcggcctacccatggctaacgccatgggacgctagttgtgaacagggtgtgaagagcctattgagctacataagagtcctccggcccctgaatgcggctaatcccaacctcggagcaggtggtcacataccagtgactggcctgtcgtaacgcgcaagtccgtggcggaaccgactactttgggtgtccgtgtttccttttattttataatggctgcttatggtgacaatcacagattgtcgtcataaagcgaattggattggccatccggtgatagtgaaattcattacttaactgtttactggattcgctccaccgcaagtgtttgctctgagtacaatttcaatagttactttaagtagacaattgtattaca

SEQ ID NO: 1036 - DNA, 743 bp, Human echovirus
  misc_feature 1..743: note = 15,strain CH 96-51 complete genome.1
  source 1..743: mol_type = genomic DNA
ttaaaacagcctgtgggttgtacccacccacagggcccactgggcgctagcactctggtattacggtacccttgtgcgcctgttttatataccccgccccaagcaaacgctagatgtaacgcacttatgatcaatagcaggcgtggcactccagccacgttatgatcaagcacttctgtctccccggaccgagtatcaatagactgctcacgcggtcgaaggagaaaacgttcgttacccgaccagctacttcgagaaacctagtaactccatggaggttgcagagtgtttcgttcagcacttcccccgtgtagatcaggctgatgagtcaccgcgttcctcacgggcgaccgtggcggtggctgcgttggcggcctgcctatgggtatacccataggacgctctaatactgacatggtgcgaagagtctattgagctagttggtagtcctccggcccctgaatgcggctaatcctaactgcggagcacatacccccaacccagggggcagtgtgtcgtaacgggtaactctgcagcggaaccgactactttgggtgtccgtgtttccttttattcttacattggctgcttatggtgacaattgagagattgttaccatatagctattggattggccatccagtgactaacagagctattatttacctttttgttggcttcgtatcacttggtttaaaagaggttagtactttatattgcattatattactaaacacgagaaa

SEQ ID NO: 1037 - DNA, 743 bp, Echovirus
  misc_feature 1..743: note = E11,strain SD2003-478/SD/CHN/2003, complete genome.1
  source 1..743: mol_type = genomic DNA
ttaaaacagcctgtgggttgttcccacccacagggcccactgggcgttagcactctggtatcgcggtacccttgtgcgcctgttttatccgccctttcccaaacgtaacttagaagctcaacttgaatggtcagcaggaaacccagtacgccaactgggtcacgaccaagcacttctgtaaccccgggccgagtatcaataagctgctcacgcggttgaaggagaaaacgcccgttacccggccaattacttcgagaaacctagtaccaccatggaggttgcgtagtgtttcgctccgcacaaccccagtgtagatcaggccgatgagtcaccgcgttccccacgggcgaccgtggcggtggctgcgttggcggcctgcccatgggataacccatgggacgcttcaatactgacatggtgcgaagagtctattgagctaattggtagtcctccggcccctgaatgcggctaatcccaactgcggagcagatacccacatgccagtgggcagtctgtcgtaacgggcaactctgcagcggaaccgactactttgggtgtccgtgtttccttttattcatacattggctgcttatggtgacaattgaaagattgttaccatatagctattggattggccatccggtgtctaatagagcgattgtctacttgttcattgggtttgtacctttaaaccttaaagttcttaacactctcaaccttgtgctacaactcaacacggcaaa

SEQ ID NO: 1038 - DNA, 743 bp, Human enterovirus sp.
  misc_feature 1..743: note = 80,strain USA/CA67-10387, complete genome.1
  source 1..743: mol_type = genomic DNA
ttaaaacagcctgtgggttgatcccacccacagggcccactgggcgtcagcactctggtatcacggtacctttgtgcgcctgttttatactccctccccccaaccgtaacttagaagcagcactaactgatcaatagccagcgcggcatgccagccacgcttcgatcaagcacttctgttaccccggactgagtatcaatagactgctcacgcggttgaaggagaaaacgttcgtcatccggccaactacttcgagaaacctagtaacaccatggaagttgcggagtgtttcgctcagcactaccccagtgtagatcaggtcgatgagtcaccgcattccccacaggcgactgtggcggtggctgcgttggcggcctgcccatggggaaacccatgggacgctcttatatagacatggtgcgaagagtctattgagctagttggtagtcctccggcccctgaatgcggctaatcctaactgcggagcatacaccctcaaaccagagggcagtgtgtcgtaatgggcaactctgcagcggaaccgactactttgggtgtccgtgtttcactttatttctaaattggctgcttatggtgacaattgagagattgttaccatatagctattggattggccatccggtgaccaatagagctattatatatctctttgttgggttcataccacttagcttgaaagaggttaaaactctgcattacattatactattgaattccgcaaa

SEQ ID NO: 1039 - DNA, 743 bp, unidentified
  source 1..743: mol_type = unassigned DNA; note = Human coxsackievirus B5, strain ChZJ-1, complete genome.1 sequence
ttaaaacagcctgtgggttgttcccacccacagggcccattgggcgtcagcactctggtatcacggtacccttgtgcgcctgttttataatccctttccccacaagtaacttagacacagcacaaaccgatcaacagtaggcgtgacactccagtcatgtcgtgatcaagcacttctgttaccccggaccgagtatcaatagactgcttacgcggttgaaggagaaaacgcccgttacccggccaactacttcgagaaacccagtaacaccatggaaattgcggagtgtttcgctcagcacaaccccagtgtagatcaggtcgatgagccaccacattccccacgggtgaccgtggtggtggctgcgttggcggcctgcctatgggggaacccataggacgcttcaatacggacatggtgcgaagagtctattgagctagttggtaatcctccggcccctgaatgcggctaatcctaactgcggagcgcgtgcccccaaaccaggaggtggcgcgtcgtaatgggcaactccgcagcggaaccgactactttgggtgtccgtgtttccttttatatttttattggctgcttatggtgacaattgagaaattgttaccatatagctattggattggccatccggtgtctaacagagcgattatttatctttttgttggatttgtaccactcaacataacaaactatcagactttgtgttgcattattggattgaacacagcaaa

SEQ ID NO: 1040 - DNA, 743 bp, Enterovirus sp.
  misc_feature 1..743: note = B88, strain 11-4644-1, complete genome.1
  source 1..743: mol_type = genomic DNA
tgtgctcttccgatctggttgttcccacccacagggcccactgggcgccagcacactggtattacggtacccttgtgcgcctgttttatccacccccccccactgtaacttagaagataaccacacgcggtcaataggtgactcagtacgccaactgggtcgcgaccaagcacttctgttaccccggaccgagtatcaataagctgctcgcgcggctgaaggagaaaacgttcgttacccggccaattacttcgagaaacctagtaccaccatggaggttgcgcagcgtttcgctccgcacaaccccagtgtagatcaggtcgatgagtcaccgcaatccccacaggcgactgtggcggtggctgcgttggcggcctgcccatggggaaacccatgggacgcttcaatatcgacatggtgcgaagagtctattgagctaattggtagtcctccggcccctgaatgcggctaatcctaactgtggagcagatacccacactccagtgggcagtctgtcgtaatgggcaactctgcagcggaaccgactactttgggtgtccgtgtttccttttattcctatgctggctgcttatggtgacaattgacagattgttaccatatagctactggattggccatccggtgacaagcagagcgattgtttacttatttgttggtttcattccactcaattataaagtactaaacacccttaatttcattataactcttaacacgttaaa

SEQ ID NO: 1041 - DNA, 743 bp, Echovirus
  misc_feature 1..743: note = E30, strain KM/A363/09 polyprotein gene, complete cds.1
  source 1..743: mol_type = genomic DNA
ttaaaacagcctgtgggttgaacccatccacagggcccactgggcgcaagcacactggtatcacggtacctttgtgcgcctgttttatccacccttccccgaacgaaacttagaagtttgacttaaacggtcaatagaaagcccagtacaccaactgggtcgtgaccaagcacttctgtgaccccggactgagtatcaataagctactcacgtggctgaaggagaaaacgttcgttatccggccaattacttcgagaaacttagtaccaccatgaaggttgcgtagcgtttcgctccgcacaaccccagtgtagatcaggtcgatgagtcaccgcgttcctcacgggcgaccgtggcggtggctgcgttggcggcctgcccttggggcaacccaagggacgcttcaatactgacatggtgcgaagagtctattgagctaattggtagtcctccggcccctgaatgcggctaatcctaactgcggagcagatacccacatgccagtgggcagtctgtcgtaatgggcaactctgcagcggaaccgactactttgggtgtccgtgtttccttttattcttatactggctgcttatggtgacaattgagaaattgttaccatatagctattggattggccatccagtgtccaatagagcaatcatttaccttttcgttggatttattccacttgactacaaagcactcaaaacactcgaatacattgtagacctcaatacaacaaa

SEQ ID NO: 1042 - DNA, 743 bp, Echovirus
  misc_feature 1..743: note = E12, strain K624/YN/CHN/2013, complete genome.1
  source 1..743: mol_type = genomic DNA
ttaaaacaaggctgtgggttgtacccacccacagggcccaccgggcgctagcacactggtatctaggtacccttgtgcgcctgttttattcgccccaccccatcgtaacttagaagttgatcaataatggtcgttaggtagcccagcacgccagctgggtcttgaccaagcacttctgttaccccggaccgagtatcaatacgctgctcacgcggctgaaggagaaaacgttcgttacccggccaattacttcgagaagcctagtaccaccatgaaggttgcgcagcgtttcgctccgcacaaccccagtgtagatcaggccgatgagtcaccgcactcctcacgggcgaccgtggcggtgactgcgttggcggcctgcccatggggtgacccatgggacgcttcaatactgacatggtgcgaagagcctattgagctaattggtagtcctccggcccctgaatgcggctaatcctaactgcggagcagatacccacacaccagtgggcagtctgtcgtaacgggcaactctgcagcggaaccgactactttgggtgtccgtgtttccttttattctaatattggctgcttatggtgacaattgaaaaattgttaccatatagctattggattggccatccggtgacaaatagagcgattgtttacctgtttgttggtttcataccattaaatcttaaagtcttaaaaacccttgattttatactagcactcaattcagcaaa

SEQ ID NO: 1043 - DNA, 743 bp, Human enterovirus sp.
  misc_feature 1..743: note = 87, strain BAN01-10396, complete genome.1
  source 1..743: mol_type = genomic DNA
ttaaaacagcctgtgggttgttcccacccacagggcccactgggcgctagcacactggtatcacggtacccttgtgcgcctgttttatacacccttcccctactgtgacttagaagcaaaacaatgatgaccaatagcaagcgcagcactccagctgtgtttcggtcaagcacttctgtttccccggactgagtatcaataggccactcacgtggccgaaggagaaaacgtccgttacccggccaattacttcgagaaacccagtaacaccatagaggttgcgcagcgtttcgctccgcactcccccagtgtagatcaggtcgatgagtcaccgcgttccccacgggcgaccgtggcggtggctgcgttggcggcctgcccatggggtaacccatgggacgcttcaatactgacatggtgcgaagagtctattgagctaattggtagtcctccggcccctgaatgcggctaatcctaactgcggagcagatacccacgctccagtgggcagtctgtcgtaacgggtaactctgcagcggaaccgactactttgggtgtccgtgtttccttttattcttatattggctgcttatggtgacaattgaaagattgttaccatatagctattggattggccatccggtgtctaatagagcaattatattcctgtttgttggttttataccactgaatatcacagtttacaagaccctcaattacatcctacgtttaaacaagacaaa

SEQ ID NO: 1044 - DNA, 743 bp, Echovirus
  misc_feature 1..743: note = E6, strain FIN09-NPA, complete genome.1
  source 1..743: mol_type = genomic DNA
ttaaaacaggcctgtgggttggttccacccacagggcccactgggcgccagcacactggtattacggtacctttgtgcgcctgttttatccacccttccctgatgtaacttagaagtaaaacataggcggtcaataggtagcccaacacaccagttgggtttcgaccaaacacttctgttaccccggaccgagtatcaataggctgctcacgcggctgaaggagaaaacgttcgttacccgaccaattacttcgagaaacccagtaacaccatgaaagttgcgcagtgtttcgctccgcacaaccccagtgtagatcaggtcgatgagtcaccgcattccccacgggcgaccgtggcggtggctgcgttggcggcctgcccatgggctaacccatgggacgctacaataccgacatggtgcgaagagtctattgagctaattggtagtcctccggcccctgaatgcggctaatcctaactgcggagcagatacccacacaccagtgggcggtctgtcgtaacgggcaactctgcagcggaaccgactactttgggtgtccgtgtttccttttattcctatattggctgcttatggtgacaattgagagattgttaccatatagctattggattggccatccggtgacaaacagggcggtcatttacctatttgttggttttgtaccattgaattttaaggtattgaaaaccctcaaccttgttttagcactcaatacagcaaa

SEQ ID NO: 1045 - DNA, 743 bp, Human echovirus
  misc_feature 1..743: note = 17, strain CHHE-29 complete genome.1
  source 1..743: mol_type = genomic DNA
ttaaaacagcctgtgggttgttcccacccacagggcccattgggcgctagcactctggtattgcggtacctttgtgcgcctgttttatattccctccccctgaccgtaacttagaagtaacacacaccgatcaacagtaagcatggcacaccagccatgttttgatcaagcacttctgttatcccggactgagtatcaatagactgctcacgcggttgaaggagaaaacgttcgttacccggccaactacttcgaaaaacctagtaacaccatggaagttgcagagtgtttcgctcagcactaccccagtgtagatcaggtcgatgagtcaccgcattccccacgggcgaccgtggcggtggctgcgttggcggcctgcctatggggaaacccataggacgctctaatacagacatggtgcgaagagtctattgagctagttggtagtcctccggcccctgaatgcggctaatcctaactgcggagcacacaccctcaagccagggggcagtgtgtcgtaacgggcaactctgcagcggaaccgactactttgggtgtccgtgtttccccttactcttgtattggctgcttatggtgacaattttggaattgttgccatatagctattggattggccatccggtgacaaacagagcgattgtatacctattcgttggacttgtaccgctcaacgttacgagtctaacgactttatactacatcatctggttgaacacagcaaa

SEQ ID NO: 1046 - DNA, 743 bp, Echovirus
  misc_feature 1..743: note = E18, isolate E18-HeB15-54462/HeB/CHN/2015, complete1
  source 1..743: mol_type = genomic DNA
ttataacagcctgtgggttgtacccacccacagggcccacagggggccagcacactggtatctcggtacctttgtgggcctgttttatccacccttcccccattttatttagaagcatgcaccaaaacggtcaacagggagcccagtaagccacttgttcattgaccaagtacttctgttaccccggaccgagtatcaataggctgctcgcgcggctgaaggagaaaacgttcgttacccggccaattacttcgagaaacccagtagcgccatggaggttgcgcagcgtttcgctccgcacaaccccagtgtagatcaggtcgatgagccaccgcgttccccacgggcgaccgtggcggtggctgcgttggcggcctgcccatgggactacccatgggacgcttcaatactgacatggtgtgaaaagtctattgagctaattggtagtcctccggcccctgaatgcggctaatcctaactgcggagcagacgcccacacaccagtgggcgatctgtcgtaatgggcaactctgcagcggaaccgactactttgggtgtccgtgtttccttttattcttaccctggctgcttatggtgacaattgagaagttgttgccatatagctattggattggccatccggtgacgagcagggcgataatttatttgtttatcgggtttgtaccactgaactacaaggttttaaacactttggattttattctgatcctcaactcactaaa

SEQ ID NO: 1047 - DNA, 743 bp, Echovirus
  misc_feature 1..743: note = E7, strain Ibadan_NGR_2010, complete genome.1
  source 1..743: mol_type = genomic DNA
ccagtgggccctgtgggttgtacccacccacagggcccactgggcgctagcactctggtatcacggtaccttagtgcgcctgttttatatcccccacccccacttgaaacttagaagcaaaacatactgaccaatagttgacatggcaagccagccgtgccttggtcaagcacctctgtttccccggaccgagtatcaatagactgctagcgcggttgaaggagaaagcgttcgttacccgactaactacttcgaaaaacctagtagcatcatgaaagttgcagagtgtttcgctcagcacaaccccagtgtagatcaggccgatgagtcaccgcattcctcacgggtgaccgtggcggtggctgcgctggcggcctgcctgtggggcaacccacaggacgctctaatacagacatggtgcgaagagtctattgagctagttagtagtcctccggcccctgaatgcggctaatcctaactgcggagcacgtgcctctaatccaagaggtagcgtgtcgtaacgggcaactctgcagcggaaccgactactttgggtgtccgtgtttccttttatttttatactggctgcttatggtgacaattgagagattgttaccatatagctattggattggccatccggtgactaatagagctattgtatacctctttattggttacgttccattaaaccgcaaggaattaaggaccctcaattacatcttgcttttgaattcagcaaa

SEQ ID NO: 1048 - DNA, 743 bp, Swine vesicular disease virus
  misc_feature 1..743: note = strain SVDV Itl. 5-99 polyprotein1
  source 1..743: mol_type = genomic DNA
ttaaaacagcttgtgggttgttcccacccacagggcccactgggcgccagtacactggtatcacggtacctttgtgcgcctgtttgactcaccttccccaaacgcaacttagaagcataacttaaatggtcattaggcggctcagtatgccaactgagtctcgatcaagcacttctgttaccccggactgagtaccaataggctgctcacgcggctgaaagggaaaccgttcgttacccgaccaactacttcgagaaacctagtaccaccatgaaagttgcgcggcgtttcgctccgcacaaccccagtgtagatcaggccgatgagtcaccgcaaaccccacgggcgaccgtggcggtggctgcgctggcggcctgcccatgggacaacccatgggacgccacaatactgacatgatgcgaagagtctattgagctagttggtagtcctccggcccctgaatgcggctaatcccaactgtggagcagatacccacgcaccagtgggcagtctgtcgtaatgggcaactctacagcggaaccgactactttgggtgtccgtgtttctttttattcctacgctggctacttatggtgacaattgagagactgtaaccatattgctatcgggttggccacctggtgaagaataaaacagttgctcactcgtttgtcagtcttgcaccgtcgtgccacaaagtcttaactgcccctcaacatcgtcataatactaaatacgctgaa

SEQ ID NO: 1049 - DNA, 743 bp, Coxsackievirus
  misc_feature 1..743: note = B5 complete genome.1
  source 1..743: mol_type = genomic DNA
ttaaaacagcctgtgggttgtacccacccacagggcccactgggcgctagcactctggtaccgcggtacctttgtgcgcctgttttatatcccccctccccttaaccggaacttagaagttacacacactgatcaacagtgggcatagcatgccagctatgtcttgatcaagcacttctgtctccccggaccaagtatcaatagactgctcacgcggttgaaggagaaagcgttcgttacccgactaactacttcgagaaacccagtagcactatgaaagttgcgaggcgtttcgctcaacacttccccagtgtagatcaggtcgatgagtcaccgcattccccacggcgaccgtggcggtggctgcgttggcggcctgctacggggcaactcgtaggacgcttcaatacagacatggtgcgaagagtctattgagctagttagtagtcctccggcccctgaatgcggctaatcctaactgcggagcacataccctcaacccagggggcagtgtgtcgtaacgggtaactctgcagcggaaccgactactttgggtgtccgtgtttccttttatccttacattggctgcttatggtgacaattgaaagattgttaccatatagctattggattggccatccagtgtctaatagagctattatatacctctttgttggatttataccacttagcctaaaagaagttaagacactacagcttattgtacaattaaacacagcaaa

SEQ ID NO: 1050 - DNA, 743 bp, Coxsackievirus
  misc_feature 1..743: note = B5, isolate 3936/09, complete genome.1
  source 1..743: mol_type = genomic DNA
ttaaaacagcctgtgggttgtacccacccacagggcccactgggcgctagcactctggtatcacggtacctttgtgcgcctgttttatgcccccttcccccaattgaaacttagaagttacacacaccgatcaacagcgggcgtggcataccagccgcgtcttgatcaagcactcctgtttccccggaccgagtatcaatagactgctcacgcggttgaaggagaaaacgttcgttacccggctaactacttcgagaaacctagtagcatcatgaaagttgcgaagcgtttcgctcagcacatccccagtgtagatcaggtcgatgagtcaccgcattccccacgggcgaccgtggcggtggctgcgttggcggcctgcctacggggcaacccgtaggacgcttcaatacagacatggtgcgaagagtcgattgagctagttagtagtcctccggcccctgaatccggctaatcctaactgcggagcacataccctcaacccagggggcattgtgtcgtaacgggtaactctgcagcggaaccgactactttgggtgtccgtgtttccttttattcttataatggctgcttatggtgacaattgaaagattgttaccatatagctattggattggccatccggtgtctaacagagctattatatacctctttgttggatttgtaccacttgatctaaaggaagtcaagacactacaattcatcatacaattgaacacagcaaa

SEQ ID NO: 1051 - DNA, 743 bp, Swine vesicular disease virus
  misc_feature 1..743: note = gene for polyprotein, complete cds.1
  source 1..743: mol_type = genomic DNA
ttaaaacagcctgtgggttgttcccacccacagggcccactgggcgctagcacactggtatcacggtacctttgtgcgcctgtttgacttaccctccccaaacgcaacttagaagcacaacttaaatggtcaatagacggctcagtatgccaactgagtctcgatcaagcacttctgttaccccggactgagtaccaataggctgctcacgcggctgaaggggaaaccgttcgttacccgactaactacttcgagaaacctagtaccaccatgaaagttgcgcagcgtttcgctccgcacaaccccagtgtagatcaggccgatgagtcaccgcaaaccccacgggcgaccgtggcggtggctgcgctggcggcctgcccatggggcaactcatgggatgcttcaatactgacatggtgcgaagagtctattgagctagttggtagtcctccggcccctgaatgcggctaatcctaactgcggagcagatacccacgcaccagtgggcagtctgtcgtaatgggcaactctgcagcggaaccgactactttgggtgtccgtgtttccttttatccttatactggctacttatggtgacaattgagagattgtaaccatattgctattggattggccacccggcgacgaatagaacagttgcttacctgtttgttagtctcgtgtcactgaactgcaaggccttaaacaccctttaatttcatcataacgctcaatacgttaaa

SEQ ID NO: 1052 - DNA, 743 bp, unidentified
  source 1..743: mol_type = unassigned DNA; note = Human coxsackievirus B3, strain GA, complete genome.1 sequence
ttaaaacagcctgtgggttgatcccacccgcagggcccactgggcgtaagcacactggtattacggtacctttgtgcgcctgttttatacacccctcccccgatgtaacttagaagttcaatgcaagcggtcgatagccagcccaacacaccagttgggttcagatcaagcacttctgttaccccggactgagtatcaataagctgctcacgtggctgaaagagaaaacgttcgttacccggccagttacttcgggaagcctagtaccaccatgaaagttgcgcagtgtttcgttccgcacaaccccagtgtagatcaggtcgatgagtcaccgcattccccacaggcgactgtggcggtggctgcgttggcggcctgcccatggggttacccatgggacgctacaatactgacatggtgcgaagagcctactgagctaactggtattcctccggcccctgaatgcggctaatcctaactgcggagcaagtacctgcagaccagcaggcagcttgtcgtaacgggcaactctgcagcggaaccgactactttgggtgtccgtgtttccttttattcttgttatggctgcttatggtgacaatcacagaattgttaccatatagctattggattggccatccagtgactaacagagcaattatatacttgtttgtcggatttgtcaaattagattttaacaacctacgcacgctttgttatattattgaattaaatacagcaag

SEQ ID NO: 1053 - DNA, 743 bp, Coxsackievirus
  misc_feature 1..743: note = B5, isolate CV-B5/P727/2013/China, complete genome.1
  source 1..743: mol_type = genomic DNA
tttaaaacagcctgtgggttgttcccacccacagggcccaatgggcgctagcacactggtatcatggtacctttgtgcgcctgttttattcaccccatcacaataaaatggagaagcataacgtaataggtcaataggtggctcagtgcgccacttgggtttagaacaaacaattctgttttcccgcaccgagtatcaataaggtgctagcgtggatgaaggagaaaacgttagttacccgagtaattagttcgagaaagacagtaccaccatgaaggatgcgcagtgtttcgttcagcactaccccagtgtagatcaggtcgatgagtcaccgcgatccccacgggtgtccgtggcggtcctgtgttggcggcaaaaccatggggtaacccatagaacgataaaattaagacatggtgagaagagtttattgagctagttggtaatcatccggcccgggaatgcggctaatcttacatgcgcagcgggcacccacaaaccagtggaaacgtttgtcgtaacgggcaactctgcagcggaaccgactactgtggggggccgggttgccttgtattcatatattggctgcttatggggacgattgaaagattgttgccatatagctattggattggccatccggaaacaaacagagctattatttacctttttgttggctttgtgccgttgaatttcaaagttgtaaaaactataaacttcattttgacactcaatacagcaaa

SEQ ID NO: 1054 - DNA, 743 bp, Coxsackievirus
  misc_feature 1..743: note = B6, strain Schmitt, complete genome.1
  source 1..743: mol_type = genomic DNA
ttaaaacagcctgtgggttgtacccacccacagggcccactgggcgctagcactctggtattgcggtacctttgtgcgcctgttttacccaccctcccccaacgtaacttagaagcctgacatatacggtcacaagccagcccagtacgccaactgggtaccgaccaagcacttctgttaccccggactgagtatcaataagctgccaaagcggctgaaggagaaaacgttcgttacccggccaattacttcgagaaacccagtaacaccatgaaagttgcgtagcgtttcattcagcacaatcccagtgtagatcaggtcgatgagtcaccgcattccccacaggcgactgtggcggtggctgcgttggcggcctgcccatggggcaaacccatgggacgcttcaatactgacatggtgcgaagagtctattgagctaattggtagtcctccggcccctgaatgcggctaatcctaactgcggagcaggcactcgcagaccagcgagcagcttgtcgtaatgggcaactccgcagcggaaccgactactttgggtgtccgtgtttcctatttcctttacactggctgcttatggtgacaattgagaaattgttaccatatagctattggagtggccatccggtgactaacagagcaataatatatttgtttgttggctttgtgccacttaatttgaaggttgttaagacgctcaatctgatactacttctaaataaagcaaa

SEQ ID NO: 1055 - DNA, 743 bp, Echovirus
  misc_feature 1..743: note = 1 (strain Farouk / ATCC VR-1038) polyprotein precursor,1
  source 1..743: mol_type = genomic DNA
ttaaaacagcctgtgggttgttcccacccacagggcccactgggcgttagcacactggtatcacggtacctttgtgcgcctgttttatactcccccccctaaggaaactttagaagcaaagcaattgtgatcaatagtgggtatggcacaccagtcatatcttgatcaagcacttctgttcccccggacttagtaccaatagactgctcaagcggttgaaggggaaaacgttcgttatccggccaactacttcgagaaacctagtagcaccatgaaagttgcggagtgtttcgctcagcacttcccccgtgtagatcaggctgatgagtcaccgtattccccacgggcgaccgtgacggtggctgcgttggcggcctgcccatggggtaacccatgggacgctctaaaacagacacggtgcgaagagtctattgagctagttggtagtcctccggcccctgaatgcggccaatcctaactgcggagcacatactcccaatccagggagcagtgtgtcgtaatgggtaactctgcagcggaaccgactactttgggtgtccgtgtttccttttattctcacattgactgcttatggtgacaattgaaagattgttaccatatagctattggattggtcatccggtgagcaatagagctattgtttatcaatttgttggatttgtaccactcaacttttctgttttgagaacactcaactacatcttactgctaaacacatcaaa

SEQ ID NO: 1056 - DNA, 743 bp, Echovirus
  misc_feature 1..743: note = E33, strain YNK35/CHN/2013, complete genome.1
  source 1..743: mol_type = genomic DNA
ttaaaacagcctgtgggttgttcccacccacagggcccacgtggcgttagcacactggtatcccggtacctttgtgcgcctgttttatacaccccaaaccccaatgtaaattagaagaaaataacaccgatcaatagtgggtgtggcacaacagccacatcatgatcaagcactactgttcccccggactgagtatcaataagctgctcgcgcggctgaaggagaaaacgttcgttatccggccaattacttcgagaaacctagtaccaccatgaaggttgcgcagtgtttcgctccacacaaccccagtgtagatcaggtcgatgagtcaccgcattccccacaggcgactgtggcggtggctgcgctggcggcctgcccatggggtgacccatgggacgcttcaatactgacatggtgtgaagagtctattgagctaattggtagtcctccggcccctgaatgcggctaatcctaactgcggagcagatacccacgcaccagtgggtagtctgtcgtaacgggtaactctgcagtggaaccgactactttgggtgtccgtgtttccttttattctcacattggctgcttatggtgacaattgaaagattgttaccatatagctactggattggccatccggtgacaaacagagcaattgtgttcctcttcgatgggttcatacctctcaacaagatcagctttcgaactttgtgctacatcatcaagctaaacacaacaaa

SEQ ID NO: 1057 - DNA, 743 bp, Human echovirus
  misc_feature 1..743: note = 25 mRNA for partial polyprotein (isolate TH222).1
  source 1..743: mol_type = genomic DNA
ttaaaacagcctgtgggttgttcccacccacagggcccattgggcgctagcacactggtatcacggtacccttgtgcgcctgttttatccaccccccccttaacgtaacttagaagcataaatcaaatggtcaatagataacccagtatgccaactgggtcccgaccaagtacttctgttaccccggactgagtatcaataagctgcttacgtggctgaaggagaaaacgttcgttacccgaccaattacttcgagaaacctagtaacaccatgaaggttgcgcagtgtttcgctcaacacaaccccagtgtagatcaggtcgatgagtcaccgcgttccccacaggcgaccgtggcggtggctgcgttggcggcctgctcatggggcaacccatgagacgcttcaatactgacatggtgcgaagagtctattgagctaactggtagtcctccggcccctgaatgcggctaatcctaactgcggagcaggcgctcgcaaaccagtgagtagcctgtcgtaacgggtaactctgcagcggaaccgactactttgggtgtccgtgtttccttttattcttatattggctgcttatggtgacaattgagagattgttaccatatagctattggattggccatccggtgtctaacagagcaatcatttacctctttgttggttacgtaccattaaatcttaaggtcgtagcaacgcttaagtttatcctacttctcaacaaagcaaa

SEQ ID NO: 1058 - DNA, 743 bp, unidentified
  source 1..743: mol_type = unassigned DNA; note = Human coxsackievirus B5 polyprotein gene, partial cds.1 sequence
ttaaaacagcctgtgggttgatcccacccacagggcccattgggcgctagcactctggtatcacggtacctttgtgcgcctgttttatatccctttcccttaattggaacttagaagttacacacaccgatcaacagcaggcgtggcatgccagctacgtcttgatcaagcacttctgtttccccggaccgagtatcaatagactgctcacgcggttgaaggagaaagtgttcgttacccggctaactacttcgagaaacccagtagcatcatgaaagttgcgaggtgtttcgctcagcacttccccagtgtagatcaggtcgatgagtcaccgcattccccacgggcgaccgtggcggtggctgcgttggcggcctgcctacggggcaacccgtaggacgcttcaatacagacatggtgcgaagagtcaattgagctagttagtattcctccggcccctgaatgcggctaatcctaactgcggagcacataccctcaatccagggggcattgtgtcgtaacgggtaactctgcagcggaaccgactactttgggtgtccgtgtttccttttgttcttatactggctgcttatggtgacaattgaaagattgttgccatatagctattggattggccatccattgtctaatagagctgttatatacctctttgttggttttgtaccgctcaatctaaaagaagttaagacactacaacttattatacagctgaacacagcaaa

SEQ ID NO: 1059 - DNA, 744 bp, Aichi virus
  misc_feature 1..744: note = genomic RNA, complete genome.1
  source 1..744: mol_type = genomic DNA
tttgaaaagggggtgggggggcctcggccccctcaccctcttttccggtggtctggtcccggaccaccgttactccattcagcttcttcggaacctgttcggaggaattaaacgggcacccatactccccccaccccccttttgtaactaagtatgtgtgctcgtgatcttgactcccacggaacggaccgatccgttggtgaacaaacagctaggtccacatcctcccttcccctgggagggcccccgccctcccacatcctccccccagcctgacgtatcacaggctgtgtgaagcccccgcgaaagctgctcacgtggcaattgtgggtccccccttcatcaagacaccaggtctttcctccttaaggctagccccggcgtgtgaattcacgttgggcaactagtggtgtcactgtgcgctcccaatctcggccgcggagtgctgttccccaagccaaacccctggcccttcactatgtgcctggcaagcatatctgagaaggtgttccgctgtggctgccaacctggtgacaggtgccccagtgtgcgtaaccttcttccgtctccggacggtagtgattggttaagatttggtgtaaggttcatgtgccaacgccctgtgcgggatgaaacctctactgccctaggaatgccaggcaggtaccccacctccgggtgggatctgagcctgggctaattgtctacgggtagtttcatttccaatccttttatgtcggagtc

SEQ ID NO: 1060 - DNA, 744 bp, Human enterovirus sp.
  misc_feature 1..744: note = 71, strain E2005125-TW polyprotein gene, complete1
  source 1..744: mol_type = genomic DNA
ttaaaacagcctgtgggttgtacccactcacagggcccactgggcgtcagcactctggtactgaggtacctttgtgcgcctgttttaactcccttcccctgaagtaacttagaagcaataaactaacgatcaacagtgggcatgacataccagtcatgtctcgatcaagcacttctgtttccccggactgagtatcaataggctgctcgcgcggctgaaagagaaaacgttcgttacccggccagctacttcgagaagcttagtaccatcatgaacgaagcagagcgtttcgctcagcacaatcccagtgtagatcaggctgatgagtcactgcgacccccatgggcgaccatggcagtggctgcgttggcggcctgcccatggagaaatccatgggacgctctaattctgacatggtgcgaagagcctattgagctagctggtagtcctccggcccctgaatgcggctaatcctaactgcggagcacgcacccacaaaccagtgggcagtgtgtcgtaacgggtaactctgcagcggaaccgactactttgggtgtccgtgtttccttttattcttatattggctgcttatggtgacaatcaaagagttgttaccatatagctattggattggccatccggtgtgcaacagagcaattgtttacctatttattgggtttgtaccactaacgttgaagtctgtgaccacactcaactttatcctgaacctcaatacagtaaaac

SEQ ID NO: 1061 - DNA, 744 bp, Enterovirus sp.
  misc_feature 1..744: note = A71 Y90-3896 RNA, complete genome.1
  source 1..744: mol_type = genomic DNA
ttaaaacagcctgtgggttgcacccacccacagggcccactgggcgccagcactctggtacttaggtacctttgtgcgcctgttttatctcccttcccccgaagtaacttagaagctgtgagctaacgatcaacagtaggtgtgacataccagtcatatcttgatcaagcacttctgtttccccggactgagtatcaataggctgctcgcgcggctgaaagagaaaacgttcgtcacccggccaactacttcgagaagcttagtaccaccatgaacgaggcagagtgtttcgctcggcacaaccccagtgtagatcaggctgatgagtcactgcaatccccatgggcgaccatggcagtggctgcgttggcggcctgcccatggagaaatccatgggacgctctaattctgacatggtgcgaagagcctattgagctagctggtagtcctccggcccctgaatgcggctaatcctaactgcggagcacacacccacaagccagtgggcagtgtgtcgtaacgggcaactctgcagcggaaccgactactttgggtgtccgtgtttccttttattcttgtattggctgcttatggtgacaatcaaagagttgttaccatatagctattggattggccatccggtgtgcaacagagcaattatttacctatttattggttttgtaccattgacactgaagtctgtgattacccttaattttattttgaccctcaacacagtcaaac

SEQ ID NO: 1062 - DNA, 744 bp, unidentified
  source 1..744: mol_type = unassigned DNA; note = Human coxsackievirus A10, strain Kowalik, complete genome.1 sequence
ttaaaacagcctgtgggttgcacccactcacagggcccactgggcgctagcactctggtaccgtggtacctttgtgcgcctgttttatacccccttccccgtttgaacattagaagtaacgcacctcgatcagtagcaggcgcggcgcaccagccgtgtcttgatcaagcacttctgtttccccggaccgagtatcaatagactgctcacgcggttgaaggagaaaacgttcgttatccggctaactacttcgagaaacttagtagcaccatggaagttgcagagtgtttcgctcagcactccccccccagtgtagatcaggctgatggatcaccgcgttcctcacgggtgaccgtggcggtggtcgcgttggcggcctgcccatggggcaacccatgggacgctctaatatggacatggtgtgaagagtctattgagctagttagtagtcctccggcccctgaatgcggctaatcctaactgcggagcacgtgtccccaacccaggggatagcgtgtcgtaacgggtaactctgcagcggaaccgactactttgggtgtccgtgtttcctttattcttatcctggctgcttatggtgacaattgagagattgttaccatatagctattggattggccatccggtgtctaacagagctataatatatctttttgttgggttcgtacccctcaattttgaggttgttctcacattaaagtacatcttggtgttaaatatcagaag

SEQ ID NO: 1063 - DNA, 744 bp, Coxsackievirus
  misc_feature 1..744: note = A16, strain 12C10, complete genome.1
  source 1..744: mol_type = genomic DNA
ttaaaacagcctgtgggttgtccccacccacagggcccactgggcgctagcacactgattttgcgggatctttgtgcgcctgttttataacccctccctaaacggcaatttagaagttctgcacatccacgaccagtagtaagcgtgacgcgccagtcacgtcttggtcaagtacttctgtatccccggactgagtatcaatagactgctcacgcggttgaaggagaaaacgttcgttatccggctaactacttcgagaaacctagtaacaccgtgaaagttgcggagtgtttcgctcagcacttcccccgtgtagatcaggccgatgagtcactgtaaaccccacgggcgaccgtgacagtggctgcgttggcggcctgcccatgaggcaactcatgggacgctctaatacagacatggtgtgaagagtctattgagctagttagtagtcctccggcccctgaatgcggctaatcctaactgcggagcacgcaccctcaacccagggggcggcgtgtcgtaatgggtaactctgcagcggaaccgactactttgggtgtccgtgtttccttttattccttattggctgcttatggtgacaattgaaaagttgttaccatatagctattggattggccatccggtatctaatagagctattgtttacctgttcattggatacgtccctcttagtcttaaggtcattcaaactcttgattacatattactccttaaccacaagaa

SEQ ID NO: 1064 - DNA, 744 bp, Enterovirus A71
  misc_feature 1..744: note = strain 119798, complete genome.1
  source 1..744: mol_type = genomic DNA
ttaaaacaggctgtgggttgtacccactcacagggcctactgggcgctagcactctggcactaaggtacctttgtgcgcctgtttttacttccctttcccaaagaaacttagaagttgtgtaccaatgatcaatagcaggtgtgacgtacaaataacatcttgatcaatcacttctgtttccccggaccgagtatcaataggctgctcgcgcggctgaaggagaaaacgttcgttacccgaccagctatttcgagaagcttagtaccaccatgaacgaggcagagtgtttcgttcagcacaaccccagtgtagatcaggctgatgagtcactgcaacccccatgggcgaccatggcagtggctgcgttggcggcctgcccatggagaaatccatgggacgctctaattctgacatggtgtgaagagcctattgagctagctggtagtcctccggcccctgaatgcggctaatcctaactgcggagcacatgctcacgagccagtgggtggtgtgtcgtaatgggcaactctgcagcggaaccgactactttgggtgtccgtgtttccttttattcttatgttggctgcttatggtgacaatcaaagaattgttaccatatagctattggattggccatccggtgtgcaacagagcaattgtttatctatttattggtttcgtaccactatcactgaagtctgtgaccactctcgaattcattttgaccctcaactcaatcaaac

SEQ ID NO: 1065 - DNA, 744 bp, Enterovirus C96
  misc_feature 1..744: note = strain T49-XZ-CHN-2005, complete genome.1
  source 1..744: mol_type = genomic DNA
ttaaaacagctctggggttgttcccaccccagaggcccacgtggcggccagtacaccggtatcacggtacccttgtacgcctgttttatactccctaccccgtaacttagaagcatcaactcaagttcaatagtaggggtacaatccagtaccaccacgaacaagcacttctgtttccccggtgatattgtatagactgtgcccacggttgaagacaatagatccgttatccgcttttatacttcgagaagcccagtaccaccttggaatcttcgatgcgttgcgatcagcactcgaacccggagtgtagcttaggtcgatgagtctggacgctcctcaccggcgacggtggtccagactgcgttggcggcctacctgtggcccaaagtcacaggacgctagttgtgaacaaggtgtgaagagcctattgagctataaaagagtcctccggcccctgaatgcggctaatcccaaccacggagcaggtgatcacaaaccagtgactagcctgtcgtaacgcgcaagtctgtggcggaaccgactactttgggtgtccgtgtttccttttatttcatttatggctgcttatggtgacaatcatagattgttatcataaagcgaattggattggccatccggtgaaaatcaagcacatcatttatctgtttgttggatttacacctttagtttcttactccccgcgccttattcatattgtgttgttgattagacagtggtattacc

SEQ ID NO: 1066 - DNA, 744 bp, Human enterovirus 96
  misc_feature 1..744: note = strain 05517, complete genome.1
  source 1..744: mol_type = genomic DNA
ttaaaacagctctggggttgttcccaccccagaggcccacgtggcggccagtacaccggtatcacggtacccttgtacgcctgttttatactccccgcccgtaacttagaagcaataactcaagttcaacagcagggggtacaaaccagtacctccacgaacaagcacttctgtttccccggtgacattgtatagactgtacccacggttgaaaacaatagatccgttatccgcttttgtacttcgagaagcccagtaccgtcttggaatcttcgatgcgttgcgctcagcactcgaacccggagtgtagcttaggtcgatgagtctggacagtcctcaccggcgacggtggtccaggctgcgttggcggcctacctgtggcccaaagccacaggacgctagttgtgaacaaggtgcgaagagcctattgagctacagaagagtcctccggcccctgaatgcggctaatcccaaccatggagcaggtgatcacgaaccagtgattagcctgtcgtaatgcgcaagtctgtggcggaaccgactactttgggtgtccgtgtttccttttatttcatttatggctgcttatggtgacaatcatagattgttgtcataaagcgaattggattggccatccggtgaaagtcaaacacattgtttatttgtttgttggcttcacgcctttaacttatcacaccttaaacctcattcacattaccttgttgatcagacagtggtatcacc

SEQ ID NO: 1067 - DNA, 744 bp, unidentified
  source 1..744: mol_type = unassigned DNA; note = Human coxsackievirus A18, strain G13, complete genome.1 sequence
ttaaaacagctctggggttgttcccaccccagaggcccacgtggcggccagtactccggtattgcggtacccttgtacgcctgttttacactcccttccccgtaacttagacgcaataaaccaagttcactaggaggggtgcaaaccagcaccaccacgaacaagcacttctgtttccccggtgacattgtatagactgtatccacggttgaaaacgattgatccgttatccgctcttgtacttcgagaagcctagtatcatcttggaatcttcgacgcgttgcgctcagcattcaaccccagaatgtagcttaggtcgatgagtctggacattcctcaccggtgacggtggtccaggctgcgttggcggcctacctgtgacccaaagtcacaggacgctagttgtgaacaaggtgtgaagagcctattgagctacaagagagtcctccggcccctgaatgcggctaatcctaaccacggagcaagtgctcacgaaccagtgagtggcttgtcgtaacgagcaattctgtggcggaaccgactactttgggtgtccgtgtttcctttttaactttaaatggctgcttatggtgacaatcattgattgttatcataagccgaattggattggccatccggtgaaaatcaagttgatcatttatttgtttgttggattcactccattaactcatttttcaattgacctaatacgtattgtattattagttagaaacatacatcaca

SEQ ID NO: 1068 - DNA, 744 bp, unidentified
  source 1..744: mol_type = unassigned DNA; note = Human coxsackievirus A24, strain E34-dn19 polyprotein gene, complete1 sequence
ttaaaacagctctggggttgttcccaccccagaggcccacgcggcggccagtacaccggtatcacggtacccttgtacgcctgttttatactcccttccccgtaacttagaagccacaaaccaagttcgataggagggggtacaaaccagtaccaccgtgaacaagcacttctgtttccccggtgatgtcacatagactgtccccacggttgaaagtgattgatccgttacccgccttggtacttcgagaaacctagtatcatcttggaatcaatgacgcgttgcgctcagcactcaaacccggagtgtagcttaggctgatgagtctggacgtccctcactggcgacagtggtccaggctgcgctggcggcctacctgtggtggaagccacaggacgctaattgtgaacaaggtgtgaagagtctattgagctaccatggagtcctccggcccctgaatgcggctaatcccaaccacggagcaagtattcacaaaccagtgaaatgcttgtcgtaacgcgaaagtctgtggcggaaccgactactttgggtgtccgtgtttccttttattctttatatggctgcttatggtgacaatcatagattgttatcataaagcgcattggattggccatccggtgaaaatcaagcaaatcatttacttatttgttggatttactccaatcacaccatttacattgcatttaattactcttgtgttgacaatcagaagatactaccaca

SEQ ID NO: 1069 - DNA, 744 bp, unidentified
  source 1..744: mol_type = unassigned DNA; note = Human coxsackievirus A11, strain BAN00-10444, complete genome.1 sequence
ttaaaacagcctgtgggttgttcccaccccagaggcccacgtggcggctagtactctggtatcacggtacctttgtacgcctgttttataccccttccccaagtaaccttagaagcaactcaacaagttcaatagagggggtacaaaccagtaccaccacgaacaagcacttctgtttccccggtgattttgcataggctgtacccacggccaaaagtgaatgatccgttatccgcttgagtacttcgagaagcttagtaccaccttggaatcttcgatgcgttgcgctcagcactctaccccgagtgtagcttaggctgatgagtctgggcattccccaccggcgacggtggcccaggctgcgttggcggcctacccatggctaacgccatgggacgctagttgtgaacaaggtgtgaagagcctattgagctactcaagagtcctccggcccctgaatgcggctaatcctaaccatggagcaagtgccctcaacccagagggtggcttgtcgtaacgcgcaagtccgtggcggaaccgactactttgggtgtccgtgtttccttttatcttatatatggctgcttatggtgacaatcatagattgttatcataaagcgaattggattggccatccggtgaagtataaacatattatttacctgtttgtcggattcaccccgctcactttatacacacccaatatagtatctattgtactgctactgaggcactaccaccgca

SEQ ID NO: 1070 - DNA, 744 bp, Human enterovirus sp.
  misc_feature 1..744: note = 88, strain BAN01-10398, complete genome.1
  source 1..744: mol_type = genomic DNA
ttaaaacagcctgtgggttgatcccacccacagggcccactgggcgctagcacactggtattccggtacttttgtgcgcctgttttatacacccttccccttcatgtaacttagaagtaaaacacaaacggtcaataggtagctcagcaaaccagctgagcctcggccaagcacttctgttaccccggactgagtatcaataagctgttaacacggctgaaggagaaaacgttcgttatccggccaattacttcgagaaacctagtaacaccatgaaggttgcgtagcgtttcgctccacacaaccccagtgtagatcaggtcgatgagtcaccgctctccccacgggtgaccgtggcggtggctgcgttggcggcctgcccatggagcactccatgggacgcttcaatactgacatggtgtgaagagtctattgagctaattggtagtcctccggcccctgaatgcggctaatcctaactgcggagcagacacccacacgccagtgggcagtctgtcgtaatgggcaactctgcagcggaaccgactactttgggtgtccgtgtttccttttattcttacattggctgcttatggtgacaatcaaggaattgttaccatatagctattggattggccatccggtatctaacagagcaattgtttacctcttcaccggttttgtaccattgaattgcaatagtctcaacaccctttgctatatcattaaattgaactcagcaaa

SEQ ID NO: 1071 - DNA, 744 bp, Human echovirus
  misc_feature 1..744: note = 30, strain Kor08-ECV30, complete genome.1
  source 1..744: mol_type = genomic DNA
ttaaaacagcctgtgggttgctcccacccacagggcccactgggcgctagcacactggtatcccggtacctttgtgcgcctgttttatccaccccacccccagctgtaatttagaagttcgacacacatggtcaatagatggctcagtgcaccaactgggtttagaccaagcacttctgttaccccgggccgagtatcaataagctgctcgcgcggctgaaggagaaaacgctcgttatccggccaattacttcgagaaacctagtaccaccatggaggttgcgcagcgtttcgctccgcacagccccagtgtagatcaggccgatgagtcaccgcgttcctcacgggcgaccgtggcggtggctgcgttggcggcctgcccatggggcaacccatgggacgcttcaatactaacatggtgtgaagagtctattgagctaattggtagtcctccggcccctgaatgcggctaatcctaactgcggagcagatactcacatgccagtgggcagtctgtcgtaacgggcaactctgcagcggaaccgactactttgggtgtccgtgtttccttttattcttatactggctgcttatggtgacaattgagaaattgttaccatatagctattggattggccatccagtgacaaacagagcgattgtttacctatttgtcggtttcataccgttgaactttagagttttgaagaccctcaacttgattatattattcaactctgtaaa

SEQ ID NO: 1072 - DNA, 744 bp, Echovirus
  misc_feature 1..744: note = E11, strain 1315/ISR/1999, complete genome.1
  source 1..744: mol_type = genomic DNA
taaaacagcctgtgggttgttcccacccacagggcccactgggcgccagcactctggtattatggtaccttagtgcgcctgttttatacaccccttccccaaatgtaatttagatgcatgtaaacaaaggccaatagcaggcgcagcataccagctgtgtctcggtcaagcacttctgttaccccggactgagtatcaataggctactcacgtggctgaaggagaaaacgttcgttatccggccaattacttcgagaaacctagtaataccatgaaggttgcgaagtgtttcgctcagcacaaccccagtgtagatcaggtcgatgagtcaccgcattccccacgggtgaccgtggcggtggctgcgctggcggcctgcccatgggattacccatgggacgcttcaatattgacatggtgtgaagagtctattgagctaattggtattcctccggcccctgaatgcggctaatcccaactgcggagcaggtacccacatgccagtgggcagcctgtcgtaatgggcaactctgcagcggaaccgactactttgggtgtccgtgtttctctttattcttatactggctgcttatggtgacaattgagaaattgttgccatatagctattggattggccatccggtgacaaatagagcaattgtgcatccatttgttggttttatactaactcaatctcaaagttttaactaccctcaatctcattatatcattcaatacagcaaa

SEQ ID NO: 1073 - DNA, 744 bp, Echovirus
  misc_feature 1..744: note = E3 genomic RNA, complete genome,strain: OC10-532.1
  source 1..744: mol_type = genomic DNA
ttaaaacagcctgtgggttgttcccacccacagggcccactgggcgttagcactctggtatcacggtacctttgtgcgcctgttttatctaccctccctaaaaatgtaatttagaagcatgatccgaacggtcattaggtagctcagtgcaccaactgagcccagaccaagcacttctgttaccccggactgagtatcaataggctgctcgcgcggctgaaggagaaaacgttcgttatccggccaattacttcgagaaacccagtaccactatgaaagttgcgcagcgtttcgttccgcacaaccccagtgtagatcaggtcgatgagtcaccgcgttccccacgggcgaccgtggcggtggctgcgttggcggcctgctcatggggcaacccatgagacgcttcaatactgacatggtgcgaagagtctattgagctaattggtagccctccggcccctgaatgcggctaatcccaactgcggagcagatacccacaaaccagtgggcagtctgtcgtaatgggtaactctgcagcggaaccgactactttgggtgtccgtgtttccttttgttcttacactggctgcttatggtgacaattgagagattgttgccatatagctattggattggccatccggtgactaacagagcaattgtttacttatttgttggttttataccgttagattacaaagtcctaaacaccctgaatctcattataacacttaattcagcaaa

SEQ ID NO: 1074 - DNA, 744 bp, Enterovirus
  misc_feature 1..744: note = B75,isolate 102/SD/CHN/97, complete genome.1
  source 1..744: mol_type = genomic DNA
tttaaaacagcctgtgggttgtttccacccacagggcccacagggcgctagcactttggtatcacggtacctttgtgcgcctgttttataacccttcccccccacagaaacttagaagcaccacacaccgatcaatagaaagcgtggcgcaccagccatgtcttgatcaagcacttctgtttccccggaccgagtatcaatagactgctcgcgcggtcgaaggagaaaacgtccgttatccggctgactacttcgagaaacccagtaacaccatggaaattgcggagtgtttcgatcagcacatccccagtgtagatcaggtcgatgagtcaccgcattccccacgggtgaccgtggcggtggctgcgttggcggcctgcctacggggcatcccgtaggacgcttcaaaatggacatggtgcgaagagtctattgagctagtcagtagtcctccggcccctgaatgcggctaatcctaactgcggagcgcgcgcctccaacccagggggtagcgcgtcgtaacgggtaactctgcagcggaaccgactactttgggtgtccgtgtttctttttatcattacattggctgcttatggtgacaattgaaaggttgttaccatatagctattggattggccacccggtgtctaatagagcgattgtgtacctttttgttgggtttgtgccactttgtaaaacagcctatcagactttgtgctttatagtcaaactaaatacagcaaa

SEQ ID NO: 1075 - DNA, 744 bp, Echovirus
  misc_feature 1..744: note = E30, strain 13-759, complete genome.1
  source 1..744: mol_type = genomic DNA
ttttaaaacaagctgtgggttgatcccacccacagggcccactgggcgctagtacactggtatcacggtacctttgtgcgcctgttttacctacccctccccgaaagaaacttagaagctcaacttatgtggtcaatagtaagctcagtacgccaactgagccacgaccaagcacttctgtcgccccggactgagtatcaataagctgctcacgtggctgaaggagaaaacgttcgttatccggccaattacttcgagaaacccagtaccaccatgaaagttgcgcggcgtttcgctccgcacaaccccagtgtagatcgggccgatgagtcaccgcgttccccacgggcgaccgtggcggtgactgcgttggcggcctgcccatggagcaatccatgggacgcttcaatactgacatggtgcgaagagtctattgagctaattggtagtcctccggcccctgaatgcggctaatcctaactgcggagcagatacccacacaccagtgggcagtctgtcgtaacgggcaacttcgcagcggaaccgactactttgggtgtccgtgtttccttttattttatactggctgcttatggtgacaattgagagattgttaccatatagctattggattggccatccggtgtccaacagagcgatcatttacttgtttgttggattcgtgcccttgaactacaaagcactcctaacacttaaatacattgtagacctcaacacagcaaa

SEQ ID NO: 1076 - DNA, 744 bp, Human enterovirus sp.
  misc_feature 1..744: note = 85,strain HTPS-MKLH04F/XJ/CHN/2011, complete1
  source 1..744: mol_type = genomic DNA
ttaaaacagcctgtgggttgttcccacccacagggcccactgggcgctagcacactggtattacggtacctttgtgcgcctgttttatataccccccccaagtgcaacttagaagcaagacatgaccggtcagcaggtgattcagtaaaccaactgagtcttgaccaagcacttctgtttccccggaccgagtatcaataggctgcttacgcggctgaaggagaaagtgttcgttacccggccaattacttcgagaagcctagtaccaccatggaggttgcgcggcgtttcgctccgcacacccccagtgtagatcaggccgatgagccaccgcattccccacgggtgaccgtggcggtggctgcgttggcggcctgcccatggggtaacctatgggacgcttcaatactgacatggtgcgaagagcctattgagctaattggtagtcctccggcccctgaatgcggctaatcctaactgcggagcaggtacccacataccagtgggcagcctgtcgtaacgggtaactctgcagcggaaccgactactttgggtgaccgtgtttccttttattttttcctattggctgcttatggtgacaatcgaggaattgttgccatatagctattggattggccatccggtgtcaaatagagcgattatttacctgtttgttggatttgtaccactgaactttaaggcgctcatcactctcaactatattttatcccttaacgcaacaaa

SEQ ID NO: 1077 - DNA, 744 bp, Human enterovirus sp.
  misc_feature 1..744: note = 84, isolate CIV2003-10603, complete genome.1
  source 1..744: mol_type = genomic DNA
ttaaaacagcctgtgggttgttcccacccacagggcccaccgggcgccagcacactggtatcacggtacccttgtgcgcctgttttatccaccccttcccacagtaacttagaagcacaccatgtatacggtcaataggcggctcagtacaccaactgggccacgaccaagcacttctgttaccccggactgagtatcaataagctgctcacgcggctgaaggagaaaacgttcgttacccggccaattacttcgagaaacccagtaccaccatgaaggttgcgcagcgtttcgttccgcacaaccccagtgtagatcaggtcgatgagtcaccgcgttcctcacgggtgaccgtggcggtggctgcgttggcggcctgcccatggggcaacccatgggacgcttcaatactgacatggtgcgaagagtctattgagctaattggtagtcctccggcccctgaatgcggctaatcctaactgcggagcagatacccacaaaccagtgggcagtctgtcgtaacgggcaactctgcagcggaaccgactactttgggtgtccgtgtttccttttatccttacactggctgcttatggtgacaattgagaaattgttaccatatagctattggattggccatccggtgacaaacagagcagttgtttacctatttgttggtttcgtaccgctgaaccttaaagttctaaagaccctcaattttatcttagcacttaacacagcaaa

SEQ ID NO: 1078 - DNA, 744 bp, Enterovirus sp.
  misc_feature 1..744: note = C96 clone V13C polyprotein gene, complete cds.1
  source 1..744: mol_type = genomic DNA
ttaaaacagctctggggttgttcccaccccagaggcccacgtggcggccagtacaccggtattacggtacccttgtacgcctgttttatactcccttccccgcaacttagaagttaaacaaaccaagttcaatagaagggggtgcaaaccagtaccaccacgaacaagcacttctgtttccccggtgacgtcatataggttgtaaccacggccaaaagtgactgatccgttatccgctcttgtacttcgagaagcccagtaccatcttgggatcttcgatgcgttgcgctcagcactcgaacccggagtgtagcttaggccgatgagtctggacattccccaccggtgacggtggtccaggctgcgttggcggcctacctgtggtccaagccacaggacgctagatgtgaacaaggtgtgaagagcctattgagctacaagggaatcctccggcccctgaatgcggctaatcctaactacggagcagacggtcacaaaccagtgaatggtctgtcgtaatgcgcaagtctgtagcggaaccgactactttgggtgtccgtgtttccttttatctttttaatggctgcttatggtgacaatcctagattgttatcataaagcgatttggattggccatccagtgatatttgaaaccattactgtattgcctgctaaggctattttaaagacttaataaacacaacttcattcaactcaattacaccaactaacaactgtctcata

SEQ ID NO: 1079 - DNA, 744 bp, Human enterovirus sp.
  misc_feature 1..744: note = B,strain Cuba450of90 polyprotein gene, complete1
  source 1..744: mol_type = genomic DNA
tttaaaacagcctgtgggttgttcccacccacagggcccactgggcgctagcactctggtattacggtacctttgtgcgcctgttttacatccctcccccagatgcaacttagaagcagtacaccaagaccaatagtaggcatggcataccagccatgtgtcggtcaagcacttctgttcccccgggctgagtatcaataaactgctcacgtggttgaaggagaaagcgcccgttacccggctaactacttcgagaagcctattaacaccatgaaagttgcggagtgtttcgctcagcacgatcccggtgtagatcaggccgatgagtcaccgcgttccccacaggtgactgtggcggtggctgcgttggcggcctgcccatggggcaacccatgggacgcttcaatatggacatggtgtgaagagcccattgagctagttagtagtcctccggcccctgaatgcggctaatcccaactgcggagcacagcgcccccgctccagggggtagtgtgtcgtaacgggcaactctgcagcggaaccgactactttgggtgtccgtgtttccttttttccttttcattggctgcttatggtgacaattgaaagattgttaccatatagctattggattggccatccagtgtcaagcagagctataatttaccaatttatagggtttgtcccgttggatctgaaagctttaaaaacccttaacttggtactactattaaacagtgtaaa

SEQ ID NO: 1080 - DNA, 744 bp, Echovirus
  misc_feature 1..744: note = E20,strain 812/YN/CHN/2010, complete genome.1
  source 1..744: mol_type = genomic DNA
ttaaaacagcctgtgggttgttcccacccgcagggcccactgggcgctaccacactggtattaaggtacccttgtgcgcctgtttaatacacccctccccctaatgtaacttagaagcatgacttaagtggtcaatagatagctcagtaatccaactgagttccgaccaagtacttctgttaccccggaccgagtatcaataagctgttcacgcggcagaaggagaaagcgttcgttatccggccaattacttcgagaaacccagtatcaccatgaaagttgcgcagtgtttcgctccgcacaaccccagtgaagatcaggtcgatgagtcaccacagtcctcacgggcgaccgtggtggtggctgcgttggcggcctgcccatggggcaacccctgggacgcttcaatcctgacatggtgtgaagagtctattgagctggatggtatccctccggcccctgaatgcggctaatcctagctgcggagcagacgctcgcatgccaacgggtagtctgtcgtaccgggtaactctgcagcggaaccgactactttgggtgtccgtgtttccttttatccttatatcgcctgcttatggtgtcaattgaaagattgttaccatatagctaatggattggccatccgataacaaatagagtgattatctagttttttgttggatttgttccattgaactacaaggtattgaacacccttaatttcattttaacactcaacacaacaaa

SEQ ID NO: 1081 - DNA, 744 bp, Enterovirus sp.
  misc_feature 1..744: note = B83, isolate AFP341-GD-CHN-2001, complete genome.1
  source 1..744: mol_type = genomic DNA
tttaaaacagcctgtgggttgttcccacccacagggcccactgggcgctagcactctggtatcacggtacctttgtgcgcctgttttatagcccctcccttagataggaatttagaagcactgcacaccgatcaatagcaggcgcggcacgccagccacgtcttgatcaagcacttctgtttccccggaccgagtatcaatagactgttaacgcggtcgaaggagaaaacgttcgttatccggccaactacttcgagaaacctagtaacgccatggaagttgcggagtgtttcgctcagcacatccccagtgtagatcaggtcgatgagtcaccgcatccctcacgggtgaccgtggcggtggctgcgttggcggcctgcctacggggcaacccgtaggacgcttcaatatggacatggtgcgaagagtatattgagctagttggtagtcctccggcccctgaatgcggctaatcctaactgcggagcgctcgcccccaatccagggggtcgtgcgtcgtaacgggtaactctgcagcggaaccgactactttgggtgtccgtgtttccttttatctttatcacggctgcttatggtgacaattgaaagattgttaccatatagctattggattggccatcctgtgtctaacagagcaatcatatatctttttgttggatttgtgccacttgataaaataagttaccagactttgtgttttatcatcagactaaacacaacaaa

SEQ ID NO: 1082 - DNA, 744 bp, Echovirus
  misc_feature 1..744: note = E7, strain DH22G/JS/2012, complete genome.1
  source 1..744: mol_type = genomic DNA
ttaaaacagcctgtgggttgtacccacccacagggcccaccgggcgctagcacactggtatcacggtacccttgtgcgcctgttttatcaacccctccccacattgaaacttagaagtaacacacaccgatcaatagtgggcgtggcaaaccagctacgtcgtgatcaagtatttctgtttccccggactgagtatcaatagactgctcgcgcggttgaaggagaaaacgttcgttacccggctaactacttcgagaaacctagtaatgccatgaaaattgcgtagcgtttcgttcagcacaaccccagtgtagatcaggtcgatgagtcactgcattcctcacgggcgaccgtggcagtggctgcgttggcggcctgcctatagggtaacctataggacgctacaatatggacatggtgtgaagagtctattgagctagttagtagtcctccggcccctgaatgcggctaatcctaactgcggagcgcgtgtttccaatccaggaagtggcgcgtcgtaatgggcaactctgcagcggaaccgactactttgggtgtccgtgtttctcttttatccttacactggctgcttatggtgacaattgaagaattgttaccatatagctattggattggccatccggtgtctaatagagcaattgtatacctctttgttggatttataccattaaacagaacaagttaccagaccctgtgctttattgttaaactaaacacgacgaa

SEQ ID NO: 1083 - DNA, 744 bp, Coxsackievirus
  misc_feature 1..744: note = B3, isolate DH16G/JS/2012, complete genome.1
  source 1..744: mol_type = genomic DNA
tttaaaacaaagctgtgggttgttcccacccacagggcccactgggcgctggcacactggtattgcggtacctttgtgcgcctgttttatccgccctccccagtagtaacctagaagcatgaataatgtggtcaataggaagctcagtaaaccaactgggtcttgaccaagcacttctgttaccccggactgagtatcaagaagctgctcgcgtggctgaaggagaaaacgttcgttacccggccaattacttcgagaaacccagtaccaccatggaagttgcgcagcgtttcgctccgcacaaccccagtgtagatcaggtcgatgagtcaccgcaatcctcacgggtgaccgtggcggtggctgcgctggcggcctgcccatggggtaacccatgggacgcttcaatactgacatggtgcgaagagtccattgagctaattggtagtcctccggcccctgaatgcggctaatcctaactgcggagcagatatccacacaccagtggacagtctgtcgtaatgggtaactctgcagcggaaccgactactttgggtgtccgtgtttccttttatctttatattggctgcttatggtgacaattgagagattgttaccatatagctattggattggccatccggtgagcaacagagcaattgtattcctctttgtaggatttgtgccgttgaattacaacaactacaacaccttactctacattatccacttaaacacgcggaa

SEQ ID NO: 1084 - DNA, 744 bp, Echovirus E3
  misc_feature 1..744: note = isolate ECHO3_INMI1 polyprotein gene, complete cds.1
  source 1..744: mol_type = genomic DNA
ttaaaacaaggctgtgggttgtacccgcccacagggcccactgggcgccagcactctggtattacggtacccttgtgcgcctgttttatatcccttccccaaggtaaacgttagaagcaatgcactcccgatcaatagaaggtgcgacgcgccagtcgtatctcgatcaagcacttctgtttccccggaccgagtatcaatagactgctagcgcggttgaaggagaaaacgttcgttacccgactaactacttcgagaagcccagtagcgccatgaaagttgcagagtgtttcgctcagcacttcccccgtgtagatcaggccgatgagtcaccgcaatccccacgggcgaccgtggcggtggctgcgttggcggcctgcctatggggaaacccataggacgctcaaatacagacatggtgcgaagagtctattgagctagttagtactcctccggcccctgaatgcggctaatcctaactgcggagcaagtactcacaatccagtgggcagcttgtcgtaacgggtaactctgcagcggaaccgactactttgggtgtccgtgtttccttttattcctacattggctgcttatggtgacaatcaaagagttgttaccatatagctattggattggccatccggtgactaataaagcaattatatttctttttgttgggtttgtaccccttaatacaaccagcttcaccacattgtgttacatcattagactgaacaaggcaaa

SEQ ID NO: 1085 - DNA, 744 bp, Echovirus
  misc_feature 1..744: note = type 30 partial ORF1 gene for polyprotein,isolate 91TLC.1
  source 1..744: mol_type = genomic DNA
ttaaaacagcctgtgggttgttcccacccacagggcccactgggcgccagcacactggtatcacggtacttttgtgcgcctgttttatctacccccacccccagcgtaacttagaagcacatttcacacggtcaataggtgactcagcatgccagctgagttttggccaagcacttctgttaccccggaccgagtatcaataagctactcacgtggctgaaggagaaagcgttcgttaaccggccaattacttcgagaaacctagtatcaccatgaaggttgcgtggcgtttcgctccgcacaaccccagtgtagatcaggtcgatgagttaccgcgtccctcacgggcgaccgtggcggtagctgcgctggcggcctgcccatggggcaacccatgggacgcttcaatactgacatggtgtgaagagtctattgagctaattggtagtcctccggcccctgaatgcggctaatcctaactgcggagcagatacccacacgccagtgggcagtctgtcgtaatgggcaactctgcagcggaaccgactactttgggtgtccgtgtttccttttactcttatattggctgcttatggtgacaattaaaagattgttaccatatagctattggattggccatccagtgtctaatagagcgatcatttacctttttcttgggtttgttccactcaactataaagcacttgtaacgctcaaatatattataaacctcaacacaacaaa

SEQ ID NO: 1086 - DNA, 745 bp, Human enterovirus sp.
  misc_feature 1..745: note = 91 polyprotein gene, complete cds.1
  source 1..745: mol_type = genomic DNA
ttaaacagctctagggttgttcccaccctagaggcccacgtggcggctagcactctggtatcacggtacctttgtgcgcctgttttatatccctttccccatgtaacttagaagttattaaacaaagttcaatagaagggggtacaaaccagtgccaccacgaacaagcacttctgtttccccggtgaagctgtatagactgtctccacggttgaaaatggcagatccgttacccgctttggtacttcgagaaacctagtatcaccttggaatcttcgatgcgttgcgctcagcactcaaccccagagtgtagcttaggtcgatgagtctggacgatcctcactggtgacagtggtccaggctgcgttggcggcctacctgtggtgaaaaccacaggacgctagttgtgaacaaggtgtgaagagtctattgagctaccaaagagtcctccggcccctgaatgcggctaatcctaaccacggagcaagtgccttcaaaccagtaggtagcttgtcgtaacgcgcaagtctgtggcggaaccgactactttgggtgtccgtgtttccttttattttatcatggctgcttatggtgacaatctaagattgttatcatatagctattggattggccatccggtgactaacagagatctcatatacctttttgttggttttactaaattaaatattaccacgttcaagacacttctccttatcatacaactaaatagtgagaagagaaa

SEQ ID NO: 1087 - DNA, 745 bp, Coxsackievirus
  misc_feature 1..745: note = A16,strain 20692_88_CV-A16 polyprotein gene,1
  source 1..745: mol_type = genomic DNA
ttaaaacagcctgtgggttgtacccacccacagggcccactgggcgttagcacactgatttcacggaatctttgtgcgcctgttttatatccctcccccaatacagtaacttagaagttagaaacctacacgaccaatagcaggcgtgacgcaccagtcatgtcttggtcaaacacttctgtttccccggactgagtatcaataagccgctcacgcggctgaaggagaaaacgttcgttatccggctaactacttcgagaaacctagtagcaccgtgaaagttgcagagtgtttcgctcagcactttccccgtgtagatcaggtcgatgagtcactgcatcccccacgggcgaccgtggcagtggctgcgttggcggcctgcctatggggcaacccatgggacgctctaatacagacatggtgtgaagagtctattgagctagttagtagtcctccggcccctgaatgcggctaatcctaactgcggagcacgcaccctcaatccagggggcggcgtgtcgtaacgggtaactctgcagcggaaccgactactttgggtgtccgtgtttccttttatcacttactggctgcttatggtgacaatcaaagaattgttaccatatagcttttggattggccatccggtgtctaacagagctattgtttacctgtttgttggatacattcctctcaactacaaagttcttcaaactctcaactttatattgctccttaatcataagaa

SEQ ID NO: 1088 - DNA, 745 bp, Human enterovirus sp.
  misc_feature 1..745: note = 71, strain 804/NO/03, complete genome.1
  source 1..745: mol_type = genomic DNA
ttaaaacagcctgtgggttgcacccacccacagggcccactgggcgtcagcactctggtactgaggtacctttgtgcgcctgtttttacttccctttcccgaaagtaacttagaagctttgaaccagcgatcaacagtaggtgtgacataccagtcacatctcgatcaagcacttctgtatccccggactgagtatcaataggctgcttacgcggctgaaagagaaaacgttcgttacccggccaactacttcgagaagcttagtaccaccatgaacgaggcagagcgtttcgctcggcactaccccagtgtagatcaggctgatgagtcactgcaatccccatgggcgaccatggcagtggctgcgctggcggcctgcccatggagagatccatgggacgctctaattttgacacggtgcgaagagcctattgagctagttggtagtcctccggcccctgaatgcggctaatcctaactgcggagcgcacacccacataccagtgggtagtgtgtcgtaacgggcaactctgcagcggaaccgactactttgggtgtccgtgtttccttttattctcatgtcggctgcttatggtgacaatcgaagagttgttaccatatagctattggattggccatccggtgtgcaacagagcaattgtctaccagtttattggttttgtaccactgacattaaagtctgtaattaccctcaattttatcttgacccttaacacggtcaagc

SEQ ID NO: 1089 - DNA, 745 bp, Coxsackievirus
  misc_feature 1..745: note = A16,strain R35/YN/CHN/2012, complete genome.1
  source 1..745: mol_type = genomic DNA
ttaaaacagcctgtgggttgttcccacccacagggcccactgggcgctagcacactgattctgcgggatctttgtgcgcctgttttataacccttcccctaggtagcaactttgaaggtttggacaaaaacgaacaatagggggcgaaaagcgccagtcacgtcttggtcaaacacttctgtatccccggactgagtaccaataggctgctcacgcggttgaaggggaaaacgttcgttacccggctaactacttcgagaaacctagtaacaccatgaaagttgcggagtgtttcgctcagcacttcccccgtgtagatcaggtcgatgagtcactgtaaaccccacgggcgaccgtgacagtggctgcgttggcggcctgcccatggggtaacccatgggacgctctaatacagacatggtgcgaagagtctattgagctagttagcagtcctccggcccctgaatgcggctaatcctaactgcggagcgcgcaccctcaatccagggggcggcgtgtcgtaatggttaactctgcagcggaaccgactactttgggtgtccgtgtttccttttattctttattggctgcttatggtgacaattgaaaagttgttaccatatagctattggattggccatccggtgtctaacagagctattgtttacctatttattggatacgtccctctcaatctcaagtccattcaaactcttgattatatattgctccttaactgtaggaa

SEQ ID NO: 1090 - DNA, 745 bp, Coxsackievirus
  misc_feature 1..745: note = A16,isolate CV-A16-M02-BLR-IN, complete genome.1
  source 1..745: mol_type = genomic DNA
ttaaaacagcctgtgggttgttcccacccacagggcccattgggcgatagcacactgattttgcggaatctttgtgcgcctgttttataacccttcccccaagcagcaacttagaagtattgcacaatcgcggccagtagtgggcgtgacgcgccagtcacgtcttggtcaagcacttctgtatccccggactgagtatcaatagactgctcacgcggttgaaggagaaaacgttcgttatccggctaactacttcgggaaacctagtagcaccttgaaagttgcagagtgtttcgctcagcacttcccccgtgtagatcaggccgatgagccactgtaaaccccacgggcgaccgtgacagtggctgcgctggcggcctgcccatgggggaacccatgggacgctctaatacaaacatggggtgaaaagtctactgagctacttagtagtcctccggcccctgaatgcggctaatcctaactgcagagcacacaccctcaaccctcggggcagtgtgtcgtaatgggtaactctgcagaggaacccactactttgggtgaccgtgtttccttttattcgttattggctgcttagggcgacaattgaaaagttgttaccatatccctattgtattggccatccggtatctaacagagctattgtttacttatttgttggatacgtccctcttaatttcaaggctatccaaactcttgattatatatcgctccttaattataagaa

SEQ ID NO: 1091 - DNA, 745 bp, Coxsackievirus
  misc_feature 1..745: note = A16 gene for polyprotein,isolate1
  source 1..745: mol_type = genomic DNA
ttaaaacagcctgtgggttgttcccacccacagggcccactgggcgctagcactctgattttgcgggatctttgtgcgcctgttttataatcccttccctaagcagtaacttagaagttctacacaatcaggaccaacagtcagcgtggcacgccagccacgttttggtcaagcacctctgtttccccggactgagtatcaatagactgctcacgcggttgaaggagaaaacgttcgttacccggctaactacttcgagaaacctaatagcaccatgaaagttgcggagtgtttcgctcagcacttcccccgtgtagatcaggtcgatgagtcactgtaaaccccacgggcgaccgtgacagtggctgcgttggcggcctgcccatggggtaacccatgggacgctctaatacggacatggtgtgaagagtctattgagctagttagtagtcctccggcccctgaatgcggctaatcctaactgcggagcatgcgccctcaacccagggggtggcatgtcgtaatgggcaactctgcagcggaaccgactactttgggtgtccgtgtttccttttattcctcattggctgcttatggtgacaattgaaaggttgttaccatatagctattggattggccatccggtgtctaacagagctattgtttacctattcattgggtttgtccctcttaatcttaagaccatccaaactcttgattacatattgctcctcaattgtagaag

SEQ ID NO: 1092 - DNA, 745 bp, unidentified
  source 1..745: mol_type = unassigned DNA; note = Human coxsackievirus A12,strain Texas-12, complete genome.1 sequence
ttaaaacagcctgtgggttgtacccacccacagggcccactgggcgctagcactctggtactacggtacctttgtgtgcctgttttaagcccctaccccccactcgtaacttagaaggcttctcacactcgatcaatagtaggtgtggcacgccagtcacaccgtgatcaagcacttctgttaccccggtctgagtaccaataagctgctaacgcggctgaaggggaaaacgatcgttatccggctaactacttcgagaaacccagtaccaccatgaacgttgcagggtgtttcgctcggcacaaccccagtgtagatcaggtcgatgagtcaccgtattccccacgggcgaccgtggcggtggctgcgttggcggcctgcccatggggtgacccatgggacgctctaatactgacatggtgcgaagagtctattgagctagttagtagtcctccggcccctgaatgcggctaatcctaactgcggagcacatacccttaatccaaagggcagtgtgtcgtaacgggcaactctgcagcggaaccgactactttgggtgtccgtgtttccttttattcttacattggctgcttatggtgacaattgaaaagttgttaccatatagctattggattggccatccggtgacaaatagagctattgtatatctttttgttggttacgtaccccttaattacaaagtggtttcaactttgaaatacatcctaacactaaattgtagaaa

SEQ ID NO: 1093 - DNA, 745 bp, Enterovirus sp.
  misc_feature 1..745: note = C96,isolate JN13048, complete genome.1
  source 1..745: mol_type = genomic DNA
ttaaaacagcctgtgggttgttcccaccccagaggcccacgtggcggctagtacaccggtatcgcggtacccttgtacgcctgttttatactccctaccccgtaacttagaagcaataacttgagttcaacagcagggggtacaaaccagtaccaccacgaacaagcacttctgtttccccggtgacgttgtatagactgtacccacggtcgaaaacaatagatccgttatccgcttttgtacttcgaaaagcccagtaccatcttggaatcttcgatgcgttgcgttcagcactcgaacccggagtgtagcttaggtcgatgagtctggacagtccacaccggcgacggtggtccaggctgcgttggcggcctacctgtggcccaaagccacaggacgctagttgtgaacaaggtgtgaagagcctattgagctacaaaagactcctccggcccctgaatgcggctaatcccaaccacggagcaggcgatcacaaaccagtggttagcctgtcgtaatgcgcaagtctgtggcggaaccgactactttgggtgtccgtgtttccttttatttcatttatggctgcttatggtgacaatcgtagattgttatcataaagcgaattggattggccatccggtgaaattcaaatatactgtttatttatttgttggcttcgcgcctttaaattaccgcaccttagaactcattcacattatcttgctggttagacagtggtaccatc

SEQ ID NO: 1094 - DNA, 745 bp, unidentified
  source 1..745: mol_type = unassigned DNA; note = Human coxsackievirus A24,strain USA-Tx79-10625 polyprotein gene,1 sequence
ttaaaacagctctggggttgttcccaccccagaggcccacgtggcggctagtacaccggtatcacggtacccttgtacgcctgttttatacccccttcccccgtaacttagaagctacacaccaagttcaatagaagggggtacaaaccagtaccaccgcgaacaagcacttctgtttccccggtgaagttgcatagactgtgcccacggttgaaagcgaccgatccgttacccgccttggtacttcgagaaacccagtaccactttggaatcaatgatgcgttgcgctcagcgctcgaacccggagcgtagcttaggctgatgagtctggacattccccactggtgacagtggtccaggctgcgttggcggcctacctgtggtgaaagccacaggacgctagttgtgaacaaggtgcgaagagtctattgagctaccatggagtcctccggcccctgaatgcggctaatcccaaccacggagcaggcactcacaagccagtgagacgcttgtcgtaatgcgaaagtctgtggcggaaccgactactttgggtgtccgtgtttccttttattctttgtatggctgcttatggtgacaatcgaagattgttatcataaagcaagttggattggccatccggtgagaattaaaagcattatttacttgcttattggattcactccaatcacatcatttactccacatctaatcaatcttgtgttgatactcagaaggtgttatcaaa

SEQ ID NO: 1095 - DNA, 745 bp, unidentified
  source 1..745: mol_type = unassigned DNA; note = Human coxsackievirus A24,strain DOR93-10630 polyprotein gene,1 sequence
ttaaaacagctctggggttgttcccaccccagaggcccacgtggcggccagtacactggtattacggtacccttgtacgcctgttttacaccccttcccccgtaacttagaagctttaaacccaagttcaatagtaggtggtacaacccagtaccaccacgaacaagcacttctgttatcccggtgagattgcataagctgtccccacggctaaaagcgattgatccgttacccgctcttgtacttcgagaagcctagtaaaaccttggaatcttcgacgcgttgcgttcgacactcaaccccagagtgtagcttaggctgatgagtctggacattcctcaccggcgacggtggtccaggctgcgttggcggcctacctgtggcctaaagccacaggacgctagttgtgaacaaggtgtgaagagcctattgagctacaagggagtcctccggcccctgaatgcggctaatcccaaccacggagcaggtggttgcaatccagcaactggcctgtcgtaacgcgcaagtctgtggcggaaccgactactttgggtgtccgtgtttccttttattttttaatggctgcttatggtgacaatcacagattgttgtcataaagcgaattggattggccatccagtgagagttaagataattatctacttgtttattggatttgttcctataaccgcccatacaccttgcttgattgaagtgatcctgtcaataagacatcactattaca

SEQ ID NO: 1096 - DNA, 745 bp, unidentified
  source 1..745: mol_type = unassigned DNA; note = Human coxsackievirus A24,strain Joseph, complete genome.1 sequence
ttaaaacagctctggggttgttcccaccccagaggcccacgtggcggccagtactccggtattgcggtacccttgtacgcctgttttacactcccttccccggtaacttagaagtaaacaaaccaagttcaatagaagggggtacaaaccagtaccaccacgaacaagcacttctgtttccccggtgacgttgtatagactgtacccacggttgaaaacaactgatccgttatccgctcttgtacttcgagaagcccagtatcaccttggaatcttcgatgcgttgcgctcagcactcaaccccagagtgtagcttaggtcgatgagtctggacaatcctcaccggcgacggtggtccaggctgcgttggcggcctacctgtggcccaaagccacaggacgctagttgtgaacaaggtgtgaagagcctattgagctacgagagagtcctccggcccctgaatgcggctaatcccaaccacggagcaggtgatcacaagccagtgattagcctgtcgtaacgcgcaagtctgtggcggaaccgactactttgggtgtccgtgtttcctttattttattatggctgcttatggtgacaatcacagattgttatcataaagcgacttggattggccatccagtgaaaataaaacacatcatttacctgattgttggatttactccgctgactatctactcaccaggtcttattaaggttattctgttgattaggtcacaatttcaca

SEQ ID NO: 1097 - DNA, 745 bp, unidentified
  source 1..745: mol_type = unassigned DNA; note = Human coxsackievirus A13,strain Flores, complete genome.1 sequence
ttaaaacagctctcgggttgttccccccccagaggcccacgtggcggccagtactccggtattacggtacccttgtacgcctgttttgtatccccttcccccgcaacttagaagttataaaccaagttcaatagaagggggtacaagccagtaccaccacgaacaagcacttctgtttccccggtgatgttgtatagactgctaacgcggttgaaaacagctgatccgttatccgcttgtgtacttcgagaagcctagtatcatcttggaatcttcgatgcgttgcgttcagcgctctaccccagagcgtagcttaggctgatgagtctgggcattccccaccggcgacggtggcccaggctgcgttggcggcctacctatggctaacgccataggacgctagttgtgaacaaggtgtgaagagcctattgagctacacaagagtcctccggcccctgaatgcggctaatcctaaccatggagcaagtgatcacaatccagtgatattcttgtcgtaacgcgcaagtccgtggcggaaccgactactttgggtgtccgtgtttccttttacttttatcatggctgcttatggtgacaatcattgattgttatcataaagcgaattggattggccatccggtgaaagtgagacttatcatctacttgtttgttggattcactccattgaacacattcactcccagtatcatttcaatagtaatcagaattagacagttgtatcaca

SEQ ID NO: 1098 - DNA, 745 bp, Human enterovirus sp.
  misc_feature 1..745: note = 99,strain USA-Ok85-10627 polyprotein gene,1
  source 1..745: mol_type = genomic DNA
ttaaaacagctctggggttgttcccaccccagaggcccacgtggcggctagtactccggtattacggtacccttgtacgcctgttttaaatccccttccccgtaacttagaagcttaaaccaataagttcaatagaagggggtacaaaccagtaccaccacgaacaagcacttctgtttccccggtgcggtggtatagactgtacccacggttaaaaaccaccaatccgttatccgctctggtacttcgagaagcctagtaccaccttggaatctttgacgcgttgcgctcaacactcaaccccagagtgtagcttaggctgatgagtctgggcagtccccaccggtgacggtggcccaggctgcgttggcggcctacccatggctaatgccatgggacgctagaagtgaacaaggtgtgaagagcctattgagctactagagagtcctccggcccctgaatgcggctaatcccaaccacggatcaagtgcgcgcaacccagtgcgtagcttgtcgtaatgcgcaagtctgtggcggaaccgactactttgggtgtccgtgtttccttttattcttattatggctgcttatggtgacaatcttagattgttatcatatagcaattggattggccatccagtgagagtgagagatatcatatacctatttgtagcttttactccacttagcacgaacacagttactttgattagaattgtgctattgatcagattgacacatcact

SEQ ID NO: 1099 - DNA, 745 bp, Human enterovirus sp.
  misc_feature 1..745: note = 99, complete genome.1
  source 1..745: mol_type = genomic DNA
ttaaaacagctctggggttgttcccaccccagaggcccacgtggcggctagtactctggtatcacggtacctttgtacgcctgttttatatcccttcccccgtaacttagaagctttgtaccaacaagttcaatagaaggggtacaaaccagtaccaccacgaacaagcacttctgtttccccggtgcgatgacatagactgtacccacggtcaaaagtcaccaatccgttacccgctttggtacttcgagacgcctagtattgccttggaattctcgatgcgttgcgctcaacactcgaccctggagtgtagcttaggctgatgagtctgggcattccccaccggtgacggtggcccaggctgcgttggcggcctacccatagctattgctatgggatgctagagttgaacaaggtgtgaagagccaattgagctactaaagagtcctccggcccctgaatgcggctaatcccaaccacggatcaagtgcgtgcaacccagcacgtagcttgtcgtaatgcgcaagtctgtggcggaaccgactactttgggtgtccgtgtttccttttatttttatcatggctgcttatggtgacaatcttggattgttatcatatagcgattggattggccatccggtgagaataaaagatattgtttatctgtttgtggcttttactccattaaacaaaaacacactttccttaattaaagtggtactattgatcagatcagcataccaca

SEQ ID NO: 1100 - DNA, 745 bp, Human poliovirus 1
  misc_feature 1..745: note = isolate PV1-RC2010-45, complete genome.1
  source 1..745: mol_type = genomic DNA
ttaaaacagctctggggttgttcccaccccagaggcccacgtggcggctagcactctggtattgcggtacctttgtgcgcctgttttatatccccgcccctacgtaactttagaagcaatacacagtgttcattaggaggggcacaaaccagtgtccttaagaacaagcacttctgtttccccggtgacctcgtataggctgtacccacggctaaaaacgagcgattcgttacccgcttaggtacttcgagaagcctagtaccgccttggaatcttcgacgcgttgcgctcagcactctaccccgagtgtagcttaggctgatgagtctgggcattccccaccggtgacggtggcccaggctgcgttggcggcctacccatggcctgcgccatgggacgctagttgtgaacaaggtgtgaagagcctattgagctacctaagaatcctccggcccctgaatgcggctaatcctaaccacggagcaagcaccctcaatccagggggtggcttgtcgtaacgcgcaagtctgtggcggaaccgactactttgggtgtccgtgtttccctttatttttattgtggctgcttatggtgacaatctttgattgccatcataaagcgaattggattggccatccggtgaaagttgaacacaccattcatctatttgttggattcacctcgttgactcagtttacacccaatttggtacatatagtgatagtgattagagaaaaataccaca

SEQ ID NO: 1101 - DNA, 745 bp, Coxsackievirus
  misc_feature 1..745: note = A20 genomic RNA, complete genome,strain: CAM1976.1
  source 1..745: mol_type = genomic DNA
ttaaaacagctctggggttgttcccaccccagaggcccacgtggcggctagtactctggtattacggtacctttgtacgcctgttttatatcccctccccccagtaacttagaaacaaaaaacccaagttcaataggagggggtacaaaccagtaccaccacgaacaagcacttctgttttccccggtgaggttgtatagactgtccccacggtcgaaaatgactgatccgttacccgctcctgtacttcgagaagcccagtaacatcttggaatcttcgatgcgttgcgctcagcactcaaccccagagtgtagcttaggtcgatgagtctggacgctccccaccggcgacggtggtccaggctgcgttggcggcctacctgtggtccaaagccacaggacgttagttgtgaacaaggtgtgaagagcctattgagctacaagagagtcctccggcccctgaatgcggctaatcccaaccatggagcagatgattgcaaaccagcaattggtctgtcgtaatgcgtaagtctgtggcggaaccgactactttgggtgtccgtgtttcctttttactctttaatggctgcttatggtgacaatcacggattgttatcataaagcgaattggattggccatccggtgagaatcagaacgattatttcttcctcgtggatttgtaccaataacaccttacacaccgcacttaatcagagttatattgtgtgagatttcattaccata

SEQ ID NO: 1102 - DNA, 745 bp, Human poliovirus 1
  misc_feature 1..745: note = isolate RUS39223, complete genome.1
  source 1..745: mol_type = genomic DNA
ttaaaacagctctggggttgttcccaccccagaggcccacgtggcggctagcactctggtatcacggtacctttgtgcgcctgttttatgtccccgcccccatgtaactttagaagcaatacacggtgttcattaggaggggcacaagccagtgttcctatgaacaagcacttctgtttccccggtgacctcgtataggctgtgcccacggctaaaaacgtgcgatccgttacccgcttgggtacttcgagaagcccagtaccaccttggaatcttcgacgcgttgcgctcagcactctaccccgagtgtagcttaggctgatgagtctgggcattccccactggtgacagtggcccaggctgcgttggcggcctacccattgctcgcgcaatgggacgctagatgtgaacaaggtgtgaagagcctattgagctgcctaagagtcctccggcccctgaatgcggctaatcctaaccacggagcaagcgccttcaacccagggggtggcttgtcgtaacgcgcaagtctgtggcggaaccgactactttgggtgtccgtgtttccctttgtttttattatggctgcttatggtgacaatcattgattgccatcataaagcgaattggattggccatccggtggaagttacatacatcatccatctatttgttggatttgcttcactaacacagttcacaatcaacttggtatatataataatagtgattagagaaaaataccata

SEQ ID NO: 1103 - DNA, 745 bp, unidentified
  source 1..745: mol_type = unassigned DNA; note = Human coxsackievirus A20, strain BAN00-10462 polyprotein gene,1 sequence
ttaaaacagctctggggttgttcccaccccagaggcccacgtggcggctagtactctggtatctcggtacctttgtacgcctgttttatacccccttccccatgtaactttagaagcaattcaacaagttcaatagagggggtacaaaccagtaccaccacgaacaagcacttctgtttccccggtgattttacataagctgtgcccacggctgaaagtgaatgatccgttacccgcttgagtacttcgagaagcctagtatcgccttggaatcttcgatgcgttgcgctcagcactctaccccgagtgtagcttaggctgatgagtctgggcattccccaccggtgacggtggcccaggctgcgttggcggcctacccatggctaacgccatgggacgctagttgtgaacaaggtgtgaagagcctattgagctacttaagagtcctccggcccctgaatgcggctaatcccaaccacggagcaggcgccaccaatccaggaggtagcctgtcgtaacgcgtaagtctgtggcggaaccgactactttgggtgtccgtgtttccttttatctctttaatggctgcttatggtgacaatcatagattgttatcataaagcgaattggattggccatccggtgaagtgtaaacacattatttatttgttcattggatttactccattcacccgatttactccaaatataatacatattgtattgttgataagacgttgctactaca

SEQ ID NO: 1104 - DNA, 745 bp, Human poliovirus
  misc_feature 1..745: note = 2, isolate Env2008_E3218 polyprotein gene, complete1
  source 1..745: mol_type = genomic DNA
ttaaaacagctctggggttgttcccaccccagaggcccacgtggcggctagcactccggtattacggtacccttgtgcgcctgttttatactcccttcccccgcaatttagaagcatgaaacccggttcaatagtaaggggtacaaaccagtaccactatgaacaagcacttctgtctccccggtgatattgtatagactgctcacgcggttgaaagcgattgatccgttatccgcttgtgtacttcgagaagcctagtaccaccttcggaacttcgacgcgttgcgctcagcacccgaccccggggtgtagcttgggctgatgagtctggacgatcctcaccggcgacggtggtccaggctgcgttggcggcctacccgtggttcacaccacgggacgctacaagtgaacaaggtgtgaagagcctattgagctacacaagagtcctccggcccctgaatgcggctaatcccaaccacggagcaggcggtcacgaaccagtggctagcttgtcgtaacgcgcaagtctgtggcggaaccgactactttgggtgtccgtgtttcctgttatttttatcatggctgcttatggtgacaatcattgattgttatcataaagcgaattggattggccgtccggaaagtgttttatcacatatactgtttggtgaagctactacattaattctgcctctcactcggttagtcaaacagaactcagacagagtaaaacatcaccaacgca

SEQ ID NO: 1105 - DNA, 745 bp, unidentified
  source 1..745: mol_type = unassigned DNA; note = Human coxsackievirus A21, strain GUT88-10619 polyprotein gene,1 sequence
ttaaaacagcctgtgggttgttcccaccccagaggcccacgcggcggctagtactctggtgctgcggtacctttgtacgcctgttttatacccccgtccccgcaatttagaagcaagaaaacaaagttcaatagtaggtggtgcaatccagcatcgctatgaacaagcacttttgttgccccggtgaggttgcatagactgttcccacggtcaaaagtgaccaatccgttacccgcttttgtacttcgagaagcctagtatcaccttggaatcttcgacgcgttgcgttccgcactcaaccccagggtgtagcttaggtcgatgagtctgggcggaccccaccggcgacggtggcccaggctgcgttggcggcctacctgtggtccaaagccacaggacgctagttgtgaacaaggtgtgaagagcctattgagctacaaaagagtcctccggcccctgaatgcggctaatcctaaccacggagcaggtggtcgcaaaccagtgattaacctgtcgtaatgcgcaagtctgtggcggaaccgactactttgggtgtccgtgtttctctttattttactatggctgcttatggtgacaatcgaggattgttatcataaagcgaattggattggccatccggtgaaagtgaaatacattatctattcaattgttgaattcatccagaacacacccgcaacactacatctgattaaactcgttttgataaccagagaacattaccaca

SEQ ID NO: 1106 - DNA, 745 bp, unidentified
  source 1..745: mol_type = unassigned DNA; note = Human coxsackievirus A20, strain CVA20a-Tulane polyprotein gene,1 sequence
ttaaaacagcctgtgggttgttcccaccccagaggcccacgtggcggctagcactccggtattacggtacccttgtgcgcctgtttttatactcccttccccgtaacttagaagcacaaaaccaagttcaatagaagggggtacaaaccagtaccaccacgaacaagcacttctgtttccccggtgacgttgtatagactgctcacgcggttgaaagcgacgaatccgttatccgcttgtgtacttcgagaagcctagtaccaccttggaatcttcgacgcgttgcgctcggcactctaccccagagtgtagcttaggctgatgagtctgggcattcctcatcggcgacgatggcccaggctgcgttggcggcctacctatggctaacgccataggacgctagttgtgaacaaggtgtgaagagcctattgagctacacaagagtcctccggcccctgaatgcggctaatcctaaccatggagcaggagatcacaaaccagtggtattcctgtcgtaatgcgcaagtccgtggcggaaccgactactttgggtgtccgtgtttccttttatttttatcatggctgcttatggtgacaatcattgattgttatcataaagcgaattggattggccatccggtgaaaataagatttattatttacttgtttgttggattcactccgctaaacacattcactccaggtatcatctctatagtgattgaaattaggcaattacatcaca

SEQ ID NO: 1107 - DNA, 745 bp, Human enterovirus sp.
  misc_feature 1..745: note = 102, complete genome.1
  source 1..745: mol_type = genomic DNA
ttaaaacagctctggggttgttcccaccccagaggcccacgtggcggctagtactctggtatcacggtacctttgtacgcctgttttacatcccctcccccacgtaactttagaagcaattcaacaagttcaatagagggggtacaaaccagtatcaccacgaacaagcacttctgtttccccggtgattttacataagctgtgcccacggctgaaagtgaatgatccgttacccgctcgagtacttcgaaaagcctagtatcgctttgggatcttcgacgcgttgcgctcagcactctaccccgagtgtagcttaggctgatgagtctgggcattccccatcggcgacgatggcccaggctgcgttggcggcctacccatggctaacgccatgggacgctagttgtgaacaaggtgtgaagagcctattgagctactcgagagtcctccggcccctgaatgcggctaatcccaaccacggatcaggtgcctccaacccaggaggtggcctgtcgtaacgcgcaagtctgtggcggaaccgactactttgggtgtccgtgtttccttttatcttttaaatggctgcttatggtgacaatcatagattgttatcataaagcgaattggattggccatccggtgaaatacaaacacattatttacttgtttgttggatttactccgctcacacagcttactcctaagataatatttattgtattgctggtaaggagacactattata

SEQ ID NO: 1108 - DNA, 745 bp, Human echovirus
  misc_feature 1..745: note = 11,strain D207, complete genome.1
  source 1..745: mol_type = genomic DNA
tttaaaacagcctgtgggttgttcccacccacagggcccactgggcgccagcactctggtattgcggtaccttagtgcgcctgttttatatacccatcccccaaacgtgatttagatgcatgttaacgaagaccaatagtaagcgcagcacaccagctgtgttccggtcaagcacttctgttaccccggactgagtatcaataagctactcacgtggctgaaggagaaaacgttcgttacccggccaattacttcgagaaacccagtaacaccatgaaggttgcgcagtgtttcgctccgcacaaccccagtgtagatcaggtcgatgagtcaccgcattccccacgggtgaccgtggcggtggctgcactggcggcctgcccatggggtaacccatgggacgcttcaatactgacatggtgcgaagagtctattgagctaattggtagtcctccggcccctgaatgcggctaatcctaactgcggagcagatacccacacgccagtgggcagtctgtcgtaacgggcaactctgcagcggaaccgactactttgggtgtccgtgtttctctttatccttatactggctgcttatggtgacaattgggagattgttaccatatagctattggattggccatccagtgacaaatagagcaatcgtgtatttgtttgttggtttcgtaccattaaattacaaggtcataaacaccctcaatcttattatagcattcaatacaacaaa

SEQ ID NO: 1109 - DNA, 745 bp, Human enterovirus sp.
  misc_feature 1..745: note = 79,strain USA/CA79-10384, complete genome.1
  source 1..745: mol_type = genomic DNA
ttaaaacagcctgtgggttgtacccacccacagggcccactgggcgctagcacactggtatcccggtacctttgtgcgcctgttttataccccctcccccatatcgtaacatagaagcaatgcactcccggtcaatagctgacgtgacaaaccagttgcgttttgaccaagcacttctgtaaccccggaccgagtatcaataagctgcttgcgcggctaaaggagaaaccgtccgttacccggctaactacttcgagaaacctagtaccaccatgaacgttgcggagtgtttcgctcagcacttcccccgtgtagatcaggtcgatgagccaccgcattccccacgggcgaccgtggcggtggctgcgttggcggcctgcctgtggggcaacccacaggacgctctaatatagacatggtgtgaagagtctattgagctagttagtagtcctccggcccctgaatgcggctaatcctaactgcggagcacatacccctaatccaaggggcagtgtgtcgtaacgggcgactctgcagcggaaccgactactttgggtgtccgtgtttccttttatcttttatattggctgcttatggtgacaattgcagagttgttaccatatagcttttggattggccatccggtgagcaatagagctgttatttatcaatttgttggattcgtcgcactcaaccacacagtctttagaacactcggatttatcttgacccttaatacgagaaa

SEQ ID NO: 1110 - DNA, 745 bp, Echovirus
  misc_feature 1..745: note = E30,strain 13-311, complete genome.1
  source 1..745: mol_type = genomic DNA
ttaaaacaagcctgtgggttgaacccactcacagggcccaatgggcgctagcacactggtatcacggtacctttgtgcgcctgttttatccaccctttccccgaacgaaacttagaagtttgaattaaacggtcaataggaaacccagtacaccaactgggctgtgaccaagcacttctgtgaccccggaccgagtatcaataagctactcacgtggctgaaggagaaaacgttcgttacccggccaattacttcgagaaacttagtaccaccatgaaagttgcgcagcgtttcgctccgcacgaccccagtgtagatcaggctgatgagtcaccgcgtaccccacgggtgaccgtggcggtggctgcgttggcggcctgcccttggggcaacccaagggacgcttcaatactgacatggtgcgaagagtctattgagctaattggtagtcctccggcccctgaatgcggctaatcccaactgcggagcagatacccacataccagtgggcagtctgtcgtaatgggcaactctgcagcggaaccgactactttgggtgtccgtgtttcctttatttcttacactggctgcttatggtgacaattgagagattgttgccatatagctattggattggccatccggtgtctaatagagcaattatctacctttttgttggatttattccacttaactataaagcactcaaaacacttatatacattgtagatctcaacacagcaaa

SEQ ID NO: 1111 - DNA, 745 bp, Enterovirus sp.
  misc_feature 1..745: note = B73,isolate 088/SD/CHN/04, complete genome.1
  source 1..745: mol_type = genomic DNA
tttaaaacagcctgtgggttgttcccacccacagggcccactgggcgctagcacactggtatcacggtacctttgtgcgcctgttttatacacccccccctacatcgtaatttagaagtccaagccaaacggtcaatagacaacccagtatgccaactgggtcccgaccaagcacttctgttgccccggaccgagtatcaataagctgcttgcgcggctgaaggagaaagcgttcgttacccggccaattacttcgagaaacccagtaacaccatggaagttgcgtggcgtttcgctccgcacaaccccagtgtagatcaggtcgatgagtcaccgcaaccctcacgggcgaccgtggcggtggctgcgttggcggcctgcccatgggacaacccatgggacgcttcaataccgacatggtgcgaagagtctattgagctaattggtattcctccggcccctgaatgcggctaatcctaactgcggagcagacacccacatgccagtgggcagtctgtcgtaacgggaaactctgcagcggaaccgactactttgggtgaccgtgtttcctattatccttattctggctgcttatggtgacaattgaaagattgttaccatatagctattggattggccatccggtgtctaatagagctattatatacctctttgttggatttataccacttaacaaagtaaactaccagactctgtgctatatcattggattgaacacggtgaa

SEQ ID NO: 1112 - DNA, 745 bp, unidentified
  source 1..745: mol_type = unassigned DNA; note = Human coxsackievirus B5, isolate 20CSF, complete genome.1 sequence
ttttaaaacaggctgtgggttgttcccacccacagggcccattgggcgccagcacactggtattacggtacctttgtgcgcctgttttatccaccccctccccaatgtaacgtagaagcacaaaccaagtggtcaatagatggctcagtacaccaactgggcttagaccaagcacttctgttaccccggactgagtatcaataggctgctcacgcggctgaaggagaaaacgttcgttacccgaccaactacttcgagaagcctagtaccatcatgaaggatgcgcagtgtttcgttcagcacaaccccagtgtagatcaggccgatgagtcaccgcaatccccacgggtgaccgtggcggtggctgcgctggcggcctgcccatggggcaacctatgggacgcttcaatttcgacatggtgcgaagagcctattgagctagttggtagtcctccggcccctgaatgcggctaatcccaactgcggagcagacacccacaaaccagtgggcagtttgtcgtaacgggcaactctgcagcggaaccgactactttgggtgtccgtgtttccttttatctatatattggctgcttatggtgacaattgagggattgttgccatatagctattggattggccatccggtaacaaacagagctattatttacctttttgttggcttcgtgccgttgaactttaaagttattaaaaccatatacttcatcttgacactcaacacagcaaa

SEQ ID NO: 1113 - DNA, 745 bp, unidentified
  source 1..745: mol_type = unassigned DNA; note = Human coxsackievirus B3, strain A103/KM/09, complete genome.1 sequence
aaaacaagcctgtgggttgctcccggccccacaggggcccactgggcgctagcacactggtattgcggtacccttgtgcgcctgttttatccaccctccccaaccgtaatttagaagcacgaacaacgtggtcaacaggcaacccagtataccaactgggtctcgaccaagcacttctgtcaccccggactgagtatcaataagctgctcgcgtggctgaaggagaaaacgttcgttacccggccaattacttcgagaaacctagtatcaccatggaagttgcgcagtgtttcgctccgcacaaccccagtgtagatcaggtcgatgagtcaccgcaaccctcacgggtgaccgtggcggtggctgcgctggcggcctgcccatggggcaacccatgggacgcttcaatactgacatggtgcgaagagtctattgagctaattggtaatcctccggcccctgaatgcggctaatcctaactgcggagcagatatccacacaccagtggacagtctgtcgtaatgggcaactctgcagcggaaccgactactttgggtgtccgtgtttccttttattctttttattggctgcttatggtgacaattgagagattgttaccatatagctattggattggccatccggtgagcaacaggtcaattgtattcctctttgttggatttgtgccattaaactataataactacaacaccctgctttacattatccatttaaacacacagaa

SEQ ID NO: 1114 - DNA, 745 bp, Coxsackievirus
  misc_feature 1..745: note = A24 clone V19C polyprotein gene, partial cds.1
  source 1..745: mol_type = genomic DNA
gctctggggttgttcccaccccagaggcccacgtggcggctagtactcccggtatcacggtacccttgtacgcctgttttatactccctttcccccgcaacttagaagattatgagaatccacgttcaacaggaagggggtacaaaccagtaccaccacgaacaagcacttctgtttccccggtgaggttgtatagactgtacccacggttgaagacgactgatccgttacccgctctagtacttcgagaagcttagtaacaccttggaatcatcgatgcgttgcgttcaacactcaaccccagagtgtagcttaggctgatgagtctggacaatcctcaccggtgacggtggtccaggctgcgctggcggcctacctgtggtccaaaaccacaggacgctagatgtgaacaaggtgcgaagagcctattgagctactagagagtcctccggcccctgaatgcggctaatcccaaccacgaagcaagtgctcacgatccagtgagtggcttgtcgtaacgcgtaagttcgtggcggaaccgactactttgggtgtccgtgtttcctttttaactttatatggctgcttatggtgacaatcattgattgttatcataaagcgatttggattggccatccagtgagagcgagaacaactacttatttgctcgttggatttgctccttcgacaagctacattttagatatcattctcattgtattcttgatcagaaagcaatatcata

SEQ ID NO: 1115 - DNA, 745 bp, Human enterovirus sp.
  misc_feature 1..745: note = B, isolate LR11F7 polyprotein gene, partial cds.1
  source 1..745: mol_type = genomic DNA
ttaaaacagcttgggggtgtttcccacccacagggcccactgggcggtagcactctggtattacggtacctttgtgcgccttttttatatccccacccccgattgtaacttagaagaaataattcacgaccaatagtaggcgtggcgcgccagccatgttttggtcaagtacttctgtttccccggatcgagtatcaataggctgtccacacggctgaaggagaaagcgtccgttatccggccaattacttcgagaaacctagtaccaccatgaaagttgcgcagtgtttcgctccgcacaaccccagtgtagatcaggtcgatgagtcaccgcttccctcacgggcgaccgtggcggtggctgcgctggcggcctgcccatggggaaacctatgggacgctccaatactgacatggtgcgaagagtctattgagctaattggtagtcctccggcccctgaatgcggctaatcccaactgcggagcagatacccacatgccagtgggcagtctgtcgtaacgggcaactctgcagcggaaccgactactttgggtgaccgtgtttccttttattcctatactggctgctaatggtgacaattgaaagattgttaccatatagctattggattggccatccggtaactaacagagcgattgtttaccaatttgttggttttgtaccactagactacaaggtcttaaacaccttaaactatatcttgacactcaacacattgaaaag

SEQ ID NO: 1116 - DNA, 746 bp, Coxsackievirus
  misc_feature 1..746: note = A10, strain 09-1996-1, complete genome.1
  source 1..746: mol_type = genomic DNA
gtgctcttccgatctgtgggttgcacccacccacagggcccactgggcgttagcactctggtaccatggtacccttgtgcgcctgttttatcaccctaacccaacttgaaacttagaagcaatacacaatcgaccaatagtaggtgtggcgcaccagccgcatcttggtcaagcacttctgtttccccgggttgagtatcaataagctgtccacacggctgaaggagaaaacgcccgttatccggccaactacttcgagaaacctagtaccactatgaacgttgcaaggcgtttcgctcagcacttcccccgtgtagatcaggtcgatgagtcaccgcattccccacgggcgaccgtggcggtggctgcgttggcggcctgcctatgggttaacccataggacgccttaatactgacatggtgcgaagagtctattgagctagttggtagtcctccggcccctgaatgcggctaatcctaactgcggagcacatactcacaacccagtgagcggtgtgtcgtaatgggtaaccctgcagcggaaccgactactttgggtgtccgtgtttccttttattcttacattggctgcttatggtgacaatcatagaattgttaccatatagctattggattggccatccgatttctaacagagctattatttacctgtttgttggatttactccgttgacatacaaatccctaaacactttgtgctttatcttgaacttgaacgcacgaaa

SEQ ID NO: 1117 - DNA, 746 bp, Coxsackievirus
  misc_feature 1..746: note = A10, strain 16-2871-1, complete genome.1
  source 1..746: mol_type = genomic DNA
tgctcttccgatctgtgggttgtacccacccacagggcccattgggcgctagcactctggtaccatggtacccttgtgcgcctgttttatcaccccgcccctacctgaaacgtagaagctataatcaatcggccaatagtgggtgtggcataccagccacatcttggtcaagcacttctgtttccccgggttgagtatcaatatgctgttcacacggctgaaggagaaaacacccgttacccggccaactacttcgagaagcttagtaccgccatgaacattgcaaggcgtttcgctcagcactttccccgtgtagatcaggccgatgagtcaccgcattccccacgggcgaccgtggcggtggctgcgttggcggcctgcctgtgggttaacccacaggacgccttaatatagacatggtgcgaagagcctattgagctagttggtattcctccggcccctgaatgcggctaatcctaactgtggagcacatactcacaagccagtgggtggtgtgtcgtaacgggcaactctgcagcggaaccgactactttgggtgtccgtgtttcctttttatccttatattggctgcttatggtgacaatcagagaattgttaccatatagctattggattggccatccggtgtgcaacagagctattgtgtatttgtttgttggatttgtcccactatcgtatacacccctcaacaccttgtattttattttgagattgaacgcaagaaa

SEQ ID NO: 1118 - DNA, 746 bp, Coxsackievirus
  misc_feature 1..746: note = A4, isolate CV-A4/P1033/2013/China, complete genome.1
  source 1..746: mol_type = genomic DNA
tttaaaacagcctgtgggttgtacccacttgcagggcccactgggcgctagcactctgattctgcgggatctttgtgcgcctgttttataaccccacccctactcgtaacttagaagtaacacacaccattgatcaacagcaagcgtggcgcaccagccacgtttagatcaagcacttctgtttccccggactgagtatcaatagactgctcacgcggttgaaggagaaatcgttcgttacccggctaactacttcgagaaacctagtagcaccattgaaactgcagagtgtttcgttcagcactttccccgtgtagatcaggccgatgagtcactgcaatccccacgggcgaccgtggcagtggctgcgttggcggcctgcctatgggctttcccataggacgctctaatgtggacatggtgtgaagagtctattgagctagttagtagtcctccggcccctgaatgcggctaatcctaactgcggagcgcataccctcaatccagggggtggtgcgtcgtaacgggcaactttgcagcggaaccgactactttgggtgtccgtgtttccttttattcttatattggctgcttatggtgacaattgagaaattgttaccatatagctattggattggccatccagtgtctaacagagcagttgtatacttatttgctggattcgttccactatcatacacatctattaataccttatattatattataagattgaacgcaaggaa

SEQ ID NO: 1119 - DNA, 746 bp, Coxsackievirus
  misc_feature 1..746: note = A4, isolate CV-A4/2016/HFMD/305, complete genome.1
  source 1..746: mol_type = genomic DNA
tttaaaacagcctgtgggttgtacccacctacagggcccactgggcgctagcactctgattccacggaatccttgtgcgcctgttttatatcccctccccaagttgcaacttagaagcattgcactacaatgatcagtagcaggcgtggcgctccagccatgtctcgatcaagcacttctgtttccccggaccgagtatcaatagactgctaacgcggttgaaggagaaaacgttcgttatccggctaactacttcgagaaacctagtagcaccatcgaagctgcggggcgtttcgctcagcacttcccccgtgtagatcaggtcgatgagtcactgcaatcctcacgggcgaccgtggcagtggctgcgttggcggcctgcctatggggcaacccataggacgcttcaaagtggacatggtgtgaagagtctattgagctagttagtagtcctccggcccctgaatgcggctaatcctaactgcggagcacataccttcaatccaggaggtagtgtgtcgtaacgggcaactctgcagcggaaccgactactttgggtgtccgtgtttccttttattctcttattggctgcttatggtgacaattgaagaattgttaccatatagctattggattggccatccagtgtctaacagagcaattgtgtacttatttgttggttttgttcctttgtctcacacgtcccttagtactttgtattacattataaaactgaattcggagag

SEQ ID NO: 1120 - DNA, 746 bp, Enterovirus 7sp.
  misc_feature 1..746: note = 1 polyprotein gene, complete cds.1
  source 1..746: mol_type = genomic DNA
tttaaaacagcctgtgggttgcacccacccacagggcccactgggcgctagcactctggtactgaggtacctttgtgcgcctgtttttactccccttcccccgaagtaacttagaagctgtaaatcaacgatcaatagcaggtgtggcacaccagtcataccttgatcaagcacttctgtttccccggactgagtatcaataggctgctcgcgcggctgaaggagaaaacgttcgttacccgaccaactacttcgagaagcttagtaccaccatgaacgaggcagggtgtttcgctcagcacaaccccagtgtagatcaggctgatgagtcactgcaacccccatgggcgaccatggcagtggctgcgttggcggcctgcccatggagaaatccatgggacgctctaattctgacatggtgtgaagagcctattgagctagctggtagtcctccggcccctgaatgcggctaatcctaactgcggagcacatgctcacaaaccagtgggtggtgtgtcgtaacgggcaactctgcagcggaaccgactactttgggtgtccgtgtttccttttattcctatattggctgcttatggtgacaatcaaagagttgttaccatatagctattggattggccatccggtgtgcaacagggcaattgtttacctatttattggttttgtaccattatcactgaagtctgtgatcactctcaaattcattttgaccctcaacgcaatcaaac

SEQ ID NO: 1121 - DNA, 746 bp, Human enterovirus sp.
  misc_feature 1..746: note = 71, isolate HN1360/HN/CHN/2011, complete genome.1
  source 1..746: mol_type = genomic DNA
ttttaaaaaccagcctgtgggttgcacccactcacagggcctactgggcgcaagcactctggtacctcggtacctttgtgcgcctgttttacaccccccccctagtgaaacttagaagcagcaaaccacgatcaatagcaggcataacgctccagttatgtcttgatcaagcacttctgtttccccggactgagtatcaatagactgctcgcgcggttgaaggagaaaacgttcgttatccggctaactacttcggaaaacctagtaacaccatgaaagttgcggagagcttcgttcagcactcccccagtgtagatcaggtcgatgagtcaccgcattccccacgggcgaccgtggcggtggctgcgttggcggcctgcccatggggtaacccatggggcgctctaatacggacatggtgtgaagagtctactgagctagttagtagtcctccggcccctgaatgcggctaatcccaactgcggagcacacgcccacaagccagcgggtagtgtgtcgtaacgggtaactctgcagcggaaccgactactttgggtgtccgtgtttccttttatctttatattggctgcttatggtgacaattaaagaattgttaccatatagctattggattggccatccggtgtgtaatagagcaattatttacctatttattggttttgtaccattaaccttgaattctgtgaccacccttaattatattttgacccttaacacagctaaac

SEQ ID NO: 1122 - DNA, 746 bp, Human enterovirus sp.
  misc_feature 1..746: note = 71, strain 3149 polyprotein gene, complete cds.1
  source 1..746: mol_type = genomic DNA
ttaaaacagcctgtgggttgttcccacccacagggcccactgggcgctagcacactgattctacggaaactttgtgcgcctgttttatgtccctccccctaatatgtaacttagaaatttagtacacccatgaccaatagtaggcgtgacgcaccagtcacgtcttggtcaagcacttttgtttccccgggctgagtatcaatagactgcttacgcggttgaaggagaaaacgttcgttacccggctaactacttcgagaaacctagtaacaccatgaaagttgcagggtgtttcgctcagcacttcccccgtgtagatcaggtcgatgagtcactgcaaaccccacgggcgaccgtggcagtggctgcgttggcggcctgcccatggggtaacccatgggacgctctgatactgacatggtgcgaagagtctattgagctagttagtagtcctccggcccctgaatgcggctaatcctaactgcggagcacacaccctcaacccagggggcggtgtgtcgtaacgggcaactctgcagcggaaccgactactttgggtgtccgtgtttccttttatctctattatggctgcttatggtgacaattgaagaattgttaccatatagctattggattggccatccggtgtttaacagagcaattgtatacctatttgttggatttgtccctttgtcacacacatctctcaataccttatactacattataaagttgaatacaggaac

SEQ ID NO: 1123 - DNA, 746 bp, Enterovirus sp.
  misc_feature 1..746: note = A71, isolate NER-13-194, complete genome.1
  source 1..746: mol_type = genomic DNA
ttaaaacagcccgtgggttgtacccactcacggggtccactggacgctagcactctggttccacggaacctttgtgcgcctgttttatacccctccccaacttgtaacgtagaagcagtacctaatatcgatcaatagtaggtgtggcgcaccagccatatcttgatcaagcacttctgtctccccggaccgagtatcaatagactgctcacgcggttgaaggagaaagcgttcgttacccggctaactacttcgagaaacctagtagcaccatggaagctgcggagtgtttcgctcagcacttcccccgtgtagatcaggtcgatgagtcactgcaatcctcacgggtgaccgtggcagtggctgcgttggcggcctgcctgtggggcaacccacaggacgctctaatgtggacatggtgcgaagagtctattgagctagttagtagtcctccggcccctgaatgcggctaatcctaactgcggagcgcatgccctcaatccagagggtagtgcgtcgtaacgggcaactctgcagcggaaccgactactttgggtgtccgtgtttccttttactcttatattggctgcttatggtgacaattacggaattgttaccatatagctattggattggccatccggtgtgcaatagagctatcatttacctatttgttggatttgtaccactgtcattaaagtccataaccacactcaattatatactcactctcaatataactaaac

SEQ ID NO: 1124 - DNA, 746 bp, Human enterovirus sp.
  misc_feature 1..746: note = 71 polyprotein gene, complete cds.1
  source 1..746: mol_type = genomic DNA
ttaaaacagctgtgggttgttcccactcacagggcccactgggcgctagcactctgattttacgaaatccttgtgcgcctgttttatatcccttccctaattcgaaacgtagaagcaatgcgcaccactgatcaatagtaggcgtaacgcgccagttacgtcatgatcaagcatatctgttcccccggactgagtatcaatagactgcttacgcggttgaaggagaaaacgttcgttatccggctaactacttcgagaagcccagtaacaccatggaagctgcagggtgtttcgctcagcacttcccccgtgtagatcaggtcgatgagccactgcaatccccacaggtgattgtggcagtggctgcgttggcggcctgcctatggggagacccataggacgctctaatgtggacatggtgcgaagagcctattgagctagttagtagtcctccggcccctgaatgcggctaatcctaactgcggagcacatgccttcaacccagagggtagtgtgtcgtaatgggcaactctgcagcggaaccgactactttgggtgtccgtgtttctttttattcttatattggctgcttatggtgacaattacagaattgttaccatatagctattggattggccatccggtgtgtaatagagctgttatatacctatttgttggctttgtaccactaactttaaaatctataactaccctcaactttatattaaccctcaatacagttgaac

SEQ ID NO: 1125 - DNA, 746 bp, Coxsackievirus
  misc_feature 1..746: note = A16 gene for polyprotein,isolate1
  source 1..746: mol_type = genomic DNA
ttaaaacagcctgtgggttgttcccacccacagggcccattgggcgctagcacactgactttgcggagtctttgtgcgcctgttttataacccttcccccaagtagcaacttagaagtattgcacaaccgcggccagtagtgggcgtgacgcgccagtcacgtcttggtcaagcacttctgtatccccggactgagtatcaatagactgctcgcgcggttgaaggagaaaacgttcgttatccggctaactacttcgggaaacctagtagcaccttggaagttgcagagtgtttcgctcagcactttccccgtgtagatcaggtcgatgagccactgtaaaccccacgggcgaccgtgacagtggctgcgttggcggcctgcccatggggtaacccatgggacgctctaatacagacatggtgtgaagagtctactgagctagttagtagtcctccggcccctgaatgcggctaatcctaactgcggagcacacaccctcaatccagggggcggtgtgtcgtaatgggtaactctgcagcggaaccgactactttgggtgtccgtgtttccttttattcctttactggctgcttatggtgacaattgaaaagttgttaccatatagctattggattggccatccggtgtctaacagagctattgtctacttgtttattggatacgtccctcttaatctcaaggtcattcgaactcttgattatatattgctccttaattataggaa

SEQ ID NO: 1126 - DNA, 746 bp, Coxsackievirus
  misc_feature 1..746: note = A7 gene for polyprotein, polyprotein region,strain1
  source 1..746: mol_type = genomic DNA
tttaaaacagcctgtgggttgcacccacccacagggcccactgggcgccagcactctgattccgcggaatctttgtgtgcctgttttatcacccttcccccaaacttgcaacttagaagcagcacttcactgaccaatagcaggcgtggcgcaccagccatgtctaggtcaagcacttctgtttccccggactgagtatcaataggctgctcacgcggctgaaggagaaaacgttcgtcatccggctaactacttcgagaaacctagtagcaccggtgaagctgcagagtgtttcgctcagcacttcccccgtgtagatcaggtcgatgagtcactgcactccccacgggcgaccgtggcagtggctgcgctggcggcctgcctatgggtcaacccataggacgctctaatgtggacacggtgcgaagagtctattgagctagttagtagtcctccggcccctgaatgcggctaatcctaactgcggagcacatgcccccgaaccagggggtggtgtgtcgtaacgggcaactctgcagcggaaccgactactttgggtgaccgtgtttccttttgttcttattatggctgcttatggtgacaattgaagaattgttaccatatagctattggattggccatccagtgtctaacagagctatcatatacctatttgttggattcgttctattgtcatacacatcactcaatacattacattttattgtgagattaaatacaagaaa

SEQ ID NO: 1127 - DNA, 746 bp, Coxsackievirus
  misc_feature 1..746: note = A7 gene for polyprotein, polyprotein region,strain1
  source 1..746: mol_type = genomic DNA
tttaaaacagcctgtgggttgtacccacccatagggcccactgggcgccagcactctgattctgcggaatctttgtgcgcctgttttatcaccctctccctaaattcgtaacttagaagcaacactctactgaccaatagcgggcgtggcgcaccagccatgtctaggtcaagcacttctgtctccccggactgagtatcaataggctgctcacgcggctgaaggagaaaacgttcgtcatccggctaactacttcgagaagcctagtagcaccgttgaaactgcagagtgtttcgctcagcactttccccgtgtagatcaggtcgatgagtcactgcactccccacgggcgaccgtggcagtggctgcgttggcggcctgcctatgggtcaacccataggacgctctaatgtagacacggtgcgaagagtctatcgagctagttagtagtcctccggcccctgaatgcggctaatcctaactgcggagcacatgcccccgagccagagggtggtgtgtcgtaacgggtaactctgcagcggaaccgactactttgggtgtccgtgtttccttttattcttgatatggctgcttatggtgacaattgaagaattgttaccatatagctattggattggccatccggtgtctaacagagctattgtatacctgtttgttggatttgttccattatcacaaacatcactcaacacactacacttcattgtgagattgaacgcaagaaa

SEQ ID NO: 1128 - DNA, 746 bp, Coxsackievirus
  misc_feature 1..746: note = A2,isolate HeN13-6/HeN/CHN/2013, complete genome.1
  source 1..746: mol_type = genomic DNA
ttaaaacagctctggggttgtacccacccgcagggcccactgggcgctagcacactgattctacggaacctttgtgcgcctgttttatatccctcccccgaaacagcaacttagaagttgaacatttacacgaccaatagtgggcatggcgcgccagccatgtcttggtcaagcactcctgtttccccggactgagtatcaataggctgctcacgtggctgaaggagaaagagttcgttacccggctaactacttcgagaaacttagtaacaccatgaatgttgcagagtgtttcgctcagcacttcccccgtgtagatcaggctgatgagccactgcaaaccccacgggcgaccgtggcagtggctgcgttggcggcctgcctatggggcaacccataggacgctctaatacagacatggtgcgaagagtctattgagctagttagtattcctccggcccctgaatgcggctaatcccaactgcggagcacatgccctcaatccagagggtggtgtgtcgtaacgggcaactctgcagcggaaccgactactttgggtgtccgtgtttccttttattcttatattggctgcttatggtgacaattgaaagattgttaccatatagctattggattggccacccggtgactaacagagctttaatttaccaattcactgggtttgtacctttatcacctacagtttatcagactttggtgtatctgttatatctcaacagtaagaa

SEQ ID NO: 1129 - DNA, 746 bp, Enterovirus C
  misc_feature 1..746: note = isolate Brunenders, complete genome.1
  source 1..746: mol_type = genomic DNA
ttaaaacagctctggggttgttcccaccccagaggcccacgtggcggccagtacaccggtaccacggtacccttgtacgcctgttttatactcccctccccgtaaactagaagcacgaaacacaagttcaatagaagggggtacagaccagtaccaccacgaacaagcacttctgttcccccggtgaggtcacatagactgtccccacggtcaaaagtgactgatccgttatccgctcacgtacttcggaaagcctagtaccaccttggaatctacgatgcgttgcgctcagcactcgaccccggagtgtagcttaggctgatgagtctggacgttccccactggtgacagtggtccaggctgcgttggcggcctacctgtggtccaaaaccacaggacgctagtagtgaacaaggtgtgaagagcccactgagctacctgagaatcctccggcccctgaatgcggctaatcccaaccacggagcaggtaatcgcaaaccagcggtcagcctgtcgtaacgcgtaagtctgtggcggaaccgactactttgggtgtccgtgtttccttttatttttatggtggctgcttatggtgacaatcatagattgttatcataaagcaaattggattggccatccggagtgagctaaactatctatttctctgagtgttggattcgtttcacccacattctgaacaatcagcctcattagtgttaccctgttaataagacgatatcatcacg

SEQ ID NO: 1130 - DNA, 746 bp, Human enterovirus sp.
  misc_feature 1..746: note = 96,strain BAN00-10488, complete genome.1
  source 1..746: mol_type = genomic DNA
ttaaaacagctctggggttgttcccaccccagaggcccacgtggcggccagtactccggtatcacggtacccttgtacgcctgttttatacccccttccccgcaacttagaagctttaaattcaagttcaatagaaggtggtacaaaccagtatcgccacgaacaagcacttctgttgccccggtgaaattgcataagctgtccccacggctgaaggcgattgatccgttacccgctcttgtacttcgagaagcctagtaccaccttggaattttcgatgcgttgcgctcagcactcaaccccagagtgtagcttaggctgatgagtctggacataccccaccggcgacggtggtccaggctgcgttggcggcctacctgtggcccaaagccacaggacgctagttatgaacaaggtgtgaagagcctattgagctacaagagagtcctccggcccctgaatgcggctaatcctaaccacggatcaggcgattgcaacccagcaattagcctgtcgtaatgcgcaagtctgtggcggaaccgactactttgggtgtccgtgtttctttttattcttacattggctgcttatggtgacaatcttagattgttatcataaagcaagttggattggccatccggtgaaagtcaaagttactatctatttatctgttggattttaccctaagaccactcatttacctgacttaattagaataattatactacttggaaattactatcaca

SEQ ID NO: 1131 - DNA, 746 bp, unidentified
  source 1..746: mol_type = unassigned DNA; note = Human coxsackievirus A11,isolate CV-A11_66990,, complete genome.1 sequence
ttaaaacagctctggggttgttcccaccccagaggcccacgtggcggctagtacaccggtatcacggtacccttgtacgcctgttttatattcccttccccgtaacttagaagcaataaactcaagttcaatagaagggggtgcaaaccagcaccaccacgaacaagcacttctgtttccccggtgagattgcatagactgtccccacggttgaaagcgattgatccgttaaccgctcttgtacttcgagaagcctagtaccatcctggaatctacgatgcgttgcgctcagcactcaatcccagagtgtagcttaggtcgatgagtctggatactccccaccggcgacggtgatccaggctgcgttggcggcctacctgtggtccaaagccacaggacgctagtagtgaacagggtgtgaagagcctattgagctacatgagagtcctccggcccctgaatgcggctaatcccaaccacggagcaggtggctacaacccagtaactggcctgtcgtaacgcgcaagtctgtggcggaaccgactactttgggtgtccgtgtttccttttatttttataatggctgcttatggtgacaatcattgattgttatcataaagcgacttggattggccatccagcgagaatcagatcgattatttatttgtttgttggattcaccaccttatctacatacacaccaaacttaattagaatcactttattgattaggtatcattatcacg

SEQ ID NO: 1132 - DNA, 746 bp, unidentified
  source 1..746: mol_type = unassigned DNA; note = Human coxsackievirus A11 strain Belgium-1, complete genome.1 sequence
ttaaaacagctgtggggttgttcccaccccagaggcccacgtggcggctagtactccggtatcacggtacccttgtacgcctgttttatactccctcccccgtaacttagaagcaatcaaatcaagttcaataggagggggtacaaaccagtaccaccacgaacgagcacttctgtttccccggtgaagttgcatagactgttaccacggttgaaagcgaccgatccgttatccgctcatgtacttcgagaagcctagtacctccttggaatcttcgatgcgttgcgctcagcactcaaccccggagtgtagcttaggctgatgagtctggacagccctcaccggcgacggtggtccaggctgcgttggcggcctacctgtggcccaaagccacaggacgctagttgtgaacaaggtgtgaagagcctattgagctacatgagagtcctccggcccctgaatgcggctaatcctaaccacggagcaggcgatcgcaaaccagcaattagcctgtcgtaacgcgaaagtctgtggcggaaccgactactttgggtgaccgtgtttctcttatttttattcatggctgcttatggtgacaatcatagattgttatcataaagcgagttggattggccatccggtaaaagtcaagtatatcatttacttgtttgtaggatttattcctttgaacgtccatttactcaatcttatcagagtcacattactagtaagatctcactatcaca

SEQ ID NO: 1133 - DNA, 746 bp, Human enterovirus sp.
  misc_feature 1..746: note = 99,strain BAN01-10582 polyprotein gene, complete1
  source 1..746: mol_type = genomic DNA
ttaaaacagcctgtgggttgttcccaccccagaggcccacgtggcggctagtactctggtatcacggtacctttgtacgcctgttttatatcccttcccccgtaacttagaagctttgtaccaacaagttcaatagaaggggtacaaaccagtaccaccacgaacaagcacttctgtttccccggtgcgatgacatagactgtacccacggtcaaaagtcaccaatccgttacccgctttggtacttcgagacgcctagtattgccttggaattctcgatgcgttgcgctcaacactcgaccctggagtgtagcttaggctgatgagtctgggcattccccaccggtgacggtggcccaggctgcgttggcggcctacccatagctattgctatgggatgctagagttgaacaaggtgtgaagagccaattgagctactaaagagtcctccggcccctgaatgcggctaatcccaaccacggatcaagtgcgtgcaacccagcacgtagcttgtcgtaatgcgcaagtctgtggcggaaccgactactttgggtgtccgtgtttccttttatttttatcgtggctgcttatggtgacaatcatagattgttatcataaagcgaattggattggccatccagtgagaatcaagtcgctgatatatttatttgttggatttaccaaaatcaaccacagaacaccagttttaattcgtattgtgttactaattagatttcactactaca

SEQ ID NO: 1134 - DNA, 746 bp, Human enterovirus sp.
  misc_feature 1..746: note = 99,strain BAN04-10697 polyprotein gene, complete1
  source 1..746: mol_type = genomic DNA
ttaaaacagcctgtgggttgttcccaccccagaggcccacgtggcggctagtactccggtattacggtacccttgtacgcctgttttatacccccttcccccgcaacttagattcaaacaaacacaagttcaataggagggggtacaaaccagtaccaccacgaacaagcacttctgtttccccggtgaggttgtatagactgttaccacggttgaaagcgactgatccgttatccgccttagtacttcgagaagcctagtatcaccttggaatctccgatgcgttgcgctcagcaatgtacccccattgtagcttaggccgatgagtctgggcattccccaccggcgacggtggcccaggctgcgttggcggcctacctatggtgaaaaccataggacgctagttgtgaacaaggtgcgaagagcctattgagctactaaggagtcctccggcccctgaatgcggctaatcccaaccacggagcaggtagttgcaaaccagcaaccagcctgtcgtaatgcgcaagtctgtggcggaaccgactactttgggtgtccgtgtttccttttattcttataatggctgcttatggtgacaatcatagattgttatcataaagcgaattggattggccatccggtgagaatcagatcgatcatttacctgtttgtcggatttaccccattggcatcgcacacgagtgacctaatcagaatagtgttgttgataaggtactactatcaca

SEQ ID NO: 1135 - DNA, 746 bp, Human poliovirus 1
  misc_feature 1..746: note = isolate CHN-Hebei/91-2, complete genome.1
  source 1..746: mol_type = genomic DNA
ttaaaacagctctggggttgttcccaccccagaggcccacgtggcggccagtactctggtactacggtacctttgtacgcctgttttatactccctcccccatgcaacattagaagcaattcacaaagttcaatagagggggtacaaaccagtaccaccacgaacaagcacttctgtttccccggtgatctcgtataggccgtacccacggctgaaaacaagtgatccgttatccgcttaggtacttcgagaaacctagtatcaccttgggatcttcgacgcgttgcactcagcactctaccccgagtgtagcttaggctgatgagtctgggcattccccaccggtgacggtggcccaggctgcgttggcggcctacccatggctaacgccatgggacgctagttgtgaacaaggtgtgaagagcctattgagctacctaagagtcctccggcccctgaatgcggctaatcccaaccacggagcaagtgccttcaatccagagggtggcttgtcgtaacgcgcaagtctgtggcggaaccgactactttgggtgtccgtgtttccttttatttttattacggctgcttatggtgacaatcattgattgccatcataaagcgagttggattggccatccggtgaaagttaagtatctcgtccacttatctgttggacttactccattaactcaactcacgcctgatttgatatctatagtgttattgatttggaaaaagctatcata

SEQ ID NO: 1136 - DNA, 746 bp, Human poliovirus 3
  misc_feature 1..746: note = strain SWI10947, complete genome.1
  source 1..746: mol_type = genomic DNA
ttaaaacagctctggggttgttcccaccccagaggcccacgtggcggctagtactccggtatcacggtacccttgtacgcctgttttatactcccttccccgtaacttagaagtatacaaaccaagttcaatagaagggggtacaaaccagtaccaccacgaacaagcacttctgtttccccggtgaagttgcatagattgtccccacggtcgaaagcgactgatccgttatccgctcttgtacttcgggaagcctagtatcaccttcggatcttcgatgcgttgcgctcagcactcaaccccagagtgtagcttaggtcgatgagtctggacgaacctcactggtgacagtggtccaggctgcgttggcggcctacctgtggcccaaagccacaggacgctagttgtgaacaaggtgtgaagagcctactgagctacatgagagtcctccggcccctgaatgcggctaatcccaaccacggagcaggtggtcacaaaccagtggtttgcctgtcgtaacgcgaaagtctgtggcggaaccgactactttgggtgtccgtgtttccttttattcttattatggctgcttatggtgacaatcttagattgttatcataaagcgaattggattggccatccggggaaaattaagcatatcatacacttgtttgttggattcacccctctgattacacatactcttggcttgattaggattgttgcattgataagacactattgttgca

SEQ ID NO: 1137 - DNA, 746 bp, unidentified
  source 1..746: mol_type = unassigned DNA; note = Human coxsackievirus A20, strain CVA20b-Cecil polyprotein gene,1 sequence
ttaaaacagcctgtgggttgttcccaccccagaggcccacgtggcggccagtactccggtatcacggtacccttgtacgcctgttttatactcccttccccagtaatttagaagcaattaaaccaagttcaatagaagggggtacaaaccagtaccaccacgaacaagcactcctgtttccccggtgacgttgtatatactgtacccacggtagaaagcgaccgatccgttatccgctcttgtacttcgagaagcccagtaccatcttggaatcttcgatgcgttgcgctcagcactcaaccccagagtgtagcttaggtcgatgagtctggacaatcctcaccggcgacggtggtccaggctgcgttggcggcctacctgtggcccaaagccacaggacgctagttgtgaacaaggtgcgaagagcctattgagctacaagagagtcctccggcccctgaatgcggctaatcccaaccacggagctggtgaccacaaaccagtggttaacctgtcgtaatgcgcaagtctgtggcggaaccgactactttgggtgtccgtgtttcctttatttttattatggctgcttatggtgacaatcatagattgttatcataaagcgacttggattggccatccagtgaaagcaaaacaatttatctacttgtttgttgaattcactctattgaccacccacttactaagtcttattaaaattctcttgttgattagattaacacaccaca

SEQ ID NO: 1138 - DNA, 746 bp, Human poliovirus 2
  misc_feature 1..746: note = isolate T10-259, complete genome.1
  source 1..746: mol_type = genomic DNA
ttaaaacagctctggggttgttcccaccccagaggcccacgtggcggctagtactccggtatcacggtacccttgtacgcctgttttatactcccttcccccgtaacttagaagaaataaaccaagttcaatagaagggggtacaaaccagtaccaccacgaacaagcacttctgtttccccggtgaagttgtataaactgtatccacggttgaaggcgactgatccgttatccgcttttgtacttcgagaagcctagtatcatcttggaatcttcgatgcgttgcgctcagcactcaaccccagagtgtagcttgggctgatgagtctggacacccctcaccggtgacggtggtccaggctgcgttggcggcctacctgtggcccaaagccacaggacgctagttgtgaacaaggtgtgaagagcctattgagctacgaaagagtcctccggcccctgaatgcggctaatcctaaccacggagcaagggtgcgcaaaccagtgcatgccttgtcgtaacgcgcaagtctgtggcggaaccgactactttgggtgtccgtgtttccttttattcttataatggctgcttatggtgacaatcatagattgttatcataaagcgaattggattggccatccggcgaaagtgaaatacattgtttatctttttgttggattcactccaaacacttccccttcttttaaactcatcactacggtcttgttgatcagagactcatatcaca

SEQ ID NO: 1139 - DNA, 746 bp, Human poliovirus 2
  misc_feature 1..746: note = isolate T09-216, complete genome.1
  source 1..746: mol_type = genomic DNA
ttaaaacagctctggggttgttcccaacccagaggcccacgtggcggctagtactctggtatcatggtacccttgtacgcctgttttatactcccttaccccgtaacttagaagcaataaaccaagttcaatagaagggggtacaaaccagtaccaccgcgaacaagcacttctgttgccccggtgaagttgcatagactgtgcccacggttaaaagcgactgatccgttatccgctcttgtacttcgagaaacctagtatcatcttggaatcttcgatgcgttgcgctcaacactcgaccccagagtgtagcttaggtcgatgagtctggacactcctcactggtgacagtggtccaggctgcgttggcggcctacctgtggcccaaagccacaggacgctagtagtgaacaaggtgtgaagagtctattgagctacaagtgagtcctccggcccctgaatgcggctaatcccaaccacggagcaagtgctcacactccagtgagtagcttgtcgtaacgggtaactctgtggcggaaccgactactttgggtgtccgtgtttccttttattcttataatggctgcttatggtgacaatcatagattgttatcataaagcgaattggattggccatccggtgaaagtgaaatactttgcttaactttttgttggattcactccagtcactttcctttcttttaaactcatcaccacagtcttgttgttcagagactcatatcaca

SEQ ID NO: 1140 - DNA, 746 bp, Human poliovirus 2
  misc_feature 1..746: note = strain NIE0611197, complete genome.1
  source 1..746: mol_type = genomic DNA
ttaaaacagctctggggttgttcccaccccagaggcccacgtggcggccagtactctggtattacggtacctttgtacgcctgttttatactccctccctcgtaacttagaagaaacaaatcaagttcaacaggagggggtacaaaccagtaccaccacgaacaagcacttctgtctccccggtgacgttgcatagactgtacccacggtcgaaagcgattgatccgttatccgctcttgtacttcgagaagcctagtatcatcttggaatcttcgatgcgttgcgctcagcactcaaccccagagtgtagcttaggtcgatgagtctggacgttccccaccggcgacggtggtccaggctgcgttggcggcctacctgtggcccaaagccacaggacgctagttgtgaacaaggtgtgaagagcctattgagctacaggagagtcctccggcccctgaatgcggctaatcccaaccacggagcaggggtgcataaaccaatgcataccttgtcgtaacgcgcaagtctgtggcggaaccgactactttgggtgtccgtgtttccttttattttttcattggctgcttatggtgacaatcatagattgttatcataaagcgacttggattggccatccggtgagagtgaaatacattgtttacttgttcattggatttactccactcaactctttcgcttacaaactcattacaacaactctgttgattgaaacaacaatactaca

SEQ ID NO: 1141 - DNA, 746 bp, Poliovirus type 3
  misc_feature 1..746: note = strain 23127 complete genome.1
  source 1..746: mol_type = genomic DNA
ttaaaacagctctggggttgttcccaccccagaggcccacgtggcggctagtacactggtatcacggtacccttgtacgcctgttttatactcccttccccgtaacttagaagtatacaagccaagttcaatagaagggggtacaaaccagtaccaccacgaacaagcacttctgtttccccggtgaagttgcatagattgttcccacggtcgaaagcgactgatccgttacccgctcatgtacttcgggaagcctagtatcacttcggactcttcgatgcgttgcgctcagcactcaaccccagagtgtagcttaggtcgatgagtctggacaaacctcactggcgacagtggtccaggctgcgttggcggcctacctgtggcccaaagccacaggacgctagttgtgaacaaggtgtgaagagcctactgagctacatgagagtcctccggcccctgaatgcggctaatctcaaccacggagcaggtagtcacaaaccagtgatttgcctgtcgtaacgcgaaagtctgtggcggaaccgactactttgggtgtccgtgtttccttttattctcattatggctgcttatggtgacaatcctagattgttatcataaagtgagctggattggccatccggtgaaaatcaagcacattatatatttgtttgttgggtttaaccctctgattgcacgcactcttggcttggttaggattattgtgtggaaaaggcaccatagttaca

SEQ ID NO: 1142 - DNA, 746 bp, Human echovirus
  misc_feature 1..746: note = 4, strain AUS250G, complete genome.1
  source 1..746: mol_type = genomic DNA
ttaaaacagcctgtgggttgctcccacccacagggcccactgggcgtcagcacactggtatcaaggtacctttgtgcgcctgttttacaaaccctccccccccttgtaacaaacttagaagcaatgcacaccgatcaatagcgggcgcggcacgccagctgcgtcttgatcaagcacttctgtctccccggaccgagtatcaatagactgcttgcgtggttgaaggagaaagcgtccgttacccgaccaactacttcgagaagcccagtagcgccatggaagctgcgaagcgtttcgctcagcacacccccagtgtagatcaggtcgatgagtcaccgcattccccacgggcgaccgtggcggtggctgcgttggcggcctgcctacggggtaacccgtaggacgcttcaatgtagacatggtgcgaagagtcgattgagctagttggtaatcctccggcccctgaatgcggctaatcctaactgcggagcacgtgccttcaacccagagggtggcgtgtcgtaacgggcaactctgcagcggaaccgactactttgggtgtccgtgtttctttttattttgtactggctgcttatggtgacaattgaaggattgttaccatatagctattggattggccatccggtgcctaacagagcaattatttacctctttgttgggttcgtaccattcaataaggctaattaccaaatcttgtgttacatcctcagattgaacacatcgaa

SEQ ID NO: 1143 - DNA, 747 bp, Human cosavirus
  misc_feature 1..747: note = D1 polyprotein gene, complete cds.1
  source 1..747: mol_type = genomic DNA
tggcagtccttgaaacgtgtggtgcgacgtctaaccattatggcagtgggtggagtactgcaaagatgtcaccgtgctttacacggtttttgaaccccacaccggctgtttggcgcttgcaggacagtaggtatattttctttcatttctcttttctagccgcgtaggttctatctacgcgggcggagtgatactcccgctccttcttggacaggcggcctccacgctctttgtggatcttaaggctgccaagtcactggtgtttgaagtgaagaatggagagacactagggcgtttcatgtggctttgccagggattgtagcgatgctgtgtgtgtgtgcggatttcccctcgtggcgacacgagcctcacaggccaaaagccctgtccgaaaggacccacacagtggggttgccccgacccctcccttcaaagctttgtgtaaacaaacttttgtttagactttcttaagcttctctcacatcaggccccaaagatgtcctgaaggtaccctgtgtatctgaggatgagcaccaccaactacccggacttgtgggacgtgtcccacagacgcatgtggtattccagccccctccttttgaggagggggcttttgctcgctcagcacaggatctgatcaggagattcatctctggtgctttacaccagagcatggatttaaaaattgcccaaggcctggcaaacaacctaggggactaggttttctctattttaaaagatgtcaat

SEQ ID NO: 1144 - DNA, 747 bp, Human enterovirus sp.
  misc_feature 1..747: note = 71,strain EV71/Xiamen/2009, complete genome.1
  source 1..747: mol_type = genomic DNA
ttaaaacagcctgtgggttgcacccactcacaggacccacgtggtgctagcactctggttccacggaacctttgtgcgcctgttttacgtcccctccccaatttgtaacttagaagcaatttacaacactgatcaatagcaggcatggcgcaccagctatgtcttgatcaagcacttccgtttccccggaccgagtatcaatagactgttcacacggttgaaggagaaagcgtccgttatccggctaactacttcgagaaacccagtagcgccattgaaactgcagagtgtttcgctccacacttcccccgtgtagatcaggtcgatgagtcactgtaatccccacgggcgaccgtgacagtggctgcgttggcggcctgcctatggggcaacccataggacgctctaatgtggacatggtgcgaagagtctattgagctagttagtagtcctccggcccctgaatgcggctaatcctaactgcggagcacatgccttcaatccagagggtagtgtgtcgtaatgggcaactctgcagcggaaccgactactttgggtgtccgtgtttccttttattctcacattggctgcttatggtgacaattacagaattgttaccatatagctattggattggccatccggtgtgcaatagagctattatatacctatttgttggctttgtaccactaaccttaaaatctgcaaccactctcgagtatatattgacccttaatacaatcaaac

SEQ ID NO: 1145 - DNA, 747 bp, unidentified
  source 1..747: mol_type = unassigned DNA; note = Human coxsackievirus A10, strain CVA10/SD/CHN/09, complete genome.1 sequence
tttaaaacagcctgtgggttgtacccacccacagggcccactgggcgctagcactccgattctgcggaatctttgtgcgcctgttttataaccctcccccgaaacttgcaacttagaagttatgtacgttactgatcaacagcaggcgtggcacaccagccatgtcttgatcaagcacttctgtacccccggactgagtatcaatagactgctcacgtggtcgaaggagaaaacgttcgttatccggctaactacctcgagaaacctagtaacgccattgaaactgcggagtgtttcgctcagcacttcccccgtgtagatcaggtcgatgagtcactgcttaccccacgggcgaccgtggcagtggctgcgttggcggcctgcctatggggcaacccataggacgctctaaagtggacatggtgcgaagagtctattgagctagttagtagtcctccggcccctgaatgcggctaatcctaactgcggagcgcatgccttcaaaccagaaggtggtgcgtcgtaacgggtaactctgcagcggaaccgactactttgggtgtccgtgtttctcttattctcataatggctgcttatggtgacaatcgaggaattgttaccatatagctattggattggccatccggtgtgcaacagagctattatctacttgtttattggatacattccattaacacttaaatccttcaatacattgcactatattctaacactgaacgcaagaaa

SEQ ID NO: 1146 - DNA, 747 bp, Coxsackievirus
  misc_feature 1..747: note = A10 gene for polyprotein, polyprotein region,strain1
  source 1..747: mol_type = genomic DNA
tttaaaacagcctgtgggttgtacccacccacagggcccactgggcgccagcactctgattctacggaatctttgtgcgcctgttttacaacccttcccaaaatctgcaacttagaagttatgcacattattgatcaatagcaggcgtggcacaccagtcatgtcttgatcgagcacttctgtatccccggactgagtatcaatagactgctcacgtggtcgaaggagaaaacgttcgttatccggctaactacttcgagaagcctagtaacaccgttgaaactgcggagcgtttcgttcagcacttcccccgtgtagatcaggtcgatgagtcactgcttaccccacgggcgaccgtggcagtggctgcgttggcggcctgcctatggggcaacccataggacgctctaaagtggacatggtgcgaagagcctattgagctagttagtagtcctccggcccctgaatgcggctaatcctaactgcggagcgcatgccctcacgccagagggtggtgcgtcgtaacgggcaactctgcagcggaaccgactactttgggtgtccgtgtttctttttattctcattatggctgcttatggtgacaattaaggaattgttaccatatagctattggattggccatccggtgtgcaacagagctattatctacttatttgttggatacattccattaacacttaaatcccttaacacattgcaatacattctaacactgaacgcaagaaa

SEQ ID NO: 1147 - DNA, 747 bp, Enterovirus sp.
  misc_feature 1..747: note = A71,strain USA/2018-23296, complete genome.1
  source 1..747: mol_type = genomic DNA
ttaaaacagcctgtgggttgtacccacccacagggcccaccgggcgctagcactctgattccacggaatctttgtgcgcctgttttataacccccctccccacctcgcaacttagaagcaacgcgcatcactgatcaacagcaggcatggcgcgccagccatgtcttgatcaagcacttctgtttccccggactgagtatcaatagactgcttacgcggttgaaggagaaaacgttcgttacccggctaactacttcgagaaacttagtaacaccatcgaagctgcagggtgtttcgctcagcacttcccccgtgtagatcaggccgatgagtcaccgcaatccccacgggcgaccgtggcggtggctgcgttggcggcctgcctatggggcaacccataggacgccctaaagtggacatggtgcgaagagtctattgagctagttagtagtcctccggcccctgaatgcggctaatcctaactgcggagcacataccctcaagccagagggtggtgtgtcgtaacgggtaactctgcagcggaaccgactactttgggtgtccgtgtttccttttattcttactgtggctgcttatggtgacaattcaagagttgttaccatatagctattggattggccatccggtgtctaacagagctattgtgtacttatttgttgggtacgttccattatcttacacatcccttgacacattacattttattgtgaagctaaatacaagaag

SEQ ID NO: 1148 - DNA, 747 bp, unidentified
  source 1..747: mol_type = unassigned DNA; note = Human coxsackievirus A5, strain CVA5/SD/CHN/09, complete genome.1
tttaaaacagcctgtgggttgtacccacccacagggcccactgggcgctagcactctggtactgcggtacctttgtgcgcctgttttatctccccagacccccgcaacgtcacattagaagatagacaatacgaccaatagtcagtggggcaacccagcctcactttggtcaagtacctctgtttccccgggcttagtaccaataggctgcttgcgcggctgaaggggaacgcgcccgttatccggctaactacttcgagaaacctagtaccaccatggaagttgccgagtgtttcgctcagcacaaccccagtgtagatcaggtcgatgagtcaccgtacaccccacgggcgaccgtgacggtggctgcgttggcggcctgcccatggtgcacaccatgggacgctctaatacagacatggtgcgaagagtctattgagctagttagtagtcctccggcccctgaatgcggctaatcctaactgtggagcatgcgctctcaacccagagagtagcgtgtcgtaacgggcaactctgcagcggaaccgactactttgggtgtccgtgtttccttttattcttatattggctgcttatggtgacaattgagagattgttaccatatagctattggattggccatccggtgtgcaatagagctattgtatattcttttgttggctttgtgccattagattatactgcaattgctactttaagatacatcttgtttctgaacacagcaaa

SEQ ID NO: 1149 - DNA, 747 bp, Coxsackievirus
  misc_feature 1..747: note = A5 gene for polyprotein, polyprotein region,strain1
  source 1..747: mol_type = genomic DNA
tttaaaacagcctgtgggttgtacccacccacagggcccactgggcgctagcacactggtattacggtacccttgtgcgcctgttttatcctccctggcccccgtaataatgtattagaagtcttgcaacgtgaccaatagctagtaaagcaacccagctttacttgggtcaagtacttctgttaccccggacctagtaccaataggctgctcgcgcggctgaaggggaaaacgttcgttatccggctaactacttcgggaaacccagtaccatcatgaatgttgcggagtgtttcgctcagcactaccccagtgtagatcaggccgatgagtcaccgtacaccccacgggcgaccgtgacggtggctgcgttggcggcctgcccatggcacctgccatgggacgctctaatacggacatggtgtgaagagtctactgagctagttagtagtcctccggcccctgaatgcggctaatcctaactgcggagcacgcgcccccaatccagagggtagcgtgtcgtaatgggcaactctgcagcggaaccgactactttgggtgtccgtgtttccttttattcttacactggctgcttatggtgacaattgagagattgttgccatatagctattggattggccatccggtgagcaatagagcgattatctattcttttgttggatttgtgccattagattacactgccatcatcacactgaagtacattttattgttaaacacaacaaa

SEQ ID NO: 1150 - DNA, 747 bp, Coxsackievirus
  misc_feature 1..747: note = A5, complete genome.1
  source 1..747: mol_type = genomic DNA
ttttaaaacaggctgtgggttgtacccacccgcagggcccactgggcgctagcactctggtaccacggtacctttgtgcgcctgttttatctccccaaaccccgtaacgctacattagaagttaaacaatatgaccgatagtcagtggggcaacccagcctcactttggtcaagcacttctgttctcccgggcttagtaccaataagctgctcgcgcggctgaaggggaacgcgcccgttatccggctaactacttcgagaaacctagtaccaccatggaagttgcagagtgtttcgctcagcactaccccagtgtagatcaggctgatgagtcaccgtgcaccccacgggcgaccgtgacggtgactgcgttggcggcctgcccatggtgtataccatgggacgctctaatacagacatggtgcgaagagtctattgagctagttagtagtcctccggcccctgaatgcggctaatcctaactgcggagcacgcgctctcaacccagagagtagcgtgtcgtaacgggtaactctgcagcggaaccgactactttgggtgtccgtgtttctttttattcttacattggctgcttatggtgacaattgagagattgttaccatatagctattggattggccatccggtgtgtaacagagctatcatatattcttttgttggcttcgtgccactagattatactgcaattgttactttaaggtacatcttacttctgaatacggtaaa

SEQ ID NO: 1151 - DNA, 747 bp, Enterovirus A
  misc_feature 1..747: note = strain A2 R1580/XY/CHN/2017, complete genome.1
  source 1..747: mol_type = genomic DNA
tttaaaacagcctgtgggttgtacccacccacagggcccactgggcgttagcacactgattctacggaatctttgtgcgcctgttttatatccctcccctaaaatagtaatttagacgttgaacatttacacgaccaatagtgggcgtggcgcaccagtcacgtcttggtcaagcactcctgttcccccggaccgagtatcaataggctgctcacgtggctgaaggagaaagtgttcgttatccggctaactacttcgggaaacccagtaacaccatgaaagttgcagagtgtttcgttcagcacttcccccgtgtagatcaggctgatgagtcactgcaaaccccacgggcgaccgtggcagtggctgcgttggcggcctgcctatggggtaacccataggacgctctaatacagacatggtgcgaagagtctactgagctagttagtattcctccggcccctgaatgcggctaatcctaactgcggagcacatgccctcaatccagagggtggtgtgtcgtaatgggcaactctgcagcggaaccgactactttgggtgtccgtgtttccttttattcttatactggctgcttatggtgacaattgaaaagttgttaccatatagctattggattggccatccggtgaataacagagctttggtttatcagttcattgggttcgtgcccttatcatctacagcttacacaactttggtgtacttgttatatcttaatagtaagaa

SEQ ID NO: 1152 - DNA, 747 bp, Coxsackievirus
  misc_feature 1..747: note = A8,isolate CV-A8/P82/2013/China, complete genome.1
  source 1..747: mol_type = genomic DNA
ttaaaacagcctgtgggttgttcccactcacagggcccactgggcgctagcacactgattctccggtacctttgtgtgcttgttttagtatccctcccccaaactcgtaacttagaagaataacacgctatcgatcaatagcaggcatggcgcaccagccatgtctcgatcaagcacttctgtttccccggacagagtatcaatagactactcacgtggttgaaggagaaaacgtccgttatccggctaactacttcgagaaacctagtaacaccattgaagctgcagagcgtttcgttcagcacttaccccgtgtagatcaggtcgatgagtcactgcattccccacgggcgaccgtggcagtggctgcgttggcggcctgcctatggggtcacccataggacgctctaatgtggacatggtgcgaagagtctattgagctagttagtagtcctccggcccctgaatgcggctaatcctaactgcggagcgcataccctcaaaccagggggtagtgcgtcgtaacgggcaactctgcagcggaaccgactactttgggtgtccgtgtttccttttattttcttactggctgcttatggtgacaattgaagaattgttgccatatagctattggattggccatccggtgtgtaacagagcaatcatctatttgtttgccgggtacatcccattaacgctcaactcttttagtacattacagtatatactaatcctgaatacaagaaa

SEQ ID NO: 1153 - DNA, 747 bp, Enterovirus sp.
  misc_feature 1..747: note = A114,strain V13-0285, partial genome.1
  source 1..747: mol_type = genomic DNA
ttaaaacagcctgtgggttgttcccacccacagggcccactgggcgctagcactctggttctccggaacctttgtgcgcctgttttgaaaccccctcccccaactcgaaacgtagaagtaatgtacactactgatcagtagcaggcgtggcgcaccagccatgtctcgatcaagcacttctgtttccccggactgagtatcaatagactgctcacgcggttgaaggtgaaaacgtccgttacccggctaactacttcgagaaacctagtagcaccatagaaactgcagagtgtttcgctcagcacttcccccgtgtagatcaggtcgatgagtcactgcaatccccacgggtgaccgtggcagtggctgcgttggcggcctgcctatggggcaacccataggacgctctaaggtggacatggtgtgaagagtctattgagctagttagtagtcctccggcccctgaatgcggctaatcctaactgtggagcgcatactcccaaaccagggagcagtgcgtcgtaacgggcaactccgcagcggaaccgactactttgggtgtccgtgtttccttttattcctatactggctgcttatggtgacaattgagagattgttaccatatagctattggattggccatccagtgtgtaatagagcaatcatttaccaatttgttggatttactccattaacccacacgtctctcaacacactacatttcatcttactactgaacactagaaa

SEQ ID NO: 1154 - DNA, 747 bp, Enterovirus sp.
  misc_feature 1..747: note = C96,isolate 127/SD/CHN/1991, complete genome.1
  source 1..747: mol_type = genomic DNA
ttaaaacagctctggggttgttcccaccccagaggcccacgtggcggccagtacaccggtattacggtacccttgtacgcctgttttatactccctacccctgcaacttagaagcaaataatccaagttcaatagtagggggtacaaaccagtaccaccacgaacaagcacttctgtttccccggtgatgttgtatagactgtacccacggttgaaaacaattgatccgttacccgctcttgtacttcgagaagcctagtatcatcttggaaccttcgatgcgttgcgctcagcactcaaccccagagtgtagcttgggtcgatgagtctggacaatccacaccggcgacggtggtccaggctgcgttggcggcctacctgtggcccaaagccacaggacgctagttgtgaacaaggtgtgaagagcctattgagctacaagagagtcctccggcccctgaatgcggctaatcccaaccacggagcaggtgatcacaacccagtgattagcctgtcgtaatgcgtaagtctgtggcggaaccgactactttgggtgaccgtgtttccttttatttttattgtggctgcttatggtgacaatcttagattgttatcataaagcgatttggattggccatccggtgaaagttaaacacattatttacttgtttgttggattcactccgttgtcctctcgcactacgtatattattaacgctgtgctattaattaggtcaatacatcaca

SEQ ID NO: 1155 - DNA, 747 bp, Human enterovirus sp.
  misc_feature 1..747: note = 96,isolate FIN04-7, complete genome.1
  source 1..747: mol_type = genomic DNA
ttaaaacagcctgtgggttgttcccaccccagaggcccacgtggcggccagtacaccggtattacggtacccttgtacgcctgttttatacttccttcccccgtaacttagaagtttacaaaccaagttcaatagaagggggtacaaaccagtaccaccacgaacaagcacttctgtttccccggtgagtttgcatagactgtatccacggttgaaagtgaacgatccgttacccgctcttgtacttcgagaagcctagtaaccccttggaatcttcgatgcgttgcgctcagcactcaaacccagagtgtagcttaggtcgatgagtctggacactcctcaccggtgacggtggtccaggctgcgttggcggcctacctgtggtccaaagccacaggacgctagttgtgaacaaggtgtgaagagcctattgagctacttgagagtcctccggcccctgaatgcggctaatcctaaccatggatcaggtggtcacaatccagtgactggcctgtcgtaatgcgcaagtccgtggcggaaccgactactttgggtgtccgtgtttccttttattcttataatggctgcttatggtgacaatcatagattgttatcatatagcgaattggattggccatccggtgtgaacaaaacacttgattcacttgttggttgaatttgtttcattaattgaacacataccagagctcatttgattggcatttttgcttagacaattgtaccaca

SEQ ID NO: 1156 - DNA, 747 bp, unidentified
  source 1..747: mol_type = unassigned DNA; note = Human coxsackievirus A11, isolate CV-A11_67874, complete genome.1 sequence
ttaaaacagctctggggttgttcccaccccagaggcccacgtggcggctagtacaccggtatcacggtacccttgtacgcctgttttatactcccttcccccagtaacttagaagtaataaaccaagttcaatagaagggggtacaaaccagtaccaccatgaacaagcacttctgttcccccggtgaggttgtatagactgtgcccacggttgaaagcgaccgatccgttatccgctcttgtacttcgagaagcctagtatcaccttggaatcttcgatgcattgcgttcagcacttgatcccggagtgtagcttaggccgatgagtctggacgttccccaccggtgacggtggtccaggctgcgttggcggcctacctgtggtccaaagccacaggacgctagttgtgaacaaggtgtgaagagcctattgagctacatgagagtcctccggcccctgaatgcggctaatcccaaccacggagcagatggttgcaatccagcggctagtctgtcgtaacgcgcaagtctgtggcggaaccgactactttgggtgtccgtgtttccttttatctttataatggctgcttatggtgacaatcattgattgttgccataaagcgacttggattggccatccggtgaaaatcagatcgattatctacttgtttattggattcacacccttatctatatacacgctaagtttgatcagagtcaccttgttaattagatattattaccacg

SEQ ID NO: 1157 - DNA, 747 bp, Human enterovirus sp.
  misc_feature 1..747: note = 96,strain 09228C1, complete genome.1
  source 1..747: mol_type = genomic DNA
ttaaaacagctctggggttgttcccaccccagaggcccacgtggcggctagtactccggtatcacggtacccttgtacgcctgttttatactccctacccctgcaacttagaagctagtaactcaagttcaatagtagggggtacaaaccagtaccaccacgaacaagcacttctgtttccccggtgatgccgtatagactgtgcccacggttgaaaacgactgacccgttatccgctcttatacttcgagaagcctagtatcatcttggaatcttcgatgcgttgcgctcagcactcaaccctagagtgtagcttaggtcgatgagtctggacattcctcaccggcgacggtggtccaggctgcgttggcggcctacctgtggcccaaagccacaggacgctagttgtgaacaaggtgtgaagagcctattgagctacaagagagtcctccggcccctgaatgcggctaatcccaaccacggagcaagtgatcacgaaccagtgattggcttgtcgtaacgcgcaagtctgtggcggaacccgactactttgggtgtccgtgtttcctttatttcatatatggctgcttatggtgacaattatagattgtcatcatagagcgaattggattggccatccggtgaaagttagacatattgtttacctatttgttggctttacatccttcaacctccacaccccgtattttgttaaggttgtgttgtcgatcagatcactataccaca

SEQ ID NO: 1158 - DNA, 747 bp, unidentified
  source 1..747: mol_type = unassigned DNA; note = Human coxsackievirus A13, strain ARG98-10613, complete genome.1 sequence
ttaaaacagcctgtgggttgttcccaccccagaggcccacgtggcggccagtactccggtatcacggtacccttgtacgcctgttttatacccccttccccgtaacttagaagtaaacaaaaccaagttcaatagaaggcggtacaaaccagtgccaccatgaacaagcacttctgtttccccggtgatgttgtatagactgtttccacggttgaaagcgactgatccgttatccgctcaagtacttcgggaagcctagtatcatcttggaatcttcgatgcgttgcgttcagcactcaacccccgagtgtagcttaggtcgatgagtctggacattcctcaccggtgacggtggtccaggctgcgttggcggcctacctgtggcccaaaaccacaggacgctagttgtgaacaaggtgtgaagagcctactgagctacttgagagtcctccggcccctgaatgcggctaatcctaaccacggatcaggtgattgcaaaccagcagttggcctgtcgtaacgcgcaagtctgtggcggaaccgactactttgggtgtccgtgtttccttttatttttccattggctgcttatggtgacaatcgtagattgttgtcataaagcgaattggattggccatccggtgaaagtcaagtacattatttatttatttgtgggttttactcctataacagcaaatacccttcatcttatcaccatcacactactgattagatatcactaccaca

SEQ ID NO: 1159 - DNA, 747 bp, unidentified
  source 1..747: mol_type = unassigned DNA; note = Human coxsackievirus A18 genomic RNA, complete genome,strain:1 sequence
ttaaaacagctctggggttgttcccaccccagaggcccacgtggcggccagtacactggtattacggtacctttgtacgcctgttttatgctcccttcccctgcaacttagaagattacaaaccaagttcaatagaagggggtgcaaaccagtaccaccacgaacaagcacttctgtttccccggtgaacttgtatagactgtacccacggtcgaaaacgagtgatccgttatccgctcttgtacttcgagaagcccagtaccttcttgggatcattgatgcgttgcgctcagcactcgaccccggagtgtagcttaggctgatgagtctggacatccctcaccggcgacggtggtccaggctgcgttggcggcctacctgtggtccaaagccacaggacgctaaatgtgaacaaggtgtgaagagcctattgagctacatgagagtcctccggcccctgaatgcggctaatcctaaccacggagcaggtggttgcaaaccagcaattggcctgtcgtaatgcgtaagtctgtggcggaaccgactactttgggtgtccgtgtttctctttatttttacaatggctgcttatggtgacaatcttagattgttgtcataaagcgaattggattggccatccggtgaagataaagcatatcatttatctatttattggattcactccattaaactcttggacttatcatttaatacaagtagtgttattgataagaagtgttcaccaca

SEQ ID NO: 1160 - DNA, 747 bp, unidentified
  source 1..747: mol_type = unassigned DNA; note = Human coxsackievirus A13 strain BAN99-10430, complete genome.1 sequence
ttaaaacagcctgtgggttgttcccaccccagaggcccacgtggcggctagtactccggtattacggtacccttgtacgcctgttttatacccccttcccccagaaacttagacgctatgaaaccaagttcaataggagggggcacgaaccagtgtcaccacgaacaagcacttctgtttccccggtgattttacataagctgtacccacggctgaaagtgaatgatccgttatccgcttgggtacttcgagaagcctagtaccacctttggatcttcgatgcgttgcgctcagcactctaccccgagtgtagcttaggtcgatgagtctgggcataccccaccggtgacggtggcccaggctgcgttggcggcctacccatggttaacaccatgggacgctagttgtgaacaaggtgtgaagagcctattgagctactcaagagtcctccggcccctgaatgcggctaatcctaaccatggagcaggtgctttcaatccagaaagtggcctgtcgtaatgcgtaagtccgtggcggaaccgactactttgggtgtccgtgtttccttttttacttttgtatggctgtttatggtgacaatcatagattgttatcataaagcgaattggattggccatccggtaaaaattaaacacatcatttatctatttgttggattcgctccaatcacttctaaaacacttcagttgatacgtgtagtattaataatcaggctattgtatcaca

SEQ ID NO: 1161 - DNA, 747 bp, unidentified
  source 1..747: mol_type = unassigned DNA; note = Human coxsackievirus A13, strain USA/Ca98-10615, complete genome.1 sequence
ttaaaacagcctgtgggttgttcccaccccagaggcccacgtggcggctagtacaccggtatcacggtacccttgtacgcctgttttatactcccttcccccgtaacttagaagtataacaaccaagttcaatagaagggggtacaaaccagtaccaccacgaacaagcacctctgtttccccggtgaacttgcatagactgtgcccacggttgaaagcgagcgatccgttacccgctcttgtacttcgagaagcctagtattatcttggaatcattgatgcgttgcgctcagcactcaaccccagagtgtagcttaggtcgatgagtctggacactcctcaccggtgacggtggtccaggctgcgttggcggcctacctgtggcccatggtcacaggacgctaaatgtgaacaaggtgtgaagagcctattgagctacatgagagtcctccggcccctgaatgcggttaatcctaaccacggagcaggcggttacaaaccagtaactagcctgtcgtaatgcgcaagtctgtggcggaaccgactactttgggtgaccgtgtttccttttatttttacaatggctgcttatggtgacaatctcagattgttatcataaagcgagttggattggccatccggtaaagataaagtgtattatctatctatttgttggatttactccgttaaataccagaacatatcacttgatacaagcggtattactaattaggaacttctatcaca

SEQ ID NO: 1162 - DNA, 747 bp, unidentified
  source 1..747: mol_type = unassigned DNA; note = Human coxsackievirus A17 strain G12, complete genome.1 sequence
ttaaaacagctctggggttgttcccaccccagaggcccacgtggcggctagtactccggtattgcggtacccttgtacgcctgttttatactcccttcccccgtaacttagaagcaatcaaacaaagttcaatagaagggggtacaaaccagtaccaccacgaacaagcacttctgtttccccggtgaagttgtatagactgtacccacggttaaaagcaattgatccgttacccgctcttgtacttcgagaagcctagtactaccttggaatcttcgatgcgttgcgctcaacactcaaccccagagtgtagcttgggctgatgagtctggacgttccccaccggcgacggtggtccaggctgcgttggcggcctacctgtggcccaaagccacaggacgctagttgtgaacaaggtgcgaagagcctattgagctacaagagagtcctccggcccctgaatgcggctaatcccaaccacggagcaggtagttgcaagccagcaatcgacctgtcgtaacgcgtaagtctgtggcggaaccgactactttgggtgtccgtgtttccttttaattttaaactggctgcttatggtgacaatcattgattgttatcataaagcgaattggattggccatccggtgagaatcagatccattatctacttgttcattggatttactccattgacaacatacacatacgaccttattagagtcaatttactattgagacatctccaccata

SEQ ID NO: 1163 - DNA, 747 bp, unidentified
  source 1..747: mol_type = unassigned DNA; note = Human coxsackievirus A17, complete genome, genomic RNA, isolate1 sequence
ttaaaacagctctggggttgttcccaccccagaggcccacgtggcggccagtacactggtatcacggtacccttgtacgcctgttttatactcccttcccccgtaacttagaagccataaatccaagttcaacagaagggggcacaaaccagtgccaccacgaacaagcacttctgtctccccggtgaagttgcatagactgtaaccacggttaaaagcgattgatccgttatccgctcatgtacttcgagaagcctagtaccaccttggaaccttcgacgcgttgcgctcagcactcaaacccagagtgtagcttaggccgatgagtctggacgttccccaccggcgacggtggtccaggctgcgttggcggcctacctgtggctcaaagccacaggacgctagttgcgaacagggtgtgaagagcctattgagctacatgagattcctccggcccctgaatgcggctaatcctaaccgcggagcaggtagttgcaagccagcaactggcctgtcgtaacgcgtaagtctgcggcggaaccgactactttgggtgtccgtgtttcctttatttcttataatggctgcttatggtgacaatcatagattgttatcataaagcgaattggattggccatccagtgaaagtcagactgattatccttctgtttgttgggtttgttccactcaattcacacactttgcacttaatcagaattgtcttattgacacgacaatatcatcact

SEQ ID NO: 1164 - DNA, 747 bp, Human poliovirus 1
  misc_feature 1..747: note = isolate 558/BRA-PE/88, complete genome.1
  source 1..747: mol_type = genomic DNA
ttaaaacagctctggggttgttcccaccccagaggcccacgtggtggccagtactctggtattacggtacctttgtacgcctgttttatactcccttcccctgtaacttagaagcaatctaacctagttcaataggagggggtacaaaccagtaccactacgaacaagcacttctgttaccccggtgaagttgtatagactgtgcccacggtcgaaaatgactgatccgttatccgctcatgtacttcgggaagcctagtaccatcttcggatcttcgatgcgttgcgctcagcactcgaccccagagtgtagcttaggtcgatgagtctggacaatcctcactggcgacagtggtccaggctgcgttggcggcctacctgtggtccaaagccacaggacgctagttgtgaacaaggtgtgaagagcctactgagctacttgagagtcctccggcccctgaatgcggctaatcccaaccacggagcaagtagttgcaaaccagcaaccagcttgtcgtaacgcgtaagtctgtggcggaaccgactactttgggtgtccgtgtttccttttatttttacactggctgcttatggtgacaatcatagattgttatcataaggcgaattggattggccacccggtgtaagtcagatcaattgtctactcgtttgttggatatactccaataacgcactacactcttgagcttaacagagttgttctgctggcgagaagttgctatcgca

SEQ ID NO: 1165 - DNA, 747 bp, Human poliovirus 1
  misc_feature 1..747: note = isolate Pak-11, complete genome.1
  source 1..747: mol_type = genomic DNA
acagtaaaacagctctggggttgttcccaccccagaggcccacgtggcggctagtactctggtatcgcggtacctttgtacgcctgttttatacccctaccccatgtaactttagaagcagttcaacaagttcaatagggggggtgcaaaccagcaccaccacgaacaagcacttctgtaaccccggtgaccttgtataagctgtacccacggctgaaagcgagtgatccgttatccgcttaagtacttcgagaagcctagtatcaccttagaatcttcgatgcgttgcgctcagcactctatcccgagtgtagcttaggctgatgagtctgggcgttcctcaccggcgacggtggcccaggctgcgttggcggcctacccatggctaacgccatgggacgctagatgtgaacaaggtgtgaagagcctattgagctacttaagagtcctccggcccctgaatgcggctaatcccaaccacggagcaggtgccttcaacccagagggtggcctgtcgtaacgcgcaagtctgtggcggaaccgactactttgggtgtccgtgtttccttttatcttttatatggctgcttatggtgacaatcatagattgttatcataaagcgacttggattggccatccggtaaaatacaaacacatcatttacttgtttgttggatttactccactctcccaatttactcctagcataatatccattgttttgttaacaagacattactatcaca

SEQ ID NO: 1166 - DNA, 747 bp, Poliovirus type 2
  misc_feature 1..747: note = (Lansing strain), complete genome.1
  source 1..747: mol_type = genomic DNA
ttaaaacagctctggggttgttcccaccccagaggcccacgtggcggccagtacactggtattgcggtacctttgtacgcctgttttatactcccttcccccgtaacttagaagcacaatgtccaagttcaataggagggggtacaaaccagtaccaccacgaacaagcacttctgttcccccggtgaggctgtataggctgtttccacggctaaaagcggctgatccgttatccgctcatgtacttcgagaagcctagtatcaccttggaatcttcgatgcgttgcgctcaacactcaaccccagagtgtagcttaggtcgatgagtctggacgttcctcaccggcgacggtggtccaggctgcgttggcggcctacctgtggcccaaagccacaggacgctagttgtgaacaaggtgtgaagagcctattgagctacctgagagtcctccggcccctgaatgcggctaatcctaaccacggagcaggcagtggcaatccagcgaccagcctgtcgtaacgcgcaagttcgtggcggaaccgactactttgggtgtccgtgtttccttttatttttacaatggctgcttatggtgacaatcattgattgttatcataaagcaaattggattggccatccggtgagaatttgattattaaattactctcttgttgggattgctcctttgaaatcttgtgcactcacacctattggaattacctcattgttaagatatcatcaccact

SEQ ID NO: 1167 - DNA, 747 bp, unidentified
  source 1..747: mol_type = unassigned DNA; note = Human coxsackievirus A21, strain BAN00-10467 polyprotein gene,1 sequence
ttaaaacagcctgtgggttgttcccaccccagaggcccacgtggcggctagtactctggtacccggtacccttgtacgcctgttttatatcccccttcccatgtaactttagaagcaattcactaagttcaacagggggggtgcaaaccagtaccaccacgaacaagcacttctgtttccccggtgatttcacataagctgtgcccacggccgaaagtggatgatccgttacccgcttgggtacttcgagaagcctagtatcaccttggaatcttcgacgcgttgcgttcagcgctctaacccgagtgtagcttaggctgatgagtctgggcgatccccaccggtgacggtggcccaggctgcgttggcggcctacccatggttaacgccatgggacgctagttttgaacaaggtgtgaagagcctattgagctactcaagagtcctccggcccctgaatgcggctaatcccaaccacggagcaagtgtcctcaaaccagagggtggcttgtcgtaacgcgcaagtctgtggcggaaccgactactttgggtgaccgtgtttccttttatttcatatttggctgcttatggtgacaatcacggattgttatcataaagcgaattggattggccatccggtgaaatacaagcacattatttacctttttgtcggattcattccaatagaatattcttcgccaaagttgatccaaataatcttagtgattagaagttattatttcagca

SEQ ID NO: 1168 - DNA, 747 bp, Human poliovirus 2
  misc_feature 1..747: note = strain CHA1218986, complete genome.1
  source 1..747: mol_type = genomic DNA
ttaaaacagctctggggttgttcccaccccagaggcccacgtggcggccagtactccggtattacggtacccttgtacgcctgttttatactcccttcccctgtaacttagaagcatacaaaccaagttcaatagaagggggtacaaaccagtaccaccacgaacaagcactcctgtttccccggtgacattgcatagactgtacccacggttgaaagcgatcgatccgttacccgctcctgtacttcgagaagcctagtatcatcttggaatcttcgatgcgttgcgctcagcactcaaccccagagtgtagcttaggctgatgagtctggacgtcccccaccggcgacggtggtccaggctgcgttggcggcctacctgtggcccaaagccacaggacgctagttgtgaacaaggtgtgaagagcctattgagctacaagagagtcctccggcccctgaatgcggctaatcctaaccacggagcaggcagttgcaaaccagcaaccggcctgtcgtaacgcgcaagtctgtggcggaaccgactactttgggtgtccgtgtttccttttatttttacaatggctgcttatggtgacaatcatagattgttatcataaagcgacttggattggccatccggtgaaagtaaaacacattgtttacttgtttgttggattcactccaattaacacttttacttacaaactcattacaacaactctattaattagagataagcatcaca

SEQ ID NO: 1169 - DNA, 747 bp, Human poliovirus 2
  misc_feature 1..747: note = strain EGY88-074, complete genome.1
  source 1..747: mol_type = genomic DNA
ttaaaacagctctggggttgttcccaccccagaggcccacgtggcggctagtacactggtattacggtacccttgtacgcctgttttatactcccttccccgtaacttagaagctatgtaatccaagttcaatagaagggggtacaaaccagtaccaccacgaacgagcacttctgtttccccggtgagattgtataagctgttcccacggccgaaaacgatcgatccgttacccgctcttgcacttcgagaagcctagtatcatcttgggatcttcgatgcgttgcgctcagcactctaccccagagtgtagcttaggtcgatgagtctggacattcctcaccggcgacggtggtccaggctgcgttggcggcctacctgtggtccaaagccacaggacgctagttgtaaacaaggtgtgaagagcctattgagctgcaagagagtcctccggcccctgaatgcggctaatcccaaccacggagcaggtggttgcaacccagtaactggcctgtcgtaacgcgtaagtctgtggcggaaccgactactttgggtgtccgtgtttccttttatttctataatggctgcttatggtgacaatcatagattgttatcataaagcgaattggattggccatccggtgagagttaagacaattatccacttgtttgttggatttacccctctgactaattacacactcaactttattaggattgtcattctagtgagatattaccatcaca

SEQ ID NO: 1170 - DNA, 747 bp, Human poliovirus 2
  misc_feature 1..747: note = gene for polyprotein, genomic RNA,isolate1
  source 1..747: mol_type = genomic DNA
ttaaaacagctctggggatgtacccaccccagaggcccacgtggcggctagcactccggtatcacggtacccttgtgcgcctgttttatactcccttcccgtaacttagaagcacgaaaccaagttcaatagaagggggtacaaaccagtaccaccacgaacaagcacttctgtttccccggtgatgttgcatagactgctcacgcggttgaaagcgactgatccgttatccgcttgtgtacttcgagaagcctagtatcaccttggaatcttcgtcgcgttgcgctcggcacccgaccccggggtgtggcttaggctgatgagtctggacattcctcaccggtgacggtggtctaggctgcgttggcggcctacctatggctaacgccataggacgctagatgtgaacaaggtgtgaagagcctattgagctacgcaagagtcctccggcccctgaatgcggctaatcccaaccacggagcaagcgatcgcaaaccagcgattggcttgtcgtaacgcgtaagtctgtggcggaaccgactactttgggtgtccgtgtttcctgttatttttatcatggctgcttatggtgacaatctgagattgttatcataaagcgaattggattggccatccggtgagtactgtctcaggtatactgctgcttaacggaaccgctaagttattcctactcctcatttagccaactcttccagaataatacgagggtaaaataacaatactata

SEQ ID NO: 1171 - DNA, 747 bp, Human poliovirus 2
  misc_feature 1..747: note = strain NIE0611451, complete genome.1
  source 1..747: mol_type = genomic DNA
ttaaaacagctctggggttgttcccaccccagaggcccacgtggcggctagtactccggtatcacggtacccttgtacgcctgttttacactcccttcccccgtaacttagaagaaacaaacaaagttcaatagaagggggtacaaaccagtaccaccacgaacaagcacttctgtttccccggtgacgttgtatagactgtacccacggtcgaaaacgattgatccgttatccgcttttgtacttcgagaagcctagtatcatcttggaatcttcgatgcgttgcgctcagcactcaatcccagagtgtagcttaggtcgatgagtctggacgttcctcaccggcgacggtggtccaggctgcgttggcggcctacctgtggcccaaagccacaggacgctagttgtgaacaaggtgtgaagagcctattgagctacaagagagtcctccggcccctgaatgcggctaatcctaaccacggagcaagggtgtgtgagccaacacataccttgtcgtaatgcgtaagttcgtggcggaaccgactactttgggtgtccgtgtttccttttattcttgtattggctgcttatggtgacaatcatagattgttatcataaagcgacttggattggccatccagtggaagtgaaataccttgtctacctgtctgttggttttactccatttgactaattcacttacaagcttattgctataatttttattgactaaacaacaatactaca

SEQ ID NO: 1172 - DNA, 747 bp, Human poliovirus 2
  misc_feature 1..747: note = isolate 44624/BRA2014, complete genome.1
  source 1..747: mol_type = genomic DNA
ttaaaacagctctggggttgttcccaccccagaggcccacgtggcggctagtactctggtatcgcggtacctttgtacgcctgttttatactccccttccctgtaacttagaagcaaacaagccaagttcaatagaagggggtacaaaccagtaccaccacgaacaagcacttctgttaccccggtgaagttgtataaactgtccccacggttgaaaacgactgatccgttacccgcttttgtacttcgagaagcctagtaccatcttggaatcttcgatgcgttgcgctccgcactcaatcccagagtgtagcttaggtcgatgagtctggacagtcctcaccggcgacggtggtccaggctgcgttggcggcctacctgtggcccaaagccacaggacgctagttgtgaacaaggtgtgaagagcctattgagctacaaaagagtcctccggcccctgaatgcggctaatcctaaccatggagcaggtggttacaaaccagtaattgacctgtcgtaacgcgtaagtccgtggcggaaccgactactttgggtgtccgtgtttccttttatttttaatgcggctgcttatggtgacaatcattgattgttatcataaagcgaattggattggccatccggtgtgaataaaacttattgtctacttgtttgttggatacactccactaaacgcattcacccctagcattatttctatagtgatcaaaatcagacaattacattaca

SEQ ID NO: 1173 - DNA, 747 bp, Human poliovirus 2
  misc_feature 1..747: note = strain USA0911201, complete genome.1
  source 1..747: mol_type = genomic DNA
ttaaaacagctctggggttgttcccaccccagaggcccacgtggcggctagcactctggtatcacggtacccttgtgcgcctgttttacaccccctccctgcaatttagaagcacaaaactaagttcaatagaagggggtacaaaccagtaccaccacgaacaagcacttctgtttccccggtgacattacatagactgctcacgcggttgaaagtgatcgatccgttacccgcttgtgtacttcgagaagcctagtatcactttgggatcttcgacgcgttgcgcccagcactcaaacccagggtgtagcttaggccgatgagtctggacgctcctcaccggcgacggtggtccaggctgcgttggcggcctacctatggctgacgccataggacgctagatgtgaacaaggtgtgaagagcctattgagctacgcaagagtcctccggcccctgaatgcggctaatcccaaccacggagcaggcggtcacaaaccagtgactggcttgtcgtaacgcgcaagtctgtggcggaaccgactactttgggtgtccgtgtttcctgttatctttattatggctgcttatggtgacaatcagagattgttaccataaagcgaattggattggccatccggtgtgtattgcattggatatacaactgtttactaaaattactgtgttatctctactttccatttaactggttaatcaggaacgatacgagaataaaacaacaacatcacg

SEQ ID NO: 1174 - DNA, 747 bp, Coxsackievirus
  misc_feature 1..747: note = B5, isolate CVB5-JZ-P50, complete genome.1
  source 1..747: mol_type = genomic DNA
tttttaaaacagccctgtgggttgttcccacccacggggcccattgggcgctagcacactggtatcacggtacccttgtgcgcctgttttatccaccccctccccaatgtaacatagaagcacaaactaagtggtcaatagacggctcagtgcaccaactgggtttagaccaagcacttctgttaccccggactgagtatcaataggctgctcacgcggctgaaggagaaaacgttcgttacccggccaactacttcgagaagcccagtaccaccatgaaggttgcgcagtgtttcgttcagcacaaccccagtgtagatcaggtcgatgagtcaccgcaatccccacgggcgaccgtggcggtggctgcgctggcggcctgcccatggggtgacccatgggacgcttcaattccgacatggtgcgaagagcctattgagctagttggtagtcctccggcccctgaatgcggctaatcccaactgcggagcaagcacccacaaaccagtgggctgtttgtcgtaacgggcaactctgcagcggaaccgactactttgggtgtccgtgtttccttttattcctacactggctgcttatggtgacaattgaaagattgttgccatatagctattggattggccatccggtaacaaacagagctattattcacttatttgttggctttgtgccgttgaatttcaaagttataaaaaccataacctccatcttgacactcaacacagcaaa

SEQ ID NO: 1175 - DNA, 748 bp, Enterovirus sp.
  misc_feature 1..748: note = A71,isolate N7008-TW99/VP1-E98K, complete genome.1
  source 1..748: mol_type = genomic DNA
ttaaaacagcctgtgggttgcacccactcacagggcccacgtggcgctagcactctggttctacggaacctttgtgcgcctgttttacgccccttcccccaatttgcaacttagaagcaatacacaacactggtcaacagtaggcatggcgcaccagccatgtcttgatcaagcacttctgtttccccggaccgagtatcaatagactgctcacgcggttgaaggagaaagcgtccgttatccggctaactacttcgagaaacttagtaacaccattgaagctgcagagtgtttcgctcggcacttcccccgtgtagatcaggtcgatgagtcactgcaatccccacgggtgaccgtggcagtggctgcgctggcggcctgcctatggggtaacccataggacgctctaatgcggacatggtgcgaagagtctattgagctagttagtggtcctccggcccctgaatgcggctaatcctaactgcggagcacatgccttcaatccagagggtagtgtgtcgtaatgggcaactctgcagcggaaccgactactttgggtgtccgtgtttccttttattcttatattggctgcttatggtgacaattacagaattgttaccatatagctattggattggccatccggtgtgcaatagagctattatatacctatttgttggctttgtgccactaaccttaaaatctataaccaccctcgactttatactaaccctcaatacagtcaaac

SEQ ID NO: 1176 - DNA, 748 bp, Coxsackievirus
  misc_feature 1..748: note = A4,isolate HK458564/2016 polyprotein gene, complete1
  source 1..748: mol_type = genomic DNA
tttaaaaccaagctgtgggttgtacccactcacagggcccactgggcgctagcactctgattccgcggaatctttgtgcgcctgttttataacccctcccccgatttgtaatttagaagtaatgcacaccactgatcaacagcaagcgtggcgcgccagccatgttcagatcaaatacttctgttttcccggactgagtatcaatagactgctcacgcggttgaaggagaaaacgttcgttacccggctaactacttcgagaaacctagtagcaccatcgaaactgcagagtgtttcgctcagcactttccccgtgtagatcaggtcgatgagtcactgcaatccccacgggcgaccgtggcagtggctgcgttggcggcctgcctatgggcttgcccataggacgctctaatgtggacatggtgtgaagagtctattgagctagttggtagtcctccggcccctgaatgcggctaatcctaactgcagagcgcataccctcaatccagggggtggtgcgtcgtaacgggcaactctgcagcggaaccgactactttgggtgtccgtgtttccttttattcttatattggctgcttatggtgacaattgagagattgttgccatatagctattggattggccatccagtgtctaacagagcaattgtatacttgtttgttggattcgttccactgtcatatacatccactaacaccttatactatattacaaaattgaacacaagaaa

SEQ ID NO: 1177 - DNA, 748 bp, Human enterovirus sp.
  misc_feature 1..748: note = 90, isolate F950027, complete genome.1
  source 1..748: mol_type = genomic DNA
tttaaaacagctctagggttgttcccaccctagaggcccaagtggcggctagcactctggtattacggtacctttgtgcgcctgttttatatcccttcccccatgtaacttagaagatattaaacaaagttcaataggagggggtacaaaccagtgccaccacgaacaaacacttctgtttccccggtgaagctacatagactgttcccacggttgaaagtggcagatccgttatccgctttggtacttcgagaaacctagtaccaccttggaatcttcgatgcgttgcgctcagcactcaaccccagagtgtagcttaggtcgatgagtctggacgatcctcactggcgacagtggtccaggctgcgttggcggcctacctgtggcgaaagccacaggacgctagttgtgaacaaggtgtgaagagtctattgagctaccaaagagtcctccggcccctgaatgcggctaatcccaaccacggagcaagtgcccacaaaccagtgggtggcttgtcgtaatgcgtaagtctgtggcggaaccgactactttgggtgtccgtgtttccttttatttttatcatggctgcttatggtgacaatctaagattgttatcatatagctattggattggccatccggtgactaacagagatcttgcatacctgtttgttggttttactaaactagatatagttacatttaaaactcttctttatatcatacagttgaatagtagaaagagaaa

SEQ ID NO: 1178 - DNA, 748 bp, Enterovirus sp.
  misc_feature 1..748: note = A71 gene for polyprotein, polyprotein region,strain1
  source 1..748: mol_type = genomic DNA
ttaaaacagcctgtgggttgcacccacccacagggcccactgggcgctagcaccctgattctgcggaatctttgtgcgcctgttttacaacccttcccccgatttgtaatttagaagcaacgaacctcaccgatcaatagtaggcgtggcgcgccagctacgtcttgatcaagcacttctgtttccccgggctgagtatcaatagactgcttgcgcggtcgaaggagaaaacgctcgttatccggctaactacttcgagaaacccagtaacaccattgaaactgcagagtgtttcgctcagcacttcccccgtgtagatcaggtcgatgagtcactgcaatccccacgggcgaccgtggcagtggctgcgttggcggcctgcctatggggcaacccataggacgctctaaggtggacatggtgtgaagagtctattgagctagttagtagtcctccggcccctgaatgcggctaatcctaactgcggagcgcatgccctcaaaccagagggtggtgcgtcgtaatgggcaactctgcagcggaaccgactactttgggtgtccgtgtttccttttattctcttaatggctgcttatggtgacaattaaggaattgttaccatatagctattggattggccatccggtgtgtagtagagctattatttatctatttgttggttttgtaccattaaacttaaggtctgtcaccactttacaatatatactgatcctcaatacggttaagc

SEQ ID NO: 1179 - DNA, 748 bp, Enterovirus sp.
  misc_feature 1..748: note = A71 partial CDS gene for polyprotein,strain1
  source 1..748: mol_type = genomic DNA
gcgcccagtgggccctgtgggttgcacccacccacagggcccactgggcgctagcactctggcactaaggtacctttgtgcgcctgttttatttcccttcccccaaagtaatttagaagttatgcaccaacgatcaatagcaggtgtgacacaccagtcatatcttgatcaagtactcctgtttccccggaccgagtatcaataagctgctcgcgcggctgaaggagaaaacgttcgttacccgaccaactacttcgagaagcttagtaccaccatgaacgaggcagagtgtttcgttcagcacaaccccagtgtagatcaggctgatgagtcactgcaaaccccatgggcgaccatggcagtggctgcgttggcggcctgcccatggagaaatccatgggacgctctaattctgacatggtgtgaagagcctattgagctagttggtagtcctccggcccctgaatgcggctaatcctaactgcggagcacatgctcacaaaccagtgggtggtgtgtcgtaatgggtaactctgcagcggaaccgactactttgggtgtccgtgtttccttttattcttatgttggctgcttatggtgacaatcaaagaattgttaccatatagctattggattggccatccggtgtgcaacagagcaattgtttacctatttgttggttttgtaccactatcactgaagtctgtgatcactctcaaattcattctgaccctcaactcaatcaaac

SEQ ID NO: 1180 - DNA, 748 bp, unidentified
  source 1..748: mol_type = unassigned DNA; note = Human coxsackievirus A13, isolate CV-A13_68095, complete genome.1 sequence
ttaaaacagctctggggttgttcccaccccagaggcccacgtggcggccagtacaccggtatcacggtacccttgtacgcctgttttatactccctttcccccgtaacttagaagcaataaaaccaagttcaatagaaagggggtacaaaccagtaccaccacgaacaagcacttctgtttccccggtgatgttgtatagactgtttccacggttgaaaacgactgatccgttatccgctcttgtacttcgagaagcctagtatcatcttgggatcttcgatgcgttgcgctcaacactcgaccccggagtgtagcttaggccgatgagtctggacgttccccaccggcgacggtggtccaggctgcgttggcggcctacctgtggtccaaagccacaggacgctagttgtgaacaaggtgtgaagagcctattgagctacttgagagtcctccggcccctgaatgcggctaatcccaaccacggagcaggtggttgcaatccagcaactagcctgtcgtaacgcgcaagtctgtggcggaaccgactactttgggtgtccgtgtttccttttatttttcattggctgcttatggtgacaatctcagattgttatcataaagcgagttggattggccatccggtgaaaatcagatcgattatttacctttttgttggatttacacctttaacattacacactttgaaactcattgaaattgtactgttgatacggtattactatcaca

SEQ ID NO: 1181 - DNA, 748 bp, unidentified
  source 1..748: mol_type = unassigned DNA; note = Human coxsackievirus A13, isolate CV-A13_67001, complete genome.1 sequence
ttaaaacagctctggggttgttcccaccccagaggcccacgtggcggccagtacaccggtatcgcggtacccttgtacgcctgttttatactccctttccccgtaacttagaagcaatgaaaccaagttcaatagaaagggggtacaaaccagtaccaccacgaacaagcacttctgtctccccggtgaggtcgtatagactgttcccacggttgaaaatgactgatccgttatccgctcttgtacttcgagaagcctagtaccaccttggaatcttcgatgcgttgcgctcagcactcaaccccggagtgtagcttgggctgatgagtctggacattccccaccggcgacggtggtccaggctgcgttggcggcctacctgtggcccaaagccacaggacgctagttgtgaacaaggtgtgaagagcctattgagctacatgagagtcctccggcccctgaatgcggctaatcccaaccacggagcaggcgattgcaatccagcaattagcctgtcgtaacgcgtaagtctgtggcggaaccgactactttgggtgaccgtgtttccttttattcttacattggctgcttatggtgacaatcatagattgttatcataaagcgagttggattggccatccagtgagaattagatcgatcatctacctttttgttggatttacacctttaaaaccacacagcttgaatctcatcaaaattgtattgttgatacgacattattatcatt

SEQ ID NO: 1182 - DNA, 748 bp, unidentified
  source 1..748: mol_type = unassigned DNA; note = Human coxsackievirus A24, strain PUR82-10686 polyprotein gene,1 sequence
ttaaaacagctctggggttgttcccaccccagaggcccacgtggcggccagtacaccggtatcgcggtacccttgtacgcctgttttatactcccttccccccgtaacttagaagcatataacacaagttcaatagaagggggtgcaaaccagcaccaccacgaacaagcacttctgtttccccggtgagatcacatagattgttcccacggtcgaaagtgatcagtccgttatccgctcttgtacttcgagaagcctagtaccttcttggaatcttcgatgcgttgcgctcagcactcaaacccagagtgtagcttaggccgatgagtctggacattccccaccggtgacggtggtccaggctgcgttggcggcctacctgtgacccaaagtcacaggacgctagttgtgaacaaggtgagaagagcctattgagctacaagagattcctccggcccctgaatgcggctaatcccaaccatggagcaggtggctgcaaaccagcagacggcctgtcgtaacgcgcaagtccgtggcggaaccgactactttgggtgtccgtgtttcctttattttttattgtggctgcttatggtgacaatcattgattgttatcataaagcgaattggattggccatccagcgataattaaccagaccatttactagtttgttggatttactccactgacattctaaacactcaatctcatagaagtggtgaaattaattggataatttaactaca

SEQ ID NO: 1183 - DNA, 748 bp, unidentified
  source 1..748: mol_type = unassigned DNA; note = Human coxsackievirus A13 strain ARG98-10614, complete genome.1 sequence
ttaaaacagcctgtgggttgttcccaccccagaggcccacgtggcggctagtactccggtattacggtacccttgtacgcctgttttatactcccttcccccgcaacttagaagttttacaaaactcgttcaacagaagggggtacaaaccagtaccaccacgaacaagcacttctgtttccccggtgacgttgtatagactgttcccacggtcgaaagcgactgatccgttatccgctctggtacttcgggaagcctagtagcaccttgggatcttcgacgcgttgcgttcaacactcaaccccggagtgtagcttaggtcgatgagtctggacgctcctcaccggcgacggtggtccaggctgcgttggcggcctacctgtggtccaaagccacaggacgctagttgtgaacaaggtgtgaagagcctactgagctacctgagagtcctccggcccctgaatgcggctaatcctaaccacggatcaggtgattgcaaaccagcaattggcctgtcgtaatgcgcaagtctgtggcggaaccgactactttgggtgtccgtgtttccttttattttaaaaatggctgcttatggtgacaatcatagattgttatcataaagcgagttggattggccatccggtgaaagtaaagtatattatctacttgtttgtgggatttactcctataactgcatacacttatcatctcattacgatcacactattgattagatcctgttaccaca

SEQ ID NO: 1184 - DNA, 748 bp, unidentified
  source 1..748: mol_type = unassigned DNA; note = Human coxsackievirus A21 strain BAN00-10542 polyprotein gene,1 sequence
ttaaaacagcctgtgggttgttcccaccccagaggcccacgtggcggctagtactctggtatcgcggtacctttgtacgcctgttttatactcccttccccatgtaactttagaagcaattcaccaagttcaatagagggggtacaagccagtaccaccacgaacaagcacttctgttaccccggtgagtttgcataagctgtgcccacggctgaaagtaaatgatccgttatccgcttgagtacttcgagaagcctagtatcaccttggaatcttcgacgcgttgcgctcaacactctaccccgagtgtagcttaggctgatgagtctgggcatcccccaccggcgacggtggcccaggctgcgttggcggcctacccatggccaacgccatgggacgctagttgtgaacaaggtgtgaagagcctattgagctactcaagagtcctccggcccctgaatgcggctaatcctaaccatggagcaagtggccccaacccaggggatggcttgtcgtaacgcgcaagtccgtggcggaaccgactactttgggtgtccgtgtttccttttattttatatatggctgcttatggtgacaatcacagattgttatcataaagcgaattggattggccatccggtgaaatataagcacattatttatatctttgctggattcgctccgttgacacattcttcaccaaagttgatttatacagtcttagtaattagaaatcaccacttcagtc

SEQ ID NO: 1185 - DNA, 748 bp, unidentified
  source 1..748: mol_type = unassigned DNA; note = Human coxsackievirus A20 strain MOR83-10617 polyprotein gene,1 sequence
ttaaaacagcctgtgggttgttcccaccccagaggcccacgtggcggctagtactccggtattacggtacccttgtacgcctgttttatactcccttcccctgtaacttagaagcaccgaacacaagttcaatagaagggggtacaaaccagtaccaccacgaacaagcacttctgtttccccggtgaagttgtattaaactgttcccacggttgaaagcggctgatccgttatccgctcatgtacttcgggaagcctagtaccatcttggaatcttcgatgcgttgcgctcagcactcaaccccagagtgtagcttaggtcgatgagtctggacaaacctcactggcgacagtggtccaggctgcgttggcggcctacctgtggcccaaagccacaggacgctagttgtgaacaaggtgtgaagagcctactgagctacatgagagtcctccggcccctgaatgcggccaatcccaaccacggagcaggcgactacaagccagtggttagtctgtcgtaatgcgcaagtctgtggcggaaccgactactttgggtgtccgtgtttccttttattttgacattggctgcttatggtgacaatcatagattgttatcataaagcgaattggattggccatccggtgagagtcaaaactattatctacctttttattggatttactccactgaacgcttataccccagtccttattagacttgcattgttgattagatatcactattata

SEQ ID NO: 1186 - DNA, 748 bp, Human poliovirus 2
  misc_feature 1..748: note = isolate CHN1025 polyprotein gene, complete cds.1
  source 1..748: mol_type = genomic DNA
ttaaaacagctctggggttgtacccaccccagaggcccacgtggcggccagcactccggtattacggtacccttgtgcgcctgttttatactccctctcccgcaacttagaagcacgaaaccaagttcaatagaagggggtacaaaccagtaccaccacgaacaagcacctctgtttccccggtgacattgcatagactgctcacgcggttgaaagtgatcgatccgttacccgcttgtgtacttcgaaaagcctagtatcgccttggaatcttcgacgcgttgcgctcagcacccgaccccggggtgtagcttaggctgatgagtctggacattcctcaccggtgacggtggtccaggctgcgttggcggcctacctatggctaacgccataggacgctagttgtgaacaaggtgtgaagagcctattgagctacataagagtcctccggcccctgaatgcggctaatcctaaccacggagcaggcggtcgcgaaccagtgactggcttgtcgtaacgcgcaagtctgtggcggaaccgactactttgggtgtccgtgtttcctgttatttttatcatggctgcttatggtgacaatcagagattgttatcataaagcgaattggattggccatccggtgagtgttgtgtcaggtatacaaccgtttgttggaaccactgtgttagctttacttctcatttaaccagttaatcaaaaacaatacgaggacaaaacaacaatactaca

SEQ ID NO: 1187 - DNA, 748 bp, Human poliovirus 2
  misc_feature 1..748: note = strain NIE1519322, complete genome.1
  source 1..748: mol_type = genomic DNA
ttccgctcctctggggttgttcccaccccagaggcccacgtggcggctagtactccggtattacggtacccttgtacgcctgttttatactcccttccccgcaacttagaagaattaaaccaagttcaatagaagggggtacaagccagtaccaccacgaacaagcacttctgtttccccggtgacgccgtatagactgtacccacggttgaaaacgactgatccgttatccgctttcgtacttcgagaagcctagtatcatcttgggatcatcgatgcgttgcgctcagcactcaaccccggggtgtagcttaggccgatgagtctggacattcctcaccggtgacggtggtccaggctgcgttggcggcctacctgtggcccaaagccacaggacgctagttgtgaacaaggtgtgaagagcctattgagctacgaaagattcctccggcccctgaatgcggctaatcccaaccacggagcaagtgctcgcacaccagtgagtagcttgtcgtaacgggtaactctgtggcggaaccgactactttgggtgtccgtgtttcctgttatttttatcatggctgcttatggtgacaatcagagattgttatcataaagcgaattggattggccatccggtgagcgttgtgtcaggtatacaactgtttgttggaaccactgtgttagctttacttctcatttaaccaatttatcaaaaataatacgaggataaaacaacaatactaca

SEQ ID NO: 1188 - DNA, 748 bp, Human poliovirus 3
  misc_feature 1..748: note = strain NIE1219535, complete genome.1
  source 1..748: mol_type = genomic DNA
gttaaaacagctctggggttgttcccaccccagaggcccaagtggcggctagtactccggtatcacggtacccttgtacgcctgttttatactcccttcccccgtaacttagaagagttaaaccaagttcaatagaagggggtacaaaccagtaccaccacgaacaagcacttctgtttccccggtgatattgtatagactgtacccacggtcgaaaatgattgatccgttatccgctctcatacttcgagaagcctagtatcatcttggaatcttcgatgcgttgcgctcggcactcgatcccggagtgtagcttaggtcgatgagtctggacactcctcaccggtgacggtggtccagactgcgttggcggcctacctgtggtccaaagccacaggacgctagttgtgaacaaggtgtgaagagcctattgagctatgagagagtcctccggcccctgaatgcggctaatcccaaccacggagcgagagtgcgcaagccagcgtatatctcgtcgtaacgcgcaagtctgtggcggaaccgactactttgggtgtccgtgtttccttttatttttgtattggctgcttatggtgacaatcacagattgttatcataaagcgaattggattggccatccggtgaaagtgaaatacattatttgcttatttattggattcagtccacctaattgctatactcacgaacccaccacagccgttttgttaactgaaagccggtaccaata

SEQ ID NO: 1189 - DNA, 748 bp, Human poliovirus 3
  misc_feature 1..748: note = strain PAK1019536, complete genome.1
  source 1..748: mol_type = genomic DNA
tggggttaaaacagctctggggttgttcccaccccagaggcccacgtggcggctagtactctggtatcatggtacctttgtacgcctgttttatacccctaccccacgtaactttagaagcaactcaacaagttcaatagggggggtacaaaccagtaccaccacgaacaagcactcctgttaccccggtgatcttgcataagctgtgcccacggctgaaggcgagagatccgttatccgcttgagtacttcgagaagcctagtatcaccttgggatcttcgacgcgttgcgctcagcactccacccgagtgtagcttaggctgatgagcctgggcattccccaccggcgacggtggcccaggctgcgttggcggcctacccatggctaacaccatgggacgctagatgtgaacaaggtgtgaagagcctattgagctactcaagagtcctccggcccctgaatgcggctaatcccaaccacggagcaggtgtcttcaacccagaaggtagcctgtcgtaacgcgtaagtctgtggcggaaccgactactttgggtgtccgtgtttccttttatcttttatatggctgcttatggtgacaatcacagattgttatcataaagcgatttggattggccatccggtgaagtacaaacacattatctacttgtttgttggatttactccactcacacaccccacccccaatataacatctattgttttgttaacaagaaattactttcgaa

SEQ ID NO: 1190 - DNA, 749 bp, Human cosavirus
  misc_feature 1..749: note = B1 polyprotein gene, complete cds.1
  source 1..749: mol_type = genomic DNA
ttgccagttttttgaaacgtgtggtttgacgtctaaccattatggcagtgggtggagtactgcaaagatgtcaccgtgctttacacggtttttgaaccccacaccggctgtttggcgcttgcaggacagcaggtttattttcttttaactctctctttctagccacacacgatctatgtgtgtgggcggagtgatactcccgttccttcttggacaggcggcctccacgccctttgtggatcttaaggctaccaagtcactggtgttggaaagtgaagagaaaggagttccttgggaactacatgtggcattgacagaggttgtagcgatgctgtgtgtgtgtgcggattacccccgtggcgacacggaccccacaggccaaaagccctgtccgaaaggacccacacagtggagcaaccccagctcccctcttcaatgttttgtgttagcaaccttggtattattttctctcaagcttccaatacaccgggccccaaagatgtcctgaaggtaccccgtgtatctgaggatgagcaccatcaactacccggacttgttctttcgagaacagacgcatgtggtaacccagccccgatcctaaggggtcggggcttttgctcactcagcacaggatctgatcaggagacctcccccccctgctttacagggggcgggggtttaaaaattgcccaaggcctggcaaataacctaggggactaggttttcctttttattttaaagttgtcaat

SEQ ID NO: 1191 - DNA, 749 bp, Human enterovirus sp.
  misc_feature 1..749: note = 90 polyprotein gene, complete cds.1
  source 1..749: mol_type = genomic DNA
ttaaaacagctcttagggttgttcccaccctagaggcccacgtggcggctagcactctggtatcacggtacctttgtgcgcctgttttatacccccctcccccatgtaacttagaagctattaaataaagttcaatagaagggggtacaaaccagtaccaccacgaacaagcacttctgtttccccggtgaagctacatagactgttcccacggttgaaagtggcagatccgttatccgctttggtacttcgagaaacctagtatcatcttggaatcttcgatgcgttgcgttcagcactcaaccccagagtgtagcttaggtcgatgagtctggacgatcctcactggcgacagtggtccaggctgcgttggcggcctacctgtggcgaaagctacaggacgctagttgtgaacaaggtgtgaagagtctattgagctatcaaagagtcctccggcccctgaatgcggctattcccaaccacggagcaagtgctcacaaaccagtgagtggcttgtcgtaacgcgcaagtctgtggcggaaccgactactttgggtgcccgtgtttccttttatttttatcatggctgcttatggtgacaatctaagattgttatcatatagctattggattggccatccggtgactaacagagatatcatatattcatttgttggttttgttaaactagactcaactacattcaagtctcttctcttcatcatacaattgaataatagaaagagaaa

SEQ ID NO: 1192 - DNA, 749 bp, Enterovirus sp.
  misc_feature 1..749: note = A90,isolate PSH40F/XJ/CHN/2011, complete genome.1
  source 1..749: mol_type = genomic DNA
ttaaaacagctctgggggttgttcccaccctagaggcccacgtggcggctagcactctggtatcacggtacctttgtgcgcctgttttatatccctttccccatgcaacttagaagttttttaaacaaagttcaatagaagggggtacaaaccagtgccaccacgaacaagcacttctgtttccccggtgaagctgcatagactgtccccacggttgaaagcggcagatccgtcatccgctttggtacttcgagaaacctagtatcaccttggaatcttcgatgcgttgcgctcagcactcaaccccagagtgtagcttaggttgatgagtctggacaatcctcactggcgacagtggtccaggctgcgttggcggcctacctgtggtgaaaaccacaggacgctagatgtgaacaaggtgtgaagagtctattgagctaccaaagagtcctccggcccctgaatgcggctaatcctaaccacggagcaagtacccacaaaccagtgggcagcttgtcgtaacgcgcaagtctgtggcggaaccgactactttgggtgtccgtgtttcctttttattttatcatggctgcttatggtgacaatctaagattgttatcatatagctattggattggccatccggtgactaacagagatattatatacctatttgttggttttgttagattaaatactatcacattcaaaactcttctttatatcatacaattgaacagtagaaagagaaa

SEQ ID NO: 1193 - DNA, 749 bp, Human enterovirus sp.
  misc_feature 1..749: note = 71isolate 237-TW86 polyprotein gene, complete1
  source 1..749: mol_type = genomic DNA
ttaaaacagcctgtgggttgttcccacccacagggcccactgggcgctagcactctgatttcacgaaatccttgtgcgcctgttttatatcccttccccccagtctgaaacatagaagcaatgcgcatcactgatcaatagcaggcgtaacgcgccagttacgtcatgatcaagcacatctgtctccccggaccgagtatcaatagactgcttgcgcggttgaaggagaaacagttcgttacccggctaactacttcgagaagcccagtagcaccatggaagctgcagggtgtttcgctcagcacttcccccgtgtagatcaggtcgatgagtcactgcaacccccacaggcgactgtggcagtggctgcgttggcggcctgcctatggggagacccataggacgctctaatgtggacatggtgtgaagagcctattgagctagttagtagtcctccggcccctgaatgcggctaatcctaactgcggagcacacgccctcaacccagagggtagtgtgtcgtaacgggcaactctgcagcggaaccgactactttgggtgtccgtgtttcttattattcttatattggctgcttatggtgacaattacagaattgttaccatatagctattggattggccatccggtgtgcaatagagctgttatatacctatttgttggttttgtgccactgactttaaaatctatagttactcttaatttcatattggctctcaacacaattaaac

SEQ ID NO: 1194 - DNA, 749 bp, Coxsackievirus
  misc_feature 1..749: note = A16 gene for polyprotein,isolate1
  source 1..749: mol_type = genomic DNA
ttaaaacagcctgtgggttgttcccacccacagggcccactgggcgctagcactctggtattacggtacctttgtgcgcctgttttatgccccttaccccttaaattggtaacttagaagttttacatacctgcgaccaatagcgggcatgacgcaccagccatgtcttggtcaagcacttctgttcccccggactgagtatcaatagactgctcacgcggtcgaaggagaaaacgttcgttatccggctggctacttcgagaaacccagtaacaccatgaaagttgcagagtgtttcgctcagcactacccccgtgtagatcaggtcgatgagtcactgcgaaccccacgggcgaccgtggcagtggctgcgctggcggcctgcccatggggtgacccatgggacgctctaatacagacatggtgtgaagagtctattgagctagtcagtagtcctccggcccctgaatgcggctaatcctaactgcggagcacatgccctcaatccagggggtggtgtgtcgtaacgggtaactctgcagcggaaccgactactttgggtgtccgtgtttccttttattcctatcatggctgcttatggtgacaattgaaagattgttaccatatagctactggattggccacccggtgtctaacagagctattgtttatctatttgttgggtacgtccttcttgactataaggcccttcagactcttaagtacatcttgtacctcaatcaaaagag

SEQ ID NO: 1195 - DNA, 749 bp, Coxsackievirus
  misc_feature 1..749: note = A8,isolate HZ040/SD/CHN/2015 polyprotein gene,1
  source 1..749: mol_type = genomic DNA
ttaaaacagcctgtgggttgtacccacccacagggcccactgggcgccagcactctgattctacggaatctttgtgcgcctgttttataatcccctccccccaagtttgtaatttagaagcaaagtaccgtaacgatcaacagcaggcgtggcgcaccagccatgtctcgatcaagcacttctgttcccccggacagagtatcaatagactactcacgtggttgaaggagaaaacgtccgttatccggctaactacttcgagaaacctagtaacaccattgaaactgcagagcgtttcgctcagcacttaccccgtgtagatcaggtcgatgagtcactgcattccccacgggcgaccgtggcagtggctgcgttggcggcctgcctatggggtcacccataggacgctctaatgtggacatggtgcgaagagtctattgagctagttagtagtcctccggcccctgaatgcggctaatcctaactgcggagcgtatgccctcaaaccagggggtggtgcgtcgtaacgggtaactctgcagcggaaccgactactttgggtgtccgtgtttccttttatttccttactggctgcttatggtgacaattgaagaattgttgccatatagctattggattggccatccggtgtgtaacagagcaatcatctatttgttcgtcgggtatatcccactaacgctcaactcttttaacacattacaatacatactaatcctaaatacaagaaa

SEQ ID NO: 1196 - DNA, 749 bp, Human enterovirus sp.
  misc_feature 1..749: note = 99,strain BAN00-10461 polyprotein gene, complete1
  source 1..749: mol_type = genomic DNA
ttaaaacagcctgtgggttgttcccaccccagaggcccacgtggcggccagtactccggtattacggtacccttgtacgcctgttttatactccctttccctagtaacttagaagttgtacaattaagttcaatagaagggggtacaaaccagtaccaccacgaacaagcacttctgtttccccggtgaagttgcatagactgtccccacggttaaaagtgactgatccgttatccgctcatttacttcgggaagcctagtatcatcttgggatcttcgatgcgttgcgctcaacactcaaccccagagtgtagcttaggtcgatgagtctggacactccccactggtgacagtggtccaggctgcgttggcggcctacctgtggtccaaagccacaggacgctagtagtgaacaaggtgtgaagagcctactgagctaattgagagtcctccggcccctgaatgcggataatcctaaccacggagcaggtgatcacaatccagtgattggcctgtcgtaatgcgtgagtctgtggcggaaccgactactttgggtgtccgtgtttcctttttactcttattatggctgcttatggtgacaatcatagattgttatcataaagcgaattggattggccatccggtgagaattaaatcgctaatatatctatttgttggatttaccaaaatcaactacagaacactagccttaattcgaatcgtgttactgatcagattccaccatcaca

SEQ ID NO: 1197 - DNA, 749 bp, unidentified
  source 1..749: mol_type = unassigned DNA; note = Human coxsackievirus A20 serotype CAV20a, complete genome.1
ttaaaacagctctggggttgttcccaccccagaggcccacgtggcggctagtactctggtattacggtacctttgtacgcctgttttatactcccttcccctccgtaacttagaagcatgagaatcaagttcaatagaagggggtacaaaccagtaccaccacgaacaagcacttctgtcaccccggtgaggttgtatagactgtccccacggttgaaagcgactgatccgttatccgctcaattacttcgggaagcctagtaccatcctggaatcttcgatgcgttgcgctcagcactcaaccccagagtgtagcttaggccgatgagtctggacaatcctcactggcgacagtggtccaggctgcgttggcggcctacctgtggtccaaagccacaggacgctagttgtgaacaaggtgcgaagagcctactgagctaattgagagtcctccggcccctgaatgcggctaatcccaaccacggagcaggcggttgcaaaccagcaactggcttgtcgtaacgcgaaagtctgtggcggaaccgactactttgggtgtccgtgtttccttttattcttatgatggctgcttatggtgacaatcgttgattgttatcataaagcgaattggattggccatccggtgaaaatcaaatctattgtttacctgttcattgggttcactccactaacttcacacactatatatctcattaaggtcgtattactagtaaggaattatcaccaaa

SEQ ID NO: 1198 - DNA, 749 bp, Human poliovirus 2
  misc_feature 1..749: note = strain NIE0711441, complete genome.1
  source 1..749: mol_type = genomic DNA
ttaaaacagctctggggttgttcccaccccagaggcccacgtggcggctagtactctggtattacggtacccttgtacgcctgttttatactcccttccccgtaacttagaagaaataaaccaagttcaatagaagggggcacaaaccagtgtcaccacgaacaagcacttctgtttccccggtgatattgtatagactgtacccacggttaaaagcgattgatccgttatccgctcttgtacttcgaaaagcctagtatcatcttggaatcttcgatgcgttgcgctcaacactcaaccccagagtgtagcttaggtcgatgagtctggacattccccaccggcgacggtggtccaggctgcgttggcggcctacctgtggcccaaagccacaggacgctagttgtgaacaaggtgtgaagagcctattgagctgcaagagagtcctccggcccctgaatgcggctaatcccaaccacggagcaagtgctcacacaccagtgagtggcttgtcgtaacgcgcaagtctgtggcggaaccgactactttgggtgtccgtgtttcctgttatttttatcatggctgcttatggtgacaatcagagattgttatcataaagcgaattggattggccatccggtgagtgttgtgtcaggtatacaactgtttgttggaaccactgtgttaactttacttctcatttaaccaattaatcaaaaacaatacgaggataaaacaacaatactaca

SEQ ID NO: 1199 - DNA, 749 bp, Human poliovirus 2
  misc_feature 1..749: note = strain EGY93-034, complete genome.1
  source 1..749: mol_type = genomic DNA
ttaaaacagctctggggttgttcccaccccagaggcccacgtggcggccagtacaccggtattacggtacccttgtacgcctgttttatactcccttccccctgtaacttagaagctcaagaatccaagttcaatagaagggggtacaaaccagtaccaccacgaacaagcacttctgtttccccggtgaagttgcatagactgttcccacggttgaaagtgactgatccgttatccgctcaactacttcgagaagcccagtatcatcttggaatcttcgatgcgttgcgctcagcactcgaccccggagtgtagcttaggctgatgagtctggacgttccccactggtgacagtggtccaggctgcgttggcggcctacctgtggtccaaagccacaggacgctagttgtgaacaaggtgtgaagagcctattgagctaattgagaatcctccggcccctgaatgcggctaatcccaaccacggagcaggtggttacaacccagtaactggcctgtcgtaacgcgtaagtctgtggcggaaccgactactttgggtgtccgtgtttccttttattcctataatggctgcttatggtgacaatcacagattgttatcataaagcgaattggattggccatccggtgagagttaagacaattatccacttgttcattggatttacccctctgactaattacacactcaaccttattagaattgtagttctagtgagatactactgtcata

SEQ ID NO: 1200 - DNA, 749 bp, Human poliovirus 2
  misc_feature 1..749: note = strain NIE0110767, complete genome.1
  source 1..749: mol_type = genomic DNA
ttaaaacagctctggggttgttcccaccccagaggcccacgtggcggctagtactccggtattacggtacccttgtacgcctgttttatactcccttccccgtaacttagaagcaataaatcaagttcaccaggagggggtacaaaccagtaccaccacgaacaagcacttctgtttccccggtgacgttgcatagactgtccccacggttgaaagcgactgatccgttatccgctcgtgtacttcgagaagcctagtatcatcttggaatcttcgatgcgttgcgctcagcactcgaccccggagtgtagcttaggctgatgagtctggacattcctcaccggcgacggtggtccaggctgcgttggcggcctacctgtggctcaaagccacaggacgctagttgtgaacaaggtgtgaagagcctattgagctacacgagaatcctccggcccctgaatgcggctaatcccaaccacggagcaagtgctcacaaaccagtgagtggcttgtcgtaacgggtaactctgtggcggaaccgactactttgggtgtccgtgtttcctttttatttttgtatggctgcttatggtgacaatcagagattgttatcataaagcgtattggattggccatccggtgagtgttgtgtcaggtatacaactgtttgttggaaccactgtgttagctttacttctcatttaaccaattaatcaaaaacaatacgaggataaaacaacaatactaca

SEQ ID NO: 1201 - DNA, 750 bp, Rabbit picornavirus
  misc_feature 1..750: note = strain Rabbit01/2013/HUN, complete genome.1
  source 1..750: mol_type = genomic DNA
ttccccttcccccttttcacggcccggccgcccgccgggtcgtcacccgttcagacacctacgggttatctgttcgggctataaatatgggcattcctcttcccccttccccttttgaagatgagtgcgcatattcttgactccgcctggattggccgcccaaggcgtgaacaagcagctaggccaccatgacactgcggtggtgtccgaacccgcgggtgccttcacgggcacctgtggtatgtaggactcccaccgtggtcttccctttccccctcaatctttccccctggttcgactaacgggaccagtgctggaacctgtccggtgaacggtatagcaggcccccccggcagaaacacccggtgcttaccccttaaggctagcccccttccatgaatttggttggggcaactagtgggtgtacagttggcgtgaaccctccggtctaggagtgctcttgcccaatcctctgtgtgtgccttgcagtagggactggcaatccttcgcgtaggtgatccgctgtgccatgccatcctggcgacaggaggcccagtgtgcgcaacctacgtcccttctgggtgctgcattgcattacctttggagtaagcttggtgtgccgaaaccccagggtttacgtaccactcgtggtgtgaggaatgtgccgcaggtaccccatccttgaggtgggatctgagcggtagctaattgtctagcaccactttcttccttttttctttgctggtcacg

SEQ ID NO: 1202 - DNA, 750 bp, Coxsackievirus
  misc_feature 1..750: note = A14 gene for polyprotein, polyprotein region,strain1
  source 1..750: mol_type = genomic DNA
ttaaaacagctctggggttgtacccactcacagggcccactgggcgctagcactctgattctacggaatccttgtgcgcctgttttataaccccctcccaatatgtaacttagaagcagcacatactaccgatcaatagtgggcatggcgcaccagccatgtctcgatcaagcacttctgtttccccggactaagtatcaatagactgctcacgcggttgaaggagaaagcgtccgttacccggctaactacttcgagaaacccagtagcaccactgaagctgcagagtgtttcgctcagcacttcccccgtgtagatcaggtcgatgagtcaccgcaatccccacgggcgaccgtggcggtggctgcgtggcggcctgcctgtggggcaacccacaggacgctctaaagtggacatggtgcgaagagtctattgagctagttagtagtcctccggcccctgaatgcggctaatcctaactgcggagcgcatgccttcaaaccagatggtagtgcgtcgtaatgggcaactctgcagcggaaccgactactttgggtgtccgtgtttccttttattcttacattggctgcttatggtgacaatcacagaattgttaccatatagctattggattggccatccggtgtgtaatagagcaataatttactcttttgttgcttttgttccattgaccttcactacactgaacactttacagtacatacttcaactcaactccagaaagcaatc

SEQ ID NO: 1203 - DNA, 750 bp, Enterovirus sp.
  misc_feature 1..750: note = A120,strain TRT/2013-23196, complete genome.1
  source 1..750: mol_type = genomic DNA
ttaaaacagcctatgggttgcacccacccatagggcccactgggcgctagcactctgattctacggaatctttgtgtgcctgttttatagtccctccccccgacttgtaacttagaagtaatgcaaaccactggtcaatagcaggcatgacgcaccagtcatgtcttgatcaagcacttctgtccccccgggctgagtatcaatagactgctcacgcggttgaaggagaaaacgctcgttacccggctaactacttcgagaaacctagtagcaccattgaaactgcagagcgtttcgctcagcactccccccgtgtagatcaggtcgatgagtcactgcactcctcacgggcgaccgtggcagtggctgcgttggcggcctgcctatggggtaacccataggacgctttaatgtggacatggtgcgaagagtctattgagctagttagtagtcctccggcccctgaatgcggctaatcctaactgcggagcacacgcccttaatccaaggggtagtgtgtcgtaatgggcaactctgcagcggaaccgactactttgggtgtccgtgtttccttttatttttatactggctgcttatggtgacaattgagagattgttaccatatagctattggattggccatccggtgtgcaacagagctattatctacctgtttgttggatatataccactcacagctgacaaaacccttatcacattattgtacatcctacacttgaactcaagaaa

SEQ ID NO: 1204 - DNA, 750 bp, Coxsackievirus
  misc_feature 1..750: note = A24,strain K282/YN/CHN/2013, complete genome.1
  source 1..750: mol_type = genomic DNA
ttaaaacaagctgtggggttgttcccaccccagaggcccacgtggcggctagtactccggtattgcggtacccttgtacgcctgttttatactccctgcccccgtaacttagaagcacaaagaaatcaagttcaacagcagggggtacaaaccagtaccaccacgaacaagcacttctgttcccccggtgacgtcgcatagactgtgcccacggttgaaaacgattgatccgttaaccgctcttgtacttcgagaagcctagtatcacattggaatctacgatgcgttgcgctcagcactcaaccccagagtgtagcttaggctgatgagtctggacattcctcaccggtgacggtggtccaggctgcgttggcggcctacctgtggcccagagccacaggacgctagttgtgaacaaggtgtgaagagcctattgagctacaagagagtcctccggcccctgaatgcggctaatcccaaccatggagcaggtggtcacaatccagtgattggcctgtcgtaatgcgcaagtccgtggcggaaccgactactttgggtgtccgtgtttccttttattttacacttggctgcttatggtgacaatcatagattgttgtcataaagcaaattggattggccatccggtgaaaactaaatacgctatttacctgtttgttggatttataccttcaacttacaacacttattgtattatttgcattgtgttattgattagacaacaatactaca

SEQ ID NO: 1205 - DNA, 750 bp, Human poliovirus 2
  misc_feature 1..750: note = strain NIE0711199, complete genome.1
  source 1..750: mol_type = genomic DNA
ttaaaacagctctggggttgttcccaccccagaggcccacgtggcggccagtactccggtattacggtacccttgtacgcctgttttatactcccttcccctgtaacctagaagaagtaaattaagttcaataggagggggtacaaaccagtaccaccacgaacaagcacttctgtttccccggtgacgttgtatagactgtgtccacggtcgaaagcaattgatccgttatccgctcttgtacttcgagaagcctagtaccagcttggaatcttcgatgcgttgcgttcagcactcaatcccagagtgtagcttaggttgatgagtctggacatccctcaccggcgacggtggtccaggctgcgttggcggcctacctgtggcccaaagccacaggacgctagttgtgaacaaggtgtgaagagcctattgagctacaagagagtcctccggcccctgaatgcggctaatcccaaccacggagcaagggtgcatgaaccaatgcatgccttgtcgtaatgcgtaagtctgtggcggaaccgactactttgggtgtccgtgtttccttttatttttatattggctgcttatggtgacaatcagagattgttatcataaagcgaattggattggccatccggtgagtgttgtgtcgggtatacaactgtttgttggaaccactgtgttaactttgcttcttatttaaccaattaatcaaaaacaatacgaggataaaacaacaataccaca

SEQ ID NO: 1206 - DNA, 750 bp, Human poliovirus 2
  misc_feature 1..750: note = strain NIE0811456, complete genome.1
  source 1..750: mol_type = genomic DNA
ttaaaacagctctggggttgttcccaccccagaggcccacgtggcggctagtactccggtattccggtacccttgtacgcctgttttatactcccctcccccgtaacttagaagaaacaaaccaagttcactaggagggggtacaaaccagtaccaccacgaacaagcacttctgtttccccggtgatattgtatagactgtacccacggtcgaaaacgattgatccgttatccgcttctgtacttcgagaagcctagtaccactttggaatcttcgatgcgttgcgctcagcactcaaccccagagtgtagcttaggtcgatgagcctggactttcctcactggcgacagtggtccaggctgcgttggcggcctacctgtggcccaaagccacaggacgctagttgtgaacaaggtgtgaagagcctattgagctacaaaagagtcctccggcccctgaatgcggctaatcccaaccatggagcaagggtgtacgaaccagtacatatcttgtcgtaacgcgcaagtccgtggcggaaccgactactttgggtgtccgtgtttccttttattttcatactggctgcttatggtgacaatcatagattgttatcataaagcgaattggattggccatccggtgagtgttgtgtcaggtatacaattgtttgttggaaccactgtgtcagctttacttctcatttaaccaattaatcaaaaacaatacgaggataaaacaacaataccaca

SEQ ID NO: 1207 - DNA, 751 bp, Ljungan virus
  misc_feature 1..751: note = genomic RNA, nearly complete genome,strain: Fuz1.1
  source 1..751: mol_type = genomic DNA
cgcggccatgtttgtaagcatggccgtagggaccccccggtgggctgggtgcacttctcgccttttaggtgggggtgtggctcggctaccaccactgggtggcaaccagttttcatgtaatagccaaacaagtaacattaacacctaagcttctggtgcaccaccctgtctggttgaagccgcttggaataaaattggatagctaaggtggattgtcaaacatgcatttctgtctcctggatatccttaatatccaggtaagggctgtacccgggcggtcctactcttcacaggagtctgcataggtggctttcacctctggacagtgcactccctcccgctccctcacccaagttagctggaacacagaatgaaaaatgagcgaacactagaaccaggtgtagcgaccacacatatgccagcggatttcccctagtggtaacactagcctctgggcccaaaaggcacgtctttgaccatatgtgtgcacaatcccagtgatggttctatctagtagtttatttagtaattttgtgaactggctcactgaacgtgagttggaggcttaggaatggcgggctgaaggatgccctgaaggtacccgtaggtaacgataagctcactatggatctgatcaggggcccaccagcatatttgctgggtagaagtcttcggaccttgggttaaaaaacgtctaggcccgtcccccagagggatctggggtttccctaataaccccaatactgacatt

SEQ ID NO: 1208 - DNA, 752 bp, Rosavirus C
  misc_feature 1..752: note = strain RRTPC2A polyprotein gene, complete cds.1
  source 1..752: mol_type = genomic DNA
ggttcccgcccccacctccgtcacagcctttcgaggctgtgctggaacggcgacagggagtttagacttcttgccgctatgggttcttctgccccgtgttttggacgcccggcatggcgttaaactgtcattccccctaccctttccctatttgtaactaagttgtgcctcgcccagacaggctgctaagacgcttgttgctacagcatgtttggactagcgagctctccataagtaaacttttccacccccttgggtgtctttgcccttggggacggtctggagccccgttgtcttagacagagtgtgtcggtgcaggctttctgctctggacccatgccggccacaaactcccatcagtgttgtgaagacggtaggacacaagtgaacaggtacagggaactttcttggaatgtagcgattactgcaagtgagcggacctcccctggtggtaacaccagcctctcaggccaaaagccacggtgttaacagcacccttgcagtaggccactgccccgtggtctccaggatctttctctttactcctagtaatttgtgaatctagctgttctgaagcatactggtgcaaaggctaaggatgccctgaaggtacccacaggtaacgttaagacactgtggatctgatcaggggcctgaatactgaagctttacagaggtagttcaggttaaaaaacgtctatgcctttcccccacgggagtgggggttcccccacacttttatcacaggcact

SEQ ID NO: 1209 - DNA, 753 bp, Coxsackievirus
  misc_feature 1..753: note = A14,isolate PZ05Y/JS/2012, complete genome.1
  source 1..753: mol_type = genomic DNA
tttaaaacaagctctggggttgtacccacccacagggcccactgggcgctagcactcttattctacggaatatttgtgcgcctgttttatagccctcccccattaagtaacttagaagtgatgtgcagcacagatcaatagcaggcatagcgcaccagctgtgtcttgatcaagcactcctgtttccccggactgagtatcaataaactgctcacgcggttgaaggagaaaacgttcgttacccggctaaccacttcgagaaacttagtaacaccattgaagctgtagagtgtttcgctcagcacttccccagtgtagatcaggctgatgagtcactgcgaccctcacgggcgaccgtggcagtggctgcgttggcggcctgcctatggggcaacccataggacgctctaaagtggacatggtgtgaagagtctattgagctggttagtagtcctccggcccctgaatgcggctaatcctaactgcggagcgcatgccctcaaaccagggggtggtgcgtcgtaacgggtaactctgcagcggaaccgactactttgggtgtccgtgtttccttttattctcatattggctgcttatggtgacaattgaagaattgttaccatatagctattggattggccatccggtgtgtaacagagcgattatcttctcttttattgcctttgtcccattgaccccaactgcgttaaacactctgcaatatatactctatcttaactctaggaagcgaac

SEQ ID NO: 1210 - DNA, 753 bp, Human enterovirus sp.
  misc_feature 1..753: note = 99,strain OMA99-10696 polyprotein gene, complete1
  source 1..753: mol_type = genomic DNA
ttaaaacagcctgtgggttgttcccaccccagaggcccacgtggcggctagtactctggtattacggtacccttgtacgcctgttttatactcccttcccatgtaacttagaagcaaataacacaagttcaatagaagggggtacaaaccagtaccaccacgaacaagcacttctgttaccccggtgaagttgcatagactgttcccacggttgaaagcgaccgatccgttatccgctcaagtacttcgagaagcctagtatcaccttggaatcttcgatgcgttgcgctcatcactcaaccccagagtgtagcttgggctgatgagtctggacgtccctcactggcgacagtggtccaggctgcgttggcggcctacctatggcccaaagccataggacgctagttgtgaacaaggtgtgaagagcctattgagctacttgagagtcctccggcccctgaatgcggctaatcccaaccacggatcaggtgattgcaaaccagcaattagcctgtcgtaacgcgcaagtctgtggcggaaccgactactttgggtgtccgtgtttccttttattttactattggctgcttatggtgacaatcattgattgttatcataaagcgaattggattggccatccggtgaaagtaaaacaggttatttacctttttgttggatttactgcattatctaagcacactccagatttaattcgtatcgttcttgcgattaggagagcacacttttccagca

SEQ ID NO: 1211 - DNA, 753 bp, Enterovirus sp.
  misc_feature 1..753: note = B,isolate NL/18-111/FAE/2018 polyprotein gene, complete1
  source 1..753: mol_type = genomic DNA
ttgatcaaggcccagttggtgcactgggttgatcccacccacagggcccactgggcgcatgcactctggtatcacggtacctttgtgcgcctgttttatctcccctcccccccgtgtaatttagaagcataagcacaatgatcaatagacaacccagtgcaccaactgggccttgatcaagcacttctgttaccccgggccgactatcaataggctgctcacgtggctgaaggagaaaacgctcgttacccggccagttacttcgagaagcctagtaccaccatgaacgttgcgcagtgtttcgctccgcacaaccccagtgtagatcaggtcgatgagtcaccgcatcccccacgggtgaccgtggcggtggctgcgttggcggcctgcccatggggtaacccatgggacgctacaatactgacatggtgtgaagagtctattgagctaactggtagtcctccggcccctgaatgcggctaatcccaactgcggagcacgtgcttccaatccaggaggtagcgtgtcgtaacgggcaactctgcagcggaaccgactactttgggtgtccgtgtttcctttatctctttattggctgcttatggtgacaattgaaagattgttgccatatagctattggattggccatccggtatctaacagagcaatcatatacctgtttgttggatttgttccacttaacaaaacagagttccgtactttgtgttatattattaggttgaacacatcaaa

SEQ ID NO: 1212 - DNA, 753 bp, Human enterovirus C
  misc_feature 1..753: note = isolate V2-TOL cl1, complete genome.1
  source 1..753: mol_type = genomic DNA
ttaaaacagctctggggttgttcccaccccagaggcccacgtggcggccagtacaccggtatcacggtacccttgtacgcctgttttatactccctctcccctgtaacttagaagcaaataaaccaagttcaatagaaagggggtacaaaccagtaccaccacgaacaaacacttctgtttccccggtgaggttgtataaactgtccccacggttgaaaacgactgatccgttacccgctcttgtacttcgagaagcctagtatcatcttggaatcttcgatgcgttgcgctcagcactcgaccccggagtgtagcttaggctgatgagtctggacgttccccaccggcgacggtggtccaggctgcgttggcggcctacctgtggcccaaagccacaggacgctagttgtgaacagggtgtgaagagcctattgagctacaagagagtcctccggcccctgaatgcggctaatcccaaccacggagcaggtggttgcaatccagcaactagcctgtcgtaacgcgcaagtctgtggcggaaccgactactttgggtgtccgtgtttccttttattcttacaatggctgcttatggtgacaatcatagattgttgtcataaagcgaattggattggccatccggtgaaagtcagatcaactatttatttgtttgttggagccactgtgttagctttacttctcatctaaccaattaatcaaaaacaatacgaggataaaacaacaacactaca

SEQ ID NO: 1213 - DNA, 753 bp, Enterovirus sp.
  misc_feature 1..753: note = D94,strain ANG/2010-23293, complete genome.1
  source 1..753: mol_type = genomic DNA
ttaaaacagctctggggttgttcccaccccagaggcccacgtggcggctagtactccggtattacggtacccttgtacgcctgttttatactcccttcccccgtaacttagaagtaacacaaatccaagttcaatagaagggggtacaaaccagtaccaccatgaacaagcacttctgtttccccggtgaaatcatagactgtacccacggttgaaagtgatcgatccgtcatccgctcttgtacttcgagaagcctagtatcaccttggaatcttcgatgcgttgcgctcaacactcaaccccagagtgtagcttaggctgatgagtctggacactccccaccggcgacggtggtccaggctgcgttggcggcctacctgtggtccaaagccacaggacgctagttgtgaacaaggtgtgaagagcctattgagctacaggagagtcctccggcccctgaatgcggctaatcccaaccacggagcaggtggtcataatccaatgattggcctgtcgtaacgcgcaagtctgtggcggaaccgactactttgggtgtccgtgtttccttttattttatcattggctgcttatggtgacaatctaagattgccatcatatagcttttggattggccatccggtgatacttcgagttatttagcttgctgcttacatttattttaaacaacatccagttaccagcattcctattttgtttttctttcattctgagttatctaataagtagttaga

SEQ ID NO: 1214 - DNA, 754 bp, Coxsackievirus
  misc_feature 1..754: note = A10,strain 11-1415-1, complete genome.1
  source 1..754: mol_type = genomic DNA
gagttcagacgtgtgccttccgatgtgggttgcacccacccacagggcccactgggcgctagcactctgataccacggtacctttgtgcgcctgttttatcaccctaccccacacgaaacttagaagcaatacataactgaccaatagtaggtgtggcgcaccagccacatcttggtcaagcacttctgtctccccgggttgagtatcaataagctgttcacacggctgaaggagaaaacacccgttacccggccaactacttcgagaaacctagtatcaccatgaacgttgcgaggtgtttcgctcagcacttcccccgtgtagatcaggccgatgagtcaccgcattccccacgggtgaccgtggcggtggctgcgttggcggcctgcctatgggttagcccataggacgccttaatactgacatggtgcgaagagtctattgagctagttggtagtcctccggcccctgaatgcggctaatcctaactgcggagcacatacccacaaaccagtgggcggtgtgtcgtaacgggtaactctgcagcggaaccgactactttgggtgtccgtgtttccttttatctttatattggctgcttatggtgacaatcagagaattgttaccatatagctactggattggccatccggtgtccaatagagctattatatacctgtttgttggattcaccccattgacctacaaatccctaaatactttgtgttatattttgaacttaaatacacgaaa

SEQ ID NO: 1215 - DNA, 754 bp, Enterovirus sp.
  misc_feature 1..754: note = C99,isolate YT31/SD/CHN/11, complete genome.1
  source 1..754: mol_type = genomic DNA
ttaaaacagcctgtgggttgttcccaccccagaggcccacgtggcggctagtactccggtattacggtacccttgtacgcctgttttatatccccttcccctgtaacttagaagcagacaacacaagttcaatagaagggggtacaaaccagtaccaccacgaacaagcacttctgttaccccggtgacgttgcatagactgttcccacggtcaaaagcgatcgatccgttatccgctcaagtacttcgaaaagcctagtatcaccttggaatcttcgatgcgttgcgctcggcactcgatcccggagtgtagcttaggccgatgagtctggacgatcctcactggcgacagtggtccaggctgcgttggcggcctacctatggcccaaagccataggacgctagttgtgaacaaggtgtgaagagcctattgagctacttgagaatcctccggcccctgaatgcggctaatcccaaccacggatcaggtgattgcaatccagcaattggcctgtcgtaacgcgcaagtctgtggcggaaccgactactttgggtgtccgtgtttccttttaattttattgctggctgcttatggtgacaatcgtagattgttatcatagagcgaattggattggccatccggtgagattaaaacacattatttacctttttgttggatttaccacactatctacgtacactccagacttaatccgcatagtacttttaattagaagatcttatcattataaca

SEQ ID NO: 1216 - DNA, 754 bp, Human enterovirus sp.
  misc_feature 1..754: note = C99,isolate HT-XEBGH09F/XJ/CHN/2011, complete1
  source 1..754: mol_type = genomic DNA
ttaaaacagctctggggttgttcccaccccagaggcccacgtggcggctagtactccggtatcgaggtacccttgtacgcctgttttatactcccttcccccgtaacttagaagccaaaaatacaagttcaatagaagggggtacaaaccagtaccaccacgaacaagcacttctgttaccccggtgatgttgcatagactgtccccacggtcgaaagcgattgatccgttatccgcttaggtacttcgagaagcctagtatcaccttggaatcttcgatgcgttgcgctcatcactcgaccccggagtgtagcttaggtcgatgagtctggacgatcctcactggcgacagtggtccaggctgcgttggcggcctacctatggcccaaagccataggacgctagttgtgaacaaggtgtgaagagcctattgagctacttaagagtcctccggcccctgaatgcggctaatcccaaccacggatcaggtgattgcaatccagcgattggcctgtcgtaacgcgcaagtctgtggcggaaccgactactttgggtgtccgtgtttccttttaattttattattggctgcttatggtgacaatcatagattgttatcataaagcgaattggattggccatccggtgaaaataaaacacattatctacctttttgttggatttactacactgtctacacacactccagatataatttatatagttcttttaatcaggagatcttatcattataaca

SEQ ID NO: 1217 - DNA, 754 bp, Human poliovirus 1
  misc_feature 1..754: note = strain ETH1319533, complete genome.1
  source 1..754: mol_type = genomic DNA
tggggacaaagttaacagctctggggttgttcccaccccagaggcctacgtggcggctagtactccggtattacggtacccttgtacgcctgttttatactccccaccccgcaacttagaagaagctaatcaagttcaataggagggggtacaaaccagtaccaccacgaacaagcacttctgtctccccggtgacattgcatagactgtccccacggttgaaagcgatcgatccgttatccgctcttgtacttcgagaagcctagtaccatcttggaatcagcgatgcgttgcgctccgcactcaatcccagagtgtagcttaggctgatgagtctggacattcctcaccggcgacggtggtccaggctgcgttggcggcctacctgtggcccaaagccacaggacgctagttgtgaacaaggtgtgaagagcctattgagctataagagagtcctccggcccctgaatgcggctaatcccaaccacggatcaagggtgcacgaaccagtgtataccttgtcgtaacgcgcaagtctgtggcggaaccgactactttgggtgtccgtgtttccttttattgtttcaatggctgcttatggtgacaatcattgattgttatcataaagcgaattggattggccatccggtgaaagtgaaacatattgtttgcctccttattgggtctactccaatcgacctctttacctacaatcttattgccacagttttactggttagaagtgtgtttcaca

SEQ ID NO: 1218 - DNA, 755 bp, Bovine kobuvirus
  misc_feature 1..755: note = strain BKoV/EGY-1, complete genome.1
  source 1..755: mol_type = genomic DNA
cgcacgttcgcgtcgtcgtaagtctggattcccaaggccaacttggtttaacttcggtttctggacaaatacaaagaacctcagtcctcttggtactttctcgcctgagtcaacaaagcgagaaacctgcccctctaacgccagacgagcggcataaaacttgaacttctggcacgctccactcttccctctcccaatcccatccccatcgcgctctcaaggtcgcgcaattctgggactagcccagatttaaaagttcctggcaccctttgcccctttaggcccttaaggcaggaactgaccttgtgctgtgacctcggtgcggaagtgctactgcgtagtgattgtaagctcctcttatggttctgccctggcaaggctatagagtactgtgatccgctgcggatgccatcctggtaacaggacccccagtgtgcgtaacagtatgttcacggctcaccgtgttcaccatgactggaacactgctttcgtgaaacagtgtgtgtccaatccctgtgatcagtatcaaccacaccacctaggaatgctaggaaggtaccccggttcgccgggatctgatcctaggctaattgtctacagtggtgctcctttattttctctccaaccatttattgttcacaactgcttgatcttgtgtttgctgcctttctctgctctcactgccattctcaagtgttcacactgtccaagctcctttggttgttttcatccacttgccattgtcaactcttgtc

SEQ ID NO: 1219 - DNA, 755 bp, unidentified
  source 1..755: mol_type = unassigned DNA; note = Human coxsackievirus A14, strain G-14, complete genome.1 sequence
ttaaaacagcctgtgggttgtacccacccacagggcccactgggcgctagcacactgattctgcgggatctttgtgcgcctgttttatatcccctccccccaaactaggtaacttagaagattagcacttgtatgaccaatagtaggcgtgacgcgccagtcatgtcttggtcaagcacttctgtttccccggactgagtatcaataagctgcttgcgcggctgaaggagaaaacgttcgttacccggctaactacttcgagaaacctagtaacaccatgaaagttgcggagtgtttcgctcagcacttcccccgtgtagatcaggtcgatgagtcactgcaaaccccacgggtgaccgtggcagtggctgcgttggcggcctgcctatgggtcaacccataggacgctctaatacagacatggtgtgaagagtctattgagctagttagtagtcctccggcccctgaatgcggctaatcctaactgcggagcacacgcttgcaaaccagtgagtagtgtgtcgtaatgggcaactctgcagcggaaccgactactttgggtgtccgtgtttccttttattctcatactggctgcttatggtgacaattgaagaattgttactatatagctattggattggccatccggtgtgtaacagagcgataatctactcctttgttgcatttgttccactaacccttactacattagacattctacaatacatactttatctcaactccaagaaacgaac

SEQ ID NO: 1220 - DNA, 758 bp, Coxsackievirus
  misc_feature 1..758: note = A10,strain 11-691-1, complete genome.1
  source 1..758: mol_type = genomic DNA
aacacataaccgaccaataaaacagcctgtgggttgcacccacccacagggcccattgggcgctagcactctggtaccacggtacctttgtgcgcctgttttatcaccctaacccccacgaaacttagaagtaacacataaccgaccaatagtaggtgtggcgcaccagccgcatcttggtcaagcacttctgtttccccgggttgagtatcaataagctgttcacacggctgaaggagaaaacacccgttacccgaccaactacttcgagaaacctagtaccaccatgaacgttgcaaggcgtttcgctcagcacttcccccgtgtagatcaggccgatgagtcaccgcattccccacgggtgaccgtggcggtggctgcgttggcggcctgcctatgggttagcccataggacgccttaatactgacatggtgcgaagagtctattgagctagttggtagtcctccggcccctgaatgcggataatcctaactgcggagcacatactcacaaaccagtgagctgtgtgtcgtaacgggcaactctgcagcggaaccgactactttgggagaccgtgtttccttttatctttatattggctgcttatggtgacaatcagagaattgttgccatatagctattggattggccatccggtgtctaatagagctattatatacctgtttgttggattcactccgctgacacataaatcccttaatactttgtgttatatcttgaacttaaacacacgaaa

SEQ ID NO: 1221 - DNA, 758 bp, Enterovirus sp.
  misc_feature 1..758: note = B93,isolate 99167/XZ/CHN/1999, complete genome.1
  source 1..758: mol_type = genomic DNA
tacaaaaaagcaggctttaaaacagctctggggttgttcccacccacagggcccactgggcgctagcactctggtatcacggtacctttgtgcgcctgtttttccacccctccccatacgcaacttagaagagagactcaaccggtcaatagacagcctagtacaccaactaggttctgaccaagaacttctgtttccccggaccgagtatcaataggctgcttacgcggctgaaggagaaaacgttcgttacccggccaattacttcgagaaacctagtatcaccatggaagttgcgcagtgtttcgctccgcacaaccccagtgtagatcaggtcgatgagtcaccgcattccccacaggcgactgtggcggtggctgcgttggcggcctgcccgtggggcaacccacgggacgcttcaataccgacatggtgcgaagagtctattgagctaattggtagtcctccggcccctgaatgcggctaatcctaactgtggagcagatacccacgcgccagtgggcagtctgtcgtaatgggcaactccgcagcggaaccgactactttgggtgtccgtgtttccttttatcctcataatggctgcttatggtgacaattgaaagattgttgccatatagctattggattggccatccggtgactaacagagcaattatttacttgtttgttgggtttgtaccattgaactacaaggtccttaatactctaaactacattataagtctcaatacagtgca

SEQ ID NO: 1222 - DNA, 759 bp, Cosavirus JMY-2014
  misc_feature 1..759: note = isolate Cosa-CHN, complete genome.1
  source 1..759: mol_type = genomic DNA
acatgggggagactgcatgtggcagtcttgaaacgtgtggtttgacgtctaccttatatggcagtgggtggagtactgcaaagatgtcaccgtgctttacacggtttttgaaccccacaccggctgtttgacgctcgtagggcagcaggtttattttcattaaaattcttactttctagctgcatgagttctattcatgcagacggagtgatactcccgttccttcttggacaggttgcctccacgccctttgtggatcttaaggtgaccaagtcactggtgttggaggtgaagatagagagtcctcttgggaatgtcatgtggctgtgccaggggttgtagcgatgccattcgtgtgtgcggatttcctctcgtggtgacacgagcctcacaggccaaaagccccgtccgaaaggacccgaatggtggagtgaccctgactcccccctgcatagttttgtgattaggaacttgaggaatttctgtcataaatctctatcacatcaggccccaaagatgtcctgaaggtaccctgtgtatctgaggatgagcaccaccgactacccggacttgcattagcagacacatgtggttgcccagccccacctcttcagaggtggggctttgctcactcagcacaggatctgatcaggagccccgctcgtgtgctttacactcgacgcggggttaaaaattgcccaaggcctggcacaacaacctaggggactaggttttcctatttttgtaaattatgtcaat

SEQ ID NO: 1223 - DNA, 759 bp, Coxsackievirus
  misc_feature 1..759: note = A16,strain S0470B polyprotein gene, complete cds.1
  source 1..759: mol_type = genomic DNA
attggctcgagttacttaaaacagcctgtgggttgtacccacccacagggcccactgggcgctagcacactggttctgcgggacctttgtgcgcctgttttataacccttccctaagcagtaacttagaagctttgtacaatcatggccaatagtgggcgtggcgcgccagtcacgtcttggtcaagcacttctgtatccccggactgagtatcaatagactgctcacgtggttgaaggagaaaacgtccgttacccggctaactacttcgagaaacctagtagcaccatgaaagttgcggagtgtttcgttcagcacttcccccgtgtagatcaggtcgatgagtcactgtaaaccccacgggcgaccgtgacagtggctgcgttggcggcctgcccatggggtaacccatgggacgctctaatacagacatggtgcgaagagtctattgagctagttagcagtcctccggcccctgaatgcggctaatcctaactgcggagcgcgcaccctcaacccagggggcggcgcgtcgtaatgggcaactctgcagcggaaccgactactttgggtgtccgtgtttccttttattctttattggctgcttatggtgacaattgaaaagttgttaccatatagctattggattggccatccggtgtctaacagagctattgtttacctattcattggattcgtccctcttaatctcaaggtcattcaaactctcgattgcatattgctccttaactgtaagaa

SEQ ID NO: 1224 - DNA, 761 bp, Gallivirus A1
  misc_feature 1..761: note = strain turkey/M176/2011/HUN, complete genome.1
  source 1..761: mol_type = genomic DNA
tccctacccaagccccagtacaccactatggagttctttatatcccagcgcgtggtggacgcactgtgaggtattccgataccaccccactcgcacttcctggatagtgcgttagatatgcccgacatatcgcttccaggaccaaagccccccttttctctttcccaaccagcttcgccactcaagctgtaattccatgtccggtctttccggccttagtatcatggaaatgtggtcgtgctcaaatgaaattgagttgacattgatcaatgaaagttgcactgaactttgctaaactggctagcgccacctggtgtgtgccgttggtctcctcacatggtaacatgtgccaacgggcccgaaaggctagtgggcaattaccgctccaagggaggggtacccaccccgacctgaacagcggtaatgaagctcacctcccaggctctgaccccgagaagtttagttatttagtaggtgtaattagtacttgtgattggtcaatttgatagtagtttgaaacgttatggatgaatgagtagaccccctgaaggtaccccattacatgggatctgatcagggccacattctgcgtgtctccccgcacttgtggttaaaaccatgaaagttcatcccaaacaatcttttcctcttctttttcttttagtggtgacaacctactggattggtgattaccaatctgtactagtgttgtattaagacttgttgtgtggagaaaatggactctttcaagaagatttttg

SEQ ID NO: 1225 - DNA, 762 bp, Ljungan virus
  misc_feature 1..762: note = strain 87-012G, complete genome.1
  source 1..762: mol_type = genomic DNA
ttgaaaggggggccctgtggccaattttggccacagggttcccctggtggggtgggtacacttctcgctcgatgagtgggggtgtggctcattgcccacacctggttggttcccaggttcatacaataaccatcaataaacttttaacatctaagatagtattatcccatactagactggacgaagccgcttggaataagtctagtcttatcttgtatgtgtcctgcactgaacttgtttctgtctctggagtgctttacacttcagtaggggctgtacccgggcggtcccactcttcacaggaatctgcacaggtggctttcacctctggacagtgcattccacacccgctccacggtagaagatgatgtgtgtctttgcttgtgaaaagcttgtgaaaatcgtgtgtaggcgtagcggctacttgagtgccagcggattacccctagtggtaacactagcctctgggcccaaaaggcatgtcatttgaccactcaggtacacaaccccagtgatgcacacgcttagtaatggcttagtaacaaacattgattgatcatttgaaagctgttaggaggtttaggtatgacgggctgaaggatgccctgaaggtacccataggtaaccttaagcgactatggatctgatcaggggcccaccatgtaacacatgggtagaagtcttcggaccttgggttaaaaaacgtctaggcccgccccccacagggatgtggggtttcccttataaccccaatattgtata

SEQ ID NO: 1226 - DNA, 762 bp, Coxsackievirus
  misc_feature 1..762: note = A16,isolate ZJ10-48 polyprotein gene, complete cds.1
  source 1..762: mol_type = genomic DNA
tacaaaaaagcaggctttaaaacagcctgtgggttgttcccacccacagggcccactgggcgctagcacactgattctgcgggatctttgtgcgcctgttttataacccctcccctaagcagtaacttagaagcttcacactattacgaccaatagtaggcgtggcgcgccagtcacgttttggtcaagcacttctgtctccccggactgagtatcaatagactgctcacgcggttgaaggagaaaacgttcgttatccggctaactacttcgagaaacctagtagcaccgtgaaagttgcggagtgtttcgctcagcacttcccccgtgtagatcaggtcgatgagtcactgtgaaccccacgggtgaccgtgacagtggctgcgttggcggcctgcccatggggtgacccatgggacgctctaatacagacacggtgtgaagagtctattgagctagttagtagtcctccggcccctgaatgcggctaatcctaactgcggagcgcgcaccctcaatccagggggccagcgcgtcgtaatgggtaactctgcagcggaaccgactactttgggtgtccgtgtttccttttattccttattggctgcttatggtgacaattgaaaagttgttaccatatagctattggattggccatccggtgaccaacagagctattgtttacctgtttattggatacgtccctctcaatctcaaagccattcaaactcttgattacatattacttcttaactgtaagaa

SEQ ID NO: 1227 - DNA, 766 bp, Kobuvirus SZAL6-KoV/2011/HUN
  misc_feature 1..766: note = complete genome.1
  source 1..766: mol_type = genomic DNA
tttcacaccctcttttccggtggtccggacccagaccaccgttactccattcagctacttcggtacctgttcggaggaattaaacgggcaccctacccaagggttacatgggaccatattcctcctcccctgtaactttaagttttgtgcccgtattcttgactccaggcggatgttgtgtcgcccgtcctgtgaacaaacagctagacactttcctcccctccctctgggctgctccggcagtccactccctccccccagcgtaacatgccccgctggagtgatgcacctggaagtcgtggacgtgggttagtaacttcggtgaaaacccactataatgacaactggttgacccccacactcaaaggactcgagtctttctcccttaaggctagcccggccacatgaatttgcagctggcaactagtgagtccaccatgtcccgcaacctcggctgcggagtgctgttccccaagcgtatgccttccttctgtaagagtgcgcctggcaagcacatctgagaagtcgttccgctgcgtcgtgccaacctggcgacaggtgacccagtgtgcgtagacttcttccggattcgtccggctcttctctaggaaacatgcgtgtaaggttcatgtgccaaagccctgcgcgcggtgttcttctactgccctaggaatgtgccgcaggtacccctacttcggtagggatctgagcggtagctaattgtctacgggtagtttcatttccatcttctcttcaggtcgacatc

SEQ ID NO: 1228 - DNA, 768 bp, Antarctic picorna-like virus 4
  misc_feature 1..768: note = nonstructural protein and structural1
  source 1..768: mol_type = genomic DNA
tatttgtttatttatcacaataagcattacatgagtttgtttaataacatactctgcaaatttattgtaggtgtttagagattaaaccaatctcttttcatttacaaaaccaataagtttgtaaaatagtaaaatttttagccattctgattcaggaatcaaaactgatgtaccactatctgtattttgtgaaaaatcaaaacgacagtagactagaaattactttgtatctaggaatctgtgtctaacgacgatagttaggaacgtgttgcacatttcatgtgcaggcctttatcactaggtctttattaaaaaagtggttgcaagttgtaattgacaacatgtgtttagttaagtttacttctattcatgattatcagggatctccttatcccgctattattagcaaaaggagccttgcaggttataccgacctgcatatgaagcctctacattaatttgtaatttttgtaggaaactgagagggaaagtggcataaccctcgtcctcgcggcgtataatgattcttcggaagaatacgacgtaacccagccgtcacaggtgcccattctctgggattgcatgcttgcatgtcgttctaggatttttcaggaacatttttgagctatagtagtttagatacgctatttgcaatgatgaaactacctagggtgggattatgagaaattcaactttgatctatttttcacaataggttgaggttggattttctcgtatttgggtttggggggtatactatttcaaatc

SEQ ID NO: 1229 - DNA, 769 bp, Gallivirus Pf-CHK1/GV
  misc_feature 1..769: note = complete genome.1
  source 1..769: mol_type = genomic DNA
ttgaccccggtatttctccgtctaaattagacggttcttttatatcccagtgcctgaagctggcactgtgaggttagtctactaaccaaggcttccgtgcagggcttgcacgttaggagttcatgttgattcatgctccaatgcccaaaactttgtgtgtttgtctgtgtctttcccaaagttcttcctaaggtttcggtactcaagccttaatctctggtcccagcttttgggccttagtatccagagaatgtacccgtgcttcgatgaacgtaagaaagctgtcttttaccgaaaaattttaatgaaataagtataactggctcgcgccacctggtgtgtgccgttggaattcccccatggtaacatggtccaacgggcccgaaaggctagtgggcaatcggtcctccaaggaaggggttcccaccccgacctgaacaggattcgatgaagctcacctcccaggctcctaaccccaaggaagtttacttaaagtaattaagatctagtacgtaattgctggcaattttgctagtagttgggaacgttatgacctaatgagtagacccccagaaggtaccccattttatgggatctgatctgggccctatactgtgtgtctccccacatatagggttaaaacaatgaaagttaggtccaaaatattcttttctttttattctttctttagtggtgacgccattatatcagcaatttgctgatgttttatagcgtacgcggcgatacgaacgattcatcactagagaaa

SEQ ID NO: 1230 - DNA, 770 bp, Bovine kobuvirus
  misc_feature 1..770: note = strain IL35164, complete genome.1
  source 1..770: mol_type = genomic DNA
cacccacttttccggcggcgcacgttcgcgtcgtcgtaagtctggactcccaaggccaactcggttcaacttcggtttccggacaaatacaagaacctcagtcctcttggtactttctcgcctgagtcaacaaagcgagaaacctgcccctctaacgccagacgagcggcatgaaacttgaacttctggcatgttccactttccctctccctcaccccaccccaccgcgctctcaaggtcgcgctcttccgggactagcccggttttaaaagttcctggcaccctttgcccctctaggcccttaaggtaggaactgaccttgtgctgtgatctcggtgcggaagtgctactgcgtagtgattgtaagatccctttgtggttctgccctggcaaggctacagagtactgtgatccgctgcggacgccatcctggtaacaggacccccagtgtgcgcaacagtatgtccacggtcttccgtgttcaccacattcggaacactgctctcgtgaaacagtgtgtgtccaatccctgtgaccagtattaaccacaccacctaggaatgctaggaaggtaccccggttcgccgggatctgatcctaggctaattgtctacagtggtgctccttttattttcccctcacttcattgactacaactgcttgatttccgtgtttgctgctcttcttagctctcactgccattctcaagtgttcacactgtccaagctcctttggttgtttgcctccacttgccactgtcaactcttgtc

SEQ ID NO: 1231 - DNA, 770 bp, Coxsackievirus
  misc_feature 1..770: note = A10,strain 15-2711-1, complete genome.1
  source 1..770: mol_type = genomic DNA
cacgtgagtgttgctcttacgtgtgctattccattctgtgggttgttcccacccacagggcccactgggcgccagcactctgattccacggaatctttgtgcgcctgttttataacccttccccaacttgtaacgtagaagtaatacacactacagatcaatagtaggcatggcgcgccagtcatgtctcgatcaagcacttctgtttccccgggctgagtatcaatagactgctcacgcggttgaaggagaaaacgtccgttacccggctaactacttcgagaaacctagtagcaccatagaagctgcagagtgtttcgctcagcacttcccccgtgtagatcaggctgatgagtcactgcaacccccacgggcgaccgtggcagtggctgcgctggcggcctgcctatggggcaacccataggacgctctaatgtggacatggtgcgaagagtctattgagctagttagtagtcctccggcccctgaatgcggctaatcctaactgcggagcacatgcctccaatccaggaggtggtgtgtcgtaacgggtaactctgcagcggaaccgactactttgggtgtccgtgtttctttttatctttatattggctgcttatggtgacaatcacggaattgttgccatatagctattggattggccatccggtgtctaatagagctattgtgtacctatttgttggatttactccactgtcatataaatctttgaacactttgtgctttatattgaacttaaacacacgaaa

SEQ ID NO: 1232 - DNA, 773 bp, Sapelovirus B
  misc_feature 1..773: note = Cam13 genomic RNA, complete genome.1
  source 1..773: mol_type = genomic DNA
gtggggtacatgcgttttaaggaacgcatgtatctcacactcatttctccccctcgcccccacaggcaacccccaccccttctcttacgggagttagggttaaggatctagtggtcaggcgttgtatcctcttacctttacccaccccacccacacggactggttaatggttttagactgaggttgtggatctgatttcaaatctgttacccattcagaggaaaaatggagtcatacattctggatttgacttgatatgaccaagagttaacaccttgcgtgttggccgtatggaatgttttaaggctactctatggattatgatttcagggttggccgcccaggataaaaggcaattgtggtaagtgatgttagtcattggtagttgaaagctgcccaagacatccgaggtctacgctttgcgggccggagtaagcttgggaacaacagtgagtatgctattttttgctttcacccaacacgaccgtgcatgaaagagctagaggcatctggaggcaaagggaaaagaatttcttatcccgaatgttcattcgagtccttgacgagtgcatccctactgtcccgtaggtgaggtgtatggcgcatgctcatggcattactccaaggtgtatctgtgaggggggggcccctcacacttagtctagtgctacctgacagggttgcggctggtcatttatgcatggtataaccagtagtaatcccccatggattgctttaactccccctccccccttacaaagacattctctaag

SEQ ID NO: 1233 - DNA, 773 bp, Enterovirus E
  misc_feature 1..773: note = isolate PD2017, complete genome.1
  source 1..773: mol_type = genomic DNA
ggcgtcagtacactggtacgtcagtacctttgtacgcctgtttttccctcccttaaataaattaagatcaccactactgaggggagtagtccgactccgctccggtaccgccgcaccagtattccggtacgcctagtaccctaatacggagtagatggtgtccctcacccgaaacttagaagaaagtaaactacccgaccaataggagcgcggcatccagtcgcgtatcggtcaagcacttctgtttccccggtctgcatagatcgttacccgcccgacccactgcgagaagcctagtagctggccaagcgaatgcgaggttgcgctcaaccacaaccccagtggtagctctggaagatggggctcgcaaactcccccgtggtaacacggttgcttgcccgcgcgtgcttccgggttcggtctcacgccgttcacctcaacctcgcgtaaccagtcaagagcttattgcgctggggcggttctcctccggggccgtgaatgctgctaatcctaacctctgagcgtgtgcgcacaaaccagtgttgctacgtcgtaatgcgcaagttggaggcggaacagactactttcggtaccccgtgtttcctttaattttatatttcaatttatggtgacattgactgacatttgccaagttgctcggttacctctgaacattgctttgtattatctgatagctttctacaaaaccacccagctttcacttgaactcattgagtttgtagtttatttgaaccaagcacacaaattctacg

SEQ ID NO: 1234 - DNA, 774 bp, Enterovirus G
  misc_feature 1..774: note = isolate 990/UK-NI, complete genome.1
  source 1..774: mol_type = genomic DNA
tattttccaggtggaatggggatgcaggcctgagttgtttttgcccccaaggaataaatcaatattcccagagccgaggggagtagtccgactccgctccactacggtgctccagtagattgctattgcggtagctctctacggggtggctggtattcctcaccctgaaacttagaagtttgtacacaccgaccaatagcggtctggcagccagccaggcaacggtcaagcacttctgtttccccggtccgcaaggatcgttacccgcccgaattgctacgaaaagcctagtaagtacccaagtttgtgcgaggttgcgttcagccacaatcccagtggtagctctgagtgatggggctcgtgattacccctctggtgacagagacacttgcccgcgcgtgcacttgggttcaccagaaatggtgttcacctcaatcaagcgcaagtactgaagagccaattgtgccaatttggtctcctccggggccgtgaatgctgctaatcctaacctccgagcgtgtgcgcacaatccagtgttgctacgtcgtaacgcgtaagttggaggcggaacagactactttcggtaccccgtgtttccttattttattcatttaaatttatggtgacaattgttgagatttgtgagctagcaaaattaccattgaatttggcattgtactgtctcattgcttttcacaaaacctcagatatcccacccagttacattgatcttttagttcatttgaatttacagttcaaactgagacaagtaaa

SEQ ID NO: 1235 - DNA, 775 bp, Shrew hepatovirus
  misc_feature 1..775: note = isolate KS121289Sorara2012 polyprotein gene,1
  source 1..775: mol_type = genomic DNA
ttgaaaggtggccggagggtttcttgaagccctccgacgcctttcagcgcccggttcacaggggtgtaagtactgtgggcccgtttgccgtgggatacggctgcctgtgtctcaggggtaagtactggggccgtgttaaccgtgcgttacggttttgcttttagattaggatgtccgactgtccggcactctcttttgcttaaaatggccttaaatccatgggaggcgtaaccatgggccctttgttacctagacatgattgcattgggggccgtccttggggcttcggccccagccaatttcccttgactcgtctaagagtttgtttcatccttttcttttcttttattttccaggctctcggcatgccaacggctctgaccactgcgcccggtggggttaaccacacgactagcgtgtggctgtaggagttaaaagtgccgacaggccaattctgacgtaagttcattctatgttaacttgaccacgtaaggttgactgatctttgtgagagggtaggctacgggtgaaaccctctaggttaatactcatattgagagatacctccagaaggtgaaggttggcggatattggtgagttcttttaggacaaaaacctttcaacgcctgtgggcccacctcactggcacaatgctttcatccccaattgtgatgggtagtttggactgaaatcaggagtaacctgccctacgagtttaggggtagttcaggggtatttaggcttccacatttgatagagtttatgagagtgagcc

SEQ ID NO: 1236 - DNA, 775 bp, Coxsackievirus
  misc_feature 1..775: note = A4,isolate 06/Taian/SD/2017, complete genome.1
  source 1..775: mol_type = genomic DNA
tttcaaaagaatattaggaggggggggttttaaaacagcctgtgggttgtacccactcacagggcccactgggtgctagcactctgattctgcggaacctttgtgcgcctgttttaaaacccccccctcaattcgtgatttagaagtaatgcacaccattgatcaacagcaagcgtggcgcaccagccatgttcagatcaaacacttctgtttccccgggctgagtatcaatagactgctcgcgcggttgaaggagaaaacgctcgttacccggctaactacttcgagaaacctagtagcaccattgaaactacagagtgtttcgctcagcactttccccgtgtagatcaggtcgatgagtcactgcaatccccacgggcgaccgtggcagtggctgcgttggcggcctgcctatgggcttgcccataggacgctctaaagtggacatggtgtgaagagtctattgagctagttagtagtcctccggcccctgaatgcggctaatcctaactgcggagcgcatgccctcaatccagggggtggtgcgtcgtaacgggcaactctgcagcggaaccgactactttgggtgaccgtgtttccttttattcttatattggctgcttatggtgacaattgagagattgttaccatatagctattggattggccatccagtgtctaacagagcaatcgtatacttatttgttggattcatcccactatcatacatatccattaacaccttatactatattataagattgaacacaagaaa

SEQ ID NO: 1237 - DNA, 776 bp, Hedgehog dicipivirus
  misc_feature 1..776: note = strain hedgehog/H14/2015/HUN, complete genome.1
  source 1..776: mol_type = genomic DNA
agaaaaggccccccggggggataccgtctatggtatctctacgaggtcttttcgaacactccacatcatgagtgtataataaactgatgacctttaaatttcaccaacccttgacctgtaatgtcagtggacagagtgctcctctgttcccggttaccgtgttccaggacacgattgtaatcctgcgcctcaccagcgctgcgtgcacgtctgcataaggaaacgtgccttccccatgtctctatcaattctttggtgagtgaccgccctagttgctcatcctatgggattcttctctcatgggttctttgtggcatgcgaatgtcaccttaattggaggtctttaattagatatcctttcttcatctttgatatgagtgtcggaatttgattcctagtctctgcaaaacaaccccacttgatgaattcaacttttcaaccgcacaaacataatcaggtttttaaattgaatgtttctaaattctaaatttagtttatttaagtagtttgccatcttgactcgatgtaaaattgtcatacaagtcttcttttcttttctttacactttgaagtttgcacttagcagtcgttctgcacagctttcgagttttgtttgatcgacatcgcaacttccacccacctctctttttctagtgttgaatgcggctaatcctaacccgagagcaataaacccaggtttattgtcgtaacgcgcaagtcttggacggaaccgactatacacacacctctttaccctttagtacacccttggtacg

SEQ ID NO: 1238 - DNA, 776 bp, Pigeon picornavirus B
  misc_feature 1..776: note = strain GAL-7/2010/Hungary, complete genome.1
  source 1..776: mol_type = genomic DNA
tgaaatggcctgggggtagcatgtacgctaaggcgtgcatgttactcccagaccatttctccccaccccctcaccttgccttttccccctcatttaatttttgtcgtaagtggcatcgacaaccacacaatttaaggagaggggcagccgtggaaactaaaagaccctaattggtatcttaatgtgctaaagccttgttctgaagaggggttccccaggccccatagtaggatcttggtgttccacattaagctctaccgaccacacatccaaacgataggcggtgtaagggctctctagctaagtgtttactcattgctagggaagtgttgcgacccgttatcaatagggatacaggaggtcttagttgcctaaccagataaagtggtgctgaaatattgcaagctcaatgtctggcgaacgacggactaccgttgaactgttgttaacgcccatatgtgtaggcaacatatgggttagtaggtcacttacattgacatccgtgccgggaaagcggatctgagctatcgattgcctgatagggtgccggcgggcgcggtacgtgtggtatagtccgctgttttggggtatggcgtctactcggttttgttgtcgtttcggaatgtcccatgtcggagatgtcgttaccggtgtttgttttacttgtgcacggataaggaagcaaagtttggagttctggaagctaatggataacattaagtttccgttgcgttcttcgtgcattttgggccagaaaatcgaccacaaaatcgaga

SEQ ID NO: 1239 - DNA, 779 bp, Antarctic picorna-like virus 1
  misc_feature 1..779: note = nonstructural protein and structural1
  source 1..779: mol_type = genomic DNA
aataaggtatgctgtttatttattaaacagtgtatcttattttgccctcatcgagagttggaggttaactaacatcctttgccacatggagtctctgtggttggttccctggccatgtatttttacaaaacagatgtgccctttgcagcttatgcaattttcggttgtttccccttttgttcgcaagattgtctcttcatttgagattttgacgttttcactcgtagtactatatgagagtgatttattacattttattttgttagcaagattggtttagttccgtcttttcttagcggagttgcacacttttctttattgctaattgcattcaccctttactggtttttcctactagttcagatcattgcaatttgttaatttccttgtctgtttggcgacccccttagtagagaggttatgatgcatcaagtgaattatgaaacagggtgtctatttaagcatttgttcttaattacgttttctttgaaaaccatttcggtggtttggcttgaattggtccctagtcacgtagttggaatgtattaagtttatttatagtcccagtgttcacggtgtttttgatcctttttgaacgggattgtacccgttcagataattcagaatttagcaaagggatttgtaatttgttccctttattggttttacaccgagacaactaccggtgacctggacatcgacaacacatcctaggggaatggcatcaccttacgagccaccacaactaaaacacaaatatacattacaatttaattatt

SEQ ID NO: 1240 - DNA, 787 bp, Coxsackievirus
  misc_feature 1..787: note = A10,strain 13-2185-1, complete genome.1
  source 1..787: mol_type = genomic DNA
gtcaacacggtgttgtcggtattgtgtctaccggtggtaatgggcttgttggcttcgcagtgttcccacccacagggcccactgggcgccagcactctgattccacggaatctttgtgtgcctgttttacaaccctttcctaatttgtaacgtagaagcaatatacactactgatcaatagcaggcatggcgcgccagtcatgtctcgatcaagcacttctgtttccccggactgagtatcaatagactgctcacgcggttgaaggagaaaacgttcgttatccggctaactacttcgagaaacctagtagcaccatagaagctgcagagtgtttcgctcagcacttcccccgtgtagatcaggctgatgagtcactgcaatccccacgggcgaccgtggcagtggctgcgctggcggcctgcctatggggcaacccataggacgctctaatgtggacatggtgcgaagagtctattgagctagttagtagtcctccggcccctgaatgcggctaatcttaactgcggagcacatgccttcaacccaggaggtggtgtgtcgtaacgggcaactctgcagcggaaccgactactttgggtgtccgtgtttctctttatccttatattggctgcttatggtgacaattacggaattgttaccatatagctattggattggccatccggtgtctaatagagctattgtgtacctatttgttggatttactccgctatcatataaatctctgaacactttgtgctttatattgaacttaaacacacgaaa

SEQ ID NO: 1241 - DNA, 797 bp, Kobuvirus sheep/TB3/HUN/2009
  misc_feature 1..797: note = complete genome.1
  source 1..797: mol_type = genomic DNA
tttgaaaagggggtgggggggcttcggccccctcaccctcttttccggcggcgcaagttcgcgtcgtcgtaagcctggacacccatgttcgcatcggtctccgggcaaatacaagaaccccagaccttctggtacttcttcgcctgggtcacaaaagcgaagaacctgcctctctaacgccagacgagcggcattaaacttgaacttctggcactctccactctcccttttccctgtccctttccccactgcgctctcaaggtcgcgcaatcctgggactagcccagttttaaaagttcctggcaccctttgcccctctaggcccttaaggtaggaactgaccttgtgctgtgatctcggtgcgggagtgctaccacgtagtcatcgtaagcctcgtttctggttctgccctggcaaggctacagagtaccgtgttccgctgtggatgccatccgggtaaccggacccccagtgtgtgtagcggtatgttcacggtccgccgtgttcaccagattcctgacctggctttgctagaaatggtgtgtgcccaatccctgtgaccagtatcaattacatcacctaggaatgctaggaaggtaccccagtcctgagctgggatctgatcctaggctaattgtctacggtgatgctccttttattttcttacaactgctattgactgtctgattgctgattctgctcttgtgctcttctgctctggctcattctcaagggttctctttgtccaagatcctttggttctctccttgttccacttgccactgccaacgcttgtc

SEQ ID NO: 1242 - DNA, 798 bp, Enterovirus G
  misc_feature 1..798: note = EV-G/Pig/JPN/Kana-Ebi1/2019/G1_PL-CP genomic RNA,1
  source 1..798: mol_type = genomic DNA
gggttgttcccaccccagggcccactgggcgccagtacactggtacgctagtaccttggtattacggtaccattgtacgccagtacctttgtacgcctgttttatattccctacccccacatgtaactttagaagtttaagtaacaaagaccaataggagtccaacatccagttggattgcggtcaagcacttctgtttccccggacctagtagtgataggctgtacccacggccgaagatgaacccgtccgttatccggccagctacttcgagaagcctagtagcatcaaagatctgtcttggcgtttcgctcagcgcgttccccccgcgtagatcgggctgatgggtctccgcattccccacgggcgaccgtggcggaggccgcgtggcggcccgcctatggcgaaagccataggacgccatttcagtgacagggtgtgaagagcctattgagctagttggtagtcctccggcccctgaatgcggctaatcctaaccactgagcgtccaccagcaaaccagctgggagggcgtcgtaacgggtaactcggtggcggaaccgactactttgggtgtccgtgtttccttttgatcctattgtggctgcttatggtgacaacttacagttgttatcataaagcttttggattggccatccggaaaaagttatcagtgtttgatattgttcggctttcacgcctaccaataagacaatcactttacttgttagttgcattttatcccactaaggatatcactgagttacatcttcaattgctcctaacattatcagcaca

SEQ ID NO: 1243 - DNA, 798 bp, Enterovirus G
  misc_feature 1..798: note = isolate PoEnV-BEL-12R021, complete genome.1
  source 1..798: mol_type = genomic DNA
gggttgttcccacccgcggggcccactgggcgctagtacactggtacgccagtaccttggtattacggtaccattgtacgtcagtacctttgtacgcctgttttatatcccttcccccacatgtaacattagaagtcaagtaaacaaagaccaataggagcccaacaaccagttgggttgcggtcaagcacttctgtctccccggacctagtagtgataggctgtacccacggccgaagatgaacccgtccgttatccggccagctacttcgagaagcctagtaacatcaaagatctgtcttggcgtttcgctcagcgcgttccccccgcgtagatcgggctgatgggtctccgcataccccacgggcgaccgtggcggaggccgcgtggcggcccgcctatggcgaaagccataggacgccatttcagtgacagggtgtgaagagcctattgagctagttggtagtcctccggcccctgaatgcggctaatcctaaccacggagcatccaccagcaaaccagctgggagggtgtcgtaacgggtaactctgtggcggaaccgactactttgggtgtccgtgtttccttttgatcctattttggctgcttatggtgacaacgataagttgttatcataaagcttttgggttggccacctggaaaaaattgtcagtgtttgatatcgctcggctttcacgcctaccagtcaaacaagctctttatctccttgttggattctactcaataaaggacataactcagtttcacataaatctgttgctttcattgtcagcaaa

SEQ ID NO: 1244 - DNA, 800 bp, Enterovirus E
  misc_feature 1..800: note = strain EV_NGR_2017, complete genome.1
  source 1..800: mol_type = genomic DNA
ggggttgtacccacccctggggcccacgtggcgccagtaccctggtacgttagtacctttgtacgcctgttttccccccccttaaacaaattaagatcgctggtcctgtggggagtagtccgactccgcaccgatacgtcgcaccagcactccggtacgcctagtaccctagtgcggaggtaccagtgtccccccccctcgaaacttagaagcaatgaaccaaaccgacccaaaaggatgcgttgcacccagcagcgtaatggtcaagcacttctgtttccccggccgcaaggtcgttatccgcccgcaccactacgagaagcctattaggcagccaagcttgcaaagcgttgcgttcagccacaaccccagtggtagctctgagagatgggactcgttgttcccccatggtaacatggtgacttgtccgcgtgtgctctcgggttcgccatcaggcgttcacgctgcacaagtgtaactgctgaagagcctattgtgctggagcggttttcctccggaaccgtgaatgctgctaatcctaacctctgagcgtgtgcgcacaaaccagtgttgctacgtcgtaacgcgtaagtcggaggcggaacagactactttcggtactccgtgtttccttattttatatcgtttcatttatggtaacaattactgagattttaaagattgccaagctgcccttaaacattggtttgtattatctagttgcattttataaaacctctgagctttcacttgaattgattgatttcttagtctttctaaacaagcataaattgaggaca

SEQ ID NO: 1245 - DNA, 801 bp, Enterovirus G
  misc_feature 1..801: note = genomic RNA, nearly complete genome,strain:1
  source 1..801: mol_type = genomic DNA
cctgtgggttgtacccacccacagggcccaccgggcgccagtacactggtacgccagtaccatggtattacggtaccatgttacgtcagtacctttgtacgcctgttttatatcccctccccgaagtaaccttagaagtttaagtaacaaagaccaataggagtccagcaaccagctggattgcggtcaagcacttctgtttccccggacctagtagtgataggctgtacccacggccgaagatgaacccgtccgttatccggccagctacttcgagaagcctagtagcatcaaagatctgtcttggcgtttcgctcagcgcgtttcccccgcgtagatcgggctgatgggtctccgcataccccacgggcgaccgtggcggaggccgcgtggcggcccgcctatggcgaaagccataggacgccatttcagtgacagggtgtgaagagcctattgagctagttggtagtcctccggcccctgaatgcggctaatcctaaccacggagcgtccaccagcaaaccagctggcggggcgtcgtaacgggtaactctgtggcggaaccgactactttgggtgtccgtgtttccttttgatcctattttggctgcttatggtgacaacaataagttgttatcataaagcttttgggttggccacctggaaaaagttatcagtgtttgatattgttcggctttcacgcctaccaacaaaacaagccttatatttattggttgccttttgtcccttggcggaaattactgattttcacctaaagcttctgattacattgacggcaaa

SEQ ID NO: 1246 - DNA, 803 bp, Kobuvirus cattle/Kagoshima-2-24-KoV/2015/JPN
  misc_feature 1..803: note = genomic RNA, complete1
  source 1..803: mol_type = genomic DNA
ttgaaaagggtgtggggggggataccctccccctccacactcttttcgacggcgcgcctcggcaaggccgccgataccgcactgtgctacttcggtaccactctgcgggaatgacaatatgcccggtgtatagtttgcctgtttctcgcaccgttaccgctcgttcgggaatgtgaaactggcacccctcctctcccctaccaccctttctccttcgcccccattcataatttacaacgccgcacacagcggcggccgccaagggctagcctggcggttataaaaggaacctgggtctttccctcttcaagccaaaaggtaggttccctgtgtccctgaatgctcggtgaggaatgctgcaccgtaacgctttgtgaagtgtttgcaagttctggcccggcaagcctacagagtgctgtgatccgctgcggacgccatcctggtaacaggacccccagtgtgcgcaacagtatgttcagacttcggtttgttcacttgctttcatggaccattgcgcgaaagtgcgtgcgccatatccctgtacttcaggtgtgcttctctggaccctaggaatgctgcgaaggtaccccgtttcggcgggatctgatcgcaggctaattgtctatgggttcagtttcctttttctttactccacaattgactgcttaactgactctggatcttgtgcttccactgctctttctgctctcaaaacggcttcacttaccaactctcacctttcgaccaacaccatttacacactaacttttttcgactcttctgactcctggcttggtgaagac

SEQ ID NO: 1247 - DNA, 804 bp, Enterovirus G
  misc_feature 1..804: note = genomic RNA, nearly complete genome,strain:1
  source 1..804: mol_type = genomic DNA
ctgtgggttgttcccacccacagggcccactgggcgctagtacactggtatgcctaacctcggtattacggtaccgttgtttacagtacctttgtacgcctgttttatatcccctccccacaagcaactttagaagtatcaagcaaataaggaccaataggagtccaacacccagttggatcatggtcaagcacttctgtctccccggacctagtagtgataggctgtacccacggccgaagatgaaaccgtccgttatccggccagctacttcgagaagcctagtagcatcaaagatctgtcttggcgtttcgctcagcgcgttttcccccgcgtagatcgggctgatgggtctccgcataccccacgggcgaccgtggcggaggccgcgtggcggcccgcctatggcgaaagccataggacgccatttcagtgacagggtgtgaagagcctattgagctagttggtagtcctccggcccctgaatgcggctaatcctaaccacggagcgtttaccagcaaaccagctggcggaacgtcgtaacgggtaactctgtggcggaaccgactactttgggtgtccgtgtttccttttgatcctattgtggctgcttatggtgacaacttacggttgttatcataaagcttttggattggccatccggaaagagttatcagtgtttgatattgttcggctttcacgcctaccattaagacaatcactttatttgttagttgcattttatcctgccaaggacattactgagtttcacctacaactttactcatacaattacatcaagt

SEQ ID NO: 1248 - DNA, 808 bp, Aichivirus B
  misc_feature 1..808: note = genomic RNA, complete genome,strain:U-1.1
  source 1..808: mol_type = genomic DNA
tttgaaaagggggtgggggggcttcggccccctcaccctcttttccggcggcgcatgttcgcgtcgtcgtaagtctggattcccaaggcccactcggttcaacttcggtttccggacaaatacaaagaacctcagtcctcttggtactttctcgcctgagtctacaaagcgagaaacctgcccctctaacgccagacgagcggcataaaactcgaacttctggcacgttccaccaccccttctcctatcccaacccccattgcgctctcaaggtcgcgcttttccgagactagctcggattcaaaaagttcctggcaccctttaccccttcaggcccttaaggtaggaactgaccttgtgctgtgatctcggtgcggaagtgctactgcgtagtgattgtaagatccttttgtggttctgccctggcaaggctacagagtgctgtgatccgctgcggatgccatcctggtaacaggacccccagtgtgcgcaacagtatgttcacggtcttccgtgttcaccacattcggaacactgctttcgtgaaacagtgtgtgtccaatccctgtgatcagtatcaaccacaccacctaggaatgctaggaaggtaccccggttcgccgggatctgatcctaggctaattgtctacggtggtgctcctttttattttccacttcaactcactggttacaactgcttgatttctgtgtttgctgcttttctctgctctcactgccattctcaagtgttcacactgtccaagctcctttggttgttcgcttccacttgccactgtcaactcttgtc

SEQ ID NO: 1249 - DNA, 809 bp, Porcine enterovirus 9
  misc_feature 1..809: note = strain UKG/410/73 polyprotein gene, complete1
  source 1..809: mol_type = genomic DNA
ttaaaacagcctgtgggttgttcccacccacagggcccactgggcgctagtacactggtatgccttacctcggtattacggtaccgatgtatatagtacctttgtacgcctgttttatatccctcccccacatgtaaccttagaagtttacacaaacaaagaccaataggagtccaacacccagttggattgcggtcaagcacttctgtttccccggacctagtagtgataggctgtacccacggccgaagatgaacccgtccgttatccggctacctacttcgggaagcctagtaacattctgaagtctctgaggcgtttcgctcagcacgaccccggtgtagatcgggctgatgggtctccgcataccccacgggcgaccgtggcggaggccgcgttggcggcccgcctatggcgaaagccataggacgcctcttagatgacagggtgtgaagagcctactgagctgggtagtagtcctccggcccctgaatgcggctaatcctaaccacggagcgtccaccagcaatccagctggcagggcgtcgtaacgggcaactctgtggcggaaccgactactttgggtgtccgtgtttccttttgatcctattttggctgcttatggtgacaacgataagttgttatcataaagctcttgggttggccacctggaaaaagttatcagtgtttgatattgttcggctctcacgcctaccaataagacaagccctatatttacttgttgcattttactcgtcagaagaaatcacagagtatcatttggatttgttactcacattaaggacaag

SEQ ID NO: 1250 - DNA, 809 bp, Enterovirus F
  misc_feature 1..809: note = genomic RNA, complete genome,strain: BEV Ho12/Bos1
  source 1..809: mol_type = genomic DNA
gggggttgttcccacccctggggcccacgtggcgccagtactctggtacgttagtacctttgtacgcctgttttcccctcccttaaacaaattaagattaccactactgaggggagtagtccgactccgctccagcactgctgcaccagtgaattggtacgctagtacctctgcacggagtagatggtatcccccccccgaaacttagaagtttgcaacaaacccgaccaataggtgcgtggcatccagctgcgtaaaggtcaagcacttctgtttccccggtccacaaggatcgttacccgcccaacccactgcgagaagcctattaactggccaaacaactgaagagttgcgctccgccacgacccctgtggtagctctggaagatggggctcgcacttcccccgtggtaacacggttgcctgcccgcgcgtgcttccgggttcgacctagtgtcgttcactccaaagttgcgtaaccagccaagagcctattgcgctgggatggttttcctccggggccgtgaatgctgctaatcctaacctccgagcgtgtgcgcacaaaccagtgttgctacgtcgtaacgcgtaagttggaggcggaacagactactttcggtaccccgtgtttcctcttatttttatataatattttatggtgacaattgctgagatttgtgatttggccaccctaccattgaatattgctttgtattatctggttgcatttcataaagcttcagaaatacctgcttcctatatcgatctacttgtattcctcaatttaaagcacaaattagagaacataag

SEQ ID NO: 1251 - DNA, 811 bp, Porcine enterovirus G1
  misc_feature 1..811: note = isolate 13-03212, complete genome.1
  source 1..811: mol_type = genomic DNA
ttaaaacagcctgtgggttgttcccacccacagggcccactgggcgctagtacactggtatacttagcctcggtattgcggtaccggtgtatatagtacctttgtacgcctgttttatgtcccctcccccttaagtaacattagaagtttgaacaaacaaagaccaatagaggtccaacatccagttggattgcggtcaagcacttctgtctccccggacctagtagtgataggctgtacccacggccgaagatgaactcgtccgttatccggctatccacttcgggaagcctagtagcatcaaagctctgtcgaggcgtttcgctcagcacgtaaccccagtgtagatcgggctgatgggcctccgcataccccacgggtgaccgtggcggaggccgcgtggcggcccgcctatggcgaaagccatgggacgcctcttggatgacagggtgtgaagagcctactgagctgggtagtagtcctccggcccctgaatgcggctaatcctaaccacggagcgtccaccaacaaaccagttggcagggcgtcgtaacgggtaactctgtggcggaaccgactactttgggtgtccgtgtttccttttgatcctatgttggctgcttatggtgacaacgataagttgttatcataaagcttttgggttggccacctggaaaacgatatcagtgtttgacattgttcggctttcacgcctaccaacgagaaaagctctttattgctgagttgcattttatccaaaagaggtaataaccaccttccatttacaactcttactcacattatcatcaag

SEQ ID NO: 1252 - DNA, 812 bp, Enterovirus E
  misc_feature 1..812: note = strain BJ101, complete genome.1
  source 1..812: mol_type = genomic DNA
ttaaaacagcctgggggttgtacccacccctggggcccacgcggcgccagtactctggttcgattagaacctttgtacgcctgttttcccctcccttaaacaaattaagatctctgccaatgtggggagtagtccgactccgcaccgatacgtcgcaccagcagaccggttcgcttaggacccttctgcggattggtatgagtccctctcccgaaacttagaagtttggacaaaccgaccaataggtgcgtggcatccagccatgttacggtcaagcacctctgtttccccggtcagaaatgatcgttacccgccctacccactacgaaaagcctattaaccattgaaagtgatgaggagttgcgctcagccatgaccccgatggtagctctgagggatggagctcgcagttcccccgtggtaacacggttgcttgctcgcgtgtgcccttgggttcgaccatttggtcgttcactccaaatcatcgtaaatggccaagagccaattgtgctggggaggttttcctccggagccgtgaatgctgctaatcccaacctccgagcgtgtgcgcacaatccagtgttgctacgtcgtaacgcgtaagttggaggcggaacagactactttcggtactccgtgtttccttttattttattattatattaatggtgacactgtttgagatttgcgagattgccaaattgccactcaacattgcactctattatttggtatcattctacaatacctcagaacttacggttgagctcattgatttcctcgtctttttgaataaaaataaattaaagaca

SEQ ID NO: 1253 - DNA, 813 bp, Enterovirus G
  misc_feature 1..813: note = genomic RNA, nearly complete genome,strain:1
  source 1..813: mol_type = genomic DNA
taataacagtctatgggttgttcccacccacagggcccactgggcgtcagtacactggtatgccagtaccttggtatcacggtaccattgtacgccagtacctttgtacgcctgttttatattcccttccccatacgtaactttagaagtttaagcaaattaagaccaataggagtccaacaaccagttggattgcggtcaagcacttctgtttccccggacctagtagtgataggctgtacccacggccgaagatgaacccgtccgttatccggccagctacttcgagaagcctagtagcatcaaagatctgtcttggcgtttcgctcagcgcgttccccccgcgtagatcgggctgatgggtctccgcataccccacgggcgaccgtggcggaggccgcgtggcggcccgcctatggcgaaagccataggacgccatttcagtgacagggtgtgaagagcctattgagctagttggtagtcctccggcccctgaatgcggctaatcctaaccactgagcgtccaccaacaaaccagttgggagggcgtcgtaacgggtaactcggtggcggaaccgactactttgggtgtccgtgtttccttttgatcctattttggctgcttatggtgacaacgataagttgttatcataaagcttttgggttggccacctggaaaaagttatcagtgtttgatattgttcggctttcacgcctaccattcagactaactctttatttgcttattgcattttacccatcggaggatattacagacttccatctacaactcttattcacattatcaacaca

SEQ ID NO: 1254 - DNA, 814 bp, Enterovirus E
  misc_feature 1..814: note = strain BEV-GX1901 polyprotein gene, complete cds.1
  source 1..814: mol_type = genomic DNA
ttaaaacaggctgggggttgtacccacccccggggcccacgcggcgccagtactctggttcgattagaacctttgtacgcctgttttccccacccttaaataaatcaagatctctgccaatgtggggagtagtccgactccgcaccgatacgtcgcaccagcagaccggttcgcttaggacccttctgcggattggtatgagttcccacccttgtaacttagaagttctcacaaaccgaccaatagcggcgttgcatccagcagcgcaacggtcaagcacttctgtttccccggcgcgtcgcgtcgttacccgcccggtctactacgggaagcccagtatggtcccaattgattgcgcagttgcgttcggccacaaccccagtggtagctctgaggaatggggctcgcccttcccccacagtaatgtggtggcctgcccgcgcgtgtcctcgggttcactcctagagtgttcactgcaattttgagtaagatctgaagagcctactgtgctaggttggttttcctccggagccgtgaatgctgctaatcccaacctccgagcgtgtgcgcacaatccagtgttgctacgtcgtaacgcgtaagttggaggcggaacagactactttcggtactccgtgtttccttattttattcacttattttatggtgacactgactgatatttgtgagtttgctcggctgcccttgaatattgctttgtactatttaatagcatttcatagaaccactcaactttcaattgagcttattgacttcgccgtctttctcaatcagatacacaaaaccacacata

SEQ ID NO: 1255 - DNA, 814 bp, Porcine enterovirus 10
  misc_feature 1..814: note = strain LP 54 polyprotein gene, complete cds.1
  source 1..814: mol_type = genomic DNA
ctaaaacagcctgcgggttgtacccgcccgcagggcccactgggcgctagtactctggtacgctagtacactagcacgttagtgcttttgtacgccagtacctttgtacgcctgttttattttcccttccccacatgtaactttagaagtttagaaacaaacaatgaccaataggagtccagcatccagttggattgcggtcaagtacttctgtttccccggacctagtagtgataggctgtacccacggccgaagatgaacccgtccgttatccggctacctacttcgggaagcctagtaacattctgaagtctctgaggcgtttcgctcagcacgaccccggtgtagatcgggctgatgggtctccgcataccccacgggtgaccgtggcggaggccgcgttggcggcccgcctatggcgaaagccataggacgcctcttagatgacagggtgtgaagagcctactgagctgggtagtagtcctccggcccctgaatgcggctaatcctaaccacggagcgtccaccggcaaaccggtcgggagggcgtcgtaacgggtaactctgtggcggaaccgactactttgggtgtccgtgtttccttttgatcctattttggctgcttatggtgacaacgataagttgttatcataaagcttttgggttggccacctggaaaaagttatcagtgtttgatattgttcggctctcacgccttccaacaaaacaggccttacttcttttaattgcattttatccatcggaggttattacagatttccatctgaagcttcttctcacagtagcagtaaa

SEQ ID NO: 1256 - DNA, 814 bp, Enterovirus G
  misc_feature 1..814: note = genomic RNA, nearly complete genome,strain:1
  source 1..814: mol_type = genomic DNA
aaaccagtctgtgggttgttcccacccacggggcctactgggcgccagtggactggtacgccagtaccttggtatcacggtaccactgtacgctagtacctttacacgcctgttttataccccttccccaaacgtaacattagaagtttaacaagcaaagaccaataggagtccaacacccagttggattgcggtcaagtacttctgtctccccggacctagtagtgataggctgtacccacggccgaagatgaaaccgtccgttatccggccagctacttcgagaagcctagtagcatcaaagatctgtcttggcgtttcgctcagcgcgttttcccccgcgtagatcgggctgatgggtctccgcataccccacgggcgaccgtggcggaggccgcgtggcggcccgcctatggcgaaagccataggacgccatttcagtgacagggtgtgaagagcctattgagctagttggtagtcctccggcccctgaatgcggctaatcctaaccacggagcgtttaccagcaaaccagctggcggaacgtcgtaacgggtaactctgtggcggaaccgactactttgggtgtccgtgtttcctgttgatcctattttggctgcttatggtgacaacgataagttgttatcataaagcttttgggttggccacctggaaaaaagttatcagtgtttgatattgttcggctttcacgcctaccattaagacaatcactttatttgttagttgcattttatcctgccaaggacattactgagtttcacctacaacttttactcatacaattacatcaagt

SEQ ID NO: 1257 - DNA, 814 bp, Enterovirus E
  misc_feature 1..814: note = isolate VD 2860/1-99 polyprotein gene, partial cds.1
  source 1..814: mol_type = genomic DNA
ttcaaacagcctgggggttgtacccacccctggggcccacgtggcgctagcactctggtatgcttagtacctttgtgcgcctgttttcccctcccttaaacaaattaagattgccactactgaggggagtagtccgactccgctccggtacagccgcaccagtactccggtgcgcatagcaccctagtacggagtaggtggtatcccttcccgaaacttagaagttatgaaccaaaccgaccaataggagcgtggcatccagccatgttgtggtcaagcacttctgtttccccggtccgcaaggatcgttacccgcccgacccactacgagaagcctattaactggccaagcgattgcgaagttgcgctcagccacaatcccagtggtagctctggaagatggggctcgcactccccccgtggtaacacggttgcttgcccgcgtgtgcttccgggttcggtcaccgaccgttcacttcaatctcgcgtaaccagccaagagccgattgtgctgggacggttttcctccggggccgtgaatgctgctaatcctaacctccgagcgtgtgcgcacaaaccagtgttgctacgtcgtaacgcgtaagttggaggcggaacagactactttcggtaccccgtgtttcttttgatttattttgtattttaatggtgacactgactgacatttgtgagtttgctcgattgcctttgaatattgctctgtattatctaatagcatttcacaagactacccaactttcactcgagcttattgactttgctgtttacttgaaccgcatacacaaactcaaca

SEQ ID NO: 1258 - DNA, 815 bp, Ovine enterovirus
  misc_feature 1..815: note = strain ovine/TB4-OEV/2009/HUN, complete genome.1
  source 1..815: mol_type = genomic DNA
taaacagtcagggggttgtacccacctccggggcccacgtggcgtcagtgctctggtgcgttagtacctttgcacgcctgttttcccttcccttaaacaaattaagatcgccagcgccgaggggagtagtccgactccgctccactacggtgctccagtggattgctattacggtagctcttcacggggtggctggtgtccccaaccccgcaacttagaagccagcacagatcgaccaatagcggctcggcagccagtcgggcaacggtcaagcacttctgtttccccggtccgtaaggatcgttacccgcccaggatgctacgagaaacttagtaaacacccaagcttgtgagaggttgcgctcagccacaaccccagtggtagctctgagtgatggggctcgtgactacccctctggtaacagagacacttgcccgcgtgtgcactcgggttcatcagaaatggtgttcacctcgaccaagcgtaagtgttgaagagtctattgtgccagcctggtttcctccggggccgtgaatgctgctaatcctaacctccgagcgtgtgcgcacaatccagtgttgctacgtcgtaacgcgtaagttggaggcggaacagactactttcggtaccccgtgtttcctcattcattatttcaatttatggtgacaattacagagatttgtgaattggcgaaactaccactgaatttggccttgtattgtcttattgccttccacaaaacttctgatattccacccagttatatcgatctcctggtttatctaaatttacaatataaattgaaccagataca

SEQ ID NO: 1259 - DNA, 816 bp, Enterovirus E
  misc_feature 1..816: note = isolate V251, complete genome.1
  source 1..816: mol_type = genomic DNA
ttaaaacagcctaggggttgttcccacccctggggcccacgcggcgctagtactctggtacgtcagcacccttgtacccccgtttttccctcccttaaacaaattaagattaccactactgaggggagtagtccgactccgctccggtactgccgcaccagtactccggtacgtttagtactctagtacggagtagatggtatcccccacccttgcaacttagaaggaatcaaactacccgaccaataggcgcgcggcatccagccgcgttacggtcaagcacttctgtttccccggtccgcaagggtcgttatccgcccgctccactacgaaaagcctagtagccaaccaaacgactgcgaagttgcgttcagccacaaccccagtggtagctctggaagatggggctcgcaatacccccgtggtgacacggttgcttgcccgcgcgtgcttccgggttcggtcatgtaccgttcactttaatgtcgtgtaattggtcaagagcctattgtgctggagcggttttcctccggggccgtgaatgctgctaatcccaacctctgagcgtgtgcgcacaaaccagtgttgctacgtcgtaacgcgtaagtcggaggcggaacagactactttcggtaccccgtgtttcacttatttttactttatattttatggtgacacttgctgatatttgtgaatttgctcgcttgccgttgaacatagccttgtattatttagtagcattttacaacacaagccagctttcagttgaactcattgattttgctgtttacctcaattacatacacaaacacaaca

SEQ ID NO: 1260 - DNA, 816 bp, Yak enterovirus
  misc_feature 1..816: note = strain SWUN-AB001, complete genome.1
  source 1..816: mol_type = genomic DNA
tttaaacagtctgggggttgttcccacccctggggcccacgtggcgctagcactctggtacgctagtacctttgtacgcctgttttccccacccttaaataaattaagattaccactaccgaggggagtagtccgactccgctccggcacagccgcaccagtgcactggtacgctagtaccttttcacggggtagtcggtatccccccccgtaacttagaagcatgtaacaaaccgaccaataggtgcgcggcagccagctgcgttgcggtcaagcacttctgtctccccggtccgcaaggatcgttacccgcccactccactacgaggagcctagtaactggccaagtgattgcggagttgcgttcagccacaaccccagtggtagctctggaagatggggctcgcacatcccccgtggtaacacggttgcttgcccgcgtgtgcttccgggttcagtctccgactgttcacttcaacatcacgcaaccagccaagagccgattgtgctggagtggtcttcctccggggccgtgaatgctgctaatcctaacctccgagcgtgtgcgcacaatccagtgttgctacgtcgtaacgcgtaagttggaggcggaacagactactttcggcaccccgtgtttcctttattttattcttattttatggtgacaattgcagagatttgtgatattgcgactttaccgttaaacatagcactgcattacctggttgcattccacaaaacttcagagattcctagttcctacattgacctacttgtttatttgaatcttaaatacaaacttgagcaagtgaa

SEQ ID NO: 1261 - DNA, 816 bp, Enterovirus E
  misc_feature 1..816: note = isolate D 14/1/96 polyprotein gene, partial cds.1
  source 1..816: mol_type = genomic DNA
ttcaaacagcctgggggttgtacccacccctggggcccacgcggcgccagtactctggtacgctagtacctttgtacgcctgttttcccctcccttaaacaaattaagattgccactactgaggggagtagtccgactccgctccgacactgtcgcaccagtactccggtacgcttagtaccctagtacggagtaggtggcatccccaccccgaaacttagaagtatgcaaacaaaccgaccaataggcgcgcggtatccagccgtgtgaaggtcaagcacttctgtctccccggtccgtaaggatcgttacccgcccgacctactacgaaaagcctagtagttggccaagcgagcacgaggttgcactcaaccacaaccccagtggtagctctggaagatggggctcgcagttcccccgtggcaacacggttgcttgcccgcgtgcgcttccgggttcggacttgtgccgttcacctcaaactcgcgtaaccagcgaagagccgattgtgctaggacggttttcctccggggccgtgaatgctgctaatcccaacctccgagcgtgtgcgcacattccagtgttgctacgtcgtaatgcgtaagtcggaggcggaacagactactttcggtaccccgtgtttcctcttattttatttacattttatggtgacactgactgacattcgtgagctagcccgcttgcctctcaatattgcactttattatttggtagcattttacaatactctcgaacttacccttgagcttgttgatttcatcgtttacctaaatcggcttgacaaaggatacaata

SEQ ID NO: 1262 - DNA, 817 bp, Enterovirus E3
  misc_feature 1..817: note = polyprotein gene, partial cds.1
  source 1..817: mol_type = genomic DNA
ttaaaacagcctgggggttgtacccacccctggggcccacgtggcgccagtactctggtacgctagtacctttgtacgcctgttttccccacccttaaataaattaagattaccactactgaggggagtagtccgactccgctccgacactgccgcaccagtattccggtacgcttagtaccctaatacggagtagatggtatccccaccccgcaacttagaagcatgcaaacaacccgaccgataggagcgcggcatccagtcgcgtataggtcaagcacttctgtttccccggtccgaaaggatcgttacccgcccaacccactacgagaagcctagtaactggccaaacaaccgcaaagttgcgctcagccacaaccccagtggtagctctggaagatggggctcgcacctcccccgtggtaacacggttgcttgcccgcgtgtgcttccgggttcggcctagtgccgttcactttaaagttgtgtaaccagcaaagagcctattgtgctgggatggttttcctccggggccgtgaatgctgctaatcccaacctccgagcgtgtgcgcacaaaccagtgttgctacgtcgtaatgcgtaagttggaggcggaacagactactttcggtaccccgtgtttccttttattgttatttacattttatggtgacactgactgacatttgtgaatttgctcgcttgcctctcaatattgcactatattacctgattgcatttcacaacactagtaaactaacccttgaacttatcgactttgctgtttacctaagtcacttaaatcacaagtacaata

SEQ ID NO: 1263 - DNA, 817 bp, Enterovirus E
  misc_feature 1..817: note = isolate D 58/96-V2130 polyprotein gene, partial cds.1
  source 1..817: mol_type = genomic DNA
ttcaaacagcctgggggttgtacccacccctggggcccacgtggcgccagtactctggtacgttagtacctttgtacgcctgttttcccctcccttaaataaattaagattgccactactgaggggagtagtccgactccgctccggcactgccgcaccagtactccggtacgcctagtaccctagtacggagtagatggtatcccccccccgaaacttagaagtaatgagtctaaccgaccaataggcgcgcggcatccagccgtgttacggtcaagcacttctgtttccccggtccgcaaggatcgttacccgcccgacccactacgagaagcctattaactggccaagcgtcagtgaagttgcactcagccacaaccccagtggtagctctggaagatggggctcgcatctcccccgtggtaacacggttgcttgcccgcgcgtgcttccgggttcagcctcgcgctgttcacttcaatgacacgtaaccagccaagagccgattgtgctgggacggttttcctccggggccgtgaatgctgctaatcctaacctccgagcgtgtgcgcacaatccagtgttgctacgtcgtaacgcgtaagttggaggcggaacagactactttcggtaccccgtgtttcccttaaatttttccttaaatatatggtgacattgactgacatttgtgagtttgctcgcttgccaatcaacattgcactctattacctaatagcatttcacaatacttgtgaactcacccttgaacttgtcaatttctccgcctatttgaactacttaaatagaaagtataaca

SEQ ID NO: 1264 - DNA, 818 bp, Enterovirus E4
  misc_feature 1..818: note = strain bovine enterovirus,strain MexKSU/5, complete1
  source 1..818: mol_type = genomic DNA
tttaaaacagctcgggggttgttcccactcccggggcccacgtggcgctagtactctggtacgttagtaccttgtacgcctgttttcccctccttaaacaaattaagattaccactactgaggggagtagtccgactccgctccagcactgctgcaccagtgaattggtatgattagtacctcttcacggagtagatggtattcctaccccgcaacttagaagtttattaacaaaccgaccaataggtgcacagtatccagctgtgtaacggtcaagcacttctgtttccccggtccaccaggatcgttacccgcccgacccactacgagaagcctagtaactagccaagtgactgcgaagttgcgctcaaccacaaccccagtggtagctctggaagatggggctcgcacctcccccgtggtaacacggttgcctgcccgcgtgtgcttccgggttcggccttgtgccgttcacttctacgtcatgtaactagccaagagcctattgtgctgggacggttttcctccgggaccgtgaatgctgctaatcctaacctccgagcgtgtgcgcacaatccagtgttgctacgtcgtaacgcgtaagttggaggcggaacagactactttcggtaccccgtgtttcctcttttattatattatttaatggtgacaattgcagaaatttgtgatttagcgactttaccattgcacatagcattatattgtttgattgctttccacaaaacatctgatatacccaactcttatatcgatctacttatctttctttgcttgaagaataaattaaagaaagcacg

SEQ ID NO: 1265 - DNA, 818 bp, Bovine enterovirus
  misc_feature 1..818: note = genomic RNA, complete genome.1
  source 1..818: mol_type = genomic DNA
ttaaaacagcctgggggttgtacccacccctggggcccacgtggcgctagtactctggttcgttagaacctttgtacgcctgttttcccctccttaaacaaattaagatctctgccaatgtggggagtagtccgactccgcaccgatacgtcgcaccagtagaccggttcgcttaggacccttctacggattggtatgagttccccaccccgtaacttagaagtactagcaaaaccgaccaataggagcgtggcacccagctgcgttaaggtcaagcacttctgtctccccggccagaaatggtcgtcacccgccctctctactacgagaagcctattaaccattgaaggcgatgaggagttgcgctccaccacaaccccagtggtagctctgagagatggggctcgcagtcacccccgtggtaacacggttgcttgcccgcgtgtgctctcgggttcggccacttggccgttcactccaactcgttgtaagtggccaagagcctattgtgctagagaggttttcctccggagccgtgaatgctgctaatcccaacctccgagcgtgtgcgcacaatccagtgttgctacgtcgtaacgcgcaagttggaggcggaacagactactttcggtactccgtgtttccttattattttatacaacaatttatggtgacattgactgatactattgagttcgcccgcttgccattgaatattgccttgtattaccttatagcatttcaaaaagccacagatctcaccctcgagctcattcactttgcagtttgtttgaatcgcatacacaagacatttgaac

SEQ ID NO: 1266 - DNA, 818 bp, Enterovirus E
  misc_feature 1..818: note = strain LC-R4 polyprotein gene, complete cds.1
  source 1..818: mol_type = genomic DNA
ttaaaacagcctgggggttgtacccacccccggggcccacgtggcgccagtactctggtttgcttagaacctttgtacgcctgttttcccccccctttaaataaattaagatctctgccaatgtggggagtagtccgactccgcaccgatacgtcgcaccagcagaccggttcgcctagaacccttctgcggattggtatgagttcctccccgaaacttagaagcaccgcaccaaccgaccaataggagcgtggcacccagccatgttacggtcaagcacttctgtttccccggtcagaaatgatcgttatccgccctctcccctacgagaagcctattaaccaccgaacgtggtgaagagttgcgctcagccacaatcccagtggtagctctgagagatggggctcgcatttcccccgtggtaacacggttgcttgcccgcgcgtgctctcgggttcagtcttctgactgttcactctgaaccacggtaagtggccaagagcctattgtgctggagaggttctcctccggagccgtgaatgctgctaatcccaacctctgagcgtgtgcgcacaatccagtgttgctacgtcgtaacgcgtaagtcggaggcggaacagactactttcggtactccgtgtttccttattatctattaatcaatttatggtgacactgactgatattgttgagtttgctcgattgcccttgaacattgccttatactatcttattgcattttaatagagccacagagcttactgttgagcttattgactttgctgtttacttgaatcaaatatacgcattagataaac

SEQ ID NO: 1267 - DNA, 819 bp, Bovine enterovirus type 2
  misc_feature 1..819: note = strain PS87, complete genome.1
  source 1..819: mol_type = genomic DNA
tttaaaacagcctgggggttgtacccacccctggggcccacgcggcgctagtactctggtacgttagtacctttgtacgcctgttttcccctcccttaaataaattaagattaccactactgaggggagtagtccgactccgctccgacaatgtcgcaccagtgcactggtacgctagtaccttttcacggagtagctggtattccctcccgaaacttagaagcacttaaatcaaccgaccaataggcgcgcggtagccagccgcgttacggtcaagcactcctgtttccccggtccacaaggatcgttacccgcccgacccactgcgagaaacctagtagttggccaagtggtaacgaggttgcgctcagccacaaccccagtggtagctccggaagatggggctcgcaccacccccgcggtaacgcggttgcttgcccgcgcgtgcttccgggtccggtctcgtaccgttcacctcaataccacgtaaccagcaaagagtctattgcgctgggacggttttcctccggggccgtgaatgctgctaatcccaacctccgagcgtgtgcgcacaatccagtgttgctacgtcgtaacgcgtaagttggaggcggaacagactactttcggtaccccgtgtttccctatcattccatttcattttatggtgacaattgctgagatctgtgatttggcgaccttaccactgaatattgccttatattacttggttgcattccacaaaacctctgacatacctgcttcctatatcgacctacttgttttcctcaatttaaagtatagactacaaatagcaga

SEQ ID NO: 1268 - DNA, 819 bp, Enterovirus E
  misc_feature 1..819: note = isolate D 8/01 polyprotein gene, partial cds.1
  source 1..819: mol_type = genomic DNA
ttaaaacagcctgggggttgtacccacccctggggcccacgtggcgctagtactctggttcgtttagaacccttgtacgcctgttttcccctcccttaaacaaattaagatctctgccaatgtggggagtagtccgactccgcaccgatacgtcgcaccagcagaccggttcgcttagaacccttctgcggattggtatgagttccccccccttgcaacttagaagcatgagaacaaccgaccaataggagcatggcatccagccgtgtcacggtcaagcacttctgtttccccggccagagatggtcgttacccgccctacccactacgagaagcctattaactaccgaaatcagcgaagagttgcactcagccacaaccccggtggtagctctgagagatggggctcgcaacaacccccgtggtaacacggttgcttgcccgcgcgtgctctcgggttcagtctttgactgttcactccgacctgacgtaagtagccaagagcctattgtgctgggaaggttttcctccggagccgtgaatgctgctaatcctaacctccgagcgtgtgcgcacaaaccagtgttgctacgtcgtaacgcgcaagttggaggcggaacagactactttcggtactccgtgtttccttattttattaactccaatttatggtgacattgactgatattgttgtatttgcccgcctaccgttgaacatagctttatatcatctcattgcattcaagaaatccacagagcttaccctggaactccttgactttgcagttttcttaaatcggatacataaactcagtaaga

SEQ ID NO: 1269 - DNA, 819 bp, Enterovirus E
  misc_feature 1..819: note = isolate 56/59/1 polyprotein gene, partial cds.1
  source 1..819: mol_type = genomic DNA
ttcaaacagcctgggggttgtacccacccccggggcccacggggcgccagtactctggtatgcttaatacctttgtacgcctgtttttccctcccttaaataaattaagattaccactactgaggggagtagtccgactccgctccggtaccgccgcaccagtactccggtacgctcagtaccctagtacggagtagttggtattccctccctgtaatttagaagtatgaaattaaaccgaccaataggaggcgtggcatccagtcgcgttacggtcaagcacttctgtttccccggtccgtaaggatcgttacccgcccgacccactacggaaagcctagtaactggccaactggatgagaggttgcactcagccacaaccccagtggtagctctggaagatggggctcgcaccttcccccgtggtaacacggttgcttgcccgcgtgtgctcccgggttcggtccccgaccgttcacttcgattccaggtaaccagccaagagccaactgtgctgggacggttttcctccggggccgtgaatgctgctaatcctaacctccgagcgtgtgcgcgcaaaccagcgttgctacgtcgtaacgcgtaagttggaggcggaacagactactttcggtaccccgtgtttccttttattttacttattgtttatggttacactgactgatatttgtgagtttgctcgtttgcctttgaatattgctttgtattactttgttgcttttcacaaaacgacccagctcaccgttgaacttgtcgattttgctgtttttcttaatctaacctacaagaaacttaaca

SEQ ID NO: 1270 - DNA, 820 bp, Sicinivirus A3
  misc_feature 1..820: note = isolate 100C, complete genome.1
  source 1..820: mol_type = genomic DNA
agtattaatgttgccgaattggactgacacaagttgaggagcacatagggcatggttgtaagaccactagcttgtacattccatgggcgatgctgggggtccacgtagccctcaggggaggcggtgacaagcagcgccccggccagtggcagacttgcaaaatttcctaccaaaccaccatctcactcctattaccccttccctctatacctttcgttatggtggttaccactgtttcattgccttggctgaaaatggccaccctctcgacacatgccccttgctgccccatcgtgcgactttccatttgtccactcagttagaaaagcacgggggtcctgtctgcgtcccgagcccggttggtgatcttcctcccccccgcccgattgatggcccggaggggtttgctgatgcgctttatgatgcttgcctgtccttcctccgtcggcgcgaacatgcgctcgttgagcttgcggaaatacagccttgcttccgtttctcccaccccgcataccctggccgcctcccgcttgaaattcgcttcgtccggcatcctggtgtgcctcccccgctgcgtgactttacccgtggcattcgacgccctggcattcagtacattccgctacctaacctaggcggtctcccccagtcccccgctcccccaattgcacacgtgatatccgccgctgtcaatgccgtgcgccgcggtagccactggcattgtcctctgcttcgtcaagtgtccactcacggctggctatttacctattctggctattggtgctctatcctgttgcatgaggggcgacatgaccacgac

SEQ ID NO: 1271 - DNA, 820 bp, Bovine enterovirus type 2
  misc_feature 1..820: note = strain 3A, complete genome.1
  source 1..820: mol_type = genomic DNA
tttaaaagagtcagggggttgtacccacccctggggcccacgtggcgctagtactctggtacgccagtacctttgtacgcctgttttcccctccctaaataaattaagattaccactactgaggggagtagtccgactccgctccggcaatgccgcaccagtgcactggtacgctagtaccttttcacggagtagatggtattcctcaccccgaaacttagaagcacgaaaacaaaccgaccaataggtgcatggcatccagccgtgttatggtcaagcacttctgtttccccggtccgcaaggatcgttacccgcccgacccactacgagaagcctagtaactgaccaagtagttgagaggttgcgctcagccacaaccccagtggtagctctggaagatggggctcgcacttcccccgtggtaacacggttgcttgcccgcgcgtgcttccgggttcggcctctgccgttcacctcgattctgcgtaatcagccaagagcctattgtgctgggacggtttcctccggggccgtgaatgctgctaatcccaacctccgagcgtgtgcgcacaatccagtgttgctacgtcgtaacgcgtaagttggaggcggaacagactactttcggaaccccgtgtttcctttgttttaattttaatgctttatggtgacaattgttgagatctgcgatctagcgaccttgccattgaacattgctttgtattatttggttgcattccacaaaacctctgacatacccagctcctatattgatcttttggtttatctaaacttaaaacacaaactcgaaggattgcg

SEQ ID NO: 1272 - DNA, 820 bp, Enterovirus E
  misc_feature 1..820: note = isolate Vir 404/03 polyprotein gene, complete cds.1
  source 1..820: mol_type = genomic DNA
ttcaaacagcctgggggttgtacccacccctggggcccacgcggcgccagtactctggtacgcttagtacctttgtacgcctgttttccctttcccttaaacaaattaagattaccactgttgaggggagtagtccgactccgctccggcactgccgcaccagtactccggtatgcctagtaccctagtacggagcagatggtatccccctttccctgaaacttagaagtctgacgcaaacccgaccaataggagcgcggtatccaaccgcgtaacggtcaagcacttctgtttccccggtccgcaaggatcgttacccgcccgtcccactacgggaagcctagtaactggccaactgagtgagaggttgcgctcagccacatacccagtggtagctctggaagatggggctcgcactccccccgtggtaacacggttgcttgcccgcgtgtgcttccgggttcggtttcgaccgttcacctcaaccccaggtaaccagccaagagcctactgtgctggagcggttttcctccggagccgtgaatgctgctaatcccaacctccgagcgtgtgcgcacaaaccagtgttgctacgtcgtaacgcgtaagttggaggcggaacagactactttcggtactccgtgtttccttttgttttatctattgtttatggtgacactgtctgacatttgtgaatttgctcgcttacccttgaatattgcattgtattatctggttgcatttcacaacacaacccaactctccattgaactcatcaactttgctgtatttcttaacacaatacaaagaaagcgagata

SEQ ID NO: 1273 - DNA, 820 bp, Enterovirus E
  misc_feature 1..820: note = strain PS 83 polyprotein gene, complete cds.1
  source 1..820: mol_type = genomic DNA
ttaaaacagcctgggggttgtacccacccccggggcccacgcggcgctagtactctggttcgtttagaacccttgtacgcctgtttttcccccccttaaataaattaagatctctgccaatgtggggagtagtccgactccgcaccgatacgtcgcaccaacagaccggttcgcctaggacccttctgcggattggtatgagtcccccccccgaaacttagaagcacattacaaactggccaataggagcgtggtatccaaccgcgttgcggtcaagcacttctgtttccccggtcagaaatgatcgttacccgccctccccactacgagaagcctattaaccactgaaagtgatgatgagttgcgctcagccacaaccccggtggtagctctgagagatggggctcgcaccacccccgtggtgacacggttgcttgcccgcgtgtgctctcgggttcagtcgcgagactgttcactctgactcattgtaggtggccaagagcctattgtgctggggaggttttcctccggagccgtgaatgctgctaatcccaacctccgagcgtgtgcgcacaatccagtgttgctacgtcgtaacgcgtaagttggaggcggaacagactactttcggtactccgtgtttccttaattttattgttcaaatttatggtgacattgtctgacatttgtgaattcgctcgcctgccacttaatatcgctttatatcatctgatagcattccataagactacagaactcactttggaactcatcgactttgctgttttcctgaatactgttcacaaccaaacaaaacaaa

SEQ ID NO: 1274 - DNA, 821 bp, Enterovirus AN12
  misc_feature 1..821: note = genomic RNA, complete genome,strain: AN12.1
  source 1..821: mol_type = genomic DNA
ttaaaacagcctgggggttgttcccacccccggggcccacgtggcgccagtactctggcacgttagtgcccttgtacgcctgttttcccctccttaaacaaattaagattgccactactgaggggagtagtccgactccgctccagtaccgctgcaccagtgagctggtacgctagtaccttcgcacggagtagatggcatcccccaccccgtaacttagaagcaaagtacacatctggccaatagtggcgctgcatccagccgcgcaacggtcaagcacttctgtttccccggtccgcaagggtcgttatccgcccagtccactacggaaagcctactaaccattgaagctatcgagaggttgcgctcggccacgaccccggtggtagctctgagtgatggggctcgcaaacacccccgtggtaacacggatgcttgcccgcgcgtgcactcgggttcagcctattggttgttcacctcaacatagtgtaaatggccaagagcctactgtgctggattggttttcctccggagccgtgaatgctgctaatcccaacctccgagcgtgtgcgcacaatccagtgttgctacgtcgtaacgcgtaagttggaggcggaacagactactttcggtactccgtgtttcttttgttttattttgaattttatggtgacaattgctgagatttgcgaattagcgactctaccgctgaacattgccctgtactacctaatcgcatttcacaaaacctcagagataccaagctcttacattgatctgcttgttttcctgaatctcaaatataaattggaacaagcaaa

SEQ ID NO: 1275 - DNA, 821 bp, Enterovirus E
  misc_feature 1..821: note = isolate Jena 38/02 polyprotein gene, partial cds.1
  source 1..821: mol_type = genomic DNA
ttcaaacagcctgggggttgtacccacccctggggcccacgtggcgctagtactctggtacgttagtacctttgtacgcctgttttcccctcccttaaacaaattaagattaccactactgaggggagtagtccgactccgctccggtactgccgcaccagtactccggtacacttagtaccctagtacggagtagatggtatccccaccccgcaacttagaagcatgcaaacaaaccgaccaataggcgcacgatatccagtcgtgtttcggtcaagcacttctgtctccccggtccgaaaggatcgttacccgcccgacccactacgagaagcccagtaactggccaagtgattgcgaagttgcgctcagccacaaccccagtggtagctctggaagatggggctcgcgtctcccccgtggtgacacggtcgcttgcccgcgtgtgcttccgggttcggcctacgccgttcacttcaatgtcacgtaaccagccaagagcctattgtgctgggacggttttcctccggggccgtgaatgctgctaatcccaacctccgagcgtgtgcgcacaacccagtgttgctacgtcgtaatgcgtaagttggaggcggaacagactactttcggtaccccgtgtttcctttaaattttattcattattttatggtgacaattgctgagatctgcgaattagcgactctgccgttgaatattgctctgtactatttggttgcattccacaaaacctctgacatccccagtacatacattactttacttgtttacctcaatctaaagcacaagctagataatacaaa

SEQ ID NO: 1276 - DNA, 822 bp, Picornaviridae sp.
  misc_feature 1..822: note = rodent/Mc/PicoV/Tibet2015 polyprotein gene,1
  source 1..822: mol_type = genomic DNA
tttaaaagagcctgggggttgttcccacccccaggatgcccactcgtgggcatgtggtactgtggtatcgcggtaccacagtacgcctctttgaccgccctgacccaagaatcttttcctttaacagatctcttcgtaacaagggcctcagcctgacgcaagtgcctccattggagtctctccaagccctccggggcttggagggcgccgaccccctgcctagggggagcccacgacacggctggagtccattggcacaccgcagccacgattcaagccagaattgaaagcgggaagcacttctgtctccccggtgtggatcatacgctgtacccacggcgaaaagtgaagcatcgttacccgactcggtacttcgagaagcccagtacagttgtggatctctgcagggtatacgctcagcgtgacccctacgtagttccttgagatggctgagagaacaccccacgggcgaccgtgtctctcggcgcgtggctcaaggccgggccttcagtggctcggtgccttgcagagtgaagcctccgaacagcctattgagctaccgtttagcctccgccctcttgaatgcggctaatcctaaccatggagcgcccgcccacagtccagtgggtagagcgtcgtaacgcgcaagtccgtggcggaaccgactactttagagtggcgtgtttccaatttatcctttataaagttgcttatggtgacaccacaagagatccacgatttcttgtttcttatcactgagacacaagtcatattcatcaatctttattgcggaattaacttggtgcgtccaaacacatcagc

SEQ ID NO: 1277 - DNA, 822 bp, Bovine enterovirus type 2
  misc_feature 1..822: note = strain BHM26, complete genome.1
  source 1..822: mol_type = genomic DNA
tttaaaacagcctgggggttgtacccacccccggggcccacgtggcgccagtactctggtacgctagtacccttgtacgcctgtttttcccccccttaaataaattaagactgccactactgaggggagtagtccgactccgctccggcactgccgcaccagtacactggtatgttagtacctttgtacggagtaagtggtatccccaccctgaaacttagaagtatgcaaacaaaccgaccaataggtgcgcggtatccaaccgcgtaacggtcaagcacttctgtctccccggtccgaaaggatcgttatccgcccgacccactacgagaagcccagtagctggccaagtgaacgcgaggttgcgctcagccacaaaccccagtggtagctctggaagatggggctcgcacttcccccgtggtgacacggttgcttgcccgcgtgtgcttccgggttcggactcgtgccgatcacctcaaattcacgcaaccagtcaagagcctattgtgctgggacggttttcctccggagccgtgaatgctgctaatcctaacctccgagcgtgtgcgcacaatccagtgttgctacgtcgtaacgcgtaagttggaggcggaacagactactttcggtactccgtgtttcctttgaattttatcattattttatggtgacaattgctgaaatctgtgatttggcaactctcccactgaacatcgcactatactacctgattgcatttcacaaaacctccgatatccccagttcctatatcgacctacttgtttatctcaatttgaaacataaactaggacggttgaa

SEQ ID NO: 1278 - DNA, 822 bp, Enterovirus F
  misc_feature 1..822: note = strain IL/alpaca, complete genome.1
  source 1..822: mol_type = genomic DNA
tttaaaagagcctgggggttgtacccacccctggggcccacgtggcgctagtactctggtacgccagtacctttgtacgcctgttttcccctcccttaaataaattaagattgccactactgaggggagtagtccgactccgctccagcaatgctgcaccagtgcactggtacgccagtaccttttcacggagtagatggcatccccaccccgaaacgtagaagcatgcaaacaaaccgaccaccaggcgcgcggcatccaaccgcgttacggtcaagcacttctgtttccccggtccgcaaggatcgttacccgcccgacccactacgagaagcccagtaactggccaagtggtcgcgaggttgcactcagccacaaccccagtggtagctctggaagatggggctcgcagttcccccgtggtaacacggttgcctgcccgcgcgtgcttccgggttcggctctcgccgttcacctcaaccccacgtaaccagccaagagcctattgtgctgggacggtattcctccggggccgtgaatgctgctaatcccaacctccgagcgtgtgcgcacaatccagtgttgctacgtcgtaatgcgtaagttggaggcggaacagactactttcggtaccccgtgtttcctttatttttccttcaaaaattttatggtgacaattgttgagatttgcgatttggccactttaccattgaatattgccttgtattacttggttgcttttcacagaacctctgacatacccagttcgtatattgatcttcttgtttatttaaacctaaaacacaaacttagaaagctaag

SEQ ID NO: 1279 - DNA, 822 bp, Enterovirus F
  misc_feature 1..822: note = strain BEV-261 polyprotein gene, complete cds.1
  source 1..822: mol_type = genomic DNA
tttaaacagcctgggggttgttcccacccctggggcccacgtggcgctagtactctggtacgctagtacctttgtacgcctgtttttcccctcccttaaataaatcaaggttgccactactgaggggagtagtccgactccgctccagcaatgctgcaccagtgcactggtacgctagtaccttttcacggagtagatggtatcccttaccccggaacctagaagattgcacacaaaccgaccaataggcgcaccgcatccagccgtgcagcggtcaagcacttctgtctccccggtctgtaaagatcgttatccgcccgacccactacgaaaagcctagtaactggccaagtgaacgcgaagttgcgctccgccacaaccccagtggtagctctggaagatggggctcgcaccacccccgtggtaacacggttgcctgcccgcgtgtgcttccgggttcggtctcgtgccgttcacttcaacttcacgcaaccagccaagagcctattgtgctgggacggttttcctccggggccgtgaatgctgctaatcccaacctccgagcgtgtgcgcacaatccagtgttgctacgtcgtaacgcgtaagttggaggcggaacagactactttcggtaccccgtgtttcctctcattttatttaatattttatggtgacaattgttgagatttgcgctcttgcaacgttgccattgaatattggcttatactatttggttgccttttacaaaacctctgatatacccagttcttacattgatctgcttgtttttctcaatttgaagtatagactacaaatagcaaa

SEQ ID NO: 1280 - DNA, 822 bp, Enterovirus F
  misc_feature 1..822: note = strain PS87/Belfast polyprotein gene, complete cds.1
  source 1..822: mol_type = genomic DNA
tttaaaacagcctgggggttgtacccacccctagggcccacgtggcgccagtactctggtacattagtacctttgtacgcctgttttcccctcccttaaataaatcaagattaccactactgaggggagtagtccgactccgctccagcaatgctgcaccagtgcactggtacgctagtaccttttcacggagtagatggtatccccaccccgaaacttagaagcatgtgatcaaatcgaccaataggcgcgcggttgccagccgcgtttcggtcaagcacttctgtttccccggtccgcaaggatcgttacccgcccgacccactgcgagaagcccagtaactggccaagcggtagcgaggttgcactcagccacaaccccagtggtagctctggaagatggggctcgcagttcccccgtggtaacacggatgcctgcccgcgtgtgcttccgggttcggtctcgtgccgttcacctcaataccgcgtaaccagtgaagagcctattgcgctgggacggttttcctccggggccgtgaatgctgctaatcctaacctctgagcgtgtgcgcacaatccagtgttgctacgtcgtaacgcgtaagtcaggggcggaacagactactttcggtaccccgtgtttccttttattttatatttatcattttatggtgacaattgctgagatttgcgatttagcggttttgccattgaacattgctttgtactacttggttgcatttcacaaaacctccgacatacccagctcctacatcgacttgcttgtttttcttaattaagacataaactagagaacacaaa

SEQ ID NO: 1281 - DNA, 822 bp, Enterovirus F
  misc_feature 1..822: note = genomic RNA, complete genome,strain: BEV IS2/Bos1
  source 1..822: mol_type = genomic DNA
ttaaaacagcctgggggttgtacccacccctggggcccacgtggcgccagtactctggttcgcttagaacctttgtacgcctgttttcccctcccttaaacaaattaagattgccactactgaggggagtagtccgactccgctccagcactgctgcaccagtgaattggtacgctagtacctctccacggagtagataggaatccctacccgaaacttagaagcatgtaaataacccgaccaataggagcgtggtatccaaccatgttaaggtcaagcacttctgtttccccggccagaaatggtcgttacccgccctacccactacgagaagcccagtaactacccaaacaagtgagaagttgcactcatccacaaccccagtggtagctctgagagatggggctcgcatcttcccccgtggtaacacggttgcttgcccgcgtgtgctctcgggttcgaccccgtgtcgatcacctccgatctgacgtaaccagccaagagcctattgtgctgggaaggttttcctccggagccgtgaatgctgctaatcccaacctccgagcgcgtgcgcacaatccagtgttgctgcgtcgtaatgcgtaagttggaggcggaacagactactttcggtactccgtgtttccttttattcatttattgattttatggtgacattgctgagatttgtgatttggctgttttaccactgaacattgccctgtattacctgattgcattccacaaaacttctgagatacctacatcttatattgatttacttgtcttccttaacctgaggcacaaactagagaacacaaa

SEQ ID NO: 1282 - DNA, 823 bp, Bovine enterovirus type 2
  misc_feature 1..823: note = strain BJ001, complete genome.1
  source 1..823: mol_type = genomic DNA
tttaaaagagtcagggggttgtacccacccctggggcccacgtggcgctagtactctggtacgttagtacccttgtacgcctgtttttccctcccttaaataaattaagactaccactactgaggggagtagtccgactccgctccggcactgccgcaccagtacaccggtacgctagtacccttgtacggagtagatggtatccccacccccgaaacttagaagcaagcacacaaaccgaccattaggcgcgcggcatccagtcgcgtaacggtcaagcacttctgtttccccggtccgcaaggatcgttacccgcccgacccactacgagaagcctagtagttggccaagtgaacgcgaggttgcgctcagccacaaccccagtggtagctctggaagatggggctcgcacttcccccgtggtaacacggttgcttgcccgcgcgtgcttccgggttcggcttcgtgccgttcacctcaacttcacgtaaccagcaaagagcctattgtgctgggacggttttcctccggggccgtgaatgctgctaatcccaacctccgagcgtgtgcgcacaatccagtgttgctacgtcgtaacgcgtaagttggaggcggaacagactactttcggtaccccgtgtttccttttaattttattcattattttatggtgacaattgctgagatttgtgatttggcgactttaccattgaatattgcattctattaccttatagcatttcacaaaacttctgatattccaccctcctacatcgacctgcttgttttcctgaatctcaaatataaatttgaagagacaaa

SEQ ID NO: 1283 - DNA, 828 bp, Rosavirus 2
  misc_feature 1..828: note = strain GA7403, complete genome.1
  source 1..828: mol_type = genomic DNA
ttttcaaagccggggttgggggggctgcaccccatccccccttcttcccctcttcctccgttgcgcgcgttcctgacgcccgccgcggagttcctagctggctaacacccagttgggagggctctcactccctcacacctcgcgctttggacgccaggcatggcgttaaacatgcattcccttcccctagtaacctcccttcgccccttccccacgttgtaccccctccgagatggctgctaaggcgcttgctgctacagcagtctcgtgtttcgggtgttataagtgctttcttttccactccactccctgcctatggggagcggaacggccttgtctcggtcgttgcttcttgcagatcttcacccctccaggctttctggactcgccaggggtggagtagtaggcgcactgtctaagtgaaggtagcagtgttgttggcgaagagttgtggacctactttgagtttgtagcgatcatccagagctagcggatctccccacgcggtaacgcgtgcctctaggcccaaaaggcacggtgttcacagcaccctttggatggcgggggtgcccccctccgcacttaaagtagaaaaacagcttagtagtcaaataacatggctttcctcaagcattcagtgctacatgggactgaaggatgcccagaaggtacccgcaggcaacgataagctcactgtggatctgatctggggccctgggccaggtgctatacacctggttaaaaccaaatctggtagtcagggttaaaaaacgtctaagtcccacccccccggggacggggggttcccttaaaccctcaactgacacc

SEQ ID NO: 1284 - DNA, 830 bp, Rattus tanezumi hunnivirus
  misc_feature 1..830: note = strain Wencheng-Rt38-2 polyprotein gene,1
  source 1..830: mol_type = genomic DNA
cccccctcccccccttcccttccctttgcaacgcaacaattgtaagtgccctcacctgtcaattgggaccaccactttcagtgaccccatgcgaagtgctgagagaaaggaagctttcttacccttcatttgtgaacccactggtctaagccgcttggaatacgatgagtggaaaagttcattcttaatggagtgaaacatgcttaaatttccagctcgtgctggtctttccagtacggggcggccctgtctggccgtaattcttcagagtgtcacgccacacttgtggatctcacgtgccacatgacagcgctacagctggaactgggtgcttggtgcccatggagtaacagcgaaaagtgttagatcaagccttgcttgggctatgagcctgcggaacaacaactggtaacagttgcctcaggggccgaaagccacggtgttaacagcaccctcatagtttgatccacctcagggtggtgatgtttagcagttagtagttgccaatctgtgttcactgaaatctcggcataccgtgtagtgtacaggggtgaaggatgcccagaaggtacccgtaggtaaccttaagagactatggatctgatctggggccttgtccggagtgctttacacacggctcaaggttaaaaaacgtctagccccacagagcccgagggattcgggttttccctttaaaaacccgactagagcttatggtgacaattattgctgttcagacgaacagtgtaattgttgtctattcacagcagttctatcagagcttttcccacaacggatcttcttggcaagcaaatacagcaggagtcaat

SEQ ID NO: 1285 - DNA, 837 bp, Enterovirus E
  misc_feature 1..837: note = genomic RNA, nearly complete genome,strain:1
  source 1..837: mol_type = genomic DNA
atttaaggaggggaaaacagcctgggggttgtacccacccctggggcccacgtggcgctagtactctggtacgttagtacctttgtacgcctgttttcccctccttaaataaattaagattaccactactgaggggagtagtccgactccgctccagcaatgctgcaccagtgaattggtacgctagtacctctgcacggagtagatggtatccctttccccgaaacttagaagaaagcaaacaaaccgaccaataggagcgcggcaaccagccgtgttgcggtcaagcacttctgtttccccggtccgcaaggatcgttatccgcccgacccactacggaaagcctagtaactggccaaacagcaaagaagttgcgctcggccacaaccccagtggtagctctggaggatggggctcgcatctcccccgtggtaacacggttgcttgcccgcgtgtgcctccgggttcagtcatcgactgttcacttcaatgctgtgtaaccagccaagagcctactgtgctgggacggttttcctccggggccgtgaatgctgctaatcccaacctccgagcgtgtgcgcacaaaccagtgttgctacgtcgtaacgcgtaagtcggaggcggaacagactactttcggtaccccgtgtttcctttgatttttatttaatattttatggtgacaattactgagatttgtgatttggctgctttaccattgaatattgctctgtactatttagtcgcatttcacaaaacttctgagatccctgcgtcttttattgacttgcttgttttcctcaatttgaagtgcaaactagaaggcataaaaagag

SEQ ID NO: 1286 - DNA, 843 bp, Washington bat picornavirus
  misc_feature 1..843: note = polyprotein gene, complete cds.1
  source 1..843: mol_type = genomic DNA
cctatcgacagagtttgttgccgttaaaaagaggtcccaggggtgtttcccctggggcccctttttaacggcaacaaactctgtcgataggctaacgccgagcgttcacttagtgagggcgatttacatcacataacaccgccttgtttgacatgtttcactcaaggacaagatatggtaaatctgtgcactacttgaaaattctcgacgttagcggagctaaaacaacaccacaacacaacacaacaattaacaacacattagaaattcgaatttagaagttagaccccaatttttgatttaacatctgttattttgactttgggcaatccactgatctttgaatttcacacgacagccgtggagagacggcacacgctacttcagcatagatccaaggatagctggtagcggcgacgaagtccacaatcactctatattttcaggcttctgaaagtgctgataaattgattaagttcggtttatcggaattgccgaggtccctcgaagaaacccgcggaaatgagaatatagatgttggtatggcagccagaagacatgaactatgacaagtacgtacgagcgtgtgttcggacctggttccccgccttaggatcagcgccctgtgaggggaccctttggaaagatgatcactacatagactactcgaacgagaaactatgcaaataacagggaacgtttggccacccggatgaatccagtagtacggaaaagcttaggaattcgattttggatcttttacctgtgttttaataagaaatgcaggagttgataaatagggctcgactgggagcgagactgcagcggctaaagcagcagtaa

SEQ ID NO: 1287 - DNA, 847 bp, Dromedary camel enterovirus
  misc_feature 1..847: note = strain 20CC, complete genome.1
  source 1..847: mol_type = genomic DNA
ttaaaacagcctgggggttgttcccacccccagggcccacgtggcgcaagtactctgcttcgttagaagccttgtacgcctgttttcccctccttaaataaattaagattaccacttccgaggggagtagtccgactccgctccgatacgtcgctccagtgcgctagtacgcttagtactttctcacggggatagtggtacccctccctagtaatttagaagacttgaaaaaccgaccaataggcacctcgcatccagcggggtaaaggtcaagcacttctgtttccccgggtcgagtagcgatagactgtgcccacggtcgaaggtgaaacaacccgttatccgactttgtacttcgggaagcctagtaccaccaaagattatgcttggggtttcgctcagcacgaccctggtgtagatcaggctgatggatcaccgcgttcctcacaggcgactgtggcggtggtcgcgtggcagcctgccgatggggcaacccatcggacgccaagcatatgacagggtgtgaagagcctactgagctacaaagtattcctccggcccctgaatgcggctaatcccaaccacggagcatttgctaccaaaccaggtagtggaatgtcgtaacgggtaactctgtggcggaaccgactactttgggtgtccgtgtttccttttaatttatcattctgtgtatggtgacaactatagtgctatctcgatttgcattactattgttgagattgacactttattacattgttgcattttaccctttgagtgagttttcacctgaacagattaatttacttatcctgtttatatatcacaagcagaaatacttgcaaag

SEQ ID NO: 1288 - DNA, 867 bp, Falcon picornavirus
  misc_feature 1..867: note = complete genome.1
  source 1..867: mol_type = genomic DNA
tttgcgcgcgggacctctgctacggccgggctcatattatcctccggggttttatgggtcgggcctagcccctttctgtaacggtctgtgtgagacctaaaaccacacataatatcgtgcctgatggttaacgcttgttagccgtctgtaaactaagaacctaccaacacactatgcacctcttggcgaagccgcttggaataagttgagaggaattatgcatgctagttgtgtttgtttacaactaattgttctaatccaagtgaagctcttcgcttggggcggcacgacacttgccgtaattcttctaccgtccctccacaccttgtggatgaagggccggatgtgtggcctctggctaacccctctctctggggtgatgctactggatgttttactcctagaccaaatcacatgaactcctcttgatccacttcggtggggctatgagcctgcggattaatagctggcgacagctaccccaggggccaaaagccacggtgttagcagcaccctcatagtctgatgcccaagggctgatgttgggagctagtagtgtgtgtctggcctatgtttaggacttctggccaagcgcagaggagtggggctgaaggatgcccagaaggtacccgtaggtaaccttaagagactatggatctgatctggggccccctcacgtggctttaccacgtgttgggggttaaaaaacgtctaggccccaccagcccacgggagtgggctttcccttaaaaagcccaacaatatttatggtgacaattcactgtttcttctttgcaatttttgtattcttggactccttattttttgtttgcttgattttagtggacattcagattcaaatacaaa

SEQ ID NO: 1289 - DNA, 891 bp, Antarctic picorna-like virus 3
  misc_feature 1..891: note = nonstructural protein gene, complete1
  source 1..891: mol_type = genomic DNA
aagttgcattattaggtgcaaccataattgtttattttttcccgtgtgagacggaattctcatgacagggcagtcgagagagagcgatctctctctttgcctctaatagcaatattagcgttaccctttttcgataaaagagaaatatcaaaacgatagtagacgaaagttaatctatgtcctacatttgtagggaatgaaatactgattagttgtcattgacgacagatctaagctgtaatcaacagccggacttgtgcaaagttcgataagtagaataagtactagagattagtggatttgtgacccacaacttgaattaaaggcttgtatgtgcggaaatgctgtacaagaaaagagctaaaatgcgttttcctacgtgacgatataaacgatggaggtggggttcacttatttggagaaccgacctagacggctgtttttaacagcacccccagttgcctttctgggcttagtttcgggaataggaccccgaaacggcgtacgccactaaaaaggagaagacgtcaagcagcatgcgattaggacatgtatgtgtttttatccgattatggaaccaggtggttccgtaattgagacatatacccctatatttaaggtgtcgaaagatacccattatatgcaattactggagtattttgtatatatgtgctgtgagggcactatcctaggttaccgtgggatcgcaagatcaccttacggactgagcagtaaaagccattttggccgtctcttagcgtagagcacacactcatgcgaaacccaaactcgaaagagcgggctagtaggacttagggcagattgatgatcaaagaccccccaaaaggtctttttctctttctgcgtcttcatcttcctcatatgttttag

SEQ ID NO: 1290 - DNA, 899 bp, Equine rhinitis B virus
  misc_feature 1..899: note = strain 421, complete genome.1
  source 1..899: mol_type = genomic DNA
ttttgtaactgaggttttaacatctcattgtttttgagccccaacgtcttggtggatgctcaaaagagattactcttgatgcttggctctcagaaagaatggcacctcaacgtgttgagacccgattcttttgagtcgagaccacttcccctcacccttaagattgcttttcttccaactaaacccctattgatgtgttggtcgtttgccaatcggagggcgacagatgcaggtcgctctgaggtctagtagtgtgggaacttgtcgctactaatgaaacgaggtagtgacacttagtacctacgaacaaatcttggagcaactccctttgcttccttcacccatctttcacttttcgttccgctttagcaggggtcttctttctgtccccctggcggcattggaactagccgtcgcgccttagcgcgcagccctgaaggccccacatcttgtggatctcgccgtgggcatgtttccggcatgtgtttctcaagcctgcaaccgaagaccgaacagccacttgaacggtttgagcgtggtagcgctgtgcgagttggcggtggactcccctcgtggcgacacgagcccccgcggccaaaagcccagtgtttgcagcacctctcgcatccaggacaaccccatcctggcgctcactcttagtagtgtggcttagtacgtattaggtggtaagccgagctctccctcggtcttgttctgaatgcacacatgtctaggggctaaggatgtcctacaggtacccgcacgtaaccttaagagagtgtggatctgagtaggagaccgtggtgcactgctttacagttgtagcccggtttaaaaaacgtctatgcccctacagggtagcggtgggccgcgccctttcctttaaaaatatttgtttt

SEQ ID NO: 1291 - DNA, 899 bp, Pacific black duck sicinivirus-like virus
  misc_feature 1..899: note = isolate1
  source 1..899: mol_type = genomic DNA
ttacacgcgagttttgcctcgcgcgcccgtaagggcacaaacccccctaggacgtgcacttgcccattggtacgtccggaaaccgtctgcctcggcacgcggcttctccacggtcgcaagcgacccacaatgcttcctggccatggtgtcccccaggaagagcgaacttgtggtgcggcgacccgggagtcgcgtcggcagctcaagtttctctggcagcacaccattttcccctttgtaacctcccgaaaatggcccgggggtagtccgccccctcaaaatggaccgtgtgcacccctccccacgcgttaaagcgggaagggccctcagtcggcgcagggaagcgcgctgaccctgttaagtggataggtcaggaaaaacatgtccacatcataaccccaattcccacggtcgctgatggtctgaccgttaggggcggcccaccggcgctctttgccgggcgtggcttaaccacaccatctcctctagtggattcctagagttctcccacttagtaagctcattccccccactgctgatcccgcaagggagtacaagtgcccagtgagcccacctggtaacaggtgcactggggcccaaaaggctagtggacagggggaagaccccgaatgccgtgggttcccacctgcggtgaagggtttcccccgaagtccacctttgtacttggctatggcctgttggtagtgtggagagtggcgccgaaaggtctggatgtactctctgaggaaactagtaggatcggagaacgttagtagacccccactaggtacccgcgcaagcggatctgaggtgggcccggtgactatgccgttccggtaagtccgggttaaaacaatgaacgcgttctccacaaatcactttcctctctttcttattca

SEQ ID NO: 1292 - DNA, 900 bp, Equine rhinitis B virus
  misc_feature 1..900: note = strain 396, complete genome.1
  source 1..900: mol_type = genomic DNA
ttttgtaactgaggttttgacatctcattgtttttgagccccaacgtcttggtggatgctcaaagaagattactcttgatgcttggctctcagaaagaatggcacctcaatgacttgagacccgattcttttgagtcgagacctttttccctctccccttttgaagattgctttcttccaactaaacccctattgatgtgttggtcgtttgccaatcggagggcgacaggcacaggtcgctcctgagctcagtagtgtgggaacttgttgctactaatgaaacgaggtagtgacacttagtacctgcgaacgactcaggtgcaatccctgtacttctttcaccaaccttccactttccgttccactttagcaggggtcttctttctgtccccctggcggcattggaactagccgttgcgccttagcgcacagccctgaaggccccacaccttgtggatcttgccgtgggcatgtttctggcatgtgtttctcaagcctgtaaccgacgaccgaacggtcacgtgaacagtttgagcgtggtagcgctgtgtgagttggcggtggactcccctcgtggcaacacgagcccccgtggccaaaagcccagtgtttgcagcacctctcacatccagggaaaccccaccctggcgctcactcttagtaacgtggcttagtacgtattaggtggtaagccgagctctccctcggtcttgtactgaatgcacacatgtctaggggctaaggatgtcctacaggtacccgtacgtaacctttagagagtatggatctgagtaggagaccgtggtgcactgctatacagatgtagcccggtttaaaaagcgtctatgcccctacagggtagcggtgggccgcgccctttcctttttaaaacttgttttt

SEQ ID NO: 1293 - DNA, 904 bp, Equine rhinitis B virus 2
  misc_feature 1..904: note = strain 1228, complete genome.1
  source 1..904: mol_type = genomic DNA
tatccccttgatgcaactgaggttttaacatctcattgtttttgagccccaacgtcttggtggatgctcaaagaagattactcttgatgcttggctctcagaaagaatggcacctcaacacttttgagacccgattcttttgagtcgagaccacttcccttcccctcaaggattgcttttcttccaactaaacccctattgatgtgttggtcgtttgccaatcggagggcgacagatacaggtcgctttggcgcttggtagtgtgggaacttgtcgctgctgatgaaacgaggtagtgacacttagtacctacgagaggcaacaaggcaataccccatcttccttcaccaactttttcttttcgttccactttagcggaggtcttctttctgtccctccggcggcattggaactagccgttgtgcctcagcacacagccctgaaggctccacaccttgtggatcttgccgtgggcatgtttctggcatgtgtttctcaagcctgcaaccgaagaccgaaccgttgcatgaacagtttgagcgtggtagcgctgtgcgagttggcggtggattcccctcgcggcaacacgagcccccgcggccaaaagcccagtgttcacagcacctctcgcatccaggaaaaccccctcctggcgctcactcttagtagtgtgacctagtacgtactaggtggtaagccgagctctccctcggtcttgttctgaatgcacacatgtctaggggctaaggatgtcctacaggtacccgtacgtaaccttcagagagtatggatctgagtaggagaccgtggtgcgctgctttacagtcgtagcccggtttaaaaagcgtctatgcccctacagggtagcggtgggccgcaccctttcctttgaaactattgtttt

SEQ ID NO: 1294 - DNA, 905 bp, Equine rhinovirus 3
  misc_feature 1..905: note = strain P313/75, complete genome.1
  source 1..905: mol_type = genomic DNA
tatccccttgatgcaactgaggttttaacatctcattgtttttgagccccaacgccttggtggatgctcaaagaagattactcttgatgcttggctctcagaaagaatggcacctcaaagttttgagacccgattcttttgagtcgagaaccttacccccaacccttgagattgcttttcttccaactaaacccctattgatgtgttggtcgtttgccaatcggagggcgacaggcgcaggtcgccccaacagctagtattgtgggaacttgccactgctgatgaaacgaggtagtggcatttagtacctgagaacgctggaggagcatctccccctcttccttcattaatctttcacttttcgttcctctttagcgggggtcttcttgctatccccccggcggcattggaactagccgttgcgccttagcgcacagtcctgaaggccccacatcttgtggatcttgccgtggacatgtttctggcatgtgtttctcaagcctgcaaccgacgactgaacagacgtgtgaacagtttgagtgtggtagcgctgtgtgagttggcggtggaaccccctcgtggtgacacgagcccccgtggccaaaagcccagtgtttacagcacctctcacatccagggaaaccccaccctggcgctcactcttagtaacacttcctagtaggtattaggtggtaagccgagctcttcctcggtcttgttctgaatgcacacatgtctaggggctaaggatgtcctacaggtacccgcacgtaaccttcagagagtgtggatctgagtaggagactgtggtgcgctgctttacagacgtagcccagtttaaaaaacgtctatgcccctacagggtcgcggtgggccgcaccctttccttttacaaacttggtttt

SEQ ID NO: 1295 - DNA, 906 bp, Sicinivirus sp.
  misc_feature 1..906: note = strain RS/BR/2015/4S polyprotein gene, complete1
  source 1..906: mol_type = genomic DNA
gttgcgtgcctgcagccgctcagcgtccatccttcctgttacccacctaatttggtggtaccccccggtcccttccctatccccccatacagccggaacggaccacacacctccgggtctgtggcccaaccccgactcggggttgtggcggtggtcacagctccggctgtgacttcctaaccactcctttcacccacccctttcttacatctacttaagtttatgtttgccctctcatcccaaggccttggctcatgtcctttgaggctatctggcacaaacactctttgtttggcgtctggagacccactgagccaccacttatccatgctcaatgcaacccccattagtaaccacgcaaatctaatagtggttctgcctcggcagcacctaagtgcccagggagttcaactggcgacagttgccctggggcccaaaaggctaggtggtaagggtctggccaagcaaggggtccccaccccaagctgaacccatggccccgaagccaccctttaggtggaggttatgtacccgatcgctattctatttgtttggcgaacctggccggaaacatttagtttgtggattcgttggtttgtggtgattagtagaccccctggaggtacccgttttggatctgaccagggacccgtgactataccgctccggtaattcgggtttaaaaccatgaacgtcaccacttgtcttcttttcccattttattcttcttatagtggtctgtttaaatgctcttagaatttctgttggtgactacggcacttaccatagtggttctttcccccagtgagttgcatcagctgcttgctatttgcgtgtataattttgcattaattttcctctggttgctcggaattttggagttgcctagttaccccgctatacagc

SEQ ID NO: 1296 - DNA, 915 bp, Coxsackievirus
  misc_feature 1..915: note = A16, strain S1082b polyprotein gene, complete cds.1
  source 1..915: mol_type = genomic DNA
caggaacattcattagacgccatcagatccgtctcagggaaaagatcggtcgttgatctcctttctatgagacttcatgaagcgagggtttgtagttcgaagtggcatcagacacctcatggggttccgagaacttaattgggggacaaaagtgtacaaaaaagcaggctttaaaacagctctggggttgttcccacccacagggcccactgggcgctagcacactgattctgcgggatctttgtgcgcctgttttataaccctccccctaagcagcaacttagaagctctgtacaatcacgaccagtagtgggcgtggcgcgccagccatgtcttggtcaagcacttctgtatccccggactgagtatcaatagactgcttacgtggtcgaaggagaaaacgttcgttacccggctaactacttcgagaaacccagtagcactatgaaagttgcggagtgtttcgctcagcacttcccccgtgtagatcaggtcgatgagtcactgtaaaccccacgggcaaccgtgacagtggctgcgttggcggcctgcccatggggtaacccatgggacgctctaatacagacatggtgtgaagagtctattgagctagttagtagtcctccggcccctgaatgcggctaatcctaactgcggagcgcgcaccctcaacccagggggcggcgcgtcgtaatgggtaactctgcagcggaaccgactactttgggtgtccgtgtttccttttattccttattggctgcttatggtgacaattgagaagttgttaccatatagctattggattggccatccggtgtctaacagagccattgtttacctattcattggatacgtccctcttgatctcaaggccattcaaactcttgactatatattgctccttaactgcaagaa

SEQ ID NO: 1297 - DNA, 934 bp, Picornaviridae sp.
  misc_feature 1..934: note = isolate zftwig05pic3 genomic sequence.1
  source 1..934: mol_type = genomic DNA
ccgtgggaccggagatgtgtgtccgaaaggtggcccgtttcgtgggccagacgttgaaagggggatgcagggtatgctgttttaatacagcaaagacccacacatccccgctttcaacgtctggcccacgaaacgggccacctttcggactgaccattggtttattattgaaattggcttggaaatgctgacactgtaagctggtttgtgatttaaacaatggttgttctggactctctttgagagatttacctggtggcttggcacagcctccttaaggacgtctggtccagaaaggcccggtcaagacttatattggactggtcccctgtccactgagtattctgttctgaaccgtgtaggcagggctagcgccaccatgattgccaagggactgcctccctggtgacagggacccttgggcccaaaaggctaggtggcaactctcatgtcaagagaggggtatccaccccaatctgaatcatgtggagtgaagccactcgtcatggctctgaccccgagactgtctacatttagtaagatggatgaaaactggatttggagaccactttgattgtcttgatgagaaagtccgctatttgactgagtagatgccctccagctacccttacggatgtgaggaggggaccgtgactatagcgttccgctaaaccggtttaaaaaacatgaaaggtcaaatatgtggcgccattttccatttttactaataaccatatgcctgacgaagttgattgtgctgagtgctctaagccctcctggactgtcagattaaaattggcttttctgcaatattttggctgccagtttgtatgggtttatcactcaggaaagaatcaagagaaagattgaaaatcttggattgtgcaaccaaggctcatttttgtccttgtgaaggcaaccagagattgcagtc

SEQ ID NO: 1298 - DNA, 944 bp, Mus musculus picornavirus
  misc_feature 1..944: note = strain Wencheng-Mm283 polyprotein gene,1
  source 1..944: mol_type = genomic DNA
accccggtaaaggtcagggtgtacttgcccacgttggtcggcttgtcaacactggttccggctttatcctgatacgtcaccgtgtactcgctgccatcgatcacaaacccctcatcgtccttgacagtgaccgcaggctcctgcttctctccgttgaacgtcaccgagggcggcgtcacctggatggtgggcgcggtcacggtgttgctgatgatggacgcatctaccgaagcaggtgtgctgtcattgtggttgctgtcgccctgggccttgtaccagacagtgtaattgtccacagctttcccggtgggaatggttggagtatacgggccgtcctcagccagagcgtagaccatcgtgccgtcggaagcggtgcccgcctcaatcagcgcctgctcggtgccgttgtagggcagattttccaaacccttcggagccgttgccaccgatgcagcacccttcgcaatcacaaaggtccccgtaccgtttacgatgtagttgccgccgttggcgttggtgatgatgaccgtcgccgtaccggcgttgatgttgtcgcggtaggacagggtgtactcgtcgctggggatggtgttgccgccgtcctccaccttactgcgagactcctagtagggagtggacgtattttgtgtgtgacccggagtttcccccgctccagaaacctgtgatgagctatcctcacgcccacctggcaacaggcgaggacgctgcgttggcacaggacctcattgaggctcacaacttgctgaagcaaacgaagagacgattgcgctaaggtggtttcctccggcctcctgaatgcggctaatcccatcccttggtcatccgcccactagccagtgggtagggtgtcgtaacgcgcaagccgagggcggaaccgactactttggagtgtccgtgtttctattttattttatacggcagtc

SEQ ID NO: 1299 - DNA, 957 bp, Foot-and-mouth disease virus
  misc_feature 1..957: note = type SAT 1,isolate1
  source 1..957: mol_type = genomic DNA
ctgtctgcctaatggaggtacgacagccagaggtctagccccagcgtcgcgtaacgaccgtccccggttgaaacgccactactcagacctctggctgtcgtacctccattaggcagacaggaaccacccttctggggcctacgctactgtgcccttttggggcccgcggtcgtcatcaccgcgcctccattaggctcgcagtcgtacctcctctaggctgacaactgtcgcccttttagggcctacgaccttcaagttacggttttggcgtccctcccgcggccgactcgcctacgtgaacgctagctcttcacccgaaggcccgcctttacgttaccgtcttttccgacgttaaaggattgcaaccacacgatttgccttcttttccgaagtaaaaggatacaagcacacagttttgcccgttttcatgagaaatgggacgtctgcgcacgaaacgcgctgttgctcttcgcattcttgtacaaacacgatcttgacgcaggaatcttagaccaacccaacccgtgcacctgcaagtttcgcccggtccttccgggtcttgagagacaaacagatgtactgagatcaactccacgattggtctactagcgggtactagtaacactcactttgcttcgtagcggagcacatgagcggtgggacctcccccatggtaacatggacccaccgggccaaaagccacgcctcacggcctcatgtgtgtgcaaccccagcacggcaacttgtttgtgaaacacaccttaaggtaacactgagactggtacttgatttctggagacaggctaaggatgcccttcaggtaccccgaggtaacaagagacactcgggatctgagaaggggaccaggagttctatcaaactgcccggtttaaaaagcttctatgcctggataggtgaccggaggccggcaccttttcctttatttaaactcacttt

SEQ ID NO: 1300 - DNA, 966 bp, Canine picornavirus
  misc_feature 1..966: note = isolate A128thr polyprotein gene, complete cds.1
  source 1..966: mol_type = genomic DNA
gggcctcctttcaccggggttcgcgtgacccggttataaaccacgtgacgtctttccagcgctgggttttgacgataaaataacccaggcactatagacagcgatgtctttaaacatccagacagaacagtctttaaaattacaagcttattcaattacaactagtggtgactcactttaaaatgtccaaatttaaggttggcagcttaactgcccgtgattgggctcacgtataaatggtcctggctggccgactacggccacacaatcaccgaatgatttaaacttcgggtgtgagctactaagctccttgtgtaagggtgacaccttgcccaagtatcttgtccccggtctgttgccgcttggaggcagatagggttattttccttgttactttctactcattggggatctatcccagtgaagggtcaagtggcaacccctctcttcttgaggagtggcatggcggtctttccgcatctcgaaccatgccacgcgccatgcacatatgtgacttataagtctgaagattttgaaacactttggttgacaagttgatgactgtagcgactccagtgtgcgagcggacttcccctcatggtaacatgagcctctcggaccaaaagtcaagcgttcatagcgccacactggacgggactttcctagtccctcatcaatgaaacacaatttgtgaatctttctttggacgaaagagtctgatgtgtaggatggagtgaagatggcctgaaggtaccccgtatacgggatctgatcaggtgcccctctcttggggttaaaaattactcggctcctcccacaaactggtggtccagtttttctctttaatttttactgcttatatggtgacagttattgacattctagtgttgattgcctattgttactttatattgttgttgtttttcctgaattgctttttacaaccttatactattacctttgaac

SEQ ID NO: 1301 - DNA, 970 bp, Ampivirus A1
  misc_feature 1..970: note = strain NEWT/2013/HUN, complete genome.1
  source 1..970: mol_type = genomic DNA
ttaaaatgaaaatgtgcgagcatttagctcgcacttttcattttaaatatgtccacagccctcaagggacttagtcccttgtccgcctcggcgacttaatatttaacttgtagttacttatataaagcccgtaatttatacgatacatacaaaactccagcatccactctgactgccatagtggaataaaccaagaccactctctacatccggagagtcaaatccattggacgaccatttgatactattctacaaaatctattttgatcatattatattaagcattaagcgtcattgacttggttgattaattagtttcactgattaatcgagtcaacaaacaacttcctaaattaatataattttgctcaaacgagaatttcagaatattatgcgaccatttaactatgtttacttaagcatcattgacttttgagtcaacaaataccttaagtttccgctcatctccttaccttcatacgcaggcccataagcctatattatttacctctatttataattttaatcattaatctgcacaattccaccgtttagacattattagggtttataacaacactaataattattgtatgaaaaccagtagttccagcgcgtcgtggcctattgacccccatacaaagttcataagaatagttttgctgttttcagtcattcattctttcccttaaaaggtttggtcacctataagtccagctcattacatcgagtatggcaagtctgcccaacatttgttatatctgactctggtgataataaatgtggcgggataaagttacaagtctagttatatagacagctttagctcaaaaccccaatttccccccttgtgtattattattgtattattaattgtaattatgtatttaatgtaaattgtacttttatctatccaacttcttatttcaattttctatcaagacttttttcttgtcgaaactcaatatct

SEQ ID NO: 1302 - DNA, 975 bp, Carfax virus
  misc_feature 1..975: note = polyprotein gene, partial cds.1
  source 1..975: mol_type = genomic DNA
cacggggttaacacctcgtgcgatcttttcaaccacatatatatatattctgggcggaatattagaaaatcttgggattatatatatgtaattgatatattgggcggaatatttgaaaatcttgatatatctcttacaaaattttgaaaccaaccattttagaataggtttattagcgtgacaaactatgcgacctgtagagaaaaatgtcaaaatcaatacaaaattttaaaatgttaaaaatgtttatatatttagtaaactcaagttgaattgtgatagagaaggcaagtaactaccagatgactcttctcgcaacaggattatcccagactgttgttccagcaaattgatggatgtaaactaaatttataatgataaatagttaagtaggagacccttatggtactcaagcttgtattaaaatttttaactatagatatgtattattgaaatgtgttctgtctcttatatgtacacccacgtagtcgtggtaccgctataacgccaatcggactaaataacaagaatgtgaggttcctattgagatttcaaaatttatcatattgtcacgaccaatctctttgggtaaggacttgcatggtatgcgaaaggtcggattgccagaatctgcttgctgctttctggatgtgtacacattttaattttaagatttatgatagttaatttgataatacaaggacagtgcgttttgtgacgtgcttgtttgcatctctgtcttagatgacaggtttctacactaggcgatgtgtagaagtgtagacctctaatggtttggtgcatcgtgccccggttctttttcaaggcttctccggttcaaagatagcggaggacccccctttgtaatgcagacaccattgtggataatttatctacaattcgaagcgataatttttccattcatttttgtatctttaaaacttcttacggagattttcaatattaactagaaaa

SEQ ID NO: 1303 - DNA, 723 bp, unidentified
  source 1..723: mol_type = unassigned DNA; note = Expression vector pAV-UCSF, complete sequence.1 sequence
cctcggccccctcaccctcttttccggtggtctggtcccggaccaccgttactccattcagcttcttcggaacctgttcggaggaattaaacgggcacccatactccccccaccccccttttgtaactaagtatgtgtgctcgtgatcttgactcccacggaacggaccgatccgttggtgaacaaacagctaggtccacatcctcccttcccctgggagggcccccgccctcccacatcctccccccagcctgacgtatcacaggctgtgtgaagcccccgcgaaagctgctcacgtggcaattgtgggtccccccttcatcaagacaccaggtctttcctccttaaggctagccccggcgtgtgaattcacgttgggcaactagtggtgtcactgtgcgctcccaatctcggccgcggagtgctgttccccaagccaaacccctggcccttcactatgtgcctggcaagcatatctgagaaggtgttccgctgtggctgccaacctggtgacaggtgccccagtgtgcgtaaccttcttccgtctccggacggtagtgattggttaagatttggtgtaaggttcatgtgccaacgccctgtgcgggatgaaacctctactgccctaggaatgccaggcaggtaccccacctccgggtgggatctgagcctgggctaattgtctacgggtagtttcatttccaatccttttatgtcggagtc

SEQ ID NO: 1304 - DNA, 712 bp, Aichi virus
  misc_feature 1..712: note = genomic RNA, complete genome.1
  source 1..712: mol_type = genomic DNA
tcaccctctttcccggtggtctggtcccggaccaccgttactccattcagcttcttcggaacctgttcggaggaattaaacgggcacccatactccccccacccccctttggtaactaagtatgtgtgctcgtgatcttggctcccacggagcggaccgatccgttggtgaacaaacagctaggtccacatcctcccttcccctgggagggcccccgccctcccacatcctccccccagcctgacgtatcacaggctgtgtgaagcccccgcgaaagctgctcacgtggcaattgtgggtccccccttcatcaagacaccaggtctttcctccttaaggctagccccggcgtgtgaattcacgttgggcaactagtggtgtcactgtgcgctcccaatctcggccgcggagtgctgttccccaagccaaacccctggcccttcactatgtgcctggcaagcatatctgagaaggtgttccgctgtggctgccaacctggtaacaggtgccccagtgtgcgtaaccttcttccgtctccggacggtagtgattggttaagatttggtgtaaggttcatgtgccaacgccctgtgcgggatgaaacctctactgccctaggaatgccaggcaggtaccccacctccgggtgggatctgagcctgggctaattgtctacgggtagtttcatttccaatccttttatgtcggagtc

SEQ ID NO: 1305 - DNA, 712 bp, Kobuvirus sp.
  misc_feature 1..712: note = strain 16317x87 polyprotein gene, complete cds.1
  source 1..712: mol_type = genomic DNA
tcaccctcttttccggtggtctggtcccggaccaccgttactccattcagcttcttcggaacctgttcggaggaattaaacgggcacccatacacccccatcccctttctgcaacttaagtatgtgtgctcgtgatcttgactcccacggaatggatcgatccgctggagaacaaactgctagatccacatcctcccttcccctgggaggaccttggtcctcccacatcctccccccagcctgacgtaccacaggctgtgtgaagcccccgcgaaagctgctcacgtggcaattgtgggtccccccttcatcaagacaccaggtctttcctccttaaggctagccccgatgtgtgaattcacattgggcaactagtggtgtcactgtgcgctcccaatctcggccgcggagtgctgttccccaagccaaacccctggcccttcactatgtgcctggcaagcatacctgagaaggtgttccgctgtggctgccagcctggtaacaggtgccccagtgtgcgtaaccttcttccgtcttcggacggtagtgattggttaagatttggtgtaaggtccatgtgccaacgccctgtgcgggatgaaacctctactgccctaggaatgccaggcaggtaccccacccccgggtgggatctgagcctgggctaattgtctacgggtagtttcatttccaattcttttatgtcggagtc

SEQ ID NO: 1306 - DNA, 712 bp, Aichi virus
  misc_feature 1..712: note = isolate Chshc7, complete genome.1
  source 1..712: mol_type = genomic DNA
tcaccctctttcccggtggtctggtcccggaccaccgttactccattcagcttcttcggaacctgttcggaggaattaaacgggcacccatacatccccatcccctttctgtaacttaagtatgtgtgcttgtaatcttgactcccacggaatggatcgatccgctggagaacaaactgctagatccacatcctcccttcccctgggaggaccttggtcctcccacatcctccccccagcctgacgtaccacaggctgtgtgaagcccccgcgaaagctgctcacgtggcaattgtgggtccccccttcatcaagacaccaggtctttcctccttaaggctagccccgatgtgtgaattcacattgggcaactagtggtgtcactgtgcgctcccaatctcggccgcggagtgctgttccccaagccaaacccctggcccttcactatgtgcctggcaagcatatctgagaaggtgttccgctgtggctgccagcctggtaacaggtgccccagtgtgcgtaaccttcttccgtctccggacggtagtgattggttaagatttggtgtaaggttcatgtgccaacgccctgtgcgggatgaaatctctactgccctaggaatgccaggcaggtaccccaccctcgggtgggatctgagcctgggctaattgtctacgggtagtttcatttccaatccttttatgtcggagtc

SEQ ID NO: 1307 - DNA, 679 bp, Aichi virus
  misc_feature 1..679: note = strain kvgh99012632/2010 polyprotein gene, complete1
  source 1..679: mol_type = genomic DNA
gtgttactccattcagcttcttcggaacctgttcggaggaattaaacgggcacccatactcccccccaccccccttttgtaactaagtatgtgtgctcgtgaccttgactcccacggaacggaccgatccgttggtgaacaaacagctaggtccacatcctcctttcccctgggagggtccccgccctcccacatcccccccccagcctgacgtgtcacaggctgtgtgaagcccccgcgaaagctgctcacgtggcaattgtgggtccccccttcatcaagacaccaggtctttcctccttaaggctagccccggcgtgtgaactcacgttgggcaactagtggtgtcactgtgcgctcccaatctcggccgcggagtgctgttccccaagccaaacccctggcccttcactatgtgcctggcaagcacacctgagaaggtgttccgctgtggctgccagcctggtaacaggtgccccagtgtgcgtaaccttcttccgtcttcggacggtggtgattggttaagatttggtgtaaggttcatgtgccaacgccctgtgcgggatgaaacctctactgccctaggaatgccaggcaggtaccccaccttcgggtgggatctgagcctgggctaattgtctacgggtggtttcatttccaattctttcatgtcggagtc

SEQ ID NO: 1308 - DNA, 727 bp, Aichi virus
  misc_feature 1..727: note = isolate Goiania/GO/03/01/Brazil, complete genome.1
  source 1..727: mol_type = genomic DNA
ggcttcggccccctcaccctcttttccggtggtctggtcccggaccaccgttactccattcagcttcttcggaacctgttcggaggaattaaacgggcacccatacacccccatccccttttttgcaacttaagtatgtgtgctcgtaatcttgactcccacggaatggatcgatccgctggagaacaaactgctagatccacatcctccctcccccctgggaggacctcggtcctcccacatcctccccccagcctgacgtatcacaggctgtgtgaagcccccgcgaaagctgctcacgtggcaattgtgggtccccccttcatcaagacaccaggtctttcctccttaaggctagtcccgatgtgtgaattcacatcgggcaactagtggtgtcactgtgcgctcccaatctcggccgcggagtgctgttccccaagccaaacccctggcccttcactatgtgcctggcaagcatatctgagaaggcgttccgctgtggctgccagcctggtaacaggtgccccagtgtgcgtaaccttcttccgtccccggacggtagtgattggttaagacttggcgtaaggttcatgtgccaacgccctgtgcgggatgaaacctctactgccctaggaatgccaggcaggtaccccaccttcgggtgggatctgagcctgggctaattgtctacgggtagtttcatttctaattctttcatgtcggagtc

SEQ ID NO: 1309 - DNA, 710 bp, Aichi virus 1
  misc_feature 1..710: note = strain PAK56 polyprotein gene, complete cds.1
  source 1..710: mol_type = genomic DNA
accctcttttccggtggtctggccccggaccaccgttactccattcagcttcttcggaacctgttcggaggaattaaacgggcacccatacacccccaccccctttctgcaacttaagtatgtgtgctcgtgatcttgactcccacggaatggatcgatccgctggagaacaaactgctagatccacatcctcccttcccttgggtggacctcggtcctcccacatcctccccccagcctgacgtatcacaggctgtgtgaagcccccgcgaaagctgctcacgtggcaattgtgggtccccccttcatcaagacaccaggtctttcctccttaaggctagccccgatgtgtgaattcacattgggcaactagtggtgtcactgtgcgctcccaatctcggccgcggagtgctgttccccaagccgaacccctggcccttcactatgtgcctggcaagcatatctgagaaggtgttccgctgtggctgccagcctggtaacaggtgccccagtgtgcgtaaccttcttccgtcctcggacggtagtgattggttaagatttggtgtaaggttcatgtgccaacgccctgtgcgggatgaaacctctactgccctaggaatgccaggcaggtaccccaccctcgggtgggatctgagcctgggctaattgtctacgggtagtttcatttccaattctttcatgtcggagtc

SEQ ID NO: 1310 - DNA, 710 bp, Aichi virus 1
  misc_feature 1..710: note = isolate ETH/2016/P4, partial genome.1
  source 1..710: mol_type = genomic DNA
accctcttttccggtggtctggtcccggaccaccgttactccattcagcttcttcggaacctgttcggaggaattaaacgggcacccatacacccccaccccctttttgcaacttaagtatgtgtgctcgtgatcttgactcccacggaatggatcgatccgctggagaacaaactgctagatccacatcctcccttcccttgggaggacctcggtcctcccacatcctccccccagcctgacgtaccacaggctgtgtgaagcccccgcgaaagccgctcacgtggcaattgtgggtccccccttcattaagacaccaggtctttcctccttaaggctagtcccgatgtgtgaattcacattgggcaactagtggtgtcactgtgcgctcccaatctcggccgcggagtgctgttccccaagccaaacccctggcccttcactatgtgcctggcaagcatatctgagaaggtgttccgctgtggctgccagcctggtaacaggtgccccagtgtgcgtaaccttcttccgtcttcggacggtagtgattggttaagatttggcgtaaggttcatgtgccaacgccctgtgcgggatgaaacctctactaccctaggaatgccaggcaggtaccccaccctcgggtgggatctgagcctgggctaattgtctacgggtagtttcatttccaattcttctatgtcggagtc

SEQ ID NO: 1311 - DNA, 710 bp, Aichi virus 1
  misc_feature 1..710: note = strain PAK585 polyprotein gene, complete cds.1
  source 1..710: mol_type = genomic DNA
accctctttcccggtggtctggtcccggaccaccgttactccattcagcttcttcggaacctgttcggaggaattaaacgggcacccatacactcccatcccctttctgcaacttaagtatgtgtgctcgtgatcttgactcccacggaatggatcgatccgctggagaacaaactgctagatccacatcctcccttcccttgggtggacctcggtcctcccacatcctccccccagcctgacgtatcacaggctgtgtgaagcccccgcgaaagctgctcacgtggcaattgtgggtccccccttcatcaagacaccaggtctttcctccttaaggctagccccgatgtgtgaattcacattgggcaactagtggtgtcactgtgcgctcccaatctcggccgcggagtgctgttccccaagccgaacccctggcccttcactatgtgcctggcaagcatatctgagaaggtgttccgctgtggctgccagcctggtaacaggtgccccagtgtgcgtaaccttcttccgtcctcggacggtagtgattggttaagatttggtgtaaggttcatgtgccaacgccctgtgcgggatgaaacctctactgccctaggaatgccaggcaggtaccccaccctcgggtgggatctgagcctgggctaattgtctacgggtagtttcatttccaattctttcatgtcggagtc

SEQ ID NO: 1312 - DNA, 677 bp, Aichi virus
  misc_feature 1..677: note = strain D/VI2169/2004 polyprotein gene, complete cds.1
  source 1..677: mol_type = genomic DNA
gttactccattcagcttcttcggaacctgttcggaggaattaaacgggcacccatacacccccacccccttttctgcaacttaagtatgtgtgctcgtaatcttgactcccacggaatggatcgatccgctggagaacaaactgctagatccacatcctcccttcccctgggaggaccccggtcctcccacatcctccccccagcctgacgtatcacaggctgtgtgaagtccccgcgaaagctgctcacgtggcaattgtgggtccccccttcatcaagacaccaggtctttcctccttaaggctagccccgatgtgtgaattcacattgggcaactagtggtgtcactgtgcgctcccaatctcggccgcggagtgctgttccccaagccaaacccctggcccttcactatgtgcctggcaagcatatctgagaaggtgttccgctgtggctgccagcctggtaacaggtgccccagtgtgcgtaaccttcttccgtctccggacggtagtgattggttaagatttggtgtaaggttcatgtgccaacgccctgtgcgggatgaaacctctactgccctaggaatgccaggcaggtaccccaccttcgggtgggatctgagcctgggctaattgtctacgggtagtttcatttccaattcttttatgtcggagtc

SEQ ID NO: 1313 - DNA, 677 bp, Aichi virus
  misc_feature 1..677: note = strain D/VI2244/2004 polyprotein gene, complete cds.1
  source 1..677: mol_type = genomic DNA
gttactccattcagcttcttcggaacctgttcggaggaattaaacgggcacccatacacccccacccccttttctgcaacttaagtatgtgtgctcgtaatcttgactcccacggaacggatcgatccgctggagaacaaactgctagatccacatcctcccttcccctgggaggaccccggtcctcccacatcctccccccagcctgacgtaacacaggctgtgtgaagtccccgcgaaagctgctcacgtggcaattgtgggtccccccttcaccaagacaccaggtctttcctccttaaggctagccccgatgtgtgaattcacattgggcaactagtggtgtcactgtgcgctcccaatctcggccgcggagtgctgttccccaagccaaacccctggcccttcactatgtgcctggcaagcatatctgagaaggtgttccgctgtggctgccagcctggtaacaggtgccccagtgtgcgtaaccttcttccgtctccggacggtagtgattggttaagatttggtgtaaggttcatgtgccaacgccctgtgcgggatgaaacctctactgccctaggaatgccaggcaggtaccccaccttcgggtgggatctgagcctgggctaattgtctacgggtagtttcatttccaattcttttatgtcggagtc

SEQ ID NO: 1314 - DNA, 677 bp, Aichi virus
  misc_feature 1..677: note = strain D/VI2359/2004 polyprotein gene, complete cds.1
  source 1..677: mol_type = genomic DNA
gttactccattcagcttcttcggaacctgttcggaggaattaaacgggcacccatacacccccacccccttttctgcaacttaagtatgtgtgctcgtaatcttgactcccacggaatggatcgatccgctggagaacaaactgctagatccacatcctcccttcccctgggaggaccccggtcctcccacatcctccccccagcctgacgtatcacaggctgtgtgaagtccccgcgaaagctgctcacgtggcaattgtgggtccccccttcatcaagacaccaggtctttcctccttaaggctagccccgatgtgtgaattcacattgggcaactagtggtgtcactgtgcgctcccaatctcggccgcggagtgctgttccccaagccaaacccctggcccttcactatgtgcctggcaagcatatctgagaaggtgttccgctgtggctgccagcctggtaacaggtgccccagtgtgcgtaaccttcttccgtctccggacggtagtgattggttaagatttggtgtaaggttcatgtgccaacgccctgtgcgggatgaaacctctactgccctaggaatgccaggcaggtaccccaccttcgggtgggatctgagcctgggctaattgtctacgggtagttccatttccaattcttttatgtcggagtc

SEQ ID NO: 1315 - DNA, 677 bp, Aichi virus
  misc_feature 1..677: note = strain D/VI2287/2004 polyprotein gene, complete cds.1
  source 1..677: mol_type = genomic DNA
gttactccattcagcttcttcggaacctgttcggaggaattaaacgggcacccatacacccccacccccttttctgcaacttaagtatgtgtgctcgtaatcttgactcccacggaatggatcgatccgctggagaacaaactgctagatccacatcctcccttcccctgggaggaccccggtcctcccacatcctccccccagcctgacgtatcacaggctgtatgaagtccccgcgaaagctgctcacgtggcaattgtgggtccccccttcatcaagacaccaggtctttcctccttaaggctagccccgatgtgtgaattcacattgggcaactagtggtgtcactgtgcgctcccaatctcggccgcggagtgctgttccccaagccaaacccctggcccttcactatgtgcctggcaagcatatctgagaaggtgttccgctgtggctgccagcctggtaacaggtgccccagtgtgcgtaaccttcttccgtctccggacggtagtgattggttaagatttggtgtaaggttcatgtgccaacgccctgtgcgggatgaaacctctactgccctaggaatgccaggcaggtaccccaccttcgggtgggatctgagcctgggctaattgtctatgggtagtttcatttccaattcttttatgtcggagtc

SEQ ID NO: 1316 - DNA, 664 bp, Aichi virus
  misc_feature 1..664: note = strain D/VI2321/2004 polyprotein gene, complete cds.1
  source 1..664: mol_type = genomic DNA
gcttcttcggaacctgttcggaggaattaaacgggcacccatacacccccacccccttttctgcaacttaagtatgtgtgctcgtaatcttgactcccacggaatggatcgatccgctggagaacaaactgctagatccacatcctcccttcccctgggaggaccccggtcctcccacatcctccccccagcctgacgtatcacaggctgtgtgaagtccccgcgaaagctgctcacgtggcaattgtgggtccccccttcatcaagacaccaggtctttcctccttaaggctagccccgatgtgtgaattcacattgggcaactagtggtgtcactgtgcgctcccaatctcggccgcggagtgctgttccccaagccaaacccctggcccttcactatgtgcctggcaagcatatctgagaaggtgttccgctgtggctgccagcctggtaacaggtgccccagtgtgcgtaaccttcttccgtctccggacggtagtgattggttaagatttggtgtaaggttcatgtgccaacgccctgtgcgggatgaaacctctactgccctaggaatgccaggcaggtaccccaccttcgggtgggatctgagcctgggctaattgtctacgggtagtttcatttccaattcttttatgtcggagtc

SEQ ID NO: 1317 - DNA, 629 bp, Aichivirus A
  misc_feature 1..629: note = strain FSS693 polyprotein gene, complete cds.1
  source 1..629: mol_type = genomic DNA
cacccatacacccccacccccttttctgtaactcaagtatgtgtgctcgtaatcttgactcccacggaatggatcgatccgctggagaacaaactgctagatccacatcctccctccccttgggaggacctcggtcctcccacatcctccctccagcctgacgtatcacaggctgtgtgaagcccccgcgaaagctgctcacgtggcaattgtgggtccccccttcatcaagacaccaggtctttcctccttaaggctagccccgatgtgtgaattcacattgggcaactagtggtgtcactgtgcgctcccaatctcggccgcggagtgctgttccccaagccaaacccctggcccttcactatgtgcctggcaagcatatctgagaaggtgttccgctgtggctgccagcctggtaacaggtgccccagtgtgcgtaaccttcttccgtctccggacggtagtgattggttaagatttggtgtaaggttcatgtgccaacgccctgtgcgggatgaaacctctactgccctaggaatgccaggcaggtaccccaccttcgggtgggatctgagcctgggctaattgtctacgggtagtttcatttccaattcttttatgctggagtc

SEQ ID NO: 1318 - DNA, 487 bp, Aichi virus 1
  misc_feature 1..487: note = isolate ETH/2016/P9 polyprotein gene, partial cds.1
  source 1..487: mol_type = genomic DNA
catcctccccccagcctgacgtaccacaggctgtgtgaagcccccgcgaaagctgctcacgtggcaattgtgggtccccccttcattaagacaccaggtctttcctccttaaggctagtcccgatgtgtgaattcacattgggcaactagtggtgtcactgtgcgctcccaatctcggccgcggagtgctgttccccaagccaaacccctggcccttcactatgtgcctggcaagcatatctgagaaggtgttccgctgtggctgccagcctggtaacaggtgccccagtgtgcgtaaccttcttccgtcttcggacggtagtgactggttaagatttggcgtaaggttcatgtgccaacgccctgtgcgggatgaaacctctactaccctaggaatgccaggcaggtaccccaccctcgggtgggatctgagcctgggctaattgtctacgggtagtttcatttccaattcttctatgtcggagtc

SEQ ID NO: 1319 - DNA, 438 bp, Aichi virus 1
  misc_feature 1..438: note = isolate C1_Kwanak_06 polyprotein gene, partial cds.1
  source 1..438: mol_type = genomic DNA
aagctgctcacgtggcaattgtgggtccccccttcatcaagacaccaggtctttcctccttaaggctagccccggcgtgtgaattcacgttgggcaactagtggtgtcactgtgcgctcccaatctcggccgcggagtgctgtcccccaagccaaacccctggcccttcactatgtgcctggcaagcatatctgagaaggtgttccgctgtggctgccagcctggtaacaggtgccccagtgtacgtaaccttcttccgtctccggacggtagtgattggttaagatttggtgtaaggttcatgtgccaacgccctgtgcgggatgaaacctctactgccctgggaatgccaggcaggtaccccacctccgggtgggatctgagcctgggctaattgtctacgggtagtttcatttccaatccttttatgtcggagtc

SEQ ID NO: 1320 - DNA, 724 bp, Aichivirus A
  misc_feature 1..724: note = strain rat08/rAiA/HUN, complete genome.1
  source 1..724: mol_type = genomic DNA
tgtcggccccctcaccctcttttccggtggtctggacccggaccaccgttactccattcagcttcttcggaacctgttcggaggaattaaacgggcacccactttcctgtcctctccccttttctgtaactccaagtgtgtgctcgtaatcttgactcccgcggattgaccgctccgctggtgaacaaactgctaggtcatctcctccccacccttgggcgtccttccgggcgtccacaccctccccccagcctgacgtgtcacaggctgtacaaagaccccgcgaaagctgctaacgtggcaattgtgggtcccccctttgtaaaggaaccgagtctttctcccttaaggctagacccctgtgtgaattcacaggtggcaactagtggttccactgcatgctcccgacctcggccgcggagtgctgttccccaagtcgtaacactgaccttcacttatgtgcctggcaagcatatctgagaagatgttccgctgtggctgccaaacctggtaacaggtgccccagtgtgcgtagtcttcttccgtcttcggacggtaggtgttaggtaaagatgcggcgtaaggttcaagtgccaacgccctggaagggatgacccttctactgccctaggaatgccgcgcaggtaccccaggttcgcctgggatctgagcgcgggctaattgtctacgggtagtttcatttccctcttcttccactggcatc

SEQ ID NO: 1321 - DNA, 438 bp, Aichi virus 1
  misc_feature 1..438: note = isolate Inlet_2011MAR_Aichi_A leader protein gene,1
  source 1..438: mol_type = genomic DNA
aagctgctcacgtggcaattgtgggtccccccttcatcaagacaccaggtctttcctccttaaggctagccccgacgtgtgaactcacgttgggcaactagtggtgtcactgtgcgctcccaatctcggccgcggagtgctgttccccaagccaaacccctggcccttcactatgtgcctggcaagcatatctgagaaggtgttccgctgtggctgccagcctggtaacaggtgccccagtgtgcgtaaccttcttccgtcttcggacggtagtgattggttaagatttggtgtaaggttcatgtgccaacgccctgtgcgggatgaaacctctactgccctaggaatgccaggcaggtaccccaccttcgggtgggatctgagcctgggctaattgtctacgggtagtttcatttccaattcttttatgtcggagtc

SEQ ID NO: 1322 - DNA, 438 bp, Aichi virus 1
  misc_feature 1..438: note = isolate C3_Seongbuk_09 polyprotein gene, partial cds.1
  source 1..438: mol_type = genomic DNA
aagctgctcacgtggcaattgtgggtccccccttcatcaagacaccaggtctttcctccttaaggctagccccggcgtgtgaactcacgttgggcaactagtggtgtcactgtgcgctcccaatctcggccgcggagtgctgttccccaagccaaacccctggcccttcactatgtgcctggcaagcatatctgagaaggtgttccgctgtggctgccagcctggtaacaggtgccccagtgtgcgtaaccttcttccgtcttcggacggtagtgattggttaagatttggtgtaaggttcatgtgccaacgccctgtgcgggatgaaacctctactgccctaggaatgccaggcaggtaccccaccttcgggtgggatctgagcctgggctaattgtctacgggtagtttcatttccaattctttcatgtcggagtc

SEQ ID NO: 1323 - DNA, 438 bp, Aichi virus 1
  misc_feature 1..438: note = isolate Inlet_2011JAN_Aichi_B leader protein gene,1
  source 1..438: mol_type = genomic DNA
aagctgctcacgtggcaattgtgggtccccccttcatcaagacaccaggtctttcctccttaaggctagccccgatgtgtgaattcacattgggcaactagtggtgtcactgtgcgctcccaatctcggccgcggagtgctgttccccaagccaaacccctggcccttcactatgtgcctggcaagcatatctgagaaggtgttccgctgcggctgccaccctggtaacaggtgccccagtgtgcgtaaccttcttccgtctccggacggtagtgattggttaagatttggtgtaaggttcatgtgccaacgccctgtgcgggatgaaacctctactgccctaggaatgccaggcaggtaccccacccccgggtgggatctgagcctgggctaattgtctacgggtagtttcatttccaattcttttatgtcggagtc

SEQ ID NO: 1324 - DNA, 438 bp, Aichi virus 1
  misc_feature 1..438: note = isolate C4_Yongdeongpo_07 polyprotein gene, partial1
  source 1..438: mol_type = genomic DNA
aagctgctcacgtggcaattgtgggtccccccttcatcaagacaccaggtctttcctccttaaggctagccccgatgtgtgaattcacattgggcaactagtggtgtcactgtgcgctcccaatctcggccgcggagtgctgttccccaagccaaacccctggcccttcactatgtgcctggcaagcatatctgagaaggtgttccgctgtggctgccagcctggtaacaggtgccccggtgtgcgtaaccttcttccgtctccggacggtagtgattggttaagatttggtgtaaggttcatgtgccaacgccctgtgcgggatgaaacctctactgccctaggaatgccaggcaggtaccccacccccgggtgggatctgagcctgggctaattgtctacgggtagtttcatttccaattcttttatgtcggagtc

SEQ ID NO: 1325 - DNA, 438 bp, Aichi virus 1
  misc_feature 1..438: note = isolate Inlet_2011JAN_Aichi_A leader protein gene,1
  source 1..438: mol_type = genomic DNA
aagctgctcacgtggcaattgtgggtccccccttcatcaagacaccaggtctttcctccttaaggctagccccggcgcgtgaactcacgttgggcaactagtggtgtcactgtgcgctcccaacctcggccgcggagtgctgttccccaagccaaacccctggcccttcactatgtgcctggcaagcatatctgagaaggtgttccgctgtggctgccagcctggtaacaggtgccccagtgtgcgtaaccttcttccgtcttcggacggtagtgattggttaagatttggtgtaaggttcatgtgccaacgccctgtgcgggatgaaacctctactgccctaggaatgccaggcaggtaccccaccctcgggtgggatctgagcctgggctaattgtctacgggtagtttcatttccaattcttttatgtcggagtc

SEQ ID NO: 1326 - DNA, 438 bp, Aichi virus 1
  misc_feature 1..438: note = isolate C2_Kangdong_01 polyprotein gene, partial cds.1
  source 1..438: mol_type = genomic DNA
aagctgctcacgtggcaattgtgggtccccccttcatcaagacaccaggtctttcctccttaaggctagccccgatgtgtgaattcacattgggcaactagtggtgtcactgtgcgctcccaatctcggccgcggagtgctgttccccaagccaaacccctggcccttcactatgtgcctggcaagcatatctgagaaggtgttccgctgtggctgccagcctggtaacaggtgccccagtgtgcgtaaccttcttccgtctccggacggtagtgattggttaagatttggcgtaaggttcatgtgccaacgccctgtgcgggatgaaacctctactgccctaggaatgccaggcaggtaccccaccctcgggtgggatctgagcctgggctaattgtctacgggtagtttcatttccaattcttttatgtcggagtc

SEQ ID NO: 1327 - DNA, 438 bp, Aichi virus 1
  misc_feature 1..438: note = isolate C2_Eunpyeong_01 polyprotein gene, partial1
  source 1..438: mol_type = genomic DNA
aagctgctcacgtggcaattgtgggtccccccttcatcaagacaccaggtctttcctccttaaggctagccccggcgtgtgaactcacgttgggcaactagtggtgtcactgtgcgctcccaatctcggccgcagagtgctgttccccaagccaaacccctggcccttcactatgtgcctggcaagcatatctgagaaggtgttccgctgtggctgccagcctggtaacaggtgccccagtgtgcgtaaccttcttccgtcttcggacggtagtgattggttaagatttggtgtaaggttcgtgtgccaacgccctgtgcgggatgaaacctctactgccctaggaatgccaggcaggtaccccaccttcgggtgggatctgagcctgggctaattgtctacgggtagtttcatttccaattctttcatgtcggagtc

SEQ ID NO: 1328 - DNA, 438 bp, Aichi virus 1
  misc_feature 1..438: note = isolate C6_Mapo_22 polyprotein gene, partial cds.1
  source 1..438: mol_type = genomic DNA
aagctgctcacgtggcaattgtgggtccccccttcatcaagacaccaggtctttcctccttaaggctagccccggcgtgtgaactcgcgttgggcaactagtggtgtcactgtgcgctcccaatctcggccgcggagtgctgttccccaagccaaacccctggcccttcactatgtgcctggcaagcatatctgagaaggtgttccgctgtggctgccagcctggtaacaggtgccccagtgtgcgtaaccttcttccgtcttcggacggtagtgattggttaagatttggtgtaaggttcgtgtgccaacgccctgtgcgggatgaaacctctactgccctaggaatgccaggcaggtaccccaccttcgggtgggatctgagcctgggctaattgtctacgggtagtttcatttccaattccttcatgtcggagtc

SEQ ID NO: 1329 - DNA, 438 bp, Aichi virus 1
  misc_feature 1..438: note = isolate C4_Yongdeongpo_16 polyprotein gene, partial1
  source 1..438: mol_type = genomic DNA
aagctgctcacgtggcaattgtgggtccccccttcatcaagacaccaggtctttcctccttaaggctagccccgatgtgtgaattcacattgggcaactagtggtgtcactgtgcgctcccaatctcggccgcggagtgctgttccccaagccaaacccctggcccttcactatgtgcctggcaagcatatctgagaaggtgttccgctgtggctgccagcctggtaacaggtgccccggtgtgcgtaaccttcttccgtctccggacggtagtgattggttaagatttggtgtaaggttcatgtgccaacgccctgtgcgggatgaaacctctactgccctaggaatgccaggcaggtaccccaccctcgggtgggatctgagcctgggctaattgtctacgggtagtttcatttccaattctttcatgtcggagtc

SEQ ID NO: 1330 - DNA, 725 bp, Aichivirus A
  misc_feature 1..725: note = strain Wencheng-Rt386-2 polyprotein gene, complete1
  source 1..725: mol_type = genomic DNA
cctcggccccctcaccctcttttccggtggtctggacccggaccaccgttactccattcagcttcttcggaacctgttcggaggaattaaacgggcacccactttcctgtcctctccccctttctgcaactcaagtgtgtgctcgtaatcctgactcccacgggttgaccgccccgttggtgaacaaacagctaggtcattccctccctacccctgggcgccatttcagtggcgttcatatcctccccccagcctgacgtgtcacaggctgtgcaaagtccccgcgaaagctgctcacgtggcaattgtgggtcccccctttgtgaaggaaccgagtctttctcccttaaggctagacccctgtgtgaactcacaggtggcaactagtggttccactgcatgctcccgacctcggccgcggagtgctgttccccaagtcgtgacactgacctccacttatgtgcctggcaagcatatctgagaagatgttccgctgtggctgccaaacctggtaacaggtgccccagtgcgtgtagtcttcttccgtctccggacggtaagtgtgtggtaaagatgcggcgtaaggttcaagtgccaacgccctggaagggatgacccttctactgccctaggaatgccgcgcaggtaccccaggttcgcctgggatctgagcgcgggctaattgtctacgggtagtttcatttccctctcttttcactggcatc

SEQ ID NO: 1331 - DNA, 438 bp, Aichi virus 1
  misc_feature 1..438: note = isolate C5_Mapo_01 polyprotein gene, partial cds.1
  source 1..438: mol_type = genomic DNA
aagctgctcacgtggcaattgtgggtccccccttcatcaagacaccaggtctttcctccttaaggctagccccggcgtgtgaactcacgttgggcaactagtggtgtcactgtgcgctcccaatctcggccgcggagtgctgttccccaagccaaacccctggcccttcactatgtgcctggcaagcatatctgagaaggtgttccgctgtggctgccagcctggtaacaggtgcccccgtgtgcgtaaccttcctccgtcttcggtcggtagtgattggttaagatttggtgtaaggttcgtgtgccaacgccctgtgcgggatgaaacctctactgccctaggaatgccaggcaggtaccccaccttcgggtgggatctgagcctgggctaattgtctacgggtagtttcatttccaattccttcatgtcggagtc

SEQ ID NO: 1332 - DNA, 395 bp, Kobuvirus sp.; identical to SEQ ID NO: 431
  misc_feature 1..395: note = strain 16806x8 polyprotein gene, partial cds.1
  source 1..395: mol_type = genomic DNA

SEQ ID NO: 1333 - DNA, 733 bp, Marmot kobuvirus
  misc_feature 1..733: note = strain HT9, complete genome.1
  source 1..733: mol_type = genomic DNA
cttcggccctcacaccctcttttccgatggtctggtcccggaccaccgtcactccattcagcttcttcggaacctgttcggaggaattaaacgggcaccccacttcccccccccaccctcgcaacttcaagtgtgtgtgcccataaccttgacccctgccggtatgccgcccggttcagtggacaaactgctaggcaaattcccccctccccctgtggctggtccttcaaccagccactctcttccccccagccggacgtgctacaggctgtgcaaagcccccgcgaaagctgctcacgtggcaattgtgggtcccccctttgtcaaggcttcgagtctttctcccttaaggctagtcccgtactgtgaaatcagtgtgggcaactagtgaagccactgcacgctcccgaccacggacgcggagtgctgtcccccaagtcatgacactaacaccaagctgtgctgcctggcaagcatagcctgggaaggtgttccgctgtggctgccaaacctggtaacaggtgccccagtgtgtgtaaccttcctccagtcttcggactggcagctttgtgtgaagacgtgacgtaaggttcaagtgccaactccctggaagggatgacccctctactgccctaggaatgctacgcaggtacccctggttcgccagggatctgagcgtaggctaattgtctacgggtagtttcatttcccacctttttatttctttagcatc

SEQ ID NO: 1334 - DNA, 729 bp, Feline kobuvirus
  misc_feature 1..729: note = isolate FKV/18CC0718, complete genome.1
  source 1..729: mol_type = genomic DNA
cctcggccccctcaccctcttttccggtggtctggtcccggaccaccgttactccattcagcttcttcggaacctgttcggaggaattaaacgggcacccactcatccctacctccccctgtaacttgaagtgtgtgctcgtgaccttgactcctgcgggcttcaccgacccgtccagtgaacaaactgctaggtgatttcttcccctcccctgacctggatgttccacatccaggtcttcctcccccagcccgacatgtcatgggctgtttggaatccccgcgaaagctgctaacgtggcaattgtgggtcccccttccaacaagacaccgagtctttctcccttaaggctagccccgtgtggtgaattccaccgggcaactagtgatgtcaatgcatgcctccgacctcggccgcggagtgctgccccccaagttgcgaaactgaccaaggattgtgctgcctggcaagcatagtctgaggagatgttccgctgtggctgccaaacctggtaacaggtgccccagtgcgcgtagtctccttccggttcgtccggctgtcctttggtaaagacacaatgtaaggggcgtgtgccaacgccctggaaagagtgaacttctactgccctaggaatgccacgcaggtacccctggtctcctaccagggatctgagcgtgggctaattgtctaacgggtagtttcatttctctcctcccttttgttgacacc

SEQ ID NO: 1335 - DNA, 729 bp, Feline kobuvirus
  misc_feature 1..729: note = isolate FKV/18CC0503, complete genome.1
  source 1..729: mol_type = genomic DNA
cctcggccccctcaccctcttttccggtggtctggtcccggaccaccgttactccattcagcttcttcggaacctgttcggaggaattaaacgggcacccactcacccccatctccccctgtaacttgaagtgtgtgctcgtgaccttgactcctgcgggcttcaccgacccgtccagtgaacaaactgctaggtgatttcttcccctcccctagcctggatgttccacatccaggtcttcttcccccagcccgacatgtcatgggctgtttggaatccccgcgaaagctgctaacgtggcaattgtgggtcccccttccaacaagacaccgagtctttctcccttaaggctagccccgtgtggtgaattccaccgggcaactagtggtgtcaatgcatgcctccgacctcggccgcggagtgctgccccccaagttgcgaaactgaccaaggattgtgctgcctggcaagcatagtctgaggagatgttccgctgtggttgccaaacctggtaacaggtgccccagtgcgcgtagtctccttccggttcgtccggctgtcctttggtaaagacacaatgtaaggggcgtgtgccaacgccctggaaagagtgaacttctactgccctaggaatgccacgcaggtacccctggtttcttaccagggatctgagcgtgggctaattgtctaacgggtagtttcatttccctcccttcttttgttgacatc

SEQ ID NO: 1336 - DNA, 717 bp, Feline kobuvirus
  misc_feature 1..717: note = isolate 12D240, complete genome.1
  source 1..717: mol_type = genomic DNA
tcaccctcttttccggtggtccggtcccagaccaccgttactccactcagcttcttcggaacctgtctggaggaattaaacgggcacccactcatccccaccccccttgtaacttaaagtgtgtgctcgtgaccttgactcctgcgggcttcaccgacccgttcagtgaacagactgctaggtgatttcttccccttccctggcctggatggcccacatccaggtccccttcccccagcccgacatgtcatgggctgtttggaatccccgcgaaagctgctaacgtggcaattgtgggtcccccttccaacaagacaccgagtctttctcccttaaggctagccccgtgtggtgaattccaccgggcaactagtgacgccactgcatgcctccgacctcggccgcggagtgctgccccccaagttgtgaaactggccaaggactgtgctgcctggcaagcatagtctgaggagatgttccgctgtggctgccaaacctggtaacaggtgccccagtgtgcgtagtctccttccggttcgtccggctgtcctttggtaaagacacaatgtaaggggcgtgtgccaacgccctggaaagagtgaacttctgctgccctaggaatgccacgcaggtacccctggtttcccaccagggatctgagcgtgggctaattgtctaacgggtagtttcatttccctcctctcttttgttgacatc

SEQ ID NO: 1337 - DNA, 523 bp, Rat kobuvirus
  misc_feature 1..523: note = MM33, partial genome.1
  source 1..523: mol_type = genomic DNA
cctccccacccctgggcgccgcctaggcgacgtccacatcctccccccagcctgacgtgtcacaggctgtgcaaagaccccgcgaaagctgctcacgtggcaattgtgggtcccccctttgtgaaggaaccgagtctttctcccttaaggctagacccctgtgtgaattcacaggtggcaactagtggttccactgcatgctcccgacctcggccgcggagtgctgttccccaagtcgtaacactgacctccacttatgtgcctggcaagcatatctgagaagatgttccgctgtggctgccaaacctggtaacaggtgccccagtgtgcgtagtcttcttccgtctccggacggtaagtgtgtggtaaagatgcggcgtaaggttcaagtgccaacgccctggaagggatgacccttctactgccctaggaatgccgcgcaggtaccccaggttcgcctgggatctgagcgcgggctaattgtctacgggtagtttcatttccctctttcttcactggcatc

SEQ ID NO: 1338 - DNA, 534 bp, Rat kobuvirus
  misc_feature 1..534: note = GZ85, partial genome.1
  source 1..534: mol_type = genomic DNA
ctaggtcattccctccccacccctgggcgccgcttcggcggtgtccacatcctccccccagcctgacgtgtcacaggctgtgcaaagaccccgcgaaagctgctcacgtggcaattgtgggtcccccctttgtgaaggaaccgagtctttctcccttaaggctagacccctgtgtgaattcacaggtggcaactagtggttccactgcatgctcccgacctcggccgcggagtgctgttccccaagtcgtaacactgacctccacttatgtgcctggcaagcatatctgaaaagatgttccgctgtggctgccaaacctggtaacaggtgccccagtgtgcgtagtcttcttccgtcttcggacggtaagtgtgtggtaaagatgcggcgtaaggttcaagtgccaacgccctggaagggatgacccttctactgccctaggaatgccgcgcaggtaccccaggttcgcctgggatctgagcgcgggctaattgtctacgggtagtttcatttccctctttcttcactggcatc

SEQ ID NO: 1339 - DNA, 306 bp, Aichi virus 1
  misc_feature 1..306: note = isolate ETH/2016/P24 polyprotein gene, partial cds.1
  source 1..306: mol_type = genomic DNA
cggagtgctgttccccaagccaaacccctggcccttcactatgtgcctggcaagcatatctgagaaggtgttccgctgtggctgccagcctggtaacaggtgccccagtgtgcgtaaccttcttccgtcttcggacggtagtgattggttaagatttggcgtaaggttcatgtgccaacgccctgtgcgggatgaaacctctactaccctaggaatgccaggcaggtaccccaccctcgggtgggatctgagcctgggctaattgtctacgggtagtttcatttccaattcttctatgtcggagtc

SEQ ID NO: 1340 - DNA, 301 bp, Aichi virus 1
  misc_feature 1..301: note = isolate ETH/2016/P6 polyprotein gene, partial cds.1
  source 1..301: mol_type = genomic DNA
gtgctgttccccaagccaaacccctggccctccactatgtgcctggcaagcatacctgagagggtgttccgctgtggctgccagcctggtaacaggtgccccagtgtgcgtaaccttcttccgtcttcggacggtagtgatcggttaagatttggtgtaaggttcatgtgccaacgccctgtgcgggatgaacctctactgccctaggaatgccaggcaggtaccccaccctcgggtgggatctgagcctgggctaattgtctacgggtagtttcatttccaatccttttatgtcggagtc

SEQ ID NO: 1341 - DNA, 610 bp, Mouse kobuvirus; identical to SEQ ID NO: 665
  misc_feature 1..610: note = M-5/USA/2010, complete genome.1
  source 1..610: mol_type = genomic DNA

SEQ ID NO: 1342 - DNA, 711 bp, Canine kobuvirus
  misc_feature 1..711: note = strain CaKoV-26, complete genome.1
  source 1..711: mol_type = genomic DNA
tcaccctcttttccggtggtccggacccagaccaccgttactccattcagcttcttcggaacctgttcggaggaattaaacgggcacccactcaccccctctccctcctcgtaactaagtgtgtgcccagtctctttactcctgctggcttcaccgaccagtagtggccaaaatgctaggtgaacctcctccctcccccactgggctcccgcccagtttcctccccccagcctgacgtgtcacaggctgtgcaaagaccccgcgaaagctgccaaaagtggcaattgtgggtcccccctttgtcaaggcgtcgagtctttctcccttaaggctagccccgtcagtgaattctgtcgggcaactagtgacgccactgcatgcctccgacctcggccgcggagtgctgccccccaagtcatgcccctgaccacaagttgtgctgtctggcaaacattgtctgtgagaatgttccgctgtggctgccaagcctggtaacaggctgccccagtgtgtgtagttctcatccggacttcggtctggcaacttgctgttaagacatggcgtaaggggcgtgtgccaacgccctggaacgagtgtccactctaataccccgaggaatgctacgcaggtacccctggcctgccagggatctgagcgtaggctaattgtctaagggtattttcatttcccactctttctttcttgttcata

SEQ ID NO: 1343 - DNA, 713 bp, Canine kobuvirus 1; identical to SEQ ID NO: 871
  misc_feature 1..713: note = isolate 12D049, complete genome.1
  source 1..713: mol_type = genomic DNA

SEQ ID NO: 1344 - DNA, 712 bp, Canine kobuvirus; identical to SEQ ID NO: 867
  misc_feature 1..712: note = US-PC0082, complete genome.1
  source 1..712: mol_type = genomic DNA

SEQ ID NO: 1345 - DNA, 712 bp, Canine kobuvirus 1; identical to SEQ ID NO: 866
  misc_feature 1..712: note = isolate DD2 polyprotein mRNA, complete cds.1
  source 1..712: mol_type = genomic DNA

SEQ ID NO: 1346 - DNA, 711 bp, Canine kobuvirus
  misc_feature 1..711: note = strain S272/16, complete genome.1
  source 1..711: mol_type = genomic DNA
tcaccctcttttccggtggtccggacccagaccaccgttactccattcagcttcttcggaacctgtttggaggaattaaacgggcacccacccaccttcacccccttttcgtaactaagtgtgtgcccaatctcatgactcctgctgacttcaccgaccagcagtgtccaaaacgctaggtgaatttccttcctccccctctgggcttctgcccagctccctccctccagcctgacgtgccacaggctgtgcaaagaccccgcgaaagctgccaaaagtggcaattgtgggtcccccctttgtaaaggcgtcgagtctttctcccttaaggctagacccgtcagtgaattctgtcgggcaactagtgacgccactgcatgcctccgacctcggccgcggagtgctgccccccaagtcgtgcccctgactacaagttgtgctgtctggcaaacattgtctgtgagaatgttccgctgtggctgccaagcctggtaacaggctgccccagtgtgcgtagttctcatccagacttcggtctggcaacttgctgttaagacacggcgtaaggggcgtgtgccaacgccctggaacgagtgtccactctaataccccgaggaatgctacgcaggtacccctggctccccagggatctgagcgtaggctaattgtctaagggtattttcatttcccactctttctttcttgttcata

SEQ ID NO: 1347 - DNA, 646 bp, Feline kobuvirus
  misc_feature 1..646: note = strain FK-13, complete genome.1
  source 1..646: mol_type = genomic DNA
ggaattaaacgggcacccactcacccccatccccccctgtaacttaaagtgtgtgctcgtgaccttgactcctgcgggcttcaccgacccgtccagtgaacaaactgctaggtgactccttccccccccctggcctggatggcccacatccaggtcttcttcccccagcccgacatgtcatgggctgtttggaatccccgcgaaagctgctaacgtggcaattgtgggtcccccttccaacaagacaccgagtctttctcccttaaggctagccccgtgtggtgaattccaccgggcaactagtggtgtcaatgcatgcctccgacctcggccgcggagtgctgccccccaagttgcgaaactgaccaagactgtgctgcctggcaagcatagtctgaggagatgttccgctgtggttgccaaacctggtaacaggtgccccagtgtgcgtagtctccttccggttcgtccggctgtcctttggtaaagacacaatgtaaggggcgtgtgccaacgccctggaaagagtgaacttctactgccctaggaatgccacgcaggtacccctggtttcccaccagggatctgagcgtgggctaattgtctaacgggtagtttcatttccctcctctcttttgttgacatc

SEQ ID NO: 1348 - DNA, 712 bp, Canine kobuvirus 1
  misc_feature 1..712: note = isolate 75 polyprotein mRNA, complete cds.1
  source 1..712: mol_type = genomic DNA
tcaccctcttttccggtggtccggacccagaccaccgttactccattcagcttcttcggaacctgttcggaggaattaaacgggcacccactcaccccctctccctcctcgtaactaagtgtgtgcccagtctctttactcctgctggcttcaccgaccagtagtggccaaaatgctaggtgaacctcctccctcccccactgggctcccgcccagtttcctccccccagcctgacgtgtcacaggctgtgcaaagaccccgcgaaagctgccaaaagtggcaattgtgggtcccccctttgtcaaggcgtcgagtctttctcccttaaggctagacctgtcagtgaattctgccgggcaactagtgacgccactgcatgcctccgacctcggctgcggggtgctgccccccaagttgtgcccctgagccacaagttgtgctgtctggcaaacattgtctgtgagaatgttccgctgcggctgccaagcctggtgacaggctgccccagtgtgtgtagttctcatccagacctcggtctggcaacttgctgttaagacacggcgtaaggggcgtgtgccaacgccctggaacgagtgtccattctaataccccgaggaatgctacgcaggtacccctggttcaccagggatctgagcgtaggctaattgtctaagggtattttcatttcccactctttctttcttgttcata

SEQ ID NO: 1349 - DNA, 712 bp, Canine kobuvirus 1
  misc_feature 1..712: note = isolate B103 polyprotein mRNA, complete cds.1
  source 1..712: mol_type = genomic DNA
tcaccctcttttccggtggtccggacccagaccaccgttactccattcagcttcttcggaacctgttcggaggaattaaacgggcacccactcaccctctctccctcctcgtaactaagtgtgtgcccagtctctttactcctgctggcttcaccgaccagtagtgaccaaaatgctaggtgaacctcctcccacgccctctgggcccccgcccagtttcctccccccagcctgacgtgtcacaggctgtacaaagaccccgcgaaagctgccaaaagtggcaattgtgggtcccccctttgtcaaggcgtcgagtctttctcccttaaggctagacccgtcagtgaattctgccgggcaactagtgacgccactgcatgcctccgacctcggctgcggagtgctgccccccaagtcgtgcccctgagccacaagttgtgctgtctggcaaacattgtctgtgagaatgttccgctgcggctgccaggcctggtaacaggctgccccagtgtgtgtagttctcatccagatctcggtctggcaacttgctgttaagacacggcgtaaggggcgtgtgccaacgccctggaacgagtgtccattctaataccccgaggaatgctacgcaggtacccctggtgaaccaggggtctgagcgtaggctaattgtctaagggtattttcatttcccactctttctttcttgttcata

SEQ ID NO: 1350 - DNA, 646 bp, Feline kobuvirus
  misc_feature 1..646: note = strain FeKoV/TE/52/IT/13, complete genome.1
  source 1..646: mol_type = genomic DNA
ggaattaaacgggcacccactcacccccatccccccctgtaacttaaagtgtgtgctcgtgaccttgactcctgcgggcttcaccgacccgtccagtgaacaaactgctaggtgatttcttcccctccctcagcctgggtgttccacatccaggtctttttcccccagcccgacatgtcatgggctgtttggaatccccgcgaaagctgctaacgtggcaattgtgggtcccccttccaacaagacaccgagtctttctcccttaaggctagccccgtgtggtgaactccaccgggcaactagtggtgtcaatgcatgcctccgacctcggccgcggagtgctgccccccaagttgtgaaactgaccaaggatgtgctgcctggcaagcatagtctgaggagatgttccgctgtggctggcaagcctggtaacaggtgccccagtgtgcgtagtctccttccggttcgtccggctgtcctttggtaaagacacaatgtaaggggcgtgtgccaacgccctggaaagagtgaacttttactgccctaggaatgccacgcaggtacccctggtttcccaccagggatctgagcgtgggctaattgtctaacgggtagtttcatttccctcctctcttttgttgacatc

SEQ ID NO: 1351 - DNA, 647 bp, Feline kobuvirus
  misc_feature 1..647: note = strain WHJ-1, complete genome.1
  source 1..647: mol_type = genomic DNA
ggaattaaacgggcacccactcatccctacctccccctgtaacttgaagtgtgtgctcgtgaccttgactcctgcgggcttcaccgacccgtccagtgaacaaactgctaggtgatttcttccccttcccccacctggatgttctacatccaggtcttcctcccccagcccgacatgtcatgggctgtttggaacccccgcgaaagctgctaacgtggcaattgtgggtcccccttccaacaagacaccgagtctttctcccttaaggctagccccgtgtggtgaattccaccgggcaactagtggtgtcaatgcatgcctccgacctcggccgcggagtgctgccccccaagttgtgaaactgaccaaggattgtgctgcctggcaagcatagtctgaggagatgttccgctgtggctgccaaacctggtaacaggtgccccagtgcgcgtagtctccttccggttcgtccggctgtcctctggtaaagacacaatgtaaggggtgtgtgccaacgccctggaaagagtgaacttctactgccctaggaatgccacgcaggtacccctggtcccccaccagggatctgagcgtgggctaattgtctaacgggtagtttcatttctctcctctcctttgttgacatc

SEQ ID NO: 1352 - DNA, 579 bp, Murine kobuvirus 1
  misc_feature 1..579: note = isolate MKV1/NYC/2014/M014/0146, partial genome.1
  source 1..579: mol_type = genomic DNA
gccaggtcgcatcgcctggttggtgaccaaactgctagatgctcctccctttccctcggggttggcgcaccgccatccctgcatcctccccccagcctgacatgctacaggctgtgcaagaaccccgcgaaagctgccaccgtggcaattgtgggtccccctcttgtcaaggcacagagtctttctcccttaaggctagacccctctgtgaattcagaggcggcaactagttgtgccactacatgcctcagacctcggtcgcggagtgctgttccccaaaccctgacactgccgcgtgagtatgctgcttggcaagcattgcctggatggtcgttccgctggggctgccaggtctggtaacagaccgctccagtgtgcgtagaccatctccagcttcggctggtgctcacaaggtaagactcggtgtaaggttcatgtgccaacaccctggaatgagtgaaaactctactgccctaggaatgctacgcaggtacccctgctcccttgggagccagggatctgagcgtaggctaattgtctgtcgggtagtttcatttcccacctcctagactgttcacc

SEQ ID NO: 1353 - DNA, 601 bp, Canine kobuvirus
  misc_feature 1..601: note = CH-1, complete genome.1
  source 1..601: mol_type = genomic DNA
tttaagtgttgtgcccaatctcttgactcctgctggaaccaccgaccagtagtgtccaaaatgctaggtggaaaatcctcccttcccctctgggctccatgcccagcatcctccccccagcctgacgtgtcacaggctgtgcaaagaccccgcgaaagctgccaaaagtggcaattgtgggtcccccctttgtcaaggcgtcgagtctttctcccttaaggctagccccgtcagtgaattctgacgggcaactagtgacgccactgcatgcctccgacctcggccgcggagtgctgccccccaagtcatgcccctgaccacaagttgtgctgtctggcaaacactgtctgtgagaatgttccgctgtggctgccaagcctggtaacaggctgccccagtgtgcgtagttctcatccagacctcggtctggcaacttgctgttaagacatggcgtaaggggcgtgtgccaacgccctggaacgagtgtccactctaataccccgaggaatgctacgcaggtacccctggttcgccagggatctgagcgtaggctaattgtctaagggtattttcatttcccactctctctttcttgttcata

SEQ ID NO: 1354 - DNA, 601 bp, Canine kobuvirus
  misc_feature 1..601: note = isolate SMCD-59, complete genome.1
  source 1..601: mol_type = genomic DNA
tttaagtgttgtgcccaatctcttgactcctgctggaaccaccgaccagtagtgtccaaaatgccaggtggaaaatcctcccttcccctctgggcttcatgcccggcatcctccccccagcctgacgtgccacaggctgtgcaaagaccccgcgaaagctgccaaaagtggcaattgtgggtcccccctttgtcaaggcgtcgagtctttctcccttaaggctagtcctgtcagtgaactctgtcgggcaactagtgacgccactgcatgcctccgacctcggccgcggagtgctgccccccaagtcatgcccctgaccacaagttgtgctgtctggcaaacattgtctgtgagaatgttccgctgtggctgccaagcctggtaacaggctgccccagtgtgcgtaattctcatccagacttcggtctggcaacttgctgttaagacatggcgtaaggggcgtgtgccaacgccctggaacgagtgtccactctaataccccgaggaatgctacgcaggtacccctggctcgccagggatctgagcgtaggctaattgtctaagggtattttcatttcccaccctcttcttcttgttcata

SEQ ID NO: 1355 - DNA, 493 bp, Canine kobuvirus
  misc_feature 1..493: note = isolate CaKoV_CE9_AUS_2012 polyprotein gene,1
  source 1..493: mol_type = genomic DNA
tcctccccccagcctgacgtgtcacaggctgtgcaaagaccccgcgaaagctgccaaaagtggcaattgtgggtcccccctttgtcaaggcgtcgagtctttctcccttaaggctagccccgacagtgaattctgtcgggcaactagtgacgccactgcatgcctccgacctcggccgcggagtgctgccccccaagtcgtgcccctgactacaagttgtgctgtctggcaaacattgtctgtgagaatgttccgctgtggctgccaagcctggtaacaggctgccccagtgtgcgtagttctcatccagacttcggtctggcaacttgctgttaagacgcggcgtaaggggcgtgtgccaacgccctggaacgagtgtccactctaataccccgaggaatgctacgcaggtacccctggctcgccagggatctgagcgtaggctaattgtctaagggtattttcatttcccactctttctctctcgttcata

SEQ ID NO: 1356 - DNA, 612 bp, Canine kobuvirus; identical to SEQ ID NO: 680
  misc_feature 1..612: note = strain UK003, complete genome.1
  source 1..612: mol_type = genomic DNA

SEQ ID NO: 1357 - DNA, 766 bp, Kobuvirus SZAL6-KoV/2011/HUN; identical to SEQ ID NO: 1227
  misc_feature 1..766: note = complete genome.1
  source 1..766: mol_type = genomic DNA

SEQ ID NO: 1358 - DNA, 561 bp, Kobuvirus dog/AN211D/USA/2009
  misc_feature 1..561: note = polyprotein gene, complete cds.1
  source 1..561: mol_type = genomic DNA
ccgaccagtagtgtccgaaatgctagagtggacttcctcccttcccctctgggtatcttgcccagtttcctccccccaacctgacgtgccacaggctgtgaaaacaccccgcgaaagctgccaaaagtgggaattgtgggtccccccctttgccaaggagtcgagtctttctcccttaaggctagccccatcagtgaattctgttgggcaactagtgacgccactgcatgcctccgacctcggccgcggagtgctgccccccaagtcgtgcccctgaccacaagttgtgctgtctggcaaacattgtctgtgagaatgttccgctgtggctgccaagcctggtaacaggctgccccagtgtgcgtagttctcatccagacttcggtctggcaacttgctgttaagacacggcgtaaggggcgtgtgccaacgccctggaacgagtgtccactctaataccccgaggaatgctacgtaggtacccctggttcgccagggatctgagcgtaggctaattgtctaagggtattttcatttcccactctctctttcttgttcata

SEQ ID NO: 1359 - DNA, 699 bp, Salivirus A
  misc_feature 1..699: note = strain GUT/2009/A-1746, complete genome.1
  source 1..699: mol_type = genomic DNA
tatggcaggcgggcttgtggacggtttcggcccacccacagcaagaatgccatcatctgtcctcacccccaattttccctttcttcccctgcaatcatcacgcttactcgcatgtgcattgagtggtgcatgtgttgaacaaacagctacactcacatgggggcgggttttcccgccctacggcctctcgcgaggcccacccttcccctccccttataactacagtgctttggcaggtaagcatcctgatcccccgcggaagctgctcacgtggcaactgtggggacccagacaggttatcaaaggcacccggtctttccgccttcaggagcatccccactagtgaattctagtggggctctgcttggtgccaacctcccccaaatgcgcgctgcgggagtgctcttccccaacccatcctagtatcctctcatgtgtgtgcttggtcagcatatctgagacgacgttccgctgtcccagaccagtccagtaatggacgggccagtgtgcgtagtcgtcttccggcttgtccggcgcatgtttggtgaaccggtggggtaaggttggtgtgcccaacgcccgtactttggtgacacctcaagaccacccaggaatgccagggaggtaccccgcctcacggcgggatctgaccctgggctaattgtctacggtggttcttcttgcttccacttctttctt

SEQ ID NO: 1360 - DNA, 709 bp, Salivirus NG-J1
  misc_feature 1..709: note = complete genome.1
  source 1..709: mol_type = genomic DNA
tatggcaggcgggcttgtggacggcttcggcccacccacagcaagaatgccatcatctgtcctcacccccaattttcccttttcttcccctgcaaccattacgcttactcgcatgtgcattgagtggtgcatgtgttgaacaaacagctacactcacatgggggcgggttttcccgccctacggcctctcgcgaggcccaccccttccctccccttataactacagtgctttggtaggtaagcatcctgatcccccgcggaagctgctcacgtggcaactgtggggacccagacaggttatcaaaggcacccggtctttccgccttcaggagtatccctactagtgaattctagcggggctctgcttggtgccaacctcccccaaatgcgcgctgcgggagtgctcttccccaactcaccctagtatcctctcatgtgtgtgcttggtcagcatatctgagacgatgttccgctgtcccagaccagtccagtaatggacgggccagtgcgtgtagtcgtcttccggcttgtccggggcatgtttggtgaaccggtggggtaaggttggtgtgcccaacgcccgtactttggtgacacctcaagaccacccaggaatgccagggaggtaccccacctcacggtgggatctgaccctgggctaattgtctacggtggttcttcttgcttccacttctttcttctgttcacg

SEQ ID NO: 1361 - DNA, 720 bp, Salivirus A
  misc_feature 1..720: note = strain YZ03, complete genome.1
  source 1..720: mol_type = genomic DNA
cccctttcgaccgacctatggcaggcgggcttgtggacggcttcggcccacccacagcaagaatgccatcatctgtcctcacccccatcttcccctttcttccctgcaaccgtcacgcttactcgcatgtgcattgagtggtgcacgtgtcgaacaaacagctacactcacatggggcgggttttcccgccttgcggcctctcgcgaggcccacccctccctctcctcccataactacagtgctttggtaggtaagcatcctgatcccccgcggaagctgctcacgtggcaactgtggggacccagacaggttatcaaaggcacccggtctttccgccttcaggagtatccctgctagtgaattctagtagggctctgcttggtgccaacctcccccaaatgcgcgctgcaggagtgctcttccccaactcaccctagtatcctctcatgtgtgtgcttggtcagcatatctgagacgatgttccgctgtcccagaccagtccagtaatggacgggccagtgtgcgtagtcgtcttccggcttgcccggcgcatgtttggtgaaccggtggggtaaggttggtgtgcccaacgcccgtactttggtgatacctcaagaccacccaggaatgccagggaggtaccccgcttcacagcgggatctgaccctgggctaattgtctacggtggttcttcttgcttccacttctttctactgttt

SEQ ID NO: 1362 - DNA, 724 bp, Salivirus A
  misc_feature 1..724: note = strain YZ02, complete genome.1
  source 1..724: mol_type = genomic DNA
cttccccctttcgaccgccctatggcaggcgggcttgtggacggcttcggcccacccacagcaagaatgccatcatctgtcctcacccccatcttcccctttcttccctgcaaccgtcacgcttactcgcatgtgcattgagtggtgcacgtgtcgaacaaacagctacactcacatggggcgggttttcccgccttgcggcctctcgcgaggcccacccctcccccccctcccataactacagtgctttggtaggtaagcatcctgatcccccgcggaagctgctcacgtggcaactgtggggacccagacaggttatcaaaggcacccggtctttccgccttcaggagtatccctgctagtgaattctagtagggctctgcttggtgccaacctcccccaaatgcgcgctgcaggagtgctcttccccaactcaccctagtatcctctcatgtgtgtgcttggtcagcatatctgagacgatgttccgctgtcccagaccagtccagtaatggacgggccagtgtgcgtagtcgtcttccggcttgcccggcgcatgtttggtgaaccggtggggtaaggttggtgtgcccaacgcccgtactttggtgatacctcaagaccacccaggaatgccagggaggtaccccgcttcacagcgggatctgaccctgggctaattgtctacggtggttcttcttgcttccacttctttctactgttt

SEQ ID NO: 1363 - DNA, 731 bp, Salivirus A; identical to SEQ ID NO: 931
  misc_feature 1..731: note = strain YZ01, complete genome.1
  source 1..731: mol_type = genomic DNA

SEQ ID NO: 1364 - DNA, 650 bp, Salivirus A
  misc_feature 1..650: note = SZ1 polyprotein gene, partial cds.1
  source 1..650: mol_type = genomic DNA
tctgtcctcaccccatcttcccttctttcctgcaccgttacgcttactcgcatgtgcattgagtggtgcacgtgcttgaacaaacagctacactcacatgggggcgggttttcccgccctgcggcctctcgcgaggcccacccctccccttcctcccataactacagtgctttggtaggtaagcatcctgatcccccgcggaagctgctcacgtggcaactgtggggacccagacaggttatcaaaggcacccggtctttccgccttcaggagtatccctgctagtgaattctagtagggctctgcttggtgccaacctcccccaaatgcgcgctgcgggagtgctcttccccaactcaccctagtatcctctcatgtgtgtgcttggtcagcatatctgagacgatgttccgctgtcccagaccagtccagtaatggacgggccagtgtgcgtagtcgtcttccggcttgtccggcgcatgtttggtgaaccggtggggtaaggttggtgtgcccaacgcccgtactttggtgatacctcaagaccacccaggaatgccagggaggtaccccgcttcacagcgggatctgaccctgggctaattgtctacggtggttcttcttgcttccacttctttctactgttcatg

SEQ ID NO: 1365 - DNA, 708 bp, Salivirus A
  misc_feature 1..708: note = isolate BN-2, complete genome.1
  source 1..708: mol_type = genomic DNA
tatggcaggcgggcttgtggacggcttcggcccacccacagcaagaatgccatcatctgtcctcacccccatgtttcccctttctttccctgcaaccgttacgcttactcgcaggtgcatttgagtggtgcacgtgttgaataaacagctacactcacatgggggcgggttttcccgccctgcggcctctcgcgaggcccacccctccccttcctcccataactacagtgctttggtaggtaagcatcctgatcccccgcggaagctgctcacgtggcaactgtggggacccagacaggttatcaaaggcacccggtctttccgccttcaggagtatccctgctagtgaattctagtagggctctgcttggtgccaacctcccccaaatgcgcgctgcgggagtgctcttccccaactcaccctagtatcctctcatgtgtgtgcttggtcagcatatctgagacgatgttccgctgtcccagaccagtccagtaatggacgggccagtgtgcgtagtcgtcttccggcttttccggcgcatgtttggtgaaccggtggggtaaggttggtgtgcccaacgcccgtactttggtgatacctcaagaccacccaggaatgccagggaggtaccccgcttcacagcgggatctgaccctgggctaattgtctacggtggttcttcttgcttccacttctttctactgttc

SEQ ID NO: 1366 - DNA, 484 bp, Salivirus sp.
  misc_feature 1..484: note = isolate ETH_P14_2016 polyprotein gene, complete cds.1
  source 1..484: mol_type = genomic DNA
gtgctttggcaggtaagcatcctgatcccccgcggaagctgctcacgtggcaactgtggggacccagacaggttatcaaaggcacccggtctttccgccttcaggagtaccctcactagtgaattctagtggggctctgcttggtgccaacctcccccaaatgcgcgctgcgggagtgctcttccccaacccatcctagtaccctctcatgtgtgtgcttggtcagcacatctgagacgacgttccgctgtcccagaccagtccagtaatggacgggccagtgtgcgtagtcgtcttccggcttgtccggcgcatgtttggtgaaccggtggggtaaggttggtgtgcccaatgcccgtactttggtgatacctcaagaccacccaggaatgccagggaggtaccccgcctctcggcgggatctgaccctgggctaattgtctacggtggttcttcttgcttccactcttttcttctgttcacg

SEQ ID NO: 1367 - DNA, 718 bp, Salivirus A
  misc_feature 1..718: note = isolate 02394-01, complete genome.1
  source 1..718: mol_type = genomic DNA
tttcgaccgccttatggcaggcgggcttgtggacggcttcggcccacccacagcaagaatgccatcatctgtcctcacccccatttctcccctccttcccctgcaaccattacgcttactcgcatgtgcattgagtggtgcacgtgttgaacaaacagctacactcacgtgggggcgggttttcccgcccttcggcctctcgcgaggcccacccttccccttcctcccataactacagtgctttggtaggtaagcatcctgatcccccgcggaagctgctcgcgtggcaactgtggggacccagacaggttatcaaaggcacccggtctttccgcctccaggagtatccctgctagtgaattctagtggggctctgcttggtgccaacctcccccaaatgcgcgctgcgggagtgctcttccccaactcaccctagtatcctctcatgtgtgtgcttggtcagcatatctgagacgatgttccgctgtcccagaccagtccagcaatggacgggccagtgtgcgtagtcgtcttccggcttgtccggcgcatgtttggtgaaccggtggggtaaggttggtgtgcccaacgcccgtactttggtgacaactcaagaccacccaggaatgccagggaggtaccccgcctcacggcgggatctgaccctgggctaattgtctacggtggttcttcttgcttccatttctttcttctgttc

SEQ ID NO: 1368 - DNA, 624 bp, Salivirus CH
  misc_feature 1..624: note = complete genome.1
  source 1..624: mol_type = genomic DNA
ttctcctgcaaccattacgcttaatcgcatgtgcattgagtggtgcatgtgttgaacaaacagctacaatcacatgggggcgggttttcccgccccacggcttctcgcgaggcccatccctcccttttctcccataactacagtgctttggtaggtaagcatcccgatctcccgcggaagctgctcacgtggcaactgtggggacccagacaggttatcaaaggcacccggtctttccgccttcaggagtatccctgctagcgaattctagtagggctctgcttggtgccaacctctcccaaatgcgcgctgcgggagtgctcttccccaaatcaccccagtatcctctcatgtgtgtgcctggtcagcatatctgagacgatgttccgctgtcccagaccagtccagtaatggacgggccagtgtgcgtagtcgtcctccggcttgtccggcgcatgtttggtgaaccggtggggtaaggttggtgtgcccaacgcccgtaatcaggggatacctcaaggcacccaggaatgccagggaggtatcccgcctcacagcgggatctgaccctggggtaaatgtctgcggggggtcctcttggcccaattctcagtaattttcagg

SEQ ID NO: 1369 - DNA, 624 bp, Salivirus A; identical to SEQ ID NO: 736
  misc_feature 1..624: note = strain SH1 polyprotein gene, complete cds.1
  source 1..624: mol_type = genomic DNA

SEQ ID NO: 1370 - DNA, 730 bp, Salivirus FHB
  misc_feature 1..730: note = complete genome.1
  source 1..730: mol_type = genomic DNA
acatggggggtctgcggacggcttcggcccacccgcgacaagaatgccgtcatctgtcctcattacccgtattccttcccttcccccgcaaccaccacgcttactcgcgcacgtgttgagtggcacgtgcgttgtccaaacagctacacccacacccttcggggcgggtttgtcccgccctcgggttcctcgcggaacccccccctccctctctctctttctatccgccctcacttcccataactacagtgctttggtaggtgagcaccctgaccccccgcggaagctgctaacgtggcaactgtggggatccaggcaggttatcaaaggcacccggtctttccgccttcaggagtatctctgccggtgaattccggtagggctctgcttggtgccaacctcccccaaatgcgcgctgcgggagtgctcttccccaactcatcttagtaacctctcatgtgtgtgcttggtcagcatatctgaggcgacgttccgctgtcccagaccagtccagcaatggacgggccagtgtgcgtagtcgctttccggttttccggcgcatgtttggcgaaacgctgaggtaaggttggtgtgcccaacgcccgtaatttggtgatacctcaagaccacccaggaatgccagggaggtaccccacttcggtgggatctgaccctgggctaattgtctacggtggttcttcttgcttccacttctcttttttctggcatg

SEQ ID NO: 1371 - DNA, 752 bp, Salivirus A; identical to SEQ ID NO: 128
  misc_feature 1..752: note = isolate BN-5, complete genome.1
  source 1..752: mol_type = genomic DNA

SEQ ID NO: 1372 - DNA, 471 bp, Kobuvirus cattle/Kagoshima-1-22-KoV/2014/JPN; identical to SEQ ID NO: 12
  misc_feature 1..471: note = genomic RNA, nearly1
  source 1..471: mol_type = genomic DNA

SEQ ID NO: 1373 - DNA, 750 bp, Rabbit picornavirus; identical to SEQ ID NO: 1201
  misc_feature 1..750: note = strain Rabbit01/2013/HUN, complete genome.1
  source 1..750: mol_type = genomic DNA

SEQ ID NO: 1374 - DNA, 555 bp, Porcine kobuvirus
  misc_feature 1..555: note = isolate GS-2/2012/CH, complete genome.1
  source 1..555: mol_type = genomic DNA
cctcggccccctcaccctcttttccggtggccattcgcccgggccaccgttactccactccactccttcgggactggtttggaggaacacaacagggcttcccatccctgtttaccctttattccatcatcctttccccaagtttaccctatccacaccccactgactgactcctttggattttgacctcagaatgcctatttgacctcccactcgcctctcccttttcggattgccggtggtgcctggcggaaaaagcacaagtgtgttgcaggctaccaaactcctacccgacaaaggtgcgtgtccgcgtgctgagtaatgggataggagatgcctacaacaggctcgcccatgagtagagcatggactgcggtgcatgtgacttcggtcaccacgggcatagcattgctcacccgtgaatcaagtcatcgagatttctctgacctctgaagtgcactgtggttgcgtggctgggaatccacgcttgaccatgtactgcttgatagagtcgcggctggccgactcatgggttaaagtcagttgacaagacac

SEQ ID NO: 1375 - DNA, 555 bp, Porcine kobuvirus
  misc_feature 1..555: note = strain KobuV/Pig-wt/ESP/P2B/2017, complete1
  source 1..555: mol_type = genomic DNA
cctcggccctctcaccctcttttccggtggccactcgcccgggccaccgttactccattccactccttcgggactggtttggaggaacataacagggcttcccatccctgtttatcctaattccacttacctttctccataattaaccctatccacaccccactgaccgatccctttggattttgacctcagaatgcctacctgacctcccacttgcctttcccttttcggattgccggtggtgcctggcggaaaaagcacaagtgtgttgatggctaccaaactcctacccgacaaaggtgcgtgtccgcgtgctgagtaatgggataggagatgccattgacaggctcgcccatgagtagagcatggactgcggtgcatgtgacttcggtcaccaggggcatagcattgctcacccctgaatcaagtcatcgagatttctctgacctctgaagtgcactgtggttgcgtggctgggaatccacgcttgaccatgtactgcttgatagagtcgcggctggccgactcatgggttaaagtcagttgacaagacac

SEQ ID NO: 1376 - DNA, 556 bp, Porcine kobuvirus
  misc_feature 1..556: note = isolate CH/HNXX-4/2012, complete genome.1
  source 1..556: mol_type = genomic DNA
cctcggccccctcaccctcttttccggtggccactcgcccgggccaccgttactccactccactccttcgggactggtttggaggaacataacagggcttcccatccctgtttacccttaattccatttaccttctcccccaactaaccctatccacaccccactgactgactcctttggattttgacctcagaatgcctacttgacctcccacttgcctctcccttctcggattgccggtggtgcctggcggaaaaagcacaagtgtgttgcaggctaccaaactcctacccgacaaaggtgcgtgtccgcgtgctgagtaatgggataggagatgcctacaacaggctcgcccatgagtagagcatggactgcggtgcatgtgacttcggtcaccacgggcatagcattgctcacccgtgaatcaagtcatcgagatttctctgacctctgaagtgcactgtggttgcgtggctgggaatccacgcttgaccatgtactgcttgatagagtcgcggctggccgactcatgggttaaagtcagttgacaagacac

SEQ ID NO: 1377 - DNA, 556 bp, Porcine kobuvirus
  misc_feature 1..556: note = strain WUH1, complete genome.1
  source 1..556: mol_type = genomic DNA
cctcggccccctcaccctcttttccggtggccactcgcccgggccaccgttactccactccactccttcgggactggtttggaggaacacaacagggcttcccatccctgttcaccctacactccacataccctttccctcaaccaaccctatccaaaccccactgaccgactcccttggattttgacctcagaatgcctacttgacctcccacttgcctctcccttctcggattgccggtggtgcctggcggaaaaagcacaagtgtgttgcaggctatcaaacttctacccgacaaaggcgcgtgtccgcgtgctgagtaatgggataggagatgcctacaacaggctcgcccatgagtagagcatggactgcggtgcatgtgacttcggtcaccacgggcatagcattgctcacccgtgaatcaagtcatcgagatttctctgacctctgaagtgcactgtggttgcgtggctgggaatccatgcttgaccatgtactgcttgatagagtcgcggctggccgactcatgggttaaagtcagttgacaagacac

SEQ ID NO: 1378 - DNA, 555 bp, Porcine kobuvirus
  misc_feature 1..555: note = isolate K-11/2012/CH, complete genome.1
  source 1..555: mol_type = genomic DNA
cctcggccccctcaccctcttttccggtggccacccgcccgggccaccgttactccactccactccttcgggactggtttggaggaacataacagggcttcccatccctgtttacccttattccacttaccctttcccttaaccaaccctatccacaccccactgactgattcctttggattttgacctcagaatgcctacttgacctcccacttgtctctcccttctcggattgccggtggtgcctggcggaaaaagcacaagtgtgttgcaggctaccaaactcctacccgacaaaggtgcgtgtccgcgtgctgagtaatgggataggagatgcctacaacaggctcgcccatgagtagagcatggactgcggtgcatgtgacttcggtcaccacgggcatagcattgctcacccgtgaatcaagtcatcgagatttctctgacctctgaagtgcactgtggttgcgtggctgggaatccacgcttgaccatgtactgcttgatagagtcgcggctggccgactcatgggttaaagtcagttgacaagacac

SEQ ID NO: 1379 - DNA, 555 bp, Porcine kobuvirus
  misc_feature 1..555: note = isolate GS-1/2012/CH, complete genome.1
  source 1..555: mol_type = genomic DNA
cctcggccccctcaccctcttttccggtggccacacgcccgggccaccgttactccactccactccttcgggactggtttggaggaacacaacagggcttcccatccctgtttaccctttattccatcatcctttccccaagtttaccctatccacaccccactgactgactcctttggattttgacctcagaatgcctatttgacctcccactcgcctctcccttttcggattgccggtggtgcctggcggaaaaagcacaagtgtgttgcaggctaccaaactcctacccgacaaaggtgcgtgtccgcgtgctgagtaatgggataggagatgcctacaacaggctcgcccatgagtagagcatggactgcggtgcatgtgacttcggtcaccacgggcatagcattgctcacccgtgaatcaagtcatcgagatttctctgacctctgaagtgcactgtggttgcgtggctgggaatccacgcttgaccatgtactgcttgatagagtcgcggctggccgactcatgggttaaagtcagttgacaagacac

SEQ ID NO: 1380 - DNA, 555 bp, Porcine kobuvirus
  misc_feature 1..555: note = strain WB-1-HUN/2011/HUN, complete genome.1
  source 1..555: mol_type = genomic DNA
cctcggccccctcaccctcttttccggtggccacccgcccgggccaccgttactccactccactccttcgggactggtttggaggaacataacagggcttcccatccctgtttacccttactccactcacccttctccttgaccaaccctatccacaccccactgactgactcctttggattttgacctcagaatgcctacctgacctcccacttgcctctcccatctcggactgccggtggtgcctggcggaaaaagcacaagtgtgttgatggctaccaaactcctacccgacaaaggtgcgtgtccgcgtgctgagtaatgggataggagatgccattgacaggctcgcccatgagtagagcatggactgcggtgcatgtgacttcggtcaccaggggcatagcattgctcacccctgaatcaagtcatcgagatttctctgacctctgaagtgcactgtggttgcgtggctgggaatccacgcttgaccatgtactgcttgatagagtcgcggctggccgactcatgggttaaagtcagttgacaagacac

SEQ ID NO: 1381 - DNA, 555 bp, Porcine kobuvirus
  misc_feature 1..555: note = swine/K-30-HUN/2008/HUN, complete genome.1
  source 1..555: mol_type = genomic DNA
cctcggccccctcaccctcttttccggtggccacccgcccgggccaccgttactccactccactccttcgggactggtttggaggaacataacagggcttcccatccctgtttacccttactccactcacccctccccttgaccaaccctatccacaccccactgactgactcctttggatcttgacctcggaatgcctacttgacctcccacttgcctctcccttttcggattgccggtggtgcctggcggaaaaagcacaagtgtgttgttggctaccaaactcctacccgacaaaggtgcgtgtccgcgtgctgagtaatgggataggagatgccaataacaggctcgcccatgagtagagcatggactgcggtgcatgtgacttcggtcaccaggggcatagcattgctcacccctgaatcaagtcatcgagatttctctgacctctgaagtgcactgtggttgcgtggctgggaatccacgcttgaccatgtactgcttgatagagtcgcggctggccgactcatgggttaaagtcagttgacaagacac

SEQ ID NO: 1382 - DNA, 555 bp, Porcine kobuvirus
  misc_feature 1..555: note = swine/S-1-HUN/2007/Hungary, complete genome.1
  source 1..555: mol_type = genomic DNA
cctcggccccctcaccctcttttccggtggccacccgcccgggccaccgttactccactccactccttcgggactggtttggaggaacataacagggcttcccatccctgtttacccttactccactcacccttccccttgaccaaccctatccacaccccactgactgactcctttggatcttgacctcggaatgcctacttgacctcccacttgcctctcccttttcggattgccggtggtgcctggcggaaaaagcacaagtgtgttgttggctaccaaactcctacccgacaaaggtgcgtgtccgcgtgctgagtaatgggataggagatgccaataacaggctcgcccatgagtagagcatggactgcggtgcatgtgacttcggtcaccaggggcatagcattgctcacccctgaatcaagtcatcgagatttctctgacctctgaagtgcactgtggttgcgtggctgggaatccacgcttgaccatgtactgcttgatagagtcgcggctggccgactcatgggttaaagtcagttgacaagacac

SEQ ID NO: 1383 - DNA, 555 bp, Porcine kobuvirus
  misc_feature 1..555: note = strain KobuV/Pig-wt/ESP/VC14/2017, complete1
  source 1..555: mol_type = genomic DNA
cctcggccctctcaccctcttttccggtggccactcgcccgggccaccgttactccactccactccttcgggactggtttggaggaacataacagggcttcccacccctgtttaccctcactccacttatccttctcctcaactaaccctatccacaccccactgattgattcctttggatttcgacctcagaatgcctacttgacctcccacttgcctctcccctctcggattgccggtggtgcctggcggaaaaagcacaagtgtgttgttggctaccaaactcctacccgacaaaggtgcgtgtccgcgtgctgagtaatgggatgggagatgccaataacaggctcgcccatgagtagagcatggactgcggtgcatgtgacttcggtcaccaggggcatagcattgctcacccctgaatcaagtcatcgagatttctctgacctctgaagtgcactgtggttgcgtggctgggaatccacgcttgaccatgtactgcttgatagagtcgcggctggccgactcatgggttaaagtcagttgacaagacac

SEQ ID NO: 1384 - DNA, 555 bp, Porcine kobuvirus
  misc_feature 1..555: note = strain KobuV/Pig-wt/ESP/C375/2017, complete1
  source 1..555: mol_type = genomic DNA
cctcggccctctcaccctcttttccggtggccactcgcccgggccaccgttactccactccactccttcgggactggtttggaggaacataacagggcttcccacccctgttcacccttactccactcacccttatccttaaccaaccctatccacaccccactgactgattcctttggattttgacctcagaatgcccacctgacctcccacttgcttctcccttctcggattgccggtggtgcctggcggaaaaagcacaagtgtgttgttggctaccaaactcctacccgacaaaggtgcgtgtccgcgtgctgagtaatgggataggagatgccaatgacaggctcgcccatgagtagagcatggactgcggtgcatgtgacttcggtcaccaggggcatagcattgctcacccctgaatcaagtcatcgagacttctctgacctctgaagtgcactgtggttgcgtggctgggaatccacgcttgaccatgtactgcttgatagagtcgcggctgaccgactcatgggttaaagtcagttgacaagacac

SEQ ID NO: 1385 - DNA, 555 bp, Porcine kobuvirus
  misc_feature 1..555: note = strain KobuV/Pig-wt/ESP/P284/2017, complete1
  source 1..555: mol_type = genomic DNA
cctcggccctctcaccctcttttccggtggccactcgcccgggccaccgttactccactccactccttcgggactggtttggaggaacataacagggcttcccatccctgtttacccttattccacttacccttctcctcaaccaaccctatccacaccccactgactgattcctttggattttgacctcagaatgcctacctgacctcccacttgcctctcccctctcggattgccggtggtgcctggcggaaaaagcacaagtgtgttgttggctaccaaactcctacccgacaaaggtgcgtgtccgcgtgctgagtaatgggataggagatgccaataacaggctcgcccatgagtagagcatggactgcggtgcatgtgacttcggtcaccaggggcatagcattgctcacccctgaatcaagtcatcgagatttctctgacctctgaagtgcactgtggttgcgtggctgggaatccacgcttgaccatgtactgcttgatagagtcgcggctggccgactcatgggttaaagtcagttgacaagacac

SEQ ID NO: 1386 - DNA, 555 bp, Porcine kobuvirus
  misc_feature 1..555: note = strain KobuV/Pig-wt/ESP/B304/2017, complete1
  source 1..555: mol_type = genomic DNA
cctcggccctctcaccctcttttccggtggccactcgcccgggccaccgttactccactccactccttcgggactggtttggaggaacataacagggcttcccatccctgtttaccctcattccacttacccttccccttaaccaaccctatccacaccccactgactgattcctttggattttgacctcagaatgcctacctgacctcccacttgcttctcccctctcggattgccggtggtgcctggcggaaaaagcacaagtgtgttgttggctaccaaactcctacccgacaaaggtgcgtgtccgcgtgctgagtaatgggataggagatgccaataacaggctcgcccatgagtagagcatggactgcggtgtatgtgacttcggtcaccaggggcatagcattgctcacccctgaatcaagtcatcgagatttctctgacctctgaagtgcactgtggttgcgtggctgggaatccacgcttgaccatgtactgcttgatagagtcgcggctggccgactcatgggttaaagtcagttgacaagacac

SEQ ID NO: 1387 - DNA, 555 bp, Porcine kobuvirus
  misc_feature 1..555: note = strain KobuV/Pig-wt/ESP/C429/2017, complete1
  source 1..555: mol_type = genomic DNA
cctcggccctctcaccctcttttccggtggccactcgcccgggccaccgttactccactccactccttcgggactggtttggaggaacataacagggcttcccacccctgttcaccctaactccacttaccctttcccttaaccaaccctatccacaccccactgattgactcccttggattttgacctcggaatgcctacttgacctcccacttgcctttcccttcccggattgccggtggtgcctggcggaaaaagcacaagtgtgttgttggctaccaaactcctacccgacaaaggtgcgtgtccgcgtgctgagtaatgggataggagatgccaatgacaggctcgcccatgagtagagcatggactgcggtgcatgtgacttcggtcaccaggggcatagcattgctcacccctgaatcaagtcatcgagatttctctgacctctgaagtgcactgtggttgcgtggctgggaatccacgcttgaccatgtactgcttgatagagtcgcggctggccgactcatgggttaaagtcagttgacaagacac

SEQ ID NO: 1388 - DNA, 555 bp, Porcine kobuvirus
  misc_feature 1..555: note = strain KobuV/Pig-wt/ESP/VT25C/2017, complete1
  source 1..555: mol_type = genomic DNA
cctcggccctctcaccctcttttccggtggccactcgcccgggccaccgttactccactccactccttcgggactggtttggaggaacacaacagggcttcccacccctgtttacccttactccactcacccttccccataaccaaccctatccacaccccactgactgactcctttggattttgacctcagaatgcctatttaacctcccacttgcctctcccctctcggattgccggtggtgcctggcggaaaaagcacaagtgtgttgttggctaccaaactcctacccgacaaaggtgcgtgtccgcgtgctgagtaatgggataggagatgccaatgacaggctcgcccatgagtagagcatggactgtggtgcatgtgacctcggtcaccaggggcatagcattgctcacccctgaatcaagtcatcgagatttctctgacctctgaagtgcactgtggttgcgtggctgggaatccacgcttgaccatgtactgcttgatagagtcgcggctggccgactcatgggttaaagtcagttgacaagacac

SEQ ID NO: 1389 - DNA, 555 bp, Porcine kobuvirus
  misc_feature 1..555: note = strain KobuV/Pig-wt/ESP/VC20B/2017, complete1
  source 1..555: mol_type = genomic DNA
cctcggccctctcaccctcttttccggtggccactcgcccgggccaccgttactccactccactccttcgggactggtttggaggaacataacagggcttcccatccctgtttaccctcattccacttacccttttccttaaccaaccctatccacaccccactgactgattcctttggattttgacctcagaacgcctacttgacctcccacttgcttctcccttcccggattgccggtggtgcctggcggaaaaagcacaagtgtgttgttggctaccaaactcctacccgacaaaggtgcgtgtccgcgtgctgagtaatgggataggagatgccaataacaggctcgcccatgagtagagcatggactgcggtgcatgtgactccggtcaccgggggcatagcattgctcacccccgaatcaagtcatcgagatttctctgacctctgaagtgcactgtggttgtgtggctgggaatccacacttgaccatgtactgcttgatagagtcgcggctggccgactcatgggttaaagtcagttgacaagacac

SEQ ID NO: 1390 - DNA, 558 bp, Porcine kobuvirus
  misc_feature 1..558: note = isolate OH/RV11/2011, complete genome.1
  source 1..558: mol_type = genomic DNA
cctcggccccctcaccctcttttccggtggccactcgcccgggccaccgttactccactccactccctcgggactggtttggaggaacataacagggcttcccatccctgtttttacccttatttccatctaccctttcccttaaccaaccctatccacaccccactgactgactcctttggattttgacctcagaatgcctacttgacctcccacttgcctctcccttatcggattgccggtggtgcctggtggaaaaagcacaagtgtgttgttggctaccaaactcctacccgacaaaggtgcgtgtccgcgtgctgagtaatgggataggagatgccaatgacaggctcgcccatgagtagagcatggactgcggtgcatgtgacttcggtcaccaggggcatagcattgctcacccctgaatcaagtcatcgagatttctctgacctctgaagtgcactgtggttgcgtggctgggaatccacgcttgaccatgtactgcttgatagagtcgcggctggccgactcatgggttaaagtcagttgacaagacac

SEQ ID NO: 1391 - DNA, 555 bp, Porcine kobuvirus
  misc_feature 1..555: note = isolate JXAT2015, complete genome.1
  source 1..555: mol_type = genomic DNA
cctcggccccctcaccctcttttccggtggccactcgcccgggccaccgttacttcactccactccttcgggactggtttggaggaacataacagggcttcccatccctgtttacccttatttccacttaactttttcccaatctactctaaccacaccccactgactgactcctttggattttgacctcagaatgcctacctggcctcccactcgcctcatccttttcggattgccggtggtgcctggcggaaaaagcacaagtgtgttgcaggctaccaaactcctacccgacaaaggtgcgtgtccgcgtgctgagtaatgggataggagatgcctacaacaggctcgcccatgagtagagcatggactgcggtgcatgtgacttcggtcaccacgggcatagcattgctcacccgtgaatcaagtcatcgagatttctctgacctctgaagtgcactgtggttgcgtggctgggaatccacgcttgaccatgtactgcttgatagagtcgcggctggccgactcatgggttaaagtcagttgacaagacac

SEQ ID NO: 1392 - DNA, 555 bp, Porcine kobuvirus
  misc_feature 1..555: note = JS-01-CHN/2013/China, complete genome.1
  source 1..555: mol_type = genomic DNA
cctcggccccctcaccctcttttccggtggccactcgcccgggccaccgttacttcactccactccttcgggactggtttggaggaacacaacagggcttcccaacccctgttacccttactctaattcccttttccctcaaccaaccctttccactccccactgactgactcccttggattttgacctcagaatgcctacttgacctcccacttgcctttcccttctcggattgccggtggtgcctggcggaaaaagcacaagtgtgttgcaggctaccaaactcctacccgacaaaggtgcgtgtccgcgtgctgagtaatgggataggagatgcctacaacaggctcgcccatgagtagagcatggactgcggtgcatgtgacttcggtcaccacgggcatagcattgctcacccgtgaatcaagtcatcgagatttctctgacctctgaagtgcactgtggttgcgtggctgggaatccacgcttgaccatgtactgcttgatagagtcgcggctggccgactcatgggttaaagtcagttgacaagacac

SEQ ID NO: 1393 - DNA, 555 bp, Porcine kobuvirus
  misc_feature 1..555: note = SH-W-CHN/2010/China, complete genome.1
  source 1..555: mol_type = genomic DNA
cctcggccccctcaccctcttttccggtggccactcgcccgggccaccgttacttcactccactccttcgggactggtttggaggaacataacagggcttcccatccctgtttaccctcattccactcaccccttccctaaaccaaccctatccacaccccactgactgactcctttggattttgacctcagaatgcctacctgacctcccacttgcctctcccttctcggattgccggtggtgcctggcggaaaaagcacaagtgtgttgcaggctaccaaactcctacccgacaaaggtgcgtgtccgcgtgctgagtaatgggataggagatgtctacaacaggctcgcccatgagtagagcatggactgcggtgcatgtgacttcggtcaccacgggcatagcattgctcacccgtgaatcaagtcatcgagatttctctgacctctgaagtgcactgtggttgcgtggctgggaatccacgcttgaccatgtactgcttgatagagtcgcggctggccgactcatgggttaaagtcagttgacaagacac

SEQ ID NO: 1394 - DNA, 555 bp, Porcine kobuvirus
  misc_feature 1..555: note = isolate EdoMex/2018/205, complete genome.1
  source 1..555: mol_type = genomic DNA
cttcggccctctcaccctcttttccggtggccactcgcccgggccaccgttactccactccactccttcgggactggtttggaggaacataacagggcttcccatccctgtttaccctcattccactcaccccttcccttgaccaaccccatccacaccccactgactgattcctttggattttgacctcagaatgcctacctgacctcccactcgcctctccctcttcggattgccggtggtgcctggcggaaaaagcacaagtgtgttgctggctaccaaactcctacccgacaaaggtgcgtgtccgcgtgctgagtaatgggataggagatgctaacaacaggctcgcccatgagtagagcatggactgcggtgcatgtgacttcggtcaccacgggcatagcattgctcacccgtgaatcaagtcatcgagatttctctgacctctgaagtgcactgtggttgcgtggctgggaatccacgcttgaccatgtactgcttgatagagtcgcggctggccgactcatgggttaaagtcagttgacaagacac

SEQ ID NO: 1395 - DNA, 555 bp, Porcine kobuvirus
  misc_feature 1..555: note = strain KobuV/Pig-wt/ESP/VC8/2017, complete1
  source 1..555: mol_type = genomic DNA
cctcggccccctcaccctcttttccggtggccacacgcccgggccaccgttactccactccactccctcgggactggtttggaggaacacaacagggcttcccatccctgtttaccctcactccacccatccttctccttaaccaaccctatccacaccccactgactgactccattggattttgacctcagaatgcctacctgacctcccacttgcctctcccttctcggattgccggtggtgcctggcggaaaaagcacaagtgtgttgttggctaccaaactcctacccgacaaaggtgcgtgtccgcgtgctgagtaatgggataggagatgccaatgacaggctcgcccatgagtagagcatggactgcggtgcatgtgactttggtcaccaggggcatagcattgctcacccctgaatcaagtcatcgagatttctctgacctctgaagtgcgctgtggttgcgtggctgggaatccacgcttgaccatgtactgcttgatagagtcgcggctggccgactcatgggttaaagtcagttgacaagacac

SEQ ID NO: 1396 - DNA, 555 bp, Porcine kobuvirus
  misc_feature 1..555: note = strain KobuV/Pig-wt/ESP/P452/2017, complete1
  source 1..555: mol_type = genomic DNA
cctcggccccctcaccctcttttccggtggccacacgcccgggccaccgttactccactccactccctcgggactggtttggaggaacacaacagggcttcccatccctgtttaccctcactccacttacccttctccttaaccaaccctatccacacctcactgactgattcctttggattttgacctcagaatgcctacttgacctcccacttgcctttcccttctcggattgccggtggtgcctggcggaaaaagcacaagtgtgttgttggctactaaactcctacccgacaaaggtgcgtgtccgcgcgctgagtaatgggataggagatgccaataacaggctcgcccatgagtagagcatggactgcggtgcatgtgacttcggtcaccaggggcatagcattgctcacccctgaatcaagtcatcgagacttctctgacctctgaagtgcactgtggttgcgtggctgggaatccacgcttgaccatgtactgcttgatagagtcgcggctggccgactcatgggttaaagtcagttgacaagacac

SEQ ID NO: 1397 - DNA, 556 bp, Porcine kobuvirus
  misc_feature 1..556: note = strain KobuV/Pig-wt/ESP/P259/2017, complete1
  source 1..556: mol_type = genomic DNA
ccctcggccccctcaccctcttttccggtgcccacccgcccgggccaccgttactccactccactccttcgggactggtttggaggaacataacagggcttcccacccctgtttacccttattccactcacccttctccttaatcaaccctatccacaccccattgactgactcctttggattttgacctcagaatgcctacctgacctcccacttgcctctcccttctcggactgccggtggtgcctggcggaaaaagcacaagtgtgttgatggctaccaaactcttacccgacaaaggtgcgtgtccgcgtgctgagtaatgggataagagatgccattgacaggctcgcccatgagtagagcatggactgcggtgcatgtgacttcggtcaccaggggcatagcattgctcacccctgaatcaagtcatcgagatttctctgacctctgaagtgcactgtggttgcgtggctgggaatccacgcttgaccatgtactgcttgatagagtcgcggctggccgactcatgggttaaagtcagttgacaagacac

SEQ ID NO: 1398 - DNA, 555 bp, Porcine kobuvirus
  misc_feature 1..555: note = strain KobuV/Pig-wt/ESP/P437/2017, complete1
  source 1..555: mol_type = genomic DNA
cctcggccctctcaccctcttttccggtggccacccgcccgggccaccgttactccactccactccttcgggactggtttggaggaacataacagggcttcccacccctgtttacccttattccactcacccttccccttaatcaaccctatccacaccccactgactgactcctttggtttttgacctcagaatgcctacctgacctcccacttacctctcccttttcggattgccggtggtgcctggtggaaaaagcacaagtgtgttgttggctactaaactcctacccgacaaaggtgcgtgtccgcgtgctgagtaatgggataggagatgccaataacaggctcgcccatgagtagagcatggactgcggtgcgtgtgacttcggtcaccaggggcatagcattgctcacccctgaatcaagtcatcgagatttctctgacctctgaagtgcactgtggttgcgtggctgggaatccacgcttgaccatgtactgcttgatagagtcgcggctggccgactcatgggttaaagtcagttgacaagacac

SEQ ID NO: 1399 - DNA, 555 bp, Porcine kobuvirus
  misc_feature 1..555: note = strain KobuV/Pig-wt/ESP/P37/2017, complete1
  source 1..555: mol_type = genomic DNA
cctcggccctctcaccctcttttccggtggccacccgcccgggccaccgttactccactccactccttcgggactggtttggaggaacacaacagggcttcccacccctgtttacctttactccacttacctttctcctaaaccaatcctatccacaccccactgactgattcctttggattttgacctcagaatgcctacatgacctcccactcgtctctcccttcccggattgccggtggtgcctggcggaaaaagcacaagtgtgttgatggctaccaaactcctacccgacaaaggtgcgtgtccgcgtgctgagtaatgggataggagatgccattgacaggctcgcccatgagtagagcatggactgcggtgcatgtgacttcagtcaccaggggcatagcattgctcacccctgaatcaagtcatcgagatttctctgacctctgaagtgcactgtggttgcgtggctgggaatccacgcttgaccatgtactgcttgatagagtcgcggctggccgactcatgggttaaagtcagttgataagacac

SEQ ID NO: 1400 - DNA, 555 bp, Porcine kobuvirus
  misc_feature 1..555: note = strain KobuV/Pig-wt/ESP/P393/2017, complete1
  source 1..555: mol_type = genomic DNA
cctcggccctctcaccctcttttccggtggccattcgcccgggccaccgttactccactccactccctcgggactggtttggaggaacacaacagggcttcccacccctgtttacccttactccacttaccaccccccttaaccaatcctatccacaccccactgactgattcctttggattttgatctcagaatgcctacttgacctcccacttgcctctcccttctcggattgccggtggtgcctggcggaaaaagcacaagtgtgttgttggctaccaaactcctacccgacaaaggtgcgtgtccgcgtgctgagtaatgggataggagatgccaatgacaggctcgcccatgagtagagcatggactgcggtgcatgtgacttcggtcaccaggggcatagcattgctcacccctgaatcaagtcatcgagatttctctgacctctgaagtgcactgtggttgcgtggctgggaatccacgcttgaccatgtactgcttgatagagtcgcggctggccgactcatgggttaaagtcagttgacaagacac

SEQ ID NO: 1401 - DNA, 555 bp, Porcine kobuvirus
  misc_feature 1..555: note = strain KobuV/Pig-wt/ESP/C247/2017, complete1
  source 1..555: mol_type = genomic DNA
cctcggccccctcaccctcttttccggtggccacacgcccgggccaccgttactccactccactccctcgggactggtttggaggaacacaacagggcttcccatccctgtttaccctaacttcactcacccttatccttaaccaaccctatccacaccccactgactgattcctttggattttgacctcagaatgcctacctgacctcccacttgcctctcccttttcggattgccggtggtgcctggcggaaaaagcacaagtgtgttgatggctaccaaactcctacccgacaaaggtgcgtgtccgcgtgctgagtaatgggataggagatgccattgacaggctcgcccatgagtagagcatggactgcggtgcatgtgacttcggtcaccaggggcatagcattgctcacccctgaatcaagtcatcgagatttctctgacctctgaagtgcactgtggttgcgtggctgggaatccacgcttgaccatgtactgcttgatagagtcgcggctggccgactcatgggttaaagtcagttgataagacac

SEQ ID NO: 1402 - DNA, 558 bp, Porcine kobuvirus
  misc_feature 1..558: note = gene for polyprotein, complete cds,strain:1
  source 1..558: mol_type = genomic DNA
ggcttcggccctctcaccctcttttccggtggccactcgcccgggccaccgttactccactccactccttcgggactggtttggaggaacataacagggcttcccacccctgtttacccttaactccaccaaccctttccttgaattaaccctatccacaccccactgactgactcccttggattttgacctcagaatgcctacctgacctcccacttgcctctccctcctcggattgccggtggtgcctggcggaaaaagcacaagtgtgttgttggctaccaaactcctacccgacaaaggtgcgtgtccgcgtgctgagtaatgggataggagatgccaatgacaggctcgcccatgagtagagcatggactgcggtgcatgtgacttcggtcaccaggggcatagcattgctcacccctgaatcaagtcatcgagatttctctgacctctgaagtgcactgtggttgcgtggctgggaatccacgcttgaccatgtactgcttgatagagtcgcggctggccgactcatgggttaaagtcagttgacaagacac

SEQ ID NO: 1403 - DNA, 556 bp, Porcine kobuvirus
  misc_feature 1..556: note = gene for polyprotein, complete cds,strain:1
  source 1..556: mol_type = genomic DNA
cttcggccctctcaccctcttttccggtggccactcgcccgggccaccgttactccactccactccttcgggactggtttggaggaacataacagggcttcccatccctgtttacccttattccactcacccttcccctacaaccaaccctatccacaccccactgactgattcctttggattttgacctcagaatgcctacctgacctcccacttgcctctcccttctcggattgccggtggtgcctggcggaaaaagcacaagtgtgttgttggctaccaaactcctacccgacaaaggtgcgtgtccgcgtgctgagtaatgggataggagatgccaatgacaggctcgcccatgagtagagcatggactgcggtgcatgtgacctcggtcaccaggggcatagcattgctcacccctgaatcaagtcatcgagatttctctgacctctgaagtgcactgtggttgcgtggctgggaatccacgcttgaccatgtactgcttgatagagtcgcggctggccgactcatgggttaaagtcagttgacaagacac

SEQ ID NO: 1404 - DNA, 556 bp, Porcine kobuvirus
  misc_feature 1..556: note = isolate swKoV CH441, complete genome.1
  source 1..556: mol_type = genomic DNA
cctcggccccctcaccctcttttccggtggccacccgcccgggccaccgttacttcactccactccttcgggactggtttggaggaacataacagggcttcccaatcccctgttatccttattccaattaccctttcccttaaccaaccctatccacaccccactgactgactcctttggattttgacctcagaatgcctacctgacctcccacttgcctctcccctctcggattgccggtggtgcctggcggaaaaagcacaagtgtgttgcaggctaccaaactcctacccgacaaaggtgcgtgtccgcgtgctgagtaatgggataggagatgcctacaacaggctcgcccatgagtagagcatggactgcggtgcatgtgacttcggtcaccacgggcatagcattgctcacccgtgaatcaagtcatcgagatttctctgacctctgaagtgcactgtggttgcgtggctgggaatccacgcttgaccatgtactgcttgatagagtcgcggctggccgactcatgggttaaagtcagttgacaagacac

SEQ ID NO: 1405 - DNA, 555 bp, Porcine kobuvirus
  misc_feature 1..555: note = isolate JXJC2015, complete genome.1
  source 1..555: mol_type = genomic DNA
cctcggccccctcaccctcttttccggcggccactcgcccgggccaccgttacttcactccactccttcgggactggtttggaggaacataacagggcttcccatccctgtttacccttcactccaattacccttcccccaatcaaccctatccacaccccattgactgattcctttggattttgacctcagaatgcctacttgacctcccacttgccttccccttctcggactgccggtggtgcctggcggaaaaagcacaagtgtgttgcaggctaccaaactcctacccgacaaaggtgcgtgtccgcgtgctgagtaatgggataggagatgcctacaacaggctcgcccatgagtagagcatggactgcggtgcatgtgacttcggtcaccacgggcatagcattgctcacccgtgaatcaagtcatcgagatttctctgacctctgaagtgcactgtggttgcgtggctgggaatccacgcttgaccatgtactgcttgatagagtcgcggctggccgactcatgggttaaagtcagttgacaagacac

SEQ ID NO: 1406 - DNA, 661 bp, Caprine kobuvirus
  misc_feature 1..661: note = isolate 12Q108, complete genome.1
  source 1..661: mol_type = genomic DNA
cctcggccccctcaccctcttttccggtggccacgcccgggccaccgatacttcccttcactccttcgggactgttggggaggaacacaacagggctcccctgttttcccattccttcccccttttcccaaccccaaccgccgtatctggtggcggcaagacacacgggtctttccctctaaagcacaattgtgtgtgtgtcccaggtcctcctgcgtacggtgcgggagtgctcccacccaactgttgtaagcctgtccaacgcgtcgtcctggcaagactatgacgtcgcatgttccgctgcggatgccgaccgggtaaccggttccccagtgtgtgtagtgcgatcttccaggtcctcctggttggcgttgtccagaaactgcttcaggtaagtggggtgtgcccaatccctacaaaggttgattctttcaccaccttaggaatgctccggaggtaccccagcaacagctgggatctgaccggaggctaattgtctacgggtggtgtttcctttttcttttcacacaactctactgctgacaactcactgactatccacttgctctcttgtgcctttctgctctggttcaagttccttgattgtttttgactgcttttcactgcttttcttctcacaatccttgctcagttcaaagtc

SEQ ID NO: 1407 - DNA, 556 bp, Porcine kobuvirus
  misc_feature 1..556: note = gene for polyprotein, complete cds,strain:1
  source 1..556: mol_type = genomic DNA
cttcggccctctcaccctcttttccggtggccattcgcccgggccaccgttactccactccactccctcgggactggtttggaggaacacaacagggcttcccatccctgtttacccttaactccactcaccctttcctacaccaaccctatccacaccctactgattgattcctttggattttgacctcagaatgcctacccgacctcccactcgttttcctccttctcggattgccggtggtgcctggcggaaaaagcacaagtgtgttgttggctaccaaactcctacccgacaaaggtgcgtgtccgcgtgctgagtaatgggataggagatgccaataacaggctcgcccatgagtagagcatggactgcggtgcatgtgacttcggtcaccaggggcatagcattgctcacccctgaatcaagtcatcgagatttctctgacctctgaagtgcactgtggttgcgtggctgggaatccacgcttgaccatgtactgcttgatagagtcgcggctggccgactcatgggttaaagtcagttgacaagacac

SEQ ID NO: 1408 - DNA, 554 bp, Porcine kobuvirus
  misc_feature 1..554: note = gene for polyprotein, complete cds,strain:1
  source 1..554: mol_type = genomic DNA
cttcggccctctcaccctcttttccggtggccacccgcccgggccaccgttactccactccactccttcgggactggtttggaggaacacaacagggcttcccacccctgtttaccccgatttcatctacccttctcccgaactgaccctatccacaccccactgactaactcctttggattagacctcggaatgcctacttgacctcccacttgcctctccctttctggattgccggtggtgcctggcggaaaaagcacaagtgtgttgcaggctaccaaactcctacccgacaaaggtgcgtgtccgcgtgctgagtaatgggataggagatgcctacaacaggctcgcccatgagtagagcatggactgcggtgcatgcgacttcggtcgccacgggcatagcattgctcacccgtgaatcaagtcatcgagatttctctgacctctgaagtgcactgtggttgcgtggctgggaatccacgcttgaccatgtactgcttgatagagtcgcggctggccgactcatgggttaaagtcagttgacaagacac

SEQ ID NO: 1409 - DNA, 556 bp, Porcine kobuvirus
  misc_feature 1..556: note = gene for polyprotein, complete cds,strain:1
  source 1..556: mol_type = genomic DNA
cttcggccctctcaccctcttttccggtggccacccgcccgggccaccgttactccactccactccttcgggactggtttggaggaacataacagggcttcccaatccctgttaccctttactccatttccccatcccccaaacttaccctatccacaccccactgactgattcctttggattttgacctcagaatgcctacttgacctcccactcgcctctccctctccggactgccggtggtgcctggcggaaaaagcacaagtgtgttgcaggctactaaactcctacccgacaaaggtgcgtgtccgcgtgctgagtaatgggataggagatgcctacaacaggctcgcccatgagtagagcatggactgcggtgcatgtgacttcggtcaccacgggcatagcattgctcacccgtgaatcaagtcatcgagaattctctgacctctgaagtgcactgtggttgcgtggctgggaatccacgcttgaccatgtactgcttgatagagtcgcggctggccgactcatgggttaaagtcagttgacaagacac

SEQ ID NO: 1410 - DNA, 557 bp, Porcine kobuvirus
  misc_feature 1..557: note = gene for polyprotein, complete cds,strain:1
  source 1..557: mol_type = genomic DNA
cttcggccctctcaccctcttttccggtggccactcgcccgggccaccgttactccactccactccctcgggactggtttggaggaacataacagggcttcctacccctgttcttccctcaattccactcacccttcccctcaaccacccctatccacaccccactgactgattcctttggattttgacctcagaatgcctacttgacctcccacttgcctctcccttttcggactgccggtggtgcctggtggaaaaagcacaagtgtgttgttggctaccaaactcctacccgacaaaggtgcgtgtccgcgtgctgagtaatgggataggagatgcctacaacaggctcgcccatgagtagagcatggactgcggtgcatgtgacttcggtcaccacgggcatagcattgctcacccgtgaatcaagtcatcgagatttctctgacctctgaagtgcactgtggttgcgtggctgggaatccacgcttgaccatgtactgcttgatagagtcgcggctggccgactcatgggttaaagtcagttgataagacac

SEQ ID NO: 1411 - DNA, 556 bp, Porcine kobuvirus
  misc_feature 1..556: note = gene for polyprotein, complete cds,strain:1
  source 1..556: mol_type = genomic DNA
cttcggccctctcaccctcttttccggtggccactcgcccgggccaccgttactccactccactccctcgggactggtttggaggaacataacagggcttcccatccctgtttacccttaattctgcttaccctctccttttaccaaccctgtccacaccccactgactgattcctttggattttgacctcagaatacctacctgacctcccacttgcctctcccttctcggattgccggtggtgcctggcggaaaaagcacaagtgtgttgttggctaccaaactcttacccgacaaaggtgcgtgtccgcgtgctgagtaatgggataggagatgccaatgacaggctcgcccatgagtagagcatggactgcggtgcatgtgacttcggtcaccaggggcatagcgttgctcacccctgaatcaagtcatcgagatttctctgacctctgaagtgcactgtggttgcgtggttgggaatccacgcttgaccatgtactgcttgatagagtcgcggctggccgactcatgggttaaagtcagttgacaagacac

SEQ ID NO: 1412 - DNA, 556 bp, Porcine kobuvirus
  misc_feature 1..556: note = gene for polyprotein, complete cds,strain:1
  source 1..556: mol_type = genomic DNA
cttcggccctctcaccctcttttccggtggccactcgcccgggccaccgttactccactccactccctcgggactggtttggaggaacataacagggcttcccatccctgtttacccttaattccacttaccctctccttttaccaaccctatccatacctcactgactgattcctttggattttgacctcagaatgcctacctgacctcccacttgcctctcccttctcggattgccggtggtgcctggcggaaaaagcacaagtgtgttgttggctaccaaactcctacccgacaaaggtgcgtgtccgcgtgctgagtaatgggataggagatgcctacaacaggctcgcccatgagtagagcatggactgcggtgcatgtgacttcggtcaccacgggcatagcattgctcacccgtgaatcaagtcatcgagatttctctgacctctgaagtgcactgtggttgcgtggctgggaatccacgcttgaccatgtactgcttgatagagtcgcggctggccgactcatgggttaaagtcagttgacaagacac

SEQ ID NO: 1413 - DNA, 556 bp, Porcine kobuvirus
  misc_feature 1..556: note = gene for polyprotein, complete cds,strain:1
  source 1..556: mol_type = genomic DNA
cttcggccctctcaccctcttttccggtggctactcgcccgggccaccgttactccactccactccctcgggactggtttggaggaacataacagggcttcccatccctgtttacccttaattctgcttaccctctccttttaccaaccctgtccacaccccactgactgattcctttggattttgacctcagaatacctacctgacctcccacttgcctctcccttctcggattgccggtggtgcctggcggaaaaagcacaagtgtgttgttggctaccaaactcttacccgacaaaggtgcgtgtccgcgtgctgagtaatgggataggagatgccaatgacaggctcgcccatgagtagagcatggactgcggtgcatgtgacttcggtcaccaggggcatagcgttgctcacccctgaatcaagtcatcgagatttctctgacctctgaagtgcactgtggttgcgtggttgggaatccacgcttgaccatgtactgcttgatagagtcgcggctggccgactcatgggttaaagtcagttgacaagacac

SEQ ID NO: 1414 - DNA, 556 bp, Porcine kobuvirus
  misc_feature 1..556: note = gene for polyprotein, complete cds,strain:1
  source 1..556: mol_type = genomic DNA
cttcggccctctcaccctcttttccggtggccactcgcccgggccaccgttactccactccactccctcgggactggtttggaggaacataacagggcttcccatccctgtttacccttggttccactcaccctttcccctcaccaaccttatccacaccccactgactgactcctttggattttgacctcagaatgcctacttgacctcccactcgcctctcccttctcggactgccggtggtgcctggcggaaaaagcacaagtgtgttgttggctaccaaactcctacccgacaaaggtgcgtgtccgcgtgccgagtaatgggataggagatgccaataacaggctcgcccatgagtagagcatggactgcggtgcatgtgacttcggtcaccagggacatagcattgctcacccctgaatcaagtcatcgagaattctctgacctctgaagtgcactgtggttgcgtggctgggaatccacgcttgaccatgtactgcttgatagagtcgcggctggccgactcatgggttaaagtcagttgacaagacac

SEQ ID NO: 1415 - DNA, 558 bp, Porcine kobuvirus
  misc_feature 1..558: note = gene for polyprotein, complete cds,strain:1
  source 1..558: mol_type = genomic DNA
cttcggccctctcaccctcttttccggtggccactcgcccgggccaccgttactccactccactccctcgggactggtttggaggaacacaacagggcttcccacccctgttctttccttaattccactcaccctttccctttaccaaccctatccacaccccactgactgattcctttggattttgacctcagaatacccatttgacctcccacttgcctctccctttttcggattgccggtggtgcctggcggaaaaagcacaagtgtgttgttggctaccaaactcctacccgacaaaggtgcgtgtccgcgtgccgagtaatgggataggagatgcctacaacaggctcgcccatgagtagagcatggactgcggtgcatgtgacttcggtcaccacgggcatagcattgctcacccgtgaatcaagtcatcgagatttctctgacctctgaagtgcactgtggttgcgtggctgggaatccacgcttgaccatgtactgcttgatagagtcgcggctggccgactcatgggttaaagtcagttgataagacac

SEQ ID NO: 1416 - DNA, 555 bp, Porcine kobuvirus
  misc_feature 1..555: note = isolate OH/RV50/2011, complete genome.1
  source 1..555: mol_type = genomic DNA
cctcggccccctcaccctcttttccggtggccacccgcccgggccaccgttacttcactccactccctcgggactggtttggaggaacataacagggcttcccatccctgtttacccttatttccaattaccctttcctaaaccaaccctatccacaccccactgactgactcctttggattttgacttcagaatgcctacctgacctcccacttgcctctcccttctcggactgccggtggtgcctggcggaaaaagcacaagtgtgttgttggctaccaaactcctacccgacaaaggtgcgtgtccgcgtgctgagtaatgggataggagataccaataacaggctcgcccatgagtagagcatggactgcggcgcatgtgacctcggtcaccaggggcatagcattgctcacccctgaatcaagtcatcgagacttctctgacctctgaagtgcgctgtggttgcgtggctgggaatccacgcttgaccatgtactgcttgatagagtcgcggctggccgactcatgggttaaagtcagttgacaagacac

SEQ ID NO: 1417 - DNA, 557 bp, Porcine kobuvirus
  misc_feature 1..557: note = gene for polyprotein, complete cds,strain:1
  source 1..557: mol_type = genomic DNA
cttacggccctctcaccctcttttccggtggccattcgcccgggccaccgttactccactccactccctcgggactggtttggaggaacacaacagggcttcccatccctgtttatcctaattctacttaccttttcccttttaccgaccctatccacaccccactgactgattcctttggattttgacctcggaatgcctactagatctcccacttgcctctcccttcccggattgccggtggtgcctggcggaaaaagcacaagtgtgttgcaggctaccaaactcctacccgacaaaggtgcgtgtccgcgtgctgagtaatgggataggagatgcctacaacaggctcgcccatgagtagagcatggactgcggtgcatgtgacttcggtcaccacgggcatagcattgctcacccgtgaatcaagtcatcgagatttctctgacctctgaagtgcactgtggttgcgtggctgggaatccacgcttgaccatgtactgcttgatagagtcgcggctggccgactcatgggttaaagtcagttgacaagacac

SEQ ID NO: 1418 - DNA, 555 bp, Kobuvirus pig/JY-2010a/CHN
  misc_feature 1..555: note = isolate Y-1-CHI, complete genome.1
  source 1..555: mol_type = genomic DNA
cctcggccccctcaccctcttttccggcggccactcgcccgggccaccgttacttcactccactccctcgggactggtttggaggaacataacagggcttcccatccctgtttacccttactctgacaacccttccccttaatcaaccctatccacaccccactgactgactcctttggattttgacctcagaatgcctacttgacctcccacttgcctctccctcctcggattgccggtggtgcctggcggaaaaagcacaagtgtgttgcaggctaccaaactcctacccgacaaaggtgcgtgtccgcgtgctgagtaatgggataggagatgcctacaacaggctcgcccatgggtagagcatggactgcggtgcatgtgacttcggtcaccacgggcatagcattgctcacccgtgaatcaagtcatcgagatttctctgacctctgaagtgcactgtggttgcgtggctgggaatccacgcttgaccatgtactgcttgatagagtcgcggctggccgactcatgggttaaagtcagttgacaagacac

SEQ ID NO: 1419 - DNA, 420 bp, Bovine kobuvirus; identical to SEQ ID NO: 460
  misc_feature 1..420: note = polyprotein gene, complete cds.1
  source 1..420: mol_type = genomic DNA

SEQ ID NO: 1420 - DNA, 555 bp, Porcine kobuvirus
  misc_feature 1..555: note = strain KobuV/Pig-wt/ESP/P461/2017, complete1
  source 1..555: mol_type = genomic DNA
cttcggccctctcaccctcttttccggtggccacccgcccgggccaccgttactccactccactccctcgggactggtttggaggaacacaacagggcttctcatccctgtttacccttattccacttacccttctccccgaactacccaacccactccccactgattgactcccttggattaagacctcggaatgtcttcctgaccttcttcttggttttcccttttcggattgccggtggtgcctggtggaaaaagcacaagtgtgttgttggctaccaaactcctacccgacaaaggtgcgtgtccgcgtgctgagtaatgggataggagatgccaataacaggctcgcccatgagtagagcatggactgcggtgcatgtgacttcggtcaccaggggcatagcattgctcacccctgaatcaagtcatcgagatttctctgacctctgaagtgcactgtggttgcgtggctgggaatccacgcttgaccatgtactgcttgatagagtcgcggctggccgactcatgggttaaagtcagttgacaagacac

SEQ ID NO: 1421 - DNA, 557 bp, Porcine kobuvirus
  misc_feature 1..557: note = gene for polyprotein, complete cds,strain:1
  source 1..557: mol_type = genomic DNA
cttcggccctctcaccctcttttccggtggccacacgcccgggccaccgttactccactccactccctcgggactggtttggaggaacacaacagggcttcccatccctgttcctccctcaactccacttaccctttccccttaccaaccttatccacaccctattgactgattcctttggattttgacctcagaatgcctatctgacctcccacctgcctcccccttctcggattgccggtggtgcctggcggaaaaagcacaagtgtgttgttggctaccaaactcctacccgacaaaggtgcgtgtccgcgtgctgagtaatgggataggagatgccaataacaggctcgcccatgagtagagcatggactgcggtgcatgtgacttcagtcaccaggggcatagcattgctcacccctgaatcaagtcatcgagatttctctgacctctgaagtgcactgtggttgcgtggctgggaatccacgcttgaccatgtactgcttgatagagtcgcggctggccgactcatgggttaaagtcagttgacaagacac

SEQ ID NO: 1422 - DNA, 557 bp, Porcine kobuvirus
  misc_feature 1..557: note = gene for polyprotein, complete cds,strain:1
  source 1..557: mol_type = genomic DNA
cttcggccctctcaccctcttttccggtggccacacgcccgggccaccgttactccactccactccctcgggactggtttggaggaacacaacagggcttcccatccctgttcctccctcaactccacttaccctttccccttaccaacctcatccacacctcattgactgattcctttggattttgacttcagaatgcctatctgacctcccacttgcctcccccttctcggattgccggtggtgcctggcggaaaaagcacaagtgtgttgttggctaccaaactcctacccgacaaaggtgcgtgtccgcgtgctgagtaatgggataggagatgccaataacaggctcgcccatgagtagagcatggactgcggtgcatgtgacttcagtcaccaggggcatagcattgctcacccctgaatcaagtcatcgagatttctctgacctctgaagtgcactgtggttgcgtggctgggaatccacgcttgaccatgtactgcttgatagagtcgcggctggccgactcatgggttaaagtcagttgacaagacac

SEQ ID NO: 1423 - DNA, 556 bp, Porcine kobuvirus
  misc_feature 1..556: note = gene for polyprotein, complete cds,strain:1
  source 1..556: mol_type = genomic DNA
ttcggccctctcaccctcttttccggtggccacacgcccgggccaccgttactccactccactccctcgggactggtttggaggaacacaacagggcttcccatccctgttcctccctcaactccacttaccctttccccttaccaacctcatccacacctcattgactgattcctttggattttgacttcagaatgcctatctgacctcccacttgcctcccccttctcggattgccggtggtgcctggcggaaaaagcacaagtgtgttgttggctaccaaactcctacccgacaaaggtgcgtgtccgcgtgctgagtaatgggataggagatgccaataacaggctcgcccatgagtagagcatggactgcggtgcatgtgacttcagtcaccaggggcatagcattgctcacccctgaatcaagtcatcgagatttctctgacctctgaagtgcactgtggttgcgtggctgggaatccacgcttgaccatgtactgcttgatagagtcgcggctggccgactcatgggttaaagtcagttgacaagacac

SEQ ID NO: 1424 - DNA, 557 bp, Porcine kobuvirus
  misc_feature 1..557: note = strain CH/KB-1/2014, complete genome.1
  source 1..557: mol_type = genomic DNA
cttcggccctctcaccctcttttccggtggccacccgcccgggccaccgttacttcactccactccttcgggactggtttggaggaacataacagggcttcccaatcccctgttatcctttatcccaaacaccttttcccttaaccaaccctatccacaccccactgactgattcctttggattttgacctcagaatgcctacctgacctcccactcgcctctcccttctcggattgccggtggtgcctggcggaaaaagcacaagtgtgttgcaggctaccaaactcctacccgacaaaggtgcgtgtccgcgtgctgagtaatgggataggagatgcctacaacaggctcgcccatgagtagagcatggactgcggtgcatgtgacttcggtcaccacgggcatagcattgctcacccgtgaatcaagtcatcgagatttctctgacctctgaagtgcactgtggttgcgtggctgggaatccacgcttgaccatgtactgcttgatagagtcgcggctggccgactcatgggttaaagtcagttgacaagacac

SEQ ID NO: 1425 - DNA, 557 bp, Porcine kobuvirus
  misc_feature 1..557: note = genomic RNA, complete genome,strain:1
  source 1..557: mol_type = genomic DNA
cttcggccctctcaccctcttttccggtggccactcgcccgggccaccgttactccactccactccctcgggactggtctggaggaacacaacagggcttcccatccctgtttaccctcattccaatttacccttcccttacaaccaaccctatccacaccccactgaatgattcctttggattttgacctcagaatgcctacctgaccccccacttgcttctccctcctcggattgccggtggtgcctggcggaaaaagcacaagtgtgttgttggctaccaaactcctacccgacaaaggtgcgtgtccgcgtgctgagtaatgggataggagatgccaataacaggctcgcccatgagtagagcatggactgcggtgcatgtgacttcggtcaccagggacatagcattgctcacccctgaatcaagttattgagatttctctgacctctgaagtgcactgtggttgcgtggccgggaatccacgcttgaccatgtactgcttgatagagtcgcggctggccgactcatgggttaaagtcagttgacaagacac

SEQ ID NO: 1426 - DNA, 559 bp, Porcine kobuvirus
  misc_feature 1..559: note = isolate JS-02a-CHN/2014/China, complete genome.1
  source 1..559: mol_type = genomic DNA
cggcctcggcccactcaccctctttaccggtggccacccgcccgggccaccgttacttcactccactccttcgggactggtttggaggaacataacagggcttcccatccctgttcaccccttattccaattaccctcacccttgattaaccctacccacaccccactgactgattcctttggattttgacctcagaatgcctacttgacctcctacttgcttctcccttctcggattgccggtggtgcctggcggaaaaagcacaagtgtgttgcaggctaccaaactcctacccgacaaaggtgcgtgtccgcgtgctgagtaatgggataggagatgcctacaacaggctcgcccatgagtagagcatggactgcggtgcatgtgacttcggtcaccacgggcatagcattgctcacccgtgaatcaagtcatcgagatttctctgacctctgaagtgcactgtggttgcgtggctgggaatccacgcttgaccatgtactgcttgatagagtcgcggctggccgactcatgggttaaagtcagttgacaagacac

SEQ ID NO: 1427 - DNA, 556 bp, Porcine kobuvirus
  misc_feature 1..556: note = isolate CH/DX/2012, complete genome.1
  source 1..556: mol_type = genomic DNA
cttcggccctctcaccctcttttccggtggccactcgcccgggccaccgttacttcactccactccctcgggactggtttggaggaacataacagggcttcccacccctgtttacccttaattccacttacccttccccttaaccaaccctatccacaccccactgactgattcctttggattttgacctcagaatgcctacttgacctcccacttgcctctcccttctcggattgccggtggtgcctggcggaaaaagcacaagtgtgttgcaggctaccaaactcctacccgacaaaggtgcgtgtccgcgtgctgagtaatgggataggagatgcctacaacaggctcgcccatgagtagagcatggactgcggtgcatgtgacttcggtcaccacgggcatagcattgctcacccgtgaatcaagtcatcgagatttctctgacctctgaagtgcactgtggttgcgtggctgggaatccacgcttgaccatgtactgcttgatagagtcgcggctggccgactcatgggttaaagtcagttgacaagacac

SEQ ID NO: 1428 - DNA, 556 bp, Porcine kobuvirus
  misc_feature 1..556: note = isolate CH/HZ/2011 polyprotein gene, complete1
  source 1..556: mol_type = genomic DNA
cttcggccctctcaccctcttttccggtggccactcgcccgggccaccgttacttcactccactccctcgggactggtttggaggaacataacagggcttcccacccctgtttacccttaattccacttacccttccccttaaccaaccctatccacaccccactgactgattcctttggattttgacctcagaacgcctacttgacctcccacttgcctctcccttctcggattgccggtggtgcctggcggaaaaagcacaagtgtgttgcaggctaccaaactcctacccgacaaaggtgcgtgtccgcgtgctgagtaatgggataggagatgcctacaacaggctcgcccatgagtagagcatggactgcggtgcatgtgacttcggtcaccacgggcatagcattgctcacccgtgaatcaagtcatcgagatttctctgacctctgaagtgcactgtggttgcgtggctgggaatccacgcttgaccatgtactgcttgatagagtcgcggctggccgactcatgggttaaagtcagttgacaagacac

SEQ ID NO: 1429 - DNA, 556 bp, Porcine kobuvirus
  misc_feature 1..556: note = gene for polyprotein, complete cds,strain:1
  source 1..556: mol_type = genomic DNA
cctcggccctctcaccctcttttccggtggccactcgcccgggccaccgttacttcactccactcccttgggactggtttggaggaacacaacagggcttcccacccctgtttaccctacactccactcaccctctcccttaaccaaccctatccacatcccactgactgattcctttggattttgacttcagaatgcctacttgacctcccacttgcttctcccttcccggattgccggtggtgcctggcggaaaaagcacaagtgtgttgttggctaccaaacccctacccgacaaaagcgcgtgtccgcgtgctgagtaatgggataggggatgccaatgacaggctcgcccatgagtagagcatggactgcggtgcatgtgactttggtcaccaggggcatagcattgctcacccctgaatcaagtcatcgagatttctctgacctctgaagtgcactgtggttgcgtggctgggaatccacgcttgaccatgtactgcttgatagagtcgcggctggccgactcatgggttaaagtcagttgacaagacac

SEQ ID NO: 1430 - DNA, 557 bp, Porcine kobuvirus
  misc_feature 1..557: note = gene for polyprotein, complete cds,strain:1
  source 1..557: mol_type = genomic DNA
cttacggggctctcaccctcttttccggtggccactcgcccgggccaccgttactccactccactccttcgggactggtttggaggaacacaacagggcttcccacccctgtttacccttaactccactcacccctcccttgaaccaaccctatccacaccccactgactgactcctttggattttgacttcggaatgcctacctaacctcccacttgcctttccctttacggattgccggtggtgcctggcggaaaaagcacaagtgtgttgttggctaccaaactcctacccgacaaaggtgcgtgtccgcgtgctgagtaatgggataggagatgccaatgacaggctcgcccatgagtagagcatggactgcggtgcatgtgacttcggtcaccaggggcatagcattgctcacccctgaatcaagtcatcgagatttctctgacctctgaagtgcactgtggttgcgtggctgggaatccacgcttgaccatgtactgcttgatagagtcgcggctggccgactcatgggttaaagtcagttgacaagacac

SEQ ID NO: 1431 - DNA, 776 bp, Kobuvirus sp.
  misc_feature 1..776: note = sheep/TB3/HUN/2009, complete genome.1
  source 1..776: mol_type = genomic DNA
cttcggccccctcaccctcttttccggcggcgcaagttcgcgtcgtcgtaagcctggacacccatgttcgcatcggtctccgggcaaatacaagaaccccagaccttctggtacttcttcgcctgggtcacaaaagcgaagaacctgcctctctaacgccagacgagcggcattaaacttgaacttctggcactctccactctcccttttccctgtccctttccccactgcgctctcaaggtcgcgcaatcctgggactagcccagttttaaaagttcctggcaccctttgcccctctaggcccttaaggtaggaactgaccttgtgctgtgatctcggtgcgggagtgctaccacgtagtcatcgtaagcctcgtttctggttctgccctggcaaggctacagagtaccgtgttccgctgtggatgccatccgggtaaccggacccccagtgtgtgtagcggtatgttcacggtccgccgtgttcaccagattcctgacctggctttgctagaaatggtgtgtgcccaatccctgtgaccagtatcaattacatcacctaggaatgctaggaaggtaccccagtcctgagctgggatctgatcctaggctaattgtctacggtgatgctccttttattttcttacaactgctattgactgtctgattgctgattctgctcttgtgctcttctgctctggctcattctcaagggttctctttgtccaagatcctttggttctctccttgttccacttgccactgccaacgcttgtc

SEQ ID NO: 1432 - DNA, 665 bp, Caprine kobuvirus
  misc_feature 1..665: note = isolate MN1/2018, complete genome.1
  source 1..665: mol_type = genomic DNA
gcccgtccccctcaccctcttttccggtggccacgcccgggccaccgatacttcccttcactccctcgggactgttggggaggaacacaacagggctcccctgtatttcctcttcccattccccctttcctaaccccaaccgccgtatctggtggcggtaagacacacgggtctttccctctaaagcacaattgtgtgtgtgtcccaggtcctcctgcgttcggtgcgggagtgctcccacccaactgttgtaagcctgtccaacgtgtcgtcctggcaagactatgacgtcgcatgttccgctgtggatgccgaccgggtaaccggttccccagtgtgtgtagtgcgatcttccaggttctcctggttggcgttgtccagaaactgcttcgggtaagtggggtgtgcccaatccctacaagggttgattctttcaccaccttaggaatgctccggaggtaccccagcaacagctgggatctgaccggaggctaattgtctacgggtggtgtttccattttctttttcacacaacttcattgctgacaactcactgactaatcacttgctctcttgtgcctttctgctctggttcaagttccttgattgtttgtttgattgcttttcactgctttcttcccacaatccttgctcagttcaaagtc

SEQ ID NO: 1433 - DNA, 556 bp, Porcine kobuvirus
  misc_feature 1..556: note = gene for polyprotein, complete cds,strain:1
  source 1..556: mol_type = genomic DNA
cttcggccctctcaccctcttttccggtggccgcccgcccgggccaccgttacttcactccactccctcgggactggtttggaggaacacaacagggcttcccatccctgttttcccttaataccacttaccttttccctaattaaccctacccaccacccaccgactgactccctttggattttgacctcagaatgcccacttgacctcccacttgcctcttcctttttggattgccggtggtgcctggcggaaaaagcacaagtgtgttgcaggctaccaaactcctacccgacaaaggtgcgtgtccgcgtgctgagtaatgggataggagatgcctacaacaggctcgcccatgagtagagcatggactgcggtgcatgtgacctcggtcaccacgggcatagcattgctcacccgtgaatcaagtcatcgagatctctctgacctctgaagtgcactgtggttgcgtggctgggaatccacgcttgaccatgtactgcttgatagagtcgcggctggccgactcatgggttaaagtcagttgacaagacac

SEQ ID NO: 1434 - DNA, 549 bp, Porcine kobuvirus
  misc_feature 1..549: note = gene for polyprotein, complete cds,strain:1
  source 1..549: mol_type = genomic DNA
cctctcaccctcttttccggtggccacccgcccgggccaccgttactccactccactccttcgggactggtttggaggaacataacagggcttcccacccctgtttacccttattccactcaccctttccccacaaccaaccctatccacaccccactgactgattcctttggattttgacctcagaatgcctacctgacctcccacttgcctctcccttctcggattgccggtggtgcctggcggaaaaagcacaagtgtgttgttggctaccaaactcctacccgacaaaggtgcgtgtccgcgtgctgagtaatgggataggagatgccaatgacaggctcgcccatgagtagagcatggactgcggtgcatgtgacctcggtcaccaggggcatagcattgctcacccctgaatcaagtcatcgagatttctctgacctctgaagtgcactgtggttgcgtggctgggaatccacgcttgaccatgtactgcttgatagagtcgcggctggccgactcatgggttaaagtcagttgacaagacac

SEQ ID NO: 1435 - DNA, 546 bp, Porcine kobuvirus
  misc_feature 1..546: note = gene for polyprotein, complete cds,strain:1
  source 1..546: mol_type = genomic DNA
ctcaccctcttttccggtggccactcgcccgggccaccgttactccactccactccctcgggactggtttggaggaacacaacagggcttcccatccctgtttacccttcactccactcaccccttcccttaatcaaccctgtccacaccccactgactgattcctttggattatgacctcagaatgcctacccgatctcccactcgcctctcctttcttggattgccggtggtgcctggcggaaaaagcacaagtgtgttgcaggctaccaaactcctacccgacaaaggtgcgtgtccgcgtgctgagtaatgggataggagatgcctacaacaggctcgcccatgagtagagcatggactgcggtgcatgtgacttcggtcaccacgggcatagcattgctcacccgtgaatcaagtcatcgagatttctctgacctctgaagtgcactgtggttgcgtggctgggaatccacgcttgaccatgtactgcttgatagagtcgcggctggccgactcatgggttaaagtcagttgacaagacac

SEQ ID NO: 1436 - DNA, 755 bp, Bovine kobuvirus; identical to SEQ ID NO: 1218
  misc_feature 1..755: note = strain BKoV/EGY-1, complete genome.1
  source 1..755: mol_type = genomic DNA

SEQ ID NO: 1437 - DNA, 729 bp, Bovine kobuvirus; identical to SEQ ID NO: 922
  misc_feature 1..729: note = strain SC1 polyprotein gene, complete cds.1
  source 1..729: mol_type = genomic DNA

SEQ ID NO: 1438 - DNA, 787 bp, Aichivirus B
  misc_feature 1..787: note = genomic RNA, complete genome,strain:U-1.1
  source 1..787: mol_type = genomic DNA
cttcggccccctcaccctcttttccggcggcgcatgttcgcgtcgtcgtaagtctggattcccaaggcccactcggttcaacttcggtttccggacaaatacaaagaacctcagtcctcttggtactttctcgcctgagtctacaaagcgagaaacctgcccctctaacgccagacgagcggcataaaactcgaacttctggcacgttccaccaccccttctcctatcccaacccccattgcgctctcaaggtcgcgcttttccgagactagctcggattcaaaaagttcctggcaccctttaccccttcaggcccttaaggtaggaactgaccttgtgctgtgatctcggtgcggaagtgctactgcgtagtgattgtaagatccttttgtggttctgccctggcaaggctacagagtgctgtgatccgctgcggatgccatcctggtaacaggacccccagtgtgcgcaacagtatgttcacggtcttccgtgttcaccacattcggaacactgctttcgtgaaacagtgtgtgtccaatccctgtgatcagtatcaaccacaccacctaggaatgctaggaaggtaccccggttcgccgggatctgatcctaggctaattgtctacggtggtgctcctttttattttccacttcaactcactggttacaactgcttgatttctgtgtttgctgcttttctctgctctcactgccattctcaagtgttcacactgtccaagctcctttggttgttcgcttccacttgccactgtcaactcttgtc

SEQ ID NO: 1439 - DNA, 770 bp, Bovine kobuvirus; identical to SEQ ID NO: 1230
  misc_feature 1..770: note = strain IL35164, complete genome.1
  source 1..770: mol_type = genomic DNA

SEQ ID NO: 1440 - DNA, 545 bp, Caprine kobuvirus
  misc_feature 1..545: note = isolate CKoV-China/SWUN/F11/2019, complete1
  source 1..545: mol_type = genomic DNA
cccccttttccctaaccccaaccgccgtatctggtggcggcaagacacacgggtctttccctctaaagcacaaatgtgtgtgtgtcccaggtcctcctgcgctcggtgcgggagtgctcccacccaactgttgtaagcctgtccaacgtgtcgtcctggcaagactatgacgtcgcatgttccgctgcggatgccgaccgggtaaccggttccccagtgtgtgtagtgcgatcttccaggttcccctggttggcgttgtccagaaactgcttcaggtaagtggggtgtgcccaatccctgcaaaggttgattctctcaccaccttaggaatgctccggaggtaccccagcaacagctgggatctgaccggaggctaattgtctacgggtggtgtttcctttttctttttccacaacttcattgctgacaactcactgactacccatttgctctcttgtgcctttctgctctggttcaagctccttgattgtttttgattgctttctattgctttcttccactcaacccttgctcagttcaaagtc

SEQ ID NO: 1441 - DNA, 782 bp, Kobuvirus sp.
  misc_feature 1..782: note = cattle/Kagoshima-2-24-KoV/2015/JPN genomic RNA, complete1
  source 1..782: mol_type = genomic DNA
ataccctccccctccacactcttttcgacggcgcgcctcggcaaggccgccgataccgcactgtgctacttcggtaccactctgcgggaatgacaatatgcccggtgtatagtttgcctgtttctcgcaccgttaccgctcgttcgggaatgtgaaactggcacccctcctctcccctaccaccctttctccttcgcccccattcataatttacaacgccgcacacagcggcggccgccaagggctagcctggcggttataaaaggaacctgggtctttccctcttcaagccaaaaggtaggttccctgtgtccctgaatgctcggtgaggaatgctgcaccgtaacgctttgtgaagtgtttgcaagttctggcccggcaagcctacagagtgctgtgatccgctgcggacgccatcctggtaacaggacccccagtgtgcgcaacagtatgttcagacttcggtttgttcacttgctttcatggaccattgcgcgaaagtgcgtgcgccatatccctgtacttcaggtgtgcttctctggaccctaggaatgctgcgaaggtaccccgtttcggcgggatctgatcgcaggctaattgtctatgggttcagtttcctttttctttactccacaattgactgcttaactgactctggatcttgtgcttccactgctctttctgctctcaaaacggcttcacttaccaactctcacctttcgaccaacaccatttacacactaacttttttcgactcttctgactcctggcttggtgaagac

SEQ ID NO: 1442 - DNA, 537 bp, Porcine kobuvirus
  misc_feature 1..537: note = THA/2007 gene for polyprotein, complete cds,1
  source 1..537: mol_type = genomic DNA
ttttccggtggccacacgcccgggccaccgttactccactccactccttcgggactggtttggaggaacacaacagggcttcccacccctgtttaccctttctccactcatccactccctttaaccaaccctgtccacaccccactgactgactcctttggattttgacctcggaatgcctacttgaccttccactcgcctttcccttttcggattgccggtggtgcctggcggaaaaagcacaagtgtgttgcaggctaccaaactcctacccgacaaaggtgcgtgtccgcgtgctgagtaatgggataggagatgcctacaacaggctcgcccatgagtagagcatggactgcggtgcatgtgacttcggtcaccacgggcatagcattgctcacccgtgaatcaagtcatcgagatttctctgacctctgaagtgcactgtggttgcgtggctgggaatccacgcttgaccatgtactgcttgatagagtcgcggctggccgactcatgggttaaagtcagttgacaagacac

SEQ ID NO: 1443 - DNA, 528 bp, Porcine kobuvirus
  misc_feature 1..528: note = gene for polyprotein, complete cds,
  misc_feature 1..528: note = strain:1
  source 1..528: mol_type = genomic DNA
gccacacgcccgggccaccgttactccactccactccctcgggactggtttggaggaacacaacagggcttcccatccctgttcctccctcaactccacttaccctttccccttaccaaccttatccacaccctattgactgattcctttggattttgacctcagaatgcctatctgacctcccacctgcctcccccttctcggattgccggtggtgcctggcggaaaaagcacaagtgtgttgttggctaccaaactcctacccgacaaaggtgcgtgtccgcgtgctgagtaatgggataggagatgccaataacaggctcgcccatgagtagagcatggactgcggtgcatgtgacttcagtcaccaggggcatagcattgctcacccctgaatcaagtcatcgagatttctctgacctctgaagtgcactgtggttgcgtggctgggaatccacgcttgaccatgtactgcttgatagagtcgcggctggccgactcatgggttaaagtcagttgacaagacac

SEQ ID NO: 1444 - DNA, 532 bp, Porcine kobuvirus
  misc_feature 1..532: note = gene for polyprotein, complete cds,
  misc_feature 1..532: note = strain:1
  source 1..532: mol_type = genomic DNA
ccggtggccacccgcccgggccaccgttactccactccactccctcgggactggtttggaggaacataacagggcctcccacccctgttcaccttaattccacttaccctttccctcaaccaaccctatccacaccccattgactgattcctttggattttgacctcagaatgcctacttgacctcccacttgcctttcccttctcggattgccggtggtgcctggcggaaaaagcacaagtgtgttgcaggctatcaaactcctacccgacaaaggtgcgtgtccgcgtgctgagtaatgggataggagatgcctacaacaggctcgcccatgagtagagcatggactgcggtgcatgtgacttcggtcaccacgggcatagcattgctcacccgtgaatcaagtcatcgagatttctctgacctctgaagtgcactgtggttgcgtggctgggaatccacgcttgaccatgtactgcttgatagagtcgcggctggccgactcatgggttaaagtcagttgacaagacac

SEQ ID NO: 1445 - DNA, 510 bp, Porcine kobuvirus
  misc_feature 1..510: note = isolate Chgz1 polyprotein gene, complete cds.1
  source 1..510: mol_type = genomic DNA
cgttactccactccactccctcgggactggtttggaggaacataacagggcttcccacccctgtttacccttaattccactcaccctttccctataaccaaccctatccacaccccactgactgattcctttggattttgacctcagaatgcccacctgacctcccacttgcctctcccttcccggattgccggtggtgcctggcggaaaaagcacaagtgtgttgttggctaccaaactcctacccgacaaaggtgcgtgtccgcgtgctgagtaatgggataggagatgccaataacaggctcgcccatgagtagagcatggactgcggtgcatgtgactttggtcaccaggggcatagcattgctcacccctgaatcaagtcatcgagatttctctgacctctgaagtgcactgtggttgcgtggctgggaatccacgcttgaccatgtactgcttgatagagtcgcggctggccgactcatgggttaaagtcagttgacaagacac

SEQ ID NO: 1446 - DNA, 513 bp, Porcine kobuvirus
  misc_feature 1..513: note = isolate XX, complete genome.1
  source 1..513: mol_type = genomic DNA
ccaccgttacttcactccactccctcgggactggtttggaggagcataacagggcttcccatccctgttcaccctcaataccacccaccctttccctcaaccatccctatccacaccccactgactgattcccttggattttgacctcagaacgcctacttgacctcccacttgcctttcccttctcggattgccggtggtgcctggcggaaaaagcacaagtgtgttgcaggctaccaaactcctacccgacaaaggtacgtgtccgcgtgctgagtaatgggataggagatgcctacaacaggctcgcccatgagtagagcatggactgcggtgcatgtgacttcggtcaccacgggcatagcattgctcacccgtgaatcaagtcattgagattcctctgacctctgaagtgcactgtggttgcgtggctgggaatccacgcttgaccatgtactgcttgatagagtcgcggctggccgactcatgggttaaagtcagttgataagacac

SEQ ID NO: 1447 - DNA, 509 bp, Porcine kobuvirus
  misc_feature 1..509: note = isolate Chgz2 polyprotein gene, complete cds.1
  source 1..509: mol_type = genomic DNA
cgttactccactccactccctcgggactggtttggaggaacataacagggcttcccacccctgtttacccttaattccactcaccctttcccttaaccaaccctatccacaccccactgactgattcctttggattttgacctcagaatgcccacttgacctcccacttgcctctcccttcccggattgccggtggtgcctggcggaaaaagcacaagtgtgttgttggctaccaaactcctacccgacaaaggtgcgtgtccgcgtgctgagtaatgggataggagatgccaataacaggctcgcccatgagtagagcatggactgcggtgcatgtgactttggtcaccaggggcatagcattgctcacccctgaatcaagtcatcgagatttctctgacctctgaagtgcactgtggttgcgtggctgggaatccacgcttgaccatgtactgcttgatagagtcgcggctggccgactcatgggttaaagtcagttgacaagacac

SEQ ID NO: 1448 - DNA, 509 bp, Porcine kobuvirus
  misc_feature 1..509: note = isolate Chgz3 polyprotein gene, complete cds.1
  source 1..509: mol_type = genomic DNA
cgttactccactccactccttcgggactggtttggaggaacataacagggcttcccatccctgtttaccctttattccacttaccctttctcctaatcaaccctatccacaccccactgactgactcctttggattttgacctcagaatgcctacttgacctcccacttgcctctcccttctcggattgccggtggtgcctggcggaaaaagcacaagtgtgttgcaggctaccaaactcctacccgacaaaggtgcgtgtccgcgtgctgagtaatgggataggagatgcctacaacaggctcgcccatgagtagagcatggactgcggtgcatgtgacttcggtcaccacgggcatagcattgctcacccgtgaatcaagtcatcgagatttctctgacctctgaagtgcactgtggttgcgtggctgggaatccacgcttgaccatgtactgcttgatagagtcgcggctggccgactcatgggttaaagtcagttgataagacac

SEQ ID NO: 1449 - DNA, 641 bp, Grey squirrel kobuvirus; identical to SEQ ID NO: 770
  misc_feature 1..641: note = isolate UK 2010 polyprotein gene, complete1
  source 1..641: mol_type = genomic DNA

SEQ ID NO: 1450 - DNA, 510 bp, Porcine kobuvirus
  misc_feature 1..510: note = isolate Chgz5 polyprotein gene, complete cds.1
  source 1..510: mol_type = genomic DNA
cgttactccactccactccctcgggactggtttggaggaacataacagggcttcccacccctgtttacccttaactccactcaccctttccctacaaccaaccctatccacaccccactgactgattccttcggattttgacctcagaatgcctacctgacctcccacttgcctttcccttcccggattgccggtggtgcctggcggaaaaagcacaagtgtgttgttggctaccaaactcctacccgacaaaggtgcgtgtccgcgtgctgagtaatgggataggagatgccaataacaggctcgcccatgagtagagcatggactgcggtgcatgtgacttcggtcaccaggggcatagcattgctcacccctgaatcaagtcatcgagatttctctgacctctgaagtgcactgtggttgcgcggctgggaatccacgcttgaccatgtactgcttgatagagtcgcggctggccgactcatgggttaaagtcagttgacaagacac

SEQ ID NO: 1451 - DNA, 509 bp, Porcine kobuvirus
  misc_feature 1..509: note = isolate Chgz4 polyprotein gene, complete cds.1
  source 1..509: mol_type = genomic DNA
cgttactccactccactccctcgggactggtttggaggaacataacagggcttcccatccctgtttaccctaaattccacttaccctttccctagaccaaccctatccacaccccactgactgattcctttggattttgacctcagaatgcctacctgacctcccatctgcttttccctttccggattgccggtggtgcctggcggaaaaagcacaagtgtgttgttggctaccaaactcctacccgacaaaggtgcgtgtccgcgtgctgagtaatgggataggagatgccaataacaggctcgcccatgagtagagcatggactgcggtgcatgtgacttcggtcaccaggggcatagcattgctcacccctgaatcaagtcatcgagatttctctgacctctgaagtgcactgtggttgcgtggctgggaatccacgcttgaccatgtactgcttgatagagtcgcggctggccgactcatgggttaaagtcagttgacaagacac

SEQ ID NO: 1452 - DNA, 1000 bp, Cardiovirus B; identical to SEQ ID NO: 138
  misc_feature 1..1000: note = strain rat08/rCaB/HUN, complete genome.1
  source 1..1000: mol_type = genomic DNA

SEQ ID NO: 1453 - DNA, 977 bp, unidentified
  source 1..977: mol_type = unassigned DNA; note = Theiler's-like virus of rats NGS910 genomic RNA, complete genome.1 sequence
caccccctttggacgcggggcctgcgatagtgccaccccccgtcctccctattccaactacccgaccctaacccagggtccaggaaactggatcaatacaagtcatcccctgaatgctggctaatcagaggaaagtcagcattttccggcccaggctaagagaaacacaataagttagaatctaaattaatccccttgacgaattcgcaacgataagtcctccctcccttgccgctcgttcacacccagaactaacaattcggccccttgtgacgagccccttggtgaaaggacctctttcaatgcgacgtggttggagattaaaccgactccgacgaaagtgctatcatgcctccccgattatgtgatgttttctgccctgctgggcggagcattctcgggttgatacaccttgaatccttcatccttggacctcaggtcccccggtctaagccgcttggaatacgacagggttattttccaatcttctcctttctactttcatgagtcctattcatgaaaagggtctgtgctgccccttccttcttggagaatctgcgcggcggtctttccgtctctcgaaaagcgcagatgcagcatgctggaaccggtgaagaaaacagttctttgtggaaacttagagcagacatcgaaacagctgtagtgacctcacagtagcagcggaaccccctcctggtaacaggagcctctgcggccaaaagccccgtggataagatccactgctgtgagcggtgcaaccccagcaccctggttcgatggttgttctctgtggaaccagagaatggtctttctcaagccctccagtagagaagccaagaatgtcctgaaggtaccccgcatgcgggatctgatcaggagaccaatcgtcagtgctttacactggcgctttggtttaaaaactgtcacagcttctccaaaccaagtggtcttggttttcacttttatcaaactgtttc

SEQ ID NO: 1454 - DNA, 1000 bp, Bovine viral diarrhea virus
  misc_feature 1..1000: note = nonstructural proteins (p125/p80, p20)1
  source 1..1000: mol_type = genomic DNA
ggagggaaggcgattcgtcgccagcttatttatctccgctctggcaacctacacatacaagacttggaattaccacaacctctccaaggtagtagaaccagccttggcatacctcccctacgctaccagtgcactaaaaatgttcaccccaactaggctggagagcgtagtcatacttagcaccacaatatacaaaacttacctctcaataaggaaaggaaaaagtgatggacttctgggtacagggattagtgcagcaatggagattctgtcacagaacccggtgtcagtaggtatatctgtcatgctgggggtgggggcaattgccgctcacaatgcaatcgagtctagtgagcaaaaaaggaccctattgatgaaagtgtttgtaaaaaacttcctggaccaggcggcaacagatgagttggtgaaggaaaatccagagaaaataataatggccttatttgaagcagtacagacaattggcaacccattgaggcttatatatcatctgtatggggtttactacaaaggctgggaagcgaaagaactatccgagaggacagctggcaggaacctgttcactttgataatgttcgaagctttcgaactattagggatggactctgaagggaagataaggaacctatctgggaattacatcttggatttgatctacagtttacataaacagataaacagaggcttgaagaagatagtcttggggtgggctcctgcacccttcagttgtgactggactcctagtgatgggagaatcaggttacccacagacaactatctgagagtagagactaagtgcccatgtggttatgagatgaaagcactaaggaatttcagtggcagtctcacaaaagtggaagagaaagggcctttcctctgtaggaacgggcctggtagggggccagttaactatagagtcacaaagtactatgatgacaacctcacagagataaaaccagttgcaaaactagaaggactgcac

SEQ ID NO: 1455 - DNA, 1000 bp, Boone cardiovirus 1
  misc_feature 1..1000: note = isolate BCV-1 polyprotein gene, complete cds.1
  source 1..1000: mol_type = genomic DNA
ggtttggatcttggatctctctccttccttcccccgtcttcaatttagcttcgtgattgaagcatctcactgtctctagtatttatgtcggactgacgattgagtacgttcagattgtgtttgggaggcccaagggatcgatggacaacacttcgaaagagtcacttgtccaccgctcctttcccctaccctagcaactctggatttgctcacgtggagttcgaggtctgtactttaactctgacttgcttttcttaccttgctatcttgctgacgtggattggttgtagactgattcacgttctcgttagatgctgacgtggagtacgatcgctgtacattccactactgccaattagctcccccttcccgttgctcccctctataaggagagccttctcttgcaaaggtgaagccttcacccccggtcgaagccgcttggaataagacagggttattttctcctctcctcggcgcttgcctcttctaagctgaataggttctatctattcaggcggatggtctggtccgttccttcttggacagagtgtgtatctgggttttccggatctcgaccacacactcaccagagctcaggagtgattaagtcaaggcccgatctgcggcgaaaaggaaatgaagtattttgcagctgtagcgacctctcaaggccagcggatttccccacctggtgacaggtgcctctggggccaaaagccacgtgttaatagcacccttgagagcggtggtaccccaccaccctgcaaattatggatttgacttagtaactaaaagattgacttggcatacctcaacctgagcggcggctaaggatgccctgaaggtacccgtgttgaaatcgcttcggcgaccatggatctgatcaggggccctgcctggagtggttctatcccacacagcgtagggttaaaaaacgtctaaccgccccacaaagaccccggcagggatgccggtttcctttttaccaattcttgacact

SEQ ID NO: 1456 - DNA, 1000 bp, Miniopterus schreibersii picornavirus 1
  misc_feature 1..1000: note = complete genome.1
  source 1..1000: mol_type = genomic DNA
atcacctgcttagggcgaattgtcgagacgtcattgatgttccggcccaggataacaacgaagtgttccaaggtgatttactccgcccttttaacaacgcacttgggcgaactgcactggtgtactggtaattcctgtcttggattgtgtagtggatataaactgtacccacggttgaaacccactactcacctcacagattgtgtttacctttatatctttgtacgcggtaagtgcggcgttgagagcgccttgtaagttcctaagcattagttggtcctccccgattatgtcatcaatggggttgtcggcacgcggttaagcggttgtcgacccgttgcttggtttaagcatgaggtggattcccccgattatgtctacccgttactatggcgggcggtcgtttcagggtgtttctactgaggactgcaccaagtctttatcttttattctcagatctccggctgtttgacgcttgtaggacagcaggactattttctcttaatctttttctacccactagggtcctatcctagtggagggagggtgccaccccttctctctttagagagtgcgcctggcggtctttccgtctctggaaaaaggagcacatggcatgctacaattggcacaagaaaacaagctttgcggattctttctttgtactagaggaagctgtagcgaccctgtatggcgagcggactcccctctcggcgacgagagcctctcgggccaaaagccaagtgttaatagcacccatacaggcggcagtaccccactgccctttctcaacatacaatgactgatgaaccactgttggtttttctgacacctttgtagtaggattccaaggaatgtcctgaaggtaccctgttagcttacgcgcaggatctgatcaggagtctctttacagtgctgtacactgtgcaagggattaaaaattgtttgaggaatccccgagatagtggtctatctcttcctattttgttttacagacacg

SEQ ID NO: 1457 - DNA, 1000 bp, Rodent cardiovirus
  misc_feature 1..1000: note = isolate AMzj-2018, complete genome.1
  source 1..1000: mol_type = genomic DNA
cagtacccgcgtccaaagggggttgcctggggtggtctcaaccgcgaacacactagcgtgtatccgcggtgaagaccccagggccccctttggacgcgggtactgcgacagtgccaaaccccgtccttccctactccacctaccccggccctaacccagggtccaggaaactggatcaatacaaatcatcccctgaatgctggctaatcagaggaaagtcagcattttccggcccaggctaagagaaatacataagttagactcaatcttgatccccttgacgaattcgcaacgaaaagttctccctcccttgccgcttgttcacacccagaactaataattcggcccctcgtgacaagcccctcggtgaaagaacctctttcaatgcgacgtggttggagattaaatccgactccgacgaaagtactatcatgcctccccgattatgtgatgttttctgccctgctgggcggagcattctcgggttgatatactttgaatccttcctccttggacctccggtcccccggtctaagccgcttggaatacgacagggttattttccaaatctttctccttctactttcatgagctctattcatgaaaagggcatgtgctgccccttccttcttggagaatccgcgcggcggtctttccgtctctcaaaaagcgtggatgcagcatgctggaaccggtgaagaatgtagttctttgtggaaacctagagcagacatcgaaccggctgtagcgacctcacagtaccactgctgtgagcggtgcgaccccagcaccctggttcgatggttgttctctgtggaaccagagaatggccttctcaagccatccagtagagaagccaagaatgtcctgaaggtaccccggcccacgggatctgatcaggagactgatttgtggtgctttacaccacaacttcagtttaaaaattgtcacagcttctccaaaccaagtggtcttggttttccctctattacaatgtgac

SEQ ID NO: 1458 - DNA, 1000 bp, Foot-and-mouth disease virus
  misc_feature 1..1000: note = - type O,strain Akesu/58, complete1
  source 1..1000: mol_type = genomic DNA
cgacagctcctgcgttgcactccacacttacgtttgtatgcgcgcgggaaccgctggactttcgttcacccacctacagctggactcacggcaccgcgtggccattttagctggactgtgcggacgaacgccacttgcgcaccccgcgtgactggttaatactcttaccactttccgcctacttggtcgttagcgctgccctgggcactcccgttgggggccgtccggtgctccacggttcccacgcatgacaaactacggtgatggggccgcttcgtgcgagttgatcgcctggtgtgtttcggctgtcacccgaagcccgcctttcacaagttttaccgtcgttcccgacgttaaagggaggtaaccacatgcttattaccgcctttcccggcgttaaagggctgtaaccacacgaattgccttcacccggaagtaaaacggaaatccacacacacggttttgcccgttttcagagagaaacgggacgtgagcgcacgaaacgcgccgtcgcttgtggaagacttgtacaaacacgatctacgcaggtttcctcaactgacacaactcgtgcaaactgtaaccccgcctggtctttccaggtctggaggggaagcttttgtactgtgtttggctccacgttcggtctactggcgagcgctagtagtggcaatgttgtttcgtagcggagcatgttggccgtgggaatccctccttggcgacaaggacccacggggccgcaagccacgtctttgacccaacatgtgtgcaaccccagcacggcaaccttgccacgaaaaccacttcaaggtaacactgatactggtactcaaatactggtgacaggctaaggatgcccttcaggtaccccgaggtaacacgggacacttgggatctgagaaggggattgggacttctataaaagtgcccaatttaaaaagcttctatgcctgaataggtgaccggaggccggcacctttcctctacaactactttacca

SEQ ID NO: 1459 - DNA, 1000 bp, Rodent Cardiovirus
  misc_feature 1..1000: note = isolate 1, complete genome.1
  source 1..1000: mol_type = genomic DNA
ccgcgggagagatccccggggccccctttcaacgcgggtactgcgatagtgccaccccagccttatccttctcccgacttcccgaccctaacccaggttcctcggaaaggaacaccaaaactcaatcccctggatgctgactaatcagaggaaagttggcattttccggcccaggcttagagaagtagataagttagactcaaattgattcaattccccttggcgaatccgcgtcgaggcgccacctctcacttgccgtcctccacacccatccttaattcggcctctgtgttggaccccttgttgaagtggcttccctctgcgcggcgcggttggagaattttgtcatccgactccgacgaaactaccatcatgcctccccgattgtgtgatgccctccgccctgctgggtggagcatcctcgggttgagaaacctcttccttcaaccttggaccccggtcccccggtctaagccgcttggaataagacagggttattttcactctcttcttcttctactccacggatttctattccctggaagggtatgtgttgcccctcgcttcttgcggaacgcgcacggtggtctttccacctctcgaaaagtgtgcgtgcaacatgcagagatacgtgaagaaagcagtttgtgaactagtcctagagcgaacacgaatccggctgtagcgaccacttaagagcagcggaacccccctcccggcgacgggagcctctgcggccaaaagccacgtggataagatccactcttgagtgcggtgcggccccggcaccccggtttcgtggttgttctttgacgaacccacaaatggcgatcttaagcgcctctgtagagaagccaagaatgtccagaaggtacccctatcaagggatctgatctggagacgtgtcacttatgctttacacgagtgctcgcgtttaaaaactgtcacagcttctccaaaccaagtggtcttggttttctccttctaattctctgtcaat

SEQ ID NO: 1460 - DNA, 1000 bp, unidentified
  source 1..1000: mol_type = unassigned DNA; note = Theiler's encephalomyelitis virusstrain DA, complete genome.1 sequence
tcccccggtcaccccctttcgacgcgggtactgcgatagtgccacccagtctctcctactcccgactcccgaccctaacccaggttcctcggtataggaacaccactttactcatcccctggatgctgactaatcagaggaacgtcagcattttccggcccaggctaagagaagtagataagttacaatccaaattgatttatcatccccttgacgaattcgcgttggaaaagcacctctcacttgccgctcttcacacccatcattttaattcggcctctgtgttgagccccttgttgaagtgtttctctccatcgcgacgtggttggagatctaagtcaaccgactccgacgaaactaccatcatgtctccccgattatgtgatgctttctgccctgctgggtggagcatcctcgggttgagaaatccttcttcctttcaccttggaccccggtcccccggtctaagccgcttggaataagacagggttattttcacctctttttcttctactccacagtgctctatactgtggaagggtatgtgttgccccttccttcttggagaacgtgcgcggcggtctttccgtctctcgacaagcgcgcgtgcaacatgcagagtaacgcgaagaaagcagttcttggactagctttagtatctgcaagaagacagctgtagcgaccacacaaaggcagcggaacccccctcctggtaacaggagcctctgcggccaaaagccacgtggataagatccacctttgtgtgcggtgcaaccccagcaccctggtttcttgaagatactctagtgaacccttgaatggcaatctcaagcgcctctgtaggaaagccaagaatgtccaggaggtacccctacctcgcggaagggatctgacctggagacacgtcgcaagtgctttacacctgtgctcgtgtttaaaaattgtcacagctttcccaaaccaagtggtcttggttttcctttttattactattgacact

SEQ ID NO: 1461 - DNA, 1000 bp, unidentified
  source 1..1000: mol_type = unassigned DNA; note = Theiler murine encephalomyelitis, complete genome.1
ccggttaccccctttcgacgcgggtactgcgatagtgccaccccagtccttcctactcccgactcccgaccccaacccaggttccttggaacaggaacaccaatttattcatcccttggatgctgactaatcagaggaacgtcagcattttccggcccaggctaagagaagtagataagttagaatctaaattatttatcatccccttgacgaattcgcgttggaaaagcacctctcacttgccgctcttcacacccatcattctaattcggcccctgtgttgagccccttgttgaagtgtttccctccatcgcgacgtggttggagatctaagttaaccgactccgacgaaactaccatcatgcctccccgattatgtgatgctttctgccctgctgggtggagcatcctcgggttgagaaatctttcttccttttaccttggactccggtcccccggtctaagccgcttggaataagacagggttatcttcactcctcttcttttctacttcacagtgttctatgctgtgaaagggtatgtgtcgccccttccttcttcggagaacacgcgtggcggttttttccgtctctcgacaagcgcgtgtgcgacatgcagagtctcgcgaagaaagcagttctcggtctagctttagtgcccacaagaaaacagctgtagcgaccacacaaaggcagcggaacccccctcctggtaacaggagcctctgcggccaaaagccacgtggataagatccacctttgtgtgcggtgcaaccccagcaccctgttttcttggtgacactctagtgaacccctgaatggcgatcttaagcgcctctgtagggaagccaggaatgtccaggaggtaccccttccgctcggaagggatctgacctggagacacatcacatgtgctttacacctgtgcttgtgtttaaaaaattgtcgcagcttccccaaaccaagtggtcttggttttctctttttattatattgtcaat

SEQ ID NO: 1462 - DNA, 1000 bp, unidentified
  source 1..1000: mol_type = unassigned DNA; note = Theiler's encephalomyelitis virus, complete genome.1 sequence
atcccccggttaccccctttcgacgcgggtactgcgatagtgccaccccagtctttcctactcccgactcccgaccctaacccaggttcctcggaacaggaacaccaatttactcatcccctggatgctgactaatcagaggaacgtcagcattttccggcccaggctaagagaagtagataagttagaatccaaattgatttatcatccccttgacgaattcgcgttggaaaaacacctctcacttgccgctcttcacacccattaatttaattcggcctctgtgttgagccccttgttgaagtgtttccctccatcgcgacgtggttggagatctaagtcaaccgactccgacgaaactaccatcatgcctccccgattatgtgatgttttctgccctgctgggtggagcaccctcgggttgagaaaaccttcttcctttttccttggactccggtcccccggtctaagccgctcggaatatgacagggttattttcacctcttcttttctactccacagtgttctatactgtggaagggtatgtgttgccccttccttcttggagaacgtgcgcggcggtcttccgtctctcgacaagcgcgcgtgcaacatacagagtaacgcgaagaaagcagttctcggtctagctctagtgcccacaagaaaacagctgtagcgaccacacaaaggcagcggaacccctctcctggtaacaggagcctctgcggccaaaagccacgtggataagatccacctttgtgtgcggtgcaaccccagcaccctggtttcttggtgacactctagtgaacccctgaatggcaatctcaagcgcctctgtagggaagccaagaatgtccaggaggtaccccttcctctcggaagggatctgacctggagacacatcacacgtgctttacacctgtgcttgtgtttaaaaattgttacagcttccccgaaccaagtggtcttggttttcactttttatcacactgtcaat

SEQ ID NO: 1463 - DNA, 1000 bp, Aimelvirus 6
  misc_feature 1..1000: note = strain gpai006, complete genome.1
  source 1..1000: mol_type = genomic DNA
cactacgttacggttcccgcccgggacaactggtaccccattaggctacaacatggctgaaaagggtattgggtccccccggattgtgtccgttcgtagtgtgtgtaacgtggtttaccatctccactaacattggactaagcatttcatctttcctccccgattgtgtactcacttggctaacgctgggtggtcgcggttgggtccttgatttactttttctcgtctaagcattccgactgtcctccccgattatgtgctcattcagttaactgctgggtggtcatgactaacatcgaggaaccttctgtccacgcttactttgagctccggtcgcttgacgcttgtagggcgatagggttatcttcctgacaacatctttattctacctccataggctctatctatggagacggagtgtggcacccgtcccttctttgggagcttcggtagtgacgccctttgtcactctcgccagccgaggcatgcctggtgccaggtagcaaagaaagcatatgtttaaggacttgactgatttagcgcaagagtttgtagcgatgtccatagtgtctgcggattccccacacggcgacgtgtgccgcggaggccaaaagccacggtgttcacagcacccctatggatgcccacagaccccagtgggcactcttgttgccggactttcaggaaattaggcataggctcttctcaaactcctggcattggactaggtaagaatgccccggaggtaccccagtactccttcgggagtctgggatctgaccgggggccccacaaacatgctttacgtgtttcgtgcggtcaaaaattgtctaactagtcccaaccttgaacaagggattgttctttcctttttattactgagactggcctatggtgacaacagagattgactgtgaatacagttattttctggtgtttatcatttggtttttctccgtgctcttttacctttgtggtatttgttctttagataggcaaa

SEQ ID NO: 1464 - DNA, 1000 bp, unidentified
  source 1..1000: mol_type = unassigned DNA; note = Theiler's encephalomyelitis virus isolate Vie415HTR, complete1 sequence
catcccccggtcaccccctttcgacgcgggtactgcgatagtgccaccccagtctttcctactcccgattcccgacccctacccaggttcctcggaacaggaacaccaaattactcatcccctggatgctgactaatcagaggaacgtcagcgttttccggcccaggttaagagaagtagataagttagattctaaattgacctaccatccccttgacgaattcacactggagacgcacctctcacttgccgctcttcacacccatcaatctaattcggcccctgtgttgagccccttgttgaagtgccttcccccattgtgacgtggttggagatctaagtcaaccgactccgacgaaactaccatcatgcctccccgattatgtgatgctttctgccctgctgggtggagcatcctcgggttgagaaaatcttcttcctttttccttggaccccggtcccccggtctaagccgcttggaataagacagggttagcttcatctcctccttcttccacttcaagtgcctatactatgaaagggtatgtgttgccccttccttcttggagaacacacgcggcggcctttccgtctctcgacaagcgcgtgtgcgacatgcagagaaacgtgaagaaagcagtttgcggactagctccagtgcccacaagaaaacagctgtagcgaccacacaaaggctgcggaaccccctcctggtaacaggagcctctgcggccaaaagccacgtggataagatccacctttgtgtgcggtacaaccccagtaccctggtttcttggtgcactctagcgaaaacgcaaatggcaatctgaagcgcctctgtaggaaagcaaagaatgtccaggaggtaccccttccttttggggagggatctgacctggagacacatcacacgtgctttacacttgtgcttgtgtttaaaaactgtccagctttcccaaaccaagtggtcttggttttcattttttaaacaaatttcact

SEQ ID NO: 1465 - DNA, 1000 bp, Rat theilovirus 1
  misc_feature 1..1000: note = strain RTV-1, complete genome.1
  source 1..1000: mol_type = genomic DNA
cgcggtgaagatcaccccgggaaaccccctttggacgcgggacctgcgacagtgccatcccccgtctctcctattccaactacccgaccctaacccagggtccaggacactggatcaatacaagtcatcccctgaatgctggctaatcagaggaaagtcagcattttccggcccaggctaagagaaacacaataagttagaatctaaattaatcaccttgacgaattcgcaaagataagtcctccctcccttgccgctcgatcacacccagaactaacaattcggcctctcgtgacgagccccttggtgaaaggacctctttcaacgcgacgtggttggagattaaaaccgactccgacgaaagtgctatcatgcctccccgattatgtgatgttttctgccctgctgggcggagcattctcgggttgatataccttgaatccttcatccttggacctcccggtcccccggtctaagccacttggaatatgacagggttattttccaaaattcttatttccactttcatgagttcttttcatgaaaagggtatgtgctgccccttccttcttggagaatccgcgtggcggtctttccgtctctcgaaaaacgtggatgcagcatgctggaaacggtgaagaaagtagttctctgtggaaacttagaacagacatcgaaacagctgtagcgacctcacagtagcagcggaaccccctcctggcgacaggagcctctgcggccaaaagccccgtggataagatccactgctgtgagcggtgcaaccccagcaccctggttcgatggttgttctctgtggaatcagagaatggctttcctaagccctccagtagagaagccaagaatgtcctgaaggtaccccgcgtgcgggatctgatcaggagaccaattgccagtgctatacactggtactttggtttaaaaattgtcacagcttctccaaaccaagtggtcttggttttctatctttaataattggttc

SEQ ID NO: 1466 - DNA, 1000 bp, Saffold virus
  misc_feature 1..1000: note = gene for polyprotein, complete genome,strain:1
  source 1..1000: mol_type = genomic DNA
gcgtcttcgcggtgaagaacaccccaggggtaccccctttgaacgcgggacctgcgaaagtgccaacccaagtcttttcctgttcttaccctactccctccttgggtccattggaaggaccaactatattatcccttggatgctggctaatcagaggaaagtcagcattttccggcccaggctaagagaaacatataagttagatatgattttaatcccttgacgaattcaaaacttgatgttctccctcccttgccgcttgatcacacccacctcttaaattcggccttttgtgacaagccccttggtgaaaggacctctcttgtttcgacgtggttggaattaacatcaattccgacgaaagtgctatcatgcctccccgattatgtgatgttttctgccctgctgggcggagcaccctcgggttgagataccttgactcttttcttttggaaccttggttcccccggtctaagccgcttggaatacgacagggttattttctatactcttatttctacttttacgggttctatccgtaaaaagggtatgtgttgccccttccatcttcggagaatccacacggcggtctttccgtctctcaaaaagtgtggatgcaacatgccggaaacggtgaagaaagcagttttctgtggaaatttagaatggacatcgaaacagctgtagcgacctcacagtagcagcggactcccctcttggtaacaagagcctctgcggccaaaagccccgtggataagatccactgctgtgagcggtgcaaccccagcaccctggttcgatggctactctctatggaaccagagaatggttttctcaagccctccggtagagaagccaagaatgtcctgaaggtaccccgcgtgcgggatctgatcaggagaccgaatggtaatgctttacattatcactttggtttaaaaattgtcacagcttctccaaaccaagtggtcttggttttcctttttatccacatggcaag

SEQ ID NO: 1467 - DNA, 1000 bp, Saffold virus
  misc_feature 1..1000: note = gene for polyprotein, partial cds,isolate: Pak-2457.1
  source 1..1000: mol_type = genomic DNA
tagcatcttcgcggcaaagaacaccccaggggtaccccctttgaacgcgggtcctgcgaaagtgccaacccatgtctttcccactctttccccgactcccacctcgggtctaatgaaaagaccaaatatttcatcccttgaatgctggctaatcagaggaaagtcagcattttccggcccaggctaagagaaacatataagttagatttgatttaatcccttgacgaattcgaaacgagacgttttccctcccttgccgcttgttcacacccacttatttaattcggccttttgtgacaagcccctcggtgaaagaacctctctcttttcgacgtggttggaattaccatcatctccgacgaaagtgctatcatgcctccccgattatgtgatgttttctgccctgctgggcggagcattctcgggttgagaaaccttgaatcttttcctttggaaccttggttcccccggtctaagccgcttggaatatgacagggttattttcttaatcttatttctacttttacgggctctatccgtaaaaagggtacgtgctgccccttccttctctggagaatctacacggcggtctttccgtctcttaacaagtgtggatgcagcatgccggaaacggtgaagaaaacagttttctgtggaagtttagagtgcacatcgaaacagctgtagcgacctcacagtagcagcggactcccctcttggcgacaagagcctctgcggccaaaagccccgtggataagatccactgctgtgagcggtgcaaccccagcaccctgattcgatggtcattctctacggaaccagaaaatggttttctcaagccctccggtagagaagccaagaatgtcctgaaggtaccccgcgtgcgggatctgatcaggagaccaattgacggtgctttacactgtcactttggtttaaaaattgtcacagcttctccaaaccaagtggtcttggttttccaattttgttgagtggcaat

SEQ ID NO: 1468 - DNA, 1000 bp, Aimelvirus 2
  misc_feature 1..1000: note = strain gpai002, complete genome.1
  source 1..1000: mol_type = genomic DNA
taggatgacatgttccaagtcagatgccaacgacttggtaaggacgaatttgcccgcactacactacggttcccgcccgggacaactggtaccccattatgccacaacatggctgaaaagggtactgggtccccccggattgtgtccgtttgtagtgtgtgtaacgtggtttaccatctccactaacattggactaagcatttcatctttcctccccgattgtgtactcacttggctaacgctgggtggtcgcggttgggtccttgatttactttttctcgtctaagcatgccgactgtcctccccgattatgtgctcattcagttaactgctgggtggtcatgactaatatcgaggaaccttctgtctacgcttactttgagctccggtcgcttgacgcttgtagggcgatagggttatcttcccaacaacatctttattctacctccataggctctatctatggagacggagtgtggcacccgtcccttctttgggagcttcggtagtgacgccctttgtcactctcgccagccgaggcatgcctggtgccaggtagcaaagaaagcatatacttaaggacttgactgatttagcgcaagagtttgtagcgatgtccatagtgtctgcggattccccacacggcgacgtgtgccgcggaggccaaaagccacggtgttcacagcacccctatggatgcccacagaccccagtgggcactcttgttgccggactttcaggaaattaggtataggctcttctcaaactcctggcattggactaggtaagaatgccccggaggtaccccagtactccttcgggagtctgggatctgaccgggggccccacaaacatgctttacgtgtttcgtgcggtcaaaaattgtctaactagtcccaaccttgaacaagggattgttctttcctttttattactgagactggcctatggtgacaacagagattgactgtgaatacagttattttctggtgttcatcat

SEQ ID NO: 1469 - DNA, 1000 bp, Cardiovirus B
  misc_feature 1..1000: note = strain Longquan-Aa3-1 polyprotein gene, complete cds.1
  source 1..1000: mol_type = genomic DNA
cccccggttaccccttctgaacgcgggtcctgcgatagtgccaaccccagcttatccctaatcccgactccccgaccctaacccagggtcctcggaagaggatcaccaacttcatccccagaatgttgactaatcagaggaaagttagcattttccggcccagacttagagaagtagataagttagagccaaattgatacaagcatccccttgacgaattcgccatgaaacgtcgtccctcacttgccgcttgatcacacccagaactaacaattcggcccctcgtgacaagccccttgttgacacgacctctttctacgcgacgtggttggagattttgaaatcctttgactccgacgaaactaccatcatgtctccccgattatgtgatgctatccgccctgctgggtggagcattctcgggttgagttaacctattcctttactccttggactccggtcccccggtctaagccgcttggaataagacagggttatcttcctaactctctctcttctactcttaagtgtcctctacttaagaagggtatgtgctgccccttccttcttggagaactcgcgtggcggtctttccgtctctcgaagagcgtgagtgcagcatgcaaagacctgcgaagaaagcagtttcctgactaaccttagtttggacaagattccggctgtagcgacctcatagaagcagtggacacccctctcggtaacgagagcccctgcggccaaaagccacgtggatgagatccacttctatgagcggtgcaaccccagcaccccggtatcttggtcatactctggtgaacctggagatggcgatcttaagcaactttgtagagaagccaagaatgtccagaaggtaccccggctcacgggatctgatctggagaccagtacactgtgctttacacattgtctctggtttaaaaactgtcacagcttctccaaaccaagtggtcttggttttcccactttactacttggcaag

SEQ ID NO: 1470 - DNA, 1000 bp, Saffold virus
  misc_feature 1..1000: note = gene for polyprotein, partial cds,isolate: Pak-2491.1
  source 1..1000: mol_type = genomic DNA
tgtcttcgcggtgtagaacaccccaggggtaccccctttgaacgcgggtcctgcgaaagtgccaacccacgtctcttccttcctttaatccgattcccacctcgggtccataaaaaggaccaaatatgtcatcccttgaatgctggctaatcagaggaaagtcagcattttccggcccaggctaagagaaacatataagttagatttgatcacaatcccttgacgaattcagaacgagaagttctccctcccttgccgcttgttcactcccttccattcaattcggcctctcgtgacaagccccttggtgaaagaacctctctctttctgacgtggttggaattaacatcatttccgacgaaagtgctatcatgcctccccgattatgtgatgttttctgccctgctgggcggagcattctcgggttgagaaaccttgaatcttttcttttggaaccttggttcccccggtctaagccgcttggaatatgacagggttattttcttcactcttacttctacttttatgggctctatccataaaaagggtatgtgctgccccttccttcttcggagaattcacacggcggtctttccgtctctcgacaagtgtggatgcagcatgccggaaacggtgaagaaaacagttttctgcggaagtttagaatacgcatcgaaacagctgtagcgacctcacagtagcagcggactcccctcttggcgacaagagcctctgcggccaaaagccccgtggataagatccactgctgtgagcggtgcaaccccagcaccctgattcgatgattattctctacggaaccagaaaatggttttctcaagccttccggtagagaagccaagaatgtcctgaaggtaccccgcgtgcgggatctgatcaggagaccaactggcagtgctttacactgttaccttggtttaaaaactgtcacagcttctccaaaccaagtggtcttggttttcccattttaattgatggcaat

SEQ ID NO: 1471 - DNA, 1000 bp, Saffold virus
  misc_feature 1..1000: note = strain Can112051-06 adapted, complete genome.1
  source 1..1000: mol_type = genomic DNA
gttcgcggtgaagaacaccccaggggtaccccctttggacgcgggacctgcgacagtgccaacccacgtctcttcccactattattattccggttcccgccttaggtccattgaaaagaccaaatatgtcatcccttggatgctggctaatcagaggaaagtcagcattttccggcccaggctaagagaaacatataagttagaaatgattctaatcccttgacgaattcggaacgagaagttctccctcccttgctgcttgttcacacccatcatttaattcggccctttgtgacaagccccttggtgaaaggacctctctctttccgacgtggttggaattaacatcttttccgacgaaagtgctatcatgcctccccgattgtgtgatgttttctgccctgctgggcggagcgtcctcgggttgagaaacctttaatcttttcctttggagccttggctcccccggtctaagccgcttggaatatgacagggttattttccaaactctttatttctactttcatgggttctatccatgaaaagggtatgtgttgccccttccttctttggagaatctgcgcggcggtctttccgtctctcaacaagcgtggatgcaacatgccggaaacggtgaagaaaacagttttctgtggaaatttagagtggacatcgaaacagctgtagcgacctcacagtagcagcggattcctctcttggcgacaagagcctctgcggccaaaagccccgtggataagatccactgctgtgagcggtgcaaccccagcaccctggttcgatggccattctctatggaaccagagaatggttttctcaagccctccggtagagaagccaagaatgtcctgaaggtaccccgcgcgcgggatctgatcaggagaccaattggcagtgctttacgctgccactttggtttaaaaactgtcacagcttctccaaaccaagtggtcttggttttctaattttgttgactggcaat

SEQ ID NO: 1472 - DNA, 1000 bp, Saffold virus
  misc_feature 1..1000: note = strain BCH1031, complete genome.1
  source 1..1000: mol_type = genomic DNA
ttttcgcggcaaagaacacctcaggggtaccccctttgaacgcgggacctgcgatagtgccaacccacgtcttttcccactcctaacccggttcccaccttatgtccattgaaaggaccagatatatcatcccttgaatgctggctaatcagaggaaagtcagcattttccggcccaggctaagagaaacatataagttagaaatgattctaatcccttgacgaaaccagaacgagacgttctccctcccttgccgcttgttcacacccatttgattgattcggccttttgtgacaagccccttggtgaaaggacctctctctttctggcgtggttggaattaacatcctttccgacgaaagtgctatcatgcctccccgattatgtgatgctttctgccctgctgggcggagcattctcgggttgagaaatctcaaaccttttctttttggaactttggttcccccggtctaagccgcttggaatacgacagggttattttctatactcttatttctacttttacgggctctatccgtaaaaagggtaagtgttgccccttccatcttcggagaatccacacgacggtctttccgtctctcgaaaagtgtggatgcaacatgccggaaacggtgaagaaagcagttttctgtggaaatttagaatggacatcgaaacagctgtagcgacctcacagtagcagcggactcccctcttggcaacaagagcctctgcggccaaaagccccgtggataagatccactgctgtgagcggtgcaaccccagcaccctggttcgatggctattctctatggaaccagagaatggttttctcaagccctccggtagagaagccaagaatgtcctgaaggtaccccgcgtgcgggatctgatcaggagaccgaatggtaatgctttacattatcactttggtttaaaaattgtcacagcttctccaaaccaagtggtcttggttttccttttttatccacatggcaag

SEQ ID NO: 1473 - DNA, 1000 bp, Saffold virus
  misc_feature 1..1000: note = gene for viral polyprotein,strain Nijmegen2008.1
  source 1..1000: mol_type = genomic DNA
gcatcttcgcggtgtagaacaccccaggggtaccccctttgaacgcgggacctgcgatagtgccaacccacgtcttttcccacttttgccccgattcccacctcgggtccaatgaaaggaccacatgtttcatcccttgagtgctggctaatcagaggaaagtcagcattttccggcccaggctaagagaaacatataagttagatttgattcaaatcccttgacgaattcggaacgagacgttctccctcccttgccacttgttcacacccacacttttgattcggccttttgtgacaagtcccttggtgaaagaacctctctctttccgacgtggttggaattaacatcatttccgacgaaagtgctatcatgcctccccgattgtgtgatgttttctgccctgctgggcggagcattctcgggttgagaaaccttgaatcttttcctttggaaccctggttcccccggtctaagccgcttggaatacgacagggttattttccttattcttacttctacttttatgggttctatccataaaaagggtatgtgctgccccttccttctttggagaattcgcacggcggtctttccgtctctcgacaagtgtgaatgcagcatgccggaaacggtgaagaaaacagttttctgtggaagtttagagtgcacatcgaaacagctgtagcgacctcacagtagcagcggaaccccctcttggcgacaagaacctctgcggccaaaagccccgtggataagatccactgctgtgagcggtgcaaccccagcaccctgattcgatggtcattctctacggaaccagaaaatggttttctcaagccctccggtagagaagccaagaatgtcctgaaggtaccccgtgcgcgggatctgatcagagaccaattgacagtgctgtacgctgtcactttggtttaaaaactgtcacagcttctccaaccaagtggtcttggttttccaatttttattgaatggcagt

SEQ ID NO: 1474 - DNA, 1000 bp, Sikhote-Alin virus
  misc_feature 1..1000: note = strain P-113 polyprotein gene, complete cds.1
  source 1..1000: mol_type = genomic DNA
cccggccaccccctttcgacgcgggtactgcgatagtgccaccccagtctttcctactcccgactcccgactctaacccaggttccttggaacaggaacaccaatatactcatcccctggatgctgactaatcagaggaacgtcagcattttccggcccaggctaagagaagtagataagttagattccaaattgatttatcatccccttgacgaattcgcgttggaaatgcacctctcacttgccgctcttcacacccattaacttgattcggcctctgtgttgagccccttgttgaagtgcttccctccatcgtgacgtggttggagatctaagtcaaccgactccgacgaaactaccatcatgcctccccgattatgtgatgctttctgccctgctgggtggagcatcctcgggttgagaaaaccttcttcctttttccttggaccccggtcccccggtctaagccgcttggaataagacagggttatcttcacctcttccttcttctacttcatagtgttctatactatgaaagggtatgtgtcgccccttccttctttggagaacacgcgcggcggtctttccgtctctcgaaaagcgcgtgtgcgacatgcagagaaccgtgaagaaagcagtttgcggactagctttagtgcccacaagaaaacagctgtagcgaccacacaaaggcagcggaccccccctcctggcaacaggagcctctgcggccaaaagccacgtggataagatccacctttgtgtgcggcacaaccccagtgccctggtttcttggtgacacttcagtgaaaacgcaaatggcgatctgaagcgcctctgtaggaaagccaagaatgtccaggaggtaccccttccctcgggaagggatctgacctggagacacatcacatgtgctttacacctgtgcttgtgtttaaaaattgtcacagctttcccaaaccaagtggtcttggttttcactctttaaactgatttcact

SEQ ID NO: 1475 - DNA, 1000 bp, unidentified
  source 1..1000: mol_type = unassigned DNA; note = Theiler's encephalomyelitis virus, isolate1 sequence
cccccggttaccccctttcgacgcgggtactgcgatagtgccaccccagtctttcctactcccgactcccgaccctaacccaggttcctcggaacaggaacacaaatttactcatcccctggatgctgactaatcagaggaacgtcagcattttccggcccaggcttagagaagtagataagttagaatctaaattgatatgacttccccttgacgaattcacgttggaaatgcacccctcacttgccgctcttcacacccactaattgattcggcctactgtgttgagccccttgttgaagtgcttccctccctcgtgacgtggttggagaaatcttgtcacccgactccgacgaaactaccatcatgcctccccgattatgtgatgctttctgccctgctgggtggagtatcctcgggttgagaaatccttcttccttttaccttggaccttggtcccccggtctaagccgcttggaataagacagggttattttcacctcttcttcttctacttcatggtgctctataccatgaaagggtatgtgtcgccccttccttcttggagaactcacgcggcggtcttccgtctctcaaaaagcgcgagtgcgacatgcagagtaacgcgaagaaagcagttcctggcctagctctagtgcccacaagaaaacggctgtagcgaccacacaaaggcagcggaactcccctcctggtaacaggagcctctgcggccaaaagccacgtggattagatccacctttgtgtgcggtgcaaccccagcaccccggtttcttgttgacactctagtgaatccttgaatggcaatctcaagcgcctctgtaggaaagccaagaatgtccaggaggtaccccttcctcgcggaagggatctgacctggagacacatcacacgtgctttacacttgtgcttgtgtttaaaaattgtcacagctttcccaaaccaagtggtcttggttttccttttttatcctactgtcaat

SEQ ID NO: 1476 - DNA, 1000 bp, Human cosavirus A
  misc_feature 1..1000: note = clone V8B polyprotein gene, complete cds.1
  source 1..1000: mol_type = genomic DNA
ggctcactcctgtacaccgtgagtccgcgcagtgctgacttaacacttaagtaatgtgtaggccgagaacgacaccgctcggctcccacctttcaccaccgtgggattaacaggttcaatacacaaattcctgtccttggctatgtcaaagcaatacagtgtgtacatgatgtgcacgctcaaggcggagacttaggcctcacagattgtgttttgtgatattgaatgctggatggtcacgttggagactgcatgtggcagtcttgaaacgtgtggtttgacgtctatccattatggcagtgggtggagtactgcaaagatgtcaccgtgctttacacggtttttgaaccccacaccggctgtttggcgcttgcaggacagcaggtttattttcttatgttctctatttctagccaacaggacactatcctgttgggcggagtgatactcccgttccttcttggacagattgcctccacgacctttgtggatctcaaggtagtcaagtcactggtgaatagagcgaaggttgaggagacctgaggaatttccatgtggctttgccaggagttgtagcgatgctgtgtgtgtgtgcggatttcccctcatggcaacatgagcctcacaggccaaaagccctgtccgaaaggacccacacagtggagcgaccccagctccctcctacaaagctttgtgagaatgaactcacgtttattcttctttattctctatttacatcaggccccaaagatgtcctgaaggtaccttgtgtatctgggcatgagcaccatcaactacccggacttgcacttcggtgcagacgcatgtggtgtcccagcccctctgcttcggcaggggggcttttgctcgctcagcacgagatctgatcaggagtctcccccggtgtgctttacacccggcgggggattaaaaattgcccaaggcctggcaaaataacctaggggactaggttttccttttattaacaatgtctgtcatt

SEQ ID NO: 1477 - DNA, 1000 bp, Human cosavirus A
  misc_feature 1..1000: note = strain AM326/BRA-AM/2017, complete genome.1
  source 1..1000: mol_type = genomic DNA
tccgctgtgatgggctcactcctgtacaccgtgagtccgcgcagtgctgacttaacacttaagtaatgcataggccgagaattacaccgctcggctcccacctttttccatcgtgggattaacaggtttaatgcacaaattcctgtccttggctatgtcaaagcaatacagtgtgtactcggtgtacacgctcaaggcggagatttaggcctcacagattgtgttttgtgttgttgaatgctggatggtcacgttggagactgcatgtggcagtcttgaaacgtgtggtttgacgtctatccattacggcagtgggtggagtactgcaaagatgtcaccgtgctttacacggtttttgaaccccacaccggctgtttggcgcttgcaggacagcaggtttattttcttatattctctatttctagccaacagggtactatcttgttgggcggagtgatactcccgttccttcttggacagattgcctccacgttctttgtggatcttgaggtgatcaagtcactggtaagtagagcgaaggttgaggagacctgaggaatttccatgtggctttgccaggagttgtagcgatgctgtgtgtgtgtgcggatctcccctcatggtaacatgagcctcacaggccaaaagccctgtccgaaaggacccacacagtggagcaatcccagctccctcctacaaagctttgtgagaatgaactcacgtttattcttctttattctctacttacatcaggccccaaagatgtcctgaaggtaccttgtgtatctgggcacgagcaccatcaactacccggacttgtgcttcggcgcagacgcatgtggtgactcagcccctctgcttcggcagaggggctttttgctcgctcagcacgagatctgatcaggagcccctcccagtgtgctttacacctggcgaggggttaaaaattgcccaaggcctggcaaaacaacctaggggactaggttttcctttattaaca

SEQ ID NO: 1478 - DNA, 1000 bp, Picornaviridae sp.
  misc_feature 1..1000: note = isolate bbr144pit2 genomic sequence.1
  source 1..1000: mol_type = genomic DNA
tcagaacagaatactcagtggacaggggaccaatccaatataagtcttgaccgggcctttctggaccagatgtccttaaggaggctgtgccaagccaccaggtaaatctctcaaagagagtccagagtctcgtaggctatgctgtattaatacagcaaagacccacacatccccgctttcaacgtctggcccacgaaacgggccactttctcggtctgaccattggtttattattgaaattggcttggaaatgctgacactgtaagttggtttgtgatttaaacaatggttaatctggactctctttgagagatttacctggtggcttggcacagcctccttaaggacatctggtccagaaaggcccggtcaagacttatattggattggtcccctgtccactgagtattctgttctgaaccgtgtaggcagggctagcgccaccatgattgccaagggactacctccctggtgacagggacccttgggcccaaaaggctaggtggcaactctcatgtcaagagaggggtatccaccccaatctgaatcatgtggagtgaagccactcgtcatggctctgaccccgagactgtctacatctagtaagatggatgaaaactggatttggagaccactctgattgtcttgatgagaaagtccgctatttgactgagtagatgccctccagctacccttatggatgtgaggaggggaccgtgactatagcgttccgctaaaccggtttaaaaaacatgaaaggtcaaatatgtggcgccattttccacttatatcaataaccatatgtctgacgaagttgattgtgctgagtgttctaagccctcctggactgtcagattaaaattggcttttctgcaatattttggttgccagtttgtatgggtttatcactcaggaaagaatcaagagaaagattgaaaatcttggattgtgcaacaaaagctcatttttgtccttgtgaaggcaaccagagattgcagtc

SEQ ID NO: 1479 - DNA, 1000 bp, Cosavirus F
  misc_feature 1..1000: note = strain NGR_2017_NHP_CV, complete genome.1
  source 1..1000: mol_type = genomic DNA
cggtgtgatgggctcactcctgtacatcgtgagtatgctcaaccactgactaaagggctgcttgaacttaacatcatggattccgatccgttacattgatcggcccgtgcccttctcaatatgggattaacagagcttcaacttggttttcctgtcttttagcgttccaacggtattatgccacaacatggcagaaagcccgcggtagctatcacagattgtgtaaccaggtttggctgctggatggtcatattcagatcgcatgcatgtgtggtcttgagatatgtcccggttgacgtttcccttatgttacattcttgacagccggtggagtgctgaaattacgtcaccatgctttacatggtttttgaactccacgccggtcgctagacgcttgtaaggcgataggcttatcttcctatttctcttctttctagcccagtaggttctatctactggggcggagcgaggttcccgttccttcttggacagctggtcaccacaccttgtggattcttagactggcaaaacactggtgcaagagttgaagggattatgtgtttaagtgaagttctactgctttttgaggaatcgtagcggtgctgtgtgtgtgtgcggattccctcctgcggcgacgcaggcctcacaggccaaaagccacggtcgaaagaccccacacagtggagatatcccatctccttcctctcttagtagtttaatgaatctttttcacaggatcttataagactactgcatttcagaccccaaagatggcctgaaggtaccttgtgtattcactttggctgaaccaccgactccccggactggctttgccgacgcatgtgggtgcccagcccctgcccttaagggcaggggcttccctcagcaagtgacacgagatctgatcaggtgccaggtcactggtgctttacaccaccctggttaaaaattgcccaaggtctgacaccccaacccaggggactgggttttcttttatctt

SEQ ID NO: 1480 - DNA, 1000 bp, Human cosavirus
  misc_feature 1..1000: note = isolate HCoSV/CMRHP57/CMR/2014 polyprotein gene,1
  source 1..1000: mol_type = genomic DNA
ctcactcctgtacaccgtgagtccgcgcagtgctgacttaacacttaagtaatgtttaggccgagaattacaccgctcggctcccacctttcaccatcgtgggattaacaggtaaactatgtgtattcctgtccttggttgtttcaaagcaatacggcatgtgcaatggcgcacaggcccaaggcggagaattagacctcacagattgtgttacacatttgtttatgctggatggtcacgttggagactgcatgtggcagtcttgaaacgtgtggtttgacgtctaaccattatggcagtgggtggagtactgcaaagatgtcaccgtgctttacacggtttttgaaccccacaccggctgtttggcgcttgcaggacagtaggtttattttcatttgaattctcttttctagccgtgtaggatctatctacacgggcggagtgatactcccgctccttcttggacaggtgacctccacgctctttgtggatctcaaggtgaccaagtcactggtgtttgaagtgaagattgaagagacactagggagtttcatgtggctttgccagggattgtagcgatgctgtgtgtgtgtgcggatctcccctcgtggcgacacgagcctcacaggccaaaagccctgtccgaaaggacccacacagtggggttgccccgacccctccctacaaagctttgtgcaaacaaacttttgttttgtctttcttaagcttctctcacatcaggccccaaagatgtcctgaaggtaccccgtgtatctgaggatgagcaccatcagctacccggacttgtagaacacattctacagacgcatgtggtaacccagcccctctccttcgggaggggggctttgctcactcagcacaggatctgatcaggagatccacctctcgtgctttacacgagggcgtgggtttaaaaattgcccaaggcctggcaaacaacctaggggactaggttttcctttattcaaaagttgtcaat

SEQ ID NO: 1481 - DNA, 1000 bp, Human cosavirus
  misc_feature 1..1000: note = isolate HCoSV/CMRHP49/CMR2014 polyprotein gene,1
  source 1..1000: mol_type = genomic DNA
ctctgccagtgattcccccttgcgggatctttttaaactttatttcaaactacgtttctaagcaactttaaatacacaagaacgttgacccttccattgggaatggaagagatgaaattgaaatggaagtattctattgtaatgtcaatagtcttaccatccgctgtgatgggctcactcctgtacaccgtgagtccgcgcagtgctgacttaacacttaagtaatgattaggccgagaattacaccgctcggctcccacctttcaccatcgtgggattaacaggtaatttgtatacattcctgtccttggttatgtcaaagcaatacggcatgtgcaaaggcgcacaggcccaaggcggagacttagacctcacagattgtgttgtatattaaattatgctggatggtcacgttggagactgcatgtggcagtcttgaaacgtgtggtttgacgtctaaccattatggcagtgggtggagtactgcaaagatgtcaccgtgctttacacggtttttgaaccccacaccggctgtttggcgcttgcaggacagtaggtttattttctttcaacttctcttttctagccgcacatgttctatgtgtgcgggcggagtgatactcccgctccttcttggacaggtgacctccacgccctttgtggatcttaaggttgccaagtcactggtgtttgaagtgaagattgaagaaacactagggagtttcatgtggctttgccagggattgtagcgatgctgtgtgtgtgtgcggatttcccctcgtggcgacacgagcctcacaggccaaaagccccgtccgaaaggacccacacagtggggttaccccaacccctccctacaaagttttgtgcaaacaagcttttgtttagtctctcttaagcttctttcacatcaggccccaaagatgtcctgaaggtaccccgtgtatctgaggatgagcaccatcgactacccgaacttgcgagcaaatttcgcagacgc

SEQ ID NO: 1482 - DNA, 1000 bp, Human cosavirus
  misc_feature 1..1000: note = E/D clone V13C2 polyprotein gene, partial cds.1
  source 1..1000: mol_type = genomic DNA
ctcactcctgtacaccgtgagtccgcgcagtgctgacttaacacttaaataatgtttaggccgagaattacaccgctcggctcccacctttcaccatcgtgggattaacaggtgactagtttgtattcctgtccttggttttatcaaagcaatacggcatgtgtaacggcgcacaggcccaaggcggagatttagacctcacagattgtgttacaaatttagtcatgctggatggtcacgttggagactgcatgtggcagtcttgaaacgtgtggtttgacgtctaaccattatggcagtgggtggagtactgcaaagatgtcaccgtgctatacacggtttttgaaccccacaccggctgtttggcgcttgcaggacagtaggtttattttcttttaaatctcttttctagccgtgcaggatctgtctgcacgggcggagtgatactcccgctccttcttggacaggtgacctccacgttctttgtggacctcaaggttaccaagtcactggtgtttgaagtgaagactagagagacactagggagtttcatgtggctttgccagggattgtagcgatgctgtgtgtgtgtgcggatttcccctcgtggcaacacgagcctcacaggccaaaagccctgtccgaaaggacccacacagtggggtgaccccgacccctccctacaaagctttgtgcaaacaatcttttgtttagcttttcttaagcttctttcacatcaggccccaaagatgtcctgaaggtaccccgtgtatctgaggatgagcaccaccgactacccggacttgcgcacctaacgcagacacatgtggtaatccagccccctccttgaggggagggggctttgctcactcagcacaggatctgatcaggagatccatctctggtgctttacaccggagcatggatttaaaaattgcccaaggcctggcacacaacctaggggactaggttttcttttttatttttcaagtttgtcaat

SEQ ID NO: 1483 - DNA, 1000 bp, Coxsackievirus
  misc_feature 1..1000: note = A10,isolate QD102R/Shandong/China/2014, complete1
  source 1..1000: mol_type = genomic DNA
catgtcttgatcaagcacttctgtaaccccggactgagtatcaatagactgctcacgtggtcgaaagagaaaacgttcgttatccggctaactacttcgagaaacctagtagcaccactgaagctgcggagtgtttcgctcagcacttcccccgtgtagatcaggtcgatgagtcactgcttaccccacgggtgaccgtggcagtggctgcgttggcggcctgcctatggggcaacccataggacgctctaaagtggacatggtgtgaagagtctattgagctagttagtagtcctccggcccctgaatgcggctaatcctaactgcggagcgcatgcccccaaaccagagggtggtgcgtcgtaacgggtaactctgcagcggaaccgactactttgggtgtccgtgtttcttttattctcataatggctgcttatggtgacaattgaggaattgttaccatatagctattggattggccatccggtgtgcaacagagctattatctacttgtttgttggatacattccattgacacctaaatccttcaatacattgtactatattttaacgttgaacgcaagaaaatgggagctcaagtctcgacgcaaaaatccggcagtcatgagactggtaatgtagccactggaggatctacaataaacttcactaacatcaactattataaagattcttacgccgcgtcagctacccggcaagacttcacacaagatccgaagaaattcacacaaccagtgttagactctattagagaactatcagccctttgaactctccttctgtggaagcttgtggttatagtgatagggtcgcccagctcactgttgggaactcctccatcactacccaagaggctgcaaatattgtattagcttatggagagtggcctgagtactgccctgacacagacgcaactgccgtggataaaccaactcgtccggacgtgtctgtcaacaggttctacactctggactccaaa

SEQ ID NO: 1484 - DNA, 300 bp, Hainan astro-like virus 1
  misc_feature 1..300: note = strain LPXYF118785 hypothetical protein,1
  source 1..300: mol_type = genomic DNA
acccttggacgagacaactttccagatcattgttgtgacgctgctttttctcgcatttgttcttcaacttttttccatcgcgctctcatttgtgagccttcgagaagaacaagtgtggtctcccaaaccacgttgggatcgacgtcgtcacaaccaccatccttaaatggaaattgatgaacttgtgttaattgttttgaccctcaatacgattttatttttcttttttattgttgtcgttgttttgatttttggatttattttgtttaatttttgttttcgaaatcggtgtatacccta

SEQ ID NO: 1485 - DNA, 300 bp, Beihai sipunculid worm virus 1
  misc_feature 1..300: note = strain BHNXC40689 hypothetical2
  source 1..300: mol_type = genomic DNA
gtcatcggctttgccttcggacaaggcattataatatgtgtccctctgtgcggtgcctccgtacatctgcggaaaaccaaaaaggcaatgtttgtattggttaccatgttcatgttttttacgtatttatatatttacataggcttgcatacatttgtaaaatagtaaccggcgtacctctttcgcacgggaggtgcgactgtacatagaagtgcgtccaacacaacaatctacgatttagagccgactctaaaaacacaaaaagtcggcaccgtcacgttcgctcatgcggaccaacct

SEQ ID NO: 1486 - DNA, 300 bp, Wenzhou channeled applesnail virus 4
  misc_feature 1..300: note = strain WZFSL85898 putative1
  source 1..300: mol_type = genomic DNA
tagtgaaaggcagcctgacatgataataagagttgttacgtacgagagatcttctccaattggacagctttcacagcgattcagattagagaacacaatctgtttgtctgcagagcatttcttccttttgaatatagaagacggtcctgtggccttggtgacccctttcttgaacttctatgcagagcgatttgttgcattcaacacctcgccttcgagtgtactcatttccttcgaccaatccatctacgccccatataatcctcatctccaggcaagacagatccaggcagtgtcaga

SEQ ID NO: 1487 - DNA, 301 bp, Lampyris noctiluca chuvirus-like virus 1
  misc_feature 1..301: note = isolate 17FIN7 segment 2,1
  source 1..301: mol_type = genomic DNA
atgatacattaagagtagtggataatttaactgcaaaggctagagaaggggcaaggacgaccaatgtcaactcaattggtggaagctgttagagcagcgtttttaaccctagacataagcttagatatatagtgtaggatataccgttaagataccagccttgtagagatgggattgttttaaaaccttaaaataatgaagatacaacagaattcgtatcaaagattcataccataaattgttattcaatcttttacgagtgattagtgcctgttagtattatctacatttgaatttgaaa

SEQ ID NO: 1488 - DNA, 301 bp, Hubei virga-like virus 16
  misc_feature 1..301: note = strain arthropodmix13816 hypothetical2
  source 1..301: mol_type = genomic DNA
agctcatgtaccttttacctgtcactcttttacagttgcttcaggttttgttctctccgtcaacaactataactcagaagtgcgaagctgcagagttttaccagcgttataattttctttactatagtaggtgctcttattctgtaaaatattttatctgccccatttgtatccgaagatgttatttttgtgatttctttaatcaagtatttgactgctattggagatttttccagttttcagtttttagaaattttatctgtatagttctttttattcttattattttgtttccgtaata

SEQ ID NO: 1489 - DNA, 302 bp, Barley aphid RNA virus
  misc_feature 1..302: note = 10 09BaA3 gene for polyprotein, complete1
  source 1..302: mol_type = genomic DNA
cctgtaaacccttgttacttcagtcttttcactgttataaccgtttactactcttggtattccataaataaagaaaatttaagtttcttgatttaacccaatttctaaaactattggttggtttgaatcaaatcttgcgttgttgacacgacactcttgctattaagtttaagagtccaagatcaataccgcgaactctctatactggtgaggaaccgtatagataaccgtcaagttgttgtagacttgcgttaactattttaactttgtttaaaatactgtagtttccagtctgaagcaaa

SEQ ID NO: 1490 - DNA, 302 bp, Beihai bunya-like virus 3
  misc_feature 1..302: note = strain BWBFG40849 RNA-dependent RNA1
  source 1..302: mol_type = genomic DNA
atagaacacacttgtgcgcgactgccccccgaagggggcccataacatggaaaacaaaagcaaaagtaataacacaaataaaaacaatactaagctacctcatccagatcagaagggttatagattttacgaattatcagaagaagagaaaaagaagctgattagaccaaggattcaattagaagattatagtacaaaacagagggctagagaggttgaccgagtgacgaggtctcaaattccaaaagaggaaataatattatctgataaagtaaaagaggtacttgagaagtttcctatag

SEQ ID NO: 1491 - DNA, 303 bp, Bremia lactucae associated dsRNA virus 1
  misc_feature 1..303: note = isolate DML-A_DN43224 ORF22
  source 1..303: mol_type = genomic DNA
gaagttcgttcccgtgtgtttaaggtttcagtttatgactgggtccgagactctcctgctaatggtttaactgaagattctggtcgtcttgagtggatatatgatactaataagtgtcttatcctggctcaaggtgacggctggtacgttagacctttagtccaatctgatataattaatttactatctggtgagggcgatttagtaggagacactctatatggaggtagcacatgggaagagaaccatatcttgaaagtccctagttctgttcataaatttactccgtcttgggtttatact

SEQ ID NO: 1492 - DNA, 303 bp, Strepsipteran arli-related virus OKIAV104
  misc_feature 1..303: note = cRNA sequence.1
  source 1..303: mol_type = genomic DNA
aaaagcgacgcaaaccgccaacagcgaaagcacaaaaagaagacaaacgaaacgagaccatcaaggagttgcgaggataataagttcgagaagtgcaaatataatttagtatttgagttaattacaaaagattaatcaaaacaatatatctaaattagaataattgatcgcacttgggataaaagatatctatatatttgaaattctagtagtttttagatttataggtagtagaataaggcaaaataatcctctttacagataagcaagagatctttctgatctagtttcacagatacaatt

SEQ ID NO: 1493 - DNA, 303 bp, Beihai picorna-like virus 79
  misc_feature 1..303: note = strain BHBJDX18844 hypothetical2
  source 1..303: mol_type = genomic DNA
attggcatcgaccgcaatgtcattaaactacgaccggggcaggttaccacgtgcagatcgacaataatctggctaaaagtgatgcacggaggcgccccaaacgacacagttgggtatttacccttacttccaggatgctgttgtggcagccccacgaaaatccaggagaccagatcgacgccgcccagttaagctgctgtggcaactaggctttatgtttagggcgtttaaatgagttagcttgcaacaaataacatcaaacttgcaactctcgaggaagagtttacacatgacgcgactacc

SEQ ID NO: 1494 - DNA, 304 bp, Beihai picorna-like virus 124
  misc_feature 1..304: note = strain BHBJDX18598 hypothetical1
  source 1..304: mol_type = genomic DNA
cagagattattattgtttatctctgtgcttccgtcaaatacttattgcttatacttatattttattgaatatttcgaccgagtttacgttggacccaggtgagtcgtaatacgtttactcgtcaagccattttacaagattgatccgcgcgattgggattcaagtctagtcaaacccatttatacatcttctatagcgcgtgacgctttcggtttgtggaaggatattagcgaggcatttgttttagcagtctacctatttgttggagttgttgtgagatctatagacagtgtcatttccaaga

SEQ ID NO: 1495 - DNA, 305 bp, Tacheng tick virus 8
  misc_feature 1..305: note = strain TCP-2 polyprotein gene, complete cds.1
  source 1..305: mol_type = genomic DNA
gttacgtcccgcgtttggcttttgcccgtgctttgataaagagcatttcggacttttcggcgagttttcttcgttagtcgaaggaaatttttgacaacaaatttgttgttttatctcgacacttatcgtggtgtagagatctattaattatttgatacaaatatttgtattagataattttatatatataaatatatataatttagttgtattcttttgctttgtttaatagtagcatttaacctacgctttttcttgctttcatttgttacttgttaatcttcttgagagtttgattttttgct

SEQ ID NO: 1496 - DNA, 305 bp, Beihai picorna-like virus 6
  misc_feature 1..305: note = strain BHNXC41284 hypothetical protein2
  source 1..305: mol_type = genomic DNA
ttggctttgactagcttaggctttcctggatgagcctttaatcatctaggtctttttgtgctttatatatttatgggttataaaacttctttttctttagccttttcctgtaaggaaggccctttatataaagtacggttctgcgtgtgagcgtgtggggaggtatttacttccgtcctttggcattacttacgttaagtcgggtatttgtcataaaattttaggaaatcgttcctggagggtctagtatgagcagctagcctcctatggtttaaatatagctttcttttaattatactaatttt

SEQ ID NO: 1497 - DNA, 305 bp, Beihai picorna-like virus 42
  misc_feature 1..305: note = strain SCJXSX39263 hypothetical2
  source 1..305: mol_type = genomic DNA
gtgatcacatcaccattggcttgcgggaggatcgctatccgctagcttcttaagaaagcgaagactatttggtacagtagtcgattgaccattatctcttcatgtactacggtttgtcgccgtgccccaagacacgaaacagttggattaatctgtccactgtgggtgtaatttattactagtagatttctaaacaatacaatgaagagcattggggaacgcggtataattcccccgcggtttggtatcccgcgacaccagaattaccctccacttccgtgcacatcgtgccagcgcgaacggaa

SEQ ID NO: 1498 - DNA, 305 bp, Hubei toti-like virus 14
  misc_feature 1..305: note = strain QTM6211 hypothetical protein 11
  source 1..305: mol_type = genomic DNA
tagaatacgctggaacatggtctccagatgctggcagtcatctgggtgaacctaggaaataccgactgcctatagctgccacccatcttccaatacctatcaacccgagggagtatcacattcatttaccggacaaacttttcttcgaactcaccgttccaagtagtttgaggcgccggccgaaggatgttgagaaactccggcggtattgggggaccgtaccatcatggtggcctatatctaacacgacagactgcgcatggcccatctatgtgcactacaactcaatcaaatcttgtggccat

SEQ ID NO: 1499 - DNA, 306 bp, Trichosanthes kirilowii picorna-like virus
  misc_feature 1..306: note = strain pt111-pil-52
  source 1..306: mol_type = genomic DNA
aacttaatagttttctttagtacattcattataattctagtttttattataatttattattatatatatttttaggatttagtgtagatacagagttataatgcattttttataaaattttttaattgcagctactgaacattttttcctattttcaatttttaaaaattttcgtttaatgattgttagaattgtagtaactaacttaaacgtaaaacaaatgctacagcaaccaatcaatcaataacacaatcaaattcagttttttataataataagagcacggcagttagagactcaggctca

SEQ ID NO: 1500 - DNA, 306 bp, Solenopsis invicta virus 7
  misc_feature 1..306: note = isolate Formosa, complete genome.1
  source 1..306: mol_type = genomic DNA
attcgcatcgacctcacgtaaaagacgtagagacttcgagatccttcgagtgacgccgaagagaaaatacgcgttattgttttaaaaagtgctcctcatattgagacgaagccgctgtcgctatcacgaccacagcataatcatcttcgtgagacccctcgccagtatctccgaggttaatcctttgattcagcgctcgcgcgtgccacccaccgcttaataagaacgttctgggtttgtcagttttgaccctcacgtggcaccacttaattgacatcaaattaaagtttcgtcatcttctaaaag

SEQ ID NO: 1501 - DNA, 307 bp, Bipolaris maydis chrysovirus 1
  misc_feature 1..307: note = strain SS01 segment RNA3, complete1
  source 1..307: mol_type = genomic DNA
cgataaaaacagaaaatccgatagcacgacaacagatagttggccaattgtttaaaacaagattgagatcacttaataataaataatttaaatcaaaattaagttggtgtcttggctggctggtccagaacaagttgtcgagccgtctgatgagtagcacctcagggtcacgaaacgctggacgtaacggcggaacagattattgaggttagtagaacattatcacaaacaaaacaacaacaacacaatcacacaacaacgaacaaacaacaatccaagacaagcactagaggttagcacatgcaag

SEQ ID NO: 1502 - DNA, 307 bp, Human respiratory syncytial virus S2
  misc_feature 1..307: note = complete genome.2
  source 1..307: mol_type = genomic DNA
caaatatccttgtagtataaattccatactaataacaagtagttgtagagttactatgtataatcaaaagaacacactatatttcaatcaaaacaaccaaaataaccatatatactcaccgaatcaaccattcaatgaaatccattggacctctcaagacttgattgatgcaattcaaaattttctacaacatctaggtattactgatgatatatacacaatatatatattagtgtcataacactcaatcctaatgcttaccacatcatcaaactattaactcaaacaattcaagccatgggacaaa

SEQ ID NO: 1503 - DNA, 307 bp, Sitobion miscanthi flavi-like virus 1
  misc_feature 1..307: note = 07BaA1 gene for polyprotein,1
  source 1..307: mol_type = genomic DNA
ctttcaccccttgtggaccctagtgattactgagtacttctacttagaatcctgtctcacagtttttggtgttttctaaataagcataattaagttgcttggttttgttatatttctattgttgtaacatagccttttcgcgttgtctttacgtcccacttctcattagagtaaagtgtccaaagagataccgcgtttttgttttgagcgttgagagaatccgctcataacaggcaccagtcgttgtagactagtgtatctgcacaaatttttattttatttttattttaactatttgtgtaccacc

SEQ ID NO: 1504 - DNA, 307 bp, Picornavirales Q_sR_OV_036
  misc_feature 1..307: note = putative non-structural protein2
  source 1..307: mol_type = genomic DNA
tccccccacccacggcattggaatggggccttctttctatggaggaaagtgtgaaggcagcaaatcctgaatccaatgctaagagacgagggttatttagcccgtttatgccatggcgcgtctttaaataaaagctcggcatacctccagtcttcccttaggaataagtgtaccttaggtcgactataaaacaaccacacttgctaacaatgatacaacaaccccccaaactgcatctggttttaccacaaaggaggatttatcctctcgaggacgtcttgatactattcaagacgtttcctcctct

SEQ ID NO: 1505 - DNA, 307 bp, Hubei tombus-like virus 5
  misc_feature 1..307: note = strain WGML136364 hypothetical protein 11
  source 1..307: mol_type = genomic DNA
cacgggtgcaccgttaagcacttcaccatgggcatggtaaggttgaatgcccccactcggaaggtggttaacaccgctgaggaccagcgacaccaattccccgctctggactgagccgctcggcgcgatcgttaagagacagcaccaggctagcgtctgccatcaacatagacgtgggaagcatatcccttggaagcgattgcatctgagaacagcccgtaaacttcagcggtaagtgggtcggtcgcctgatcgtgatggccccaggtgcgtgggttaacgcaccatctccccccactaatacact

SEQ ID NO: 1506 - DNA, 308 bp, Big Cypress virus
  misc_feature 1..308: note = strain BCNP2-24 A hypothetical protein 1,1
  source 1..308: mol_type = genomic DNA
cataaattcattataaaaaccaagtcgtgcaatcaatttgtacgatcataccaggtacagtttcaatagctgtactcagcaatctgctataaatcaattttataacaacatcacgtgcttacggtcaattcgtaagcataataatcagttctaaataattgtttagaaccatcacgccgatacaagaactttgtatccccataacttgaacgctgtcaatcaacgctcaaaatatccacctacagacacttctgtaagtctcgcgcaatttttcaatattttgaaaaactattccccgtttacccgca

SEQ ID NO: 1507 - DNA, 308 bp, Plasmopara viticola lesion associated ourmia-like virus 11
  misc_feature 1..308: note = isolate1
  source 1..308: mol_type = genomic DNA
gccgcaaagtcaagactttacgtcacgacatccgtaaggatgtctggccgaaagggtttccccgaattttagatctttcgatcgataggactgctgctcgaatgagtgtgccgtcttttctatcattgattagtaatttttggacccttaggcccggtattaaatattatgtgcccgcagttgtggtctgcgttacctttctccacactagggatagcatctattcagccatcgcgtacatacctgaatcaaaacaaagtgatagcgcgcctggcccccgttacgggccatcgtaaaacccctcgaac

SEQ ID NO: 1508 - DNA, 308 bp, Perth bee virus 1
  misc_feature 1..308: note = isolate WA2-13 nonstructural polyprotein and2
  source 1..308: mol_type = genomic DNA
tcttgtaaatatatataaattcctagttctaaaatatttattatgctatttgtgtattgtcctttattatttaatattaccgcccaagatgggacgaggcagcccctcaatatctagggcacctaggtgcagattgtctgttttagtggacaacaatctaaagaaactcactagcttcaaataacaatttaaccgaaaccaaaacaaaagacacaacctatcaagctagacttgacgaacacactgaagcaggagatattaatcctgggatcgagtaccaacgacaaattgtcactttttcagaagat

SEQ ID NO: 1509 - DNA, 308 bp, Ginkgo biloba picorna-like virus
  misc_feature 1..308: note = strain pt112-pil-2-NY genomic2
  source 1..308: mol_type = genomic DNA
aataaacaaatagacatactgtaagtggattgggttataatcgagtaattggcgcttgagccacagcccttacagtaatccacaaaagccaattagagctgatttgattgtataagcttgtaaattcaacaatcgcaaaacaattagataatattgaaaatttaatagatgaagaattgaatctatcatgcggaattaaagaagaatctcaattagatgatgtagtgacagatatatccaggtccataagaccttatctaccatgggaatgtggattaatattagctttagtaccacccttagtaggg

SEQ ID NO: 1510 - DNA, 308 bp, Changjiang tombus-like virus 8
  misc_feature 1..308: note = strain CJLX29920 hypothetical1
  source 1..308: mol_type = genomic DNA
ccttatggctttatttgtggtggtgtgaggagaccacgttgtgacacaacaaatagcctcgttgccctggtattacgagcgtcggtaaggttagcatcttgctgccagggatcggtaggtgcatatacgtcaagtgatgtgtgtacctttaatagggggcggcataaggccgccactgtagcacgcgtagcgcggtctaacgaaccgttgttggaggggcgtgttaccaccggcttgccggatggctggtcattctccaggtgttcccctccactccatgacaggaacccctaacactactacttcca

SEQ ID NO: 1511 - DNA, 309 bp, Phomopsis longicolla hypovirus
  misc_feature 1..309: note = isolate ME711, complete genome.1
  source 1..309: mol_type = genomic DNA
gggtgtagagaacctctgcgaggttcaatcataatggacatttgtgatgtacttacgtctctaggacgcccattactggtttatactctgtcgagttatcagtgattgtgcttgttctacgtatggaagctacagtttcattcgtaaagctcctacccctgattggttaagaacctgattacactaatgtgtaggccaacccgctggccctagcggtttcattcaattcttgttgggtgttctgtgaacttgaatcggtgagatgggcccgtgtgccccgtctggcctggactttaactagtgcctgag

SEQ ID NO: 1512 - DNA, 309 bp, Fusarium oxysporum dianthi hypovirus 2
  misc_feature 1..309: note = complete genome.1
  source 1..309: mol_type = genomic DNA
agacgatttcggtcttacgcccactaggggcgcccaatactggtttatactctgtcgagttgtttgagctggcttgcggacattcaaaggaacgtctcgagctattgggtagcagcaaacgtgatacatgggaagcgctgttgatccgtcggggaggctgtctagcgcgtttggcttggccagctgaggtcagtagggctatgaaacccaagggtggcgatcccacccaatcagcctaggaatccacaccaggataggtgcacggcttaacaaccgaggcacgtggaaatttggccagactatgagtgt

SEQ ID NO: 1513 - DNA, 309 bp, Hubei tombus-like virus 24
  misc_feature 1..309: note = strain GCM76561 hypothetical protein 11
  source 1..309: mol_type = genomic DNA
accaatatggttgagtccctggttctctacccatctaactgtcatggaccgttgaaggctggcaaccggaggtgacgcagatttggggtgtttcggactctgtgtattatcttaccgtccggggttttattccctgggaaccgcataattgatattgatgttagacggcagcgaggaagtgatactcagaggaaacgaatctcatcgaaccatcgaggagtccgacgagcagcaggcaggcttgcgactgggattcagcgatggaacgaaaataatggtggagcgtcggcggcagatgatctggccctc

SEQ ID NO: 1514 - DNA, 310 bp, Riboviria sp.
  misc_feature 1..310: note = isolate muf160shi4 genomic sequence.1
  source 1..310: mol_type = genomic DNA
gaactcgtccgacacaggaaaacgcgctctaaagcgcctaaaacatacagattacataatttcagagtatgatgaggtagttctcaataagtactttgaacccaacctagtgatatcgagactcctcaaggaatcctcccacaccatagcagctgttctactcgaacaggcaaatattgcttgcaacagccttcgcggcccaaggactattgaaataggacctgatgcaagaatacaagacacacacaagtgcgccgggctaatatgggcctgtagtgacggtaaggaccaaaagcgaattatcgagcac

SEQ ID NO: 1515 - DNA, 310 bp, Sclerotium rolfsii fusarivirus 1
  misc_feature 1..310: note = strain BLH-1-10 RNA-dependent RNA1
  source 1..310: mol_type = genomic DNA
tatttaagttattaattgagctggatcattttgtcggagatttgatggatctccctggctgtcctggccagtcttggatgtgctaagttgtgggtagtttccctaggtttcatgcctgcactctttcggaaaattccgaggtggattaaggtgcatctggctgaaaatagttttaaatcactcgtctccatcgcgttttgttcatttaaatcatgcttggtatcaagcctgatagtgccttaaagaccctgatgagccctggcacgaaacgcacttttgtgcgttggttgattttagttgttttgttagt

SEQ ID NO: 1516 - DNA, 310 bp, Auricularia heimuer fusarivirus 1
  misc_feature 1..310: note = isolate CCMJ1296, complete1
  source 1..310: mol_type = genomic DNA
ggggtttcgttgcagccttaagtgtgtttcacttgtagactggccagtacggctggcggccctttgtggggcgccttttgtgcaatgcttcgatcccgtacaacaatctggcatttcgccgggcctggcagggcttctcggactttttaatcacgcatgctttctctggctttctcggcgcgtgttttctcggactgtggctaaaattcattaaaatccaaaaacaatgccactacctcaatctcctacttgaccctgatgagcaaggagcgaaacacgactgccatcgtgttggttatgaagttttaaa

SEQ ID NO: 1517 - DNA, 311 bp, Plasmopara viticola lesion associated bunyaarenalike virus 11
  source 1..311: mol_type = genomic DNA
ctccacttggtggattgcgacaatcgggctgccactctcattgtagatttgaatgacaggaccccgatggttgcgaccccagtggagtcggaagtggattttggctaattgggtgttgtcgattatggcactcacgtcggcatggcgctgcatgggtgcggtactatggtttgtggacttggcagcaatattgtaatataattgtttcattacctatagtgtgtgtgctgggactggcgtaatacgtaacaactagtcccaaaaaccaaaaaactctttaacaaggattgtcctttgttttcaactgaacg

SEQ ID NO: 1518 - DNA, 311 bp, Xiamen sepia Stingray hepacivirus
  misc_feature 1..311: note = strain DHHHBHGS10983 polyprotein1
  source 1..311: mol_type = genomic DNA
aagggaagccctcctaggggcagggagtaaaacagccacccgtcgtgcggtctgcaaaagtctgacgctttgtgtgtatcagggtaaacccaccggaaggtggtgctggttttgaccaaaggcctgaatggtaacacattgccccagacagaactcactgtaatgcgtggtaagtccgtcgtactagtgggggggctctgcctcacttaatacaacagccggaatgagcacaccgagtcaaatctgggtgtatggttccgaaccgtctaaccgtaggttccaggtaactggaggcgtcggccgttggaggc

SEQ ID NO: 1519 - DNA, 311 bp, Barns Ness breadcrumb sponge aquatic picorna-like virus 1
  misc_feature 1..311: note = isolate2
  source 1..311: mol_type = genomic DNA
atatatatatgtataataaataaacaataaataaacaaataaaaaagaaacaacggtcttgggaagactaattaaaagcatccctctaggcgtaacctaccatgtctataataaataaccaaaaggaggctctttgtattggattaccgtgcgtgtccaactagttagtcataggacactgcataggcttgcaaagagaggcactttccccgtaaagtacccctattcaggggagtaatcgccatacagaagattaacacacgcattgtagaataagtcttctactttagcgttcataatgacttactagt

SEQ ID NO: 1520 - DNA, 311 bp, Wenzhou picorna-like virus 19
  misc_feature 1..311: note = strain WZSLuoII97616 hypothetical2
  source 1..311: mol_type = genomic DNA
tcatattaacaagggtttttgggactaccctgcagatgcttttcctgcaattctgtcccaacgctagattgctaacgatttgccgatatcgtcgaagatctttctagcgtcgcgtgatttatattacatatatattgcccattcgtttctggggctaatgtataccggtgtagcgagccatggctgcttggttaaagtgacccgtctgtgtgtataggcataaccacagatgtattttgtctgcgaacaacaatcaaagtaatacacatggtctattgaccgaattcattgatggagcacatggcaccaca

SEQ ID NO: 1521 - DNA, 311 bp, Hubei toti-like virus 21
  misc_feature 1..311: note = strain CC64629 hypothetical protein 1 and1
  source 1..311: mol_type = genomic DNA
actggggcaaaccaaacgttttatcccctgatgaagagtggacatatgaagattttagacaaagtatactacattacggagataaggtagcgagtggggaagaaaaagtctcatgcgaatgcgacggaagaataggatgggaaagggacctaactgaatttaaccaaaacttgaagcggttccatctaccagaagtgcacaagagatgtgcagggtgttacttgaataaaggcgcattagaagatgggctacacttactgttatacttagtgccgaaacaacagcaacacataattatagaacagtacaac

SEQ ID NO: 1522 - DNA, 311 bp, Hubei tombus-like virus 2
  misc_feature 1..311: note = strain WHSFII19265 hypothetical protein2
  source 1..311: mol_type = genomic DNA
tgaacccacttgggattagggcggagctaccgtcaacataaagccgcagacggccctgcgataacaaacagcaattgggttgatgtacatagaggaccaaaactgtgaaccctccggggggacgcaaaatttcagtgctaaacaaaacgccaagagactgcacggctccgcgttcctctatcgttagagacaaacgtatacatcgatgtacagtccccgtttgtggttcgggggtccaagaccaaccactactttcttcaccatttccgatttaactcttaatttctacaacgccactgtcattatccgtt

SEQ ID NO: 1523 - DNA, 312 bp, Plasmopara viticola lesion associated dsRNA virus 1
  misc_feature 1..312: note = isolate2
  source 1..312: mol_type = genomic DNA
ggaatttgttcccatgtcttcaaggttaggccatataagtgggtattagaatcgccactattggccatctcagatgaaacaagtcagctagaatgggcatatgatactgaaagtaacataactcgtgttctagctgacgggtggaacttgagacctttagctcattcagattggttgtcactttataataagactggttctttaattagtgataatgtgtcgggagcgtcgacatgggaagagaagtatccttcagaacctcctaataatttacatccatttgttccaaagtgggtgtattcattgaagctc

SEQ ID NO: 1524 - DNA, 312 bp, Linepithema humile polycipivirus 2
  misc_feature 1..312: note = putative capsid, hypothetical1
  source 1..312: mol_type = genomic DNA
ccaaccgtttaaaaatccaacgtaaagttctttatataagaacttaacgttccggttgacggcaggatcaaacctcagtaaccaatgaacctgagttaggaactacgggagctgggcgcagctggcggcggatcaaacctggaacccccagttaggaacgaccgagagggcgaggatttttaaacggttggtgtcgttattcacccttgatggaatacaagtaaaaatattaacccttaatgttagcaagtaagttagtttttaagtttgtgtttgtccccttaggttaagtttgtaagaacgtatggcacg

SEQ ID NO: 1525 - DNA, 312 bp, Primus virus
  misc_feature 1..312: note = isolate Ferlo, complete genome.1
  source 1..312: mol_type = genomic DNA
gaattagaccaacggggagtaggtgagttcctctcctctactagagactgatatagcccttaggtttcatcgctttgatctcagtgtgcccaaattaatagtaaccctcacatcaaaggggaaaatctgccccatctattttatcgttaacattcgcgtgtctacagaccctatactatatctatttttttagcttacattttaatccttgtgtgatttaaagagagaggtgatagaactatgagcccctcttgatttagaaaaaaccaaccatagaagacaaatataaactgcgctcacctatttcataaa

SEQ ID NO: 1526 - DNA, 312 bp, Beihai picorna-like virus 107
  misc_feature 1..312: note = strain BHZY60580 hypothetical protein1
  source 1..312: mol_type = genomic DNA
gttacccctacgtattttgtttaacattaatgaaattgaagtgtctccgcgactttcaattttattcaaccaatgcaagttatcaacgaaagttagttagaaagacataatacacaatttagatgtattggcgcttagtcaccgcattagtgttctgtcggaatttagacactaattattatattaattccattagagcgcatgattttgtcatgtcctttatccacccgcagaattggatatgcgaggtgaggtggtttaaacactcgtccgcgatttgaaacgccagcgaagtttttccacaattaaacc

SEQ ID NO: 1527 - DNA, 313 bp, Bivalve RNA virus G3
  misc_feature 1..313: note = partial genome.1
  source 1..313: mol_type = genomic DNA
cgaggagttatggaagtctcgtaatttaagtgaactcgaattgttcgagggtcttgaagagcctgagattaagccaattaaactcgtagaagaaaaacaagagaagaaggcttctgtattattcacttgtaatcgcgagaaacgtgttgataagatattgtctggtcatactgaactcgagataactaaatctggttatcttagatctccagaagaggtatgcggaattattaggaaaaagatcgagagcagaaagaagaaaaaggccgatcttagaagagagcgtgaaaatagatccaaagagaggggtctt

SEQ ID NO: 1528 - DNA, 314 bp, Plasmopara viticola
  misc_feature 1..314: note = lesion associated tombus-like virus 2 isolate2
  source 1..314: mol_type = genomic DNA
tacaaaaacagattctgaaactttgtcccaagctgagcccattggaactagctgaatttccacttcagtacgtgggtaagcaacggacgaggtatcagactgccgtcgagagcttgagtgtcaagagcttgagacgcgccgatgcgtacaccagcaattttacgaaaactgaacgtacgctcaaggccaatgcagtacctagaaacatctctccgagaagttataggtacaacgcccaggtaggacggttgttaaaaccggcagaaggtgtcctacttgatggcattgcgaaagtcttaaacagcaagaccgtg

SEQ ID NO: 1529 - DNA, 314 bp, Picornavirales N_OV_080
  misc_feature 1..314: note = putative non-structural protein2
  source 1..314: mol_type = genomic DNA
tcagctatgtgatacattttgcggtttgtatcgcatagaaccgcggctaagagtttcggaggtccccgtgaccttactatatttatagtaggaattagatgattccacaaaaccccaaaaatgagtggtttatagcattaacccacttcattcaattatagtatgctcctgacaataataataataataataaagggattaacattggccctcctaataccaatgtaaatagtcgtgttcttaagaactcgtctacctgtttgaagcaggaaacactggcgtttcatgatggatcgtcagaatggaggaattct

SEQ ID NO: 1530 - DNA, 314 bp, Wenzhou tombus-like virus 5
  misc_feature 1..314: note = strain WZFSL67420 hypothetical protein1
  source 1..314: mol_type = genomic DNA
cgagggtttatcactaggtaggataggagccgcacctatcttttcagggaacccaccctgttagccactgttaccagcgaccttcggaaagtcgtgttggatggtggaagggacaagcggattataaacgcctagccgttagccagcattgctgggtaggaacgcaaactgctttgcagtaggaggtgtgtagacaccactcgaggacagcgacggaggggctgtccacggcccacgaccgacgggcgcacaagaatcggctttggtgtccctccctaatatgaggtgacaaatttctcccatcttctctcact

SEQ ID NO: 1531 - DNA, 315 bp, Persimmon ampelovirus
  misc_feature 1..315: note = PBs3 RNA, complete genome.1
  source 1..315: mol_type = genomic DNA
tcagttttgtttggttgtatctcgcgggagttaatccgtaagagaataaccaaacaaaactgactttcctcttctttgctttcccgtctttatctttcacgttctcttgctgctttgcgattgcttgttcttttaggacccccgatcgctttcctttcttaaggctttcttttcgttacgtgcttctaggttttctttatcgtttcgccttgtttttcttttccttgctttttatctatttctgcgtttttctctttttacgttctgcttttattttattttaaagggcttttcccacttgcttcatgctttacc

SEQ ID NO: 1532 - DNA, 315 bp, Casuarina virus
  misc_feature 1..315: note = isolate 0071, complete genome.1
  source 1..315: mol_type = genomic DNA
aagtaataaccccgtccgtctagcttagacgaaaaacttagcttggaaatctagccacaacagttgctataagaatctctcgagacactctcccacttaacatcttctaggaatcttgctgctacaacaatttggctagtaaacgaaaaattcatacagttgtaagagacctttggtccgtacttttgaaattttgtttctaatatatataaatttgaaaggagggggtcttagcattgtctaagcactgcctacaaccctagcgaatacatatacattagtatgaatttgttgtaatcgtcctgataagacaca

SEQ ID NO: 1533 - DNA, 315 bp, Cherry virus Trakiya
  misc_feature 1..315: note = isolate PAI 2-29, complete genome.1
  source 1..315: mol_type = genomic DNA
cttagaatgtttcttaaaaccttgccaagcctgaggattttaccatatcgatttcgatcgctgtgataatcttctcactttccccccaccctcccatattgtaattgaagcggggagttttgattgcaattgtatagtcattcctatttaggatacggttggactttaactaatcctccccccagcctattagtctgtaatgcgaacgctaaattggctgtgtaaatttcttgcattaacaatccactacacaaacaaaatgtttctgagggtcctcaaacgaccagcccccaggatatacattcaccagacaaa

SEQ ID NO: 1534 - DNA, 315 bp, Wenling scaldfish picornavirus 2
  misc_feature 1..315: note = strain XDXMC61459 polyprotein1
  source 1..315: mol_type = genomic DNA
gtgacaaggtggatggcatgccaccacctatgccccctgagtaaagcaattctatgaccttagactgatcttgattcaaccgtaattgtctaatccaagttaaataaccccaacgtttcgtcgacggatgtggagaaactttgaaatacaactaaactcgtcgctcttgctattttgtagcacaagagagtctagcctctggttgattatatttcaagactgcttgttgtggagaagttaagccattgggaatgggacacgtttgcgttatccctggatattgccgccctttggtgaagctcatgcttgggatgc

SEQ ID NO: 1535 - DNA, 315 bp, Hubei virga-like virus 16
  misc_feature 1..315: note = strain arthropodmix13816 hypothetical1
  source 1..315: mol_type = genomic DNA
aaatattagccaactgaacaaaacttagaactatactataacctacaactaatcctataacttactttaattttatttcttttcttttgtttgttttgttgactttgctaatatttattgtgtgctttcttttatcccaataaccctcagcggggctctgccttaattaagtttcatgtaacttgttttatccttttgtggtgttagttttaggatcgttttattgtagtattatttttatattcattgtttcttttgtatgttcttgtggtgtttgggttctctgtgttttataggattatctactatgtaatt

SEQ ID NO: 1536 - DNA, 315 bp, Beihai picorna-like virus 43
  misc_feature 1..315: note = strain BHNXC41212 hypothetical protein2
  source 1..315: mol_type = genomic DNA
actaaggtacgggcttacaccataaagtccgttaaaccaaaatgtggtccttgtacatagttactgttacttatttatgaatcctacaattaaaaagtaggtagagcgtggatgtacattgtaatcttacctgagcgctcctcgaaatccctatttagggatacatttttggttagagtgtaaacaattttgtaggtagttctaggaattttgagtcgtatcctagaattaacatagagacttagtgtaaataatagttttgaaagcgacgccagcgctaaaaatactggaactgtttttgatggttcagcccac

SEQ ID NO: 1537 - DNA, 316 bp, Point-Douro narna-like virus
  misc_feature 1..316: note = strain mos172gb29666, complete genome.1
  source 1..316: mol_type = genomic DNA
ggcgcacaaacgtacaccacgacggatattcgctcttccgagcgatatctggagtgcttgcggttttgcgccagcccgtagtccggattcccctgcgaaagcaggtgcttccaaaccacatcggcgcaaccgtgccaggtcggtgcgtcaaactattcgtttgaccccggcggcactctgttgtgtcctccctcttccccactggcgagctaagctgctaaacgcaatcgatgacgcagatgcgggcgagaaagctaagaaacgtacgaaagtactgtattcgaagccaactcgcgtcaaatctgcgccaacctgt

SEQ ID NO: 1538 - DNA, 316 bp, Marmot picobirnavirus
  misc_feature 1..316: note = clone c220589_g1_i1_libraryA_2527 segment I1
  source 1..316: mol_type = genomic DNA
gaagaaaggagaagcactatggagtgtttactaaaacatctgaaaagcctttcttcaaccacttcaaagttgcctttggagtatgttggagtagaggtagagaggaggtggaaatgtgaccaccaatcaaattgagtacaataagttactcgaaactcgcagaactaatttagctaatgaagctgaaactgcgaggtcaaacagggcgcgggaagccgaaaccactcgcgcaaatcttgcttctgaagccatacgagcccatcagaatgcgattggagaagccgcaaatgttattaattccaatcactatgcaaga

SEQ ID NO: 1539 - DNA, 316 bp, Rose spring dwarf-associated virus
  misc_feature 1..316: note = complete genome.3
  source 1..316: mol_type = genomic DNA
atatttgcaaatcacggttttgtttcacggcaaaacccaaaacataagtaagatgggcctaactagccctgtggagaggctaccccttgaataagggtagtggttgcacgtcttggcccgacagattccggccgaccatgcttctgtggtatacactgcaccagtaagacctggtttaacaaaactttatcctacccacgatgagatgagtgggcggcgtaaactttgtggaattttacagagaaatctgtaattctgcacatgtttgcgagaggggtctccagtacccctttatagaaataagcgcttctttggg

SEQ ID NO: 1540 - DNA, 316 bp, Black queen cell virus
  misc_feature 1..316: note = isolate GS1, complete genome.2
  source 1..316: mol_type = genomic DNA
ttttcttggcgtaattaaaaccaacaatgtgatcttgcttgcggaggcaaaaatttgcacagtataaaatctgcaagtagtgctattgttggaatcaccgtacctatttaggtttacgctccaagatcggtggatagcagccctatcaatatctaggagaactgtgctatgtttagaagattaggtagtctctaaacagaacaatttacctgctgaacaaattaatgaaaattatgaaaataaacaacaacttgttgaacagactgaaattaccacctttgaaaacgatttgatcgtgcttgaggatggaccgcaa

SEQ ID NO: 1541 - DNA, 317 bp, Sclerotinia sclerotiorum hypovirus 1
  misc_feature 1..317: note = strain SZ-150 hypothetical1
  source 1..317: mol_type = genomic DNA
ggggtgatgggaaacttacgtttcgccaacgttaaggtactgtgattttgtacttacgactcagggtcgaccttaactggtttatactctgtcgagtttgggcaaatagctagactatctccccgggttttcaggagcccttagtgtctggctgacacggtctggaatctctttttacgtctcacttacggcaaatgtgaaatcgcctactgatttagtagaagaatgccggcccgtgtgcccgcattggcaaccgtgatgcccggttttccacttttgggatagggcttccctccgaaaacgggacgaaccaaaat

SEQ ID NO: 1542 - DNA, 317 bp, Beihai astro-like virus
  misc_feature 1..317: note = strain BHWZXX13371 putative protease,2
  source 1..317: mol_type = genomic DNA
gtgggtgttgtcctgaccccatctgcccctacaacgcgccaacattactgtatgacatcaacaggaccaaaataaatgactatgttacgcgcgagggaaaaacacggctaccgacccaagcatatcgacctgacaaaccacctgctggattggaagtgaatcttttcttaaaaaatacaacccagtacaaaccctcttattgggatagtagggcctatgaaaaggcatgggaaaagttcacttacgccaatcctacagagctaacgcatgaagacatcgaatttgcaaagctcattctagctgatgagtatgactac

SEQ ID NO: 1543 - DNA, 319 bp, Permutotetraviridae sp.
  misc_feature 1..319: note = isolate H2_Rhizo_Litter_8_scaffold_8011
  source 1..319: mol_type = genomic DNA
agccttaaggttgaacgggtactcctacatttaagcatgttttaatttacatgggcgggtttggaaccgtcgcagtaataatagacatgggtggatttgaaaccatcgtagtctcttgcttatctaagtagatacaggattgtggtctgtaccctagaggaatgccaccatgcggtaaaaccctactccgtgccccctgcacgaaaccaggatctgaggtctggttgggtgaggaactccaaagtgggaagtccagtagaggggatcattgcctctacatttttcagaagaaacaactcacaacaatacacatactaag

SEQ ID NO: 1544 - DNA, 319 bp, Hubei picorna-like virus 6
  misc_feature 1..319: note = strain WHBL73048 hypothetical protein 12
  source 1..319: mol_type = genomic DNA
aactacgagggccgggtaagtgtcctcaacataggttaacaatggaaaagtttcctctataaataacgaatttccactgtggcattggttaccattcgagttcatcgctgtgtgtggaatgcgaagaggcttgtcactttatgaaccgatttttattggtagcgcagttgtatgtgagtaatgtggaaacatatataaaaattataacattgcagaaacaccaaatttaaatataaagcccacaagcgaggaagggctagttcctcgcaacctgtcagcgcccgaaaggacgttcgatattccaactctaattgacgat

SEQ ID NO: 1545 - DNA, 319 bp, Hubei tombus-like virus 38
  misc_feature 1..319: note = strain WHWG56034 hypothetical protein 1,1
  source 1..319: mol_type = genomic DNA
tttgtcaattcatggggagttggggtcgagaattgattaaaataaagtcgtcccgacaccatgggaataaaaattatatatttaagcagatgcctatagagctatgcacaaaaacaccgagcctgtgaccattggcgatatatctgtggcgtcaccaccgccacaacaaaaacacgtcccgtgaccatgggaataaaaatttatattggtcggtatatccaaataccagcgtgatgtttcatgttcatgtatgttgggtgcggcacccggtggttggaggaatggaggaggttggttaacataattcccctatctgaca

SEQ ID NO: 1546 - DNA, 320 bp, Beauveria bassiana RNA virus 1
  misc_feature 1..320: note = complete genome.1
  source 1..320: mol_type = genomic DNA
gttggaaaatagcccacaccccccccgccgggcgggctatttttccccggggcggcgggactagatggttgctagggccccgggcggtggtggtcgacgaccttgtggggtcgtcgacgttttcatttgtcttcatccatgcctgttctgatttccttccgttcgatttgttgttttctacagtcagcacctgttccttgctgactcgcctctcccatgggcgagttgtataaatacatgggacgtgagagaaccgtgctggatacctcacgtacacccaaagtcggtacggggatcgtaaccattacgctttttcctta

SEQ ID NO: 1547 - DNA, 320 bp, Fulton virus
  misc_feature 1..320: note = isolate CHABV1/NYC/2014/M026/0243 segment L1
  source 1..320: mol_type = genomic DNA
agtagttaacaaacgcttcacaacaatcatcgattacttgctctctcaatatattgcaaaactgaaaaaataatatttctcagcaacctatttcaacgaatttgaaataactaataataaaaagcaagccaaagcaaagaaatctaaataattcacttctaaagcaaaggaacaaaagaaaagaaaagaaaacaaataaaggaagagaaacaaaacaagataaagtagataaacaggtagaaaaacagaacaaagaggcagaaagaggagagtaaaggctcttgtagagcattaccgcattaataaggcccacaaccaaa

SEQ ID NO: 1548 - DNA, 320 bp, Anopheles darlingi virus
  misc_feature 1..320: note = isolate MAC, complete genome.1
  source 1..320: mol_type = genomic DNA
tacttcttttctttatttgctttttattcatactcatatatcatcgtattcaccatgcatgatgtggtgttgattagtgataggtccaatatcaatttgagaaataaggcggagatataaatatgaaaaatggaaataaaaaacataaaatgaaaaatgaataactccaaaataaaaatttatagatataagtttccaatcatgaggtatttaggcctcgctaacctcactattaagaagatttctaacctatttttaaaaacccactagtagcagattcaagtacccttctgtcaaacatcttgaaaagattattcgat

SEQ ID NO: 1549 - DNA, 320 bp, Beihai mollusks virus 2
  misc_feature 1..320: note = strain WZSLuoI86113 hypothetical protein 12
  source 1..320: mol_type = genomic DNA
gtcagcttctcgaaagcccgccctgggggcttctaataccgggggccaccgcaactatgcgttggataagctaaaaatagttgcttgtgtttgattaacgcacaggttgtaggttctgaattacctgcaatttgtggacagctacacaagtagtcattgtatatagtcgttatttagcgacggggtgacgcccacaaaaatagcactgtcatgttgtcgattgatgcaccgctcatgatatttgtacaaattgcattacttatctacataaaattttggaggacggtaccctcaataaaaataccgaattgaacactact

SEQ ID NO: 1550 - DNA, 321 bp, Knope narna-like virus
  misc_feature 1..321: note = strain GudgCC_DN40323-16 RNA-dependent RNA1
  source 1..321: mol_type = genomic DNA
agtatacactccactcgactaccaatgaaaggaggactattatgtcccaattcatttacactcagaacgaccttgtcgaagtcgatctgaatgaattcgatcaagggacgcttattcttgcgctccttgcaatcgaggcgcaggtgcctggcacacttgccagcatcttgcgtcaagccgcgttagctaacggggggtggagaatatcctccaacgtcagcaatccggggaagtccatcaatgatcagagggactttctcgcttggatgagaaaatttcaccaagccctgcaggaagagcaggcagaaaggagtgtctgag

SEQ ID NO: 1551 - DNA, 321 bp, Beihai picorna-like virus 7
  misc_feature 1..321: note = strain BHNXC41478 hypothetical protein2
  source 1..321: mol_type = genomic DNA
tttctttcattatgtcctgggatgacattaaaagcatccagcctctcgtccatgtcgtgatgggttatacaagcgttatttttctacatctcttttattaaacgtgccttaacttcatggatcggttccaggtatattaacaagcctgtgggcgggtatttacccgcggccattatgattacagatgctcattcctgtatttcatataaaatcctaaaagacatgtcctgccagttttccgagtcacgaactggtttatgtatacactgactttctttttctatttctaatatcgcgcgatgcatatcgccttataaatat

SEQ ID NO: 1552 - DNA, 321 bp, Xinzhou dimarhabdovirus virus 1
  misc_feature 1..321: note = strain XZSJSC65538 hypothetical1
  source 1..321: mol_type = genomic DNA
ctatgcccagtcctggaacgagagagttaatctatcaggatttgatagatcaaatgccctctccaacaatgttgaagggaccagacggtttaccaataaatctcagttggaaagatctgatgagtaatccggaaaataacttgagacaaatcatatccagcatcggaactgatgcatttttcaaactatcgttggaacaaaagatttttaaactgcttgatttggagcagatggcagttgacgttttagacttaatgtccgttgaatacatgtaatcggtgaaaccattgttgaaaaaaactaaaatgcaacacccctcac

SEQ ID NO: 1553 - DNA, 321 bp, Riboviria sp.
  misc_feature 1..321: note = isolate rtr167pic3 genomic sequence.1
  source 1..321: mol_type = genomic DNA
cctataattatgataaccgcacgcaacgaacaagggcttttgatgaactgatttagttcggttcaccgacagcaagattttacgaaatggatttaacttaccacgcaaaccctcagcggaccgcaggtattttgatcgcactggactctttagatcataacgacaagattggatcatatccatgtagttaacgtagactacactaaagagattttaagcacggtaatgtaatagaaattacccgcctggtaaagcaccaaaccttcgtggcagttatggcctagtcacgattgcatcgagccatttactcaatgtatcaca

SEQ ID NO: 1554 - DNA, 321 bp, Wenzhou shrimp virus 4
  misc_feature 1..321: note = strain WZRBX43306 hypothetical protein 1 and2
  source 1..321: mol_type = genomic DNA
ctggactaccacccgtctttcactgcagacgttaaacactgtgccgacctgagggttcaggatgtgcgagcgtgtgatcttgctcccagcgatattggacgtaaagtcgctggcagtactgctgcactcattaagcacataggtgggctatttagtccagagacgcctcgtggcagtcccacaaagtctcaccccgtcctcgggccgcagcgccactgggcagtgcgcgcagctgacatagcgatatgtcagtgtggcctagaaaagataccgcctgcacaaccaaactcaaacattcaaactcaagaccaaacccttagt

SEQ ID NO: 1555 - DNA, 321 bp, Shahe tombus-like virus 2
  misc_feature 1..321: note = strain SHWC01c3797 hypothetical protein 11
  source 1..321: mol_type = genomic DNA
gggggcctagttgccacacatgggttcgacactgatacagctgccaatgtcagtggtctgccaattacggtgtgtgtgacatctgggaccccaaaggtgcgcaaggcattggccttgccaggattggggctgggcgtgcaatttggtgtgcacaaccagtccctcagaaatgtgctgcgcgggttggtggagagggtgttcaaggttgtcaaaaatggcaaattggtatctccacctaaacccgtggcgaacgttttcgataagttgagtggctttcgggcccggttgttacgtgtggtgggttcatgccgcccttggact

SEQ ID NO: 1556 - DNA, 322 bp, Mud crab dicistrovirus
  misc_feature 1..322: note = complete genome.1
  source 1..322: mol_type = genomic DNA
gagctcggtacccggttttcactccgtgcacgattccattcactatctattgagcttcgatatcactctgttttgactctagttatactacactcaagcacactgatattatcgttctgatagtttgtggtttcattaaaagtgtatacatttatttatattaaatactgacactttgcgggttaaaatgtttaatactatttttcaatttgaggttgtatgagataattttgatttctatgttatcattgaataagggagtctggccctaattgatgtacgactcttctttggttgcgacccgagtcccttctacatcaag

SEQ ID NO: 1557 - DNA, 323 bp, Marmot picobirnavirus
  misc_feature 1..323: note = clone c70636_g1_i1_libraryA_2670 segment I1
  source 1..323: mol_type = genomic DNA
ctattttctattttattctagtgttctttacctattccaaggtgaacaccaattgtagcagaaaatttacactagtagcacacttgcaagcggtgtggaattagtgtaaagagatagctacgcagcaacaaaacatccacaaatgtcacgtccaaggaggtgaaccctaagtgacaaacaaccagatacggtactgggagtatcgtgagacgggtcggcacaaccaagaaactgaacgcgagacaaatcggtccaatctagctcgggaagctgagacgaatcggtctaatctagcgagagaagctgagacgcgtcgctcaaac

SEQ ID NO: 1558 - DNA, 323 bp, Potato virus X
  misc_feature 1..323: note = mRNA for 12kDa nonstructural protein, 8kDa1
  source 1..323: mol_type = genomic DNA
ctacttggaaacatcatttcgagttccgaggaaagtggcagatttgatagcaggctgtggtttcgatttcgagaccaattcacaagaagaagggcacttagagatcactggtatattcaaagggcccctacttgggaaggtgatagccattgacgaggagtctgagacaacactgtccaggcatggtgttgagtttgttaagccctgccaagtgactggacttgagttcaaagtagtcactattgtgtctgccgcgccaatagaggaaattggccagtccacagctttttacaacgccatcaccaggtcaaagggattgacat

SEQ ID NO: 1559 - DNA, 323 bp, Peach associated luteovirus
  misc_feature 1..323: note = isolate PaLV RP19, complete genome.1
  source 1..323: mol_type = genomic DNA
atgggctctgtcacgcatccggttttgaatccccttttaccattttgggattaccggatatcgtggtgcgtacaggggccgtccctaggaagagtcgtagtgtaattagctacttgagtcagttttctttaggtttagacttccgggttcccaacccttctctgcacaatgcccttgttgctgtggaaaggagagtttttactgttgggaagggtactgatgttgtacttccattggtacctagtcatggcattttcaataagctcgcttatttccgtgactccataataaaagaagtagggttctgtaaggtacatagtcca

SEQ ID NO: 1560 - DNA, 323 bp, Xiamen fanray pesti-like virus
  misc_feature 1..323: note = strain XMTSYG10372 polyprotein gene,1
  source 1..323: mol_type = genomic DNA
tgcaggccgcactagcaattttccaccactgagcgacctgaactcagaccaatttctgacgggactgtcagggcaacccctgtaaaacgaacccatacgggtcggggactaacgcctgaatggctacctgtctgggtttggcctgatcaaggaagtctagtggtgcagttagcatcaactattgccggttcggccttcgggcagaacgaccctcgggtaagacgtagggccagggcatttggatagcacaatgggtgcgggatgtgcagctggtaacagtttcccccaccgcgtttgcctgtgcataaggttcatgtgattcc

SEQ ID NO: 1561 - DNA, 323 bp, Beihai zhaovirus-like virus 2
  misc_feature 1..323: note = strain BHTSS12281 polyprotein gene,1
  source 1..323: mol_type = genomic DNA
ctttctacaagaatatactgctattaagcttcctctcgggttttttactaaacgcgggaaagatggtatctctgcctaccataattcgactaccggcagaaatttgggttgcaggtaagaagaagaagaattgacaatcttctccttcgaacaataacctaatcaaaggtcacagaactagtgataaggagtggttgctttaaaatctacaccttaaaaccagttaacgtgagccgcattatttctaagggccactagatttggacttgggtctcgagaaataatttgactatcctaaatagctagatcgtgaaacggcaaat

SEQ ID NO: 1562 - DNA, 323 bp, Beihai picorna-like virus 124
  misc_feature 1..323: note = strain BHBJDX18598 hypothetical2
  source 1..323: mol_type = genomic DNA
attgacattcttcatgaggtcttgccattttcctatctcctgccttttcttcttcatcctagacccttactcattaatatttactccatttaacatccctttggactttacagtgtattattgcactggcccttcaactagggtcaaacctgcctgatttgatatcatgctctaccacagggagagcaccctcgaacacgccatcagtagcagtagccgaagccggggttatacctcaatacctaggtgttgtatatgatcaagcttcggccgtagttacagtaggcgagcaaacaacaccaggaccccggggagaggctgca

SEQ ID NO: 1563 - DNA, 323 bp, Beihai picorna-like virus 31
  misc_feature 1..323: note = strain BHZC37445 hypothetical protein2
  source 1..323: mol_type = genomic DNA
atacgtggccttgccttgggtgcaggctttaaacgcattcattcccgtgacgaggaattcaagtagtcgttacttaccgatgctgtcggtaataaagtaaaatcagctgcaacatagaaacataacggtgttccgatgtggaggtgaattgccacaatggagcatgacaggctatgattgtaaggactagggacccgagccctgaggctatttagtctccccgcattgtcctgtgggaaaaagttaccactcgcgtatgtcagtttgcacctgcgtacgatgattttgtaaatattgctaccgaaactaaacaaatttttagg

SEQ ID NO: 1564 - DNA, 323 bp, Wenzhou tombus-like virus 14
  misc_feature 1..323: note = strain WZFSL15005 hypothetical protein1
  source 1..323: mol_type = genomic DNA
ccgatcgtttatcggtgagcagcggctcacgaaacctagatagaccaccagaacaacggtacccccccttctccaatcataagaccctcgctttttttctcgctctctaataatcgtatacggtctaggcaggtgaacgcaataaacgccctttatggcccgatcatagaggaggctttaaagcaagcagactcacatttcctgtggatatacagtagagtttgcagtggactcataaatccatgagttgttgatgcgccaacacaaaattttgccacaaaactgaaagagacagtaaacctcagtaccagctgtaaacttgg

SEQ ID NO: 1565 - DNA, 324 bp, Beihai picorna-like virus 34
  misc_feature 1..324: note = strain HOU158088 hypothetical protein1
  source 1..324: mol_type = genomic DNA
gtcggcttctatggcccattcactggggccttgtaccggtggccaccgcaactatgcgttggataagctaaaaatagttattcacatttgattaacgcacgagttgctaggttctgcattacctagatcttgtggtcagctatgtgaatagtcatgtatatatttccattttttagtggaggggtgacgcccaataaaatagcactgttatgttgttgattgatgtaccacacataatattttataaattacattacttatctttatactttaaacgaggagagtgtcctcgataataacactgcgcctctcactaatttgaga

SEQ ID NO: 1566 - DNA, 324 bp, Hubei tetragnatha maxillosa virus 9
  misc_feature 1..324: note = strain arthropodmix140491
  source 1..324: mol_type = genomic DNA
aaagcagtgaaaaagtttttggatctgtcttcctgggcatcacatgattggactctcattgagggtaacgtcgcggcctgggagcgctttcttgataatgtattcaagtgtgagtatgtttctgaaggtgtattggtgaaaagtggatttgatttaatttatcatggaaaaacgaaatggtctgaagacatatggaagagtatttctatcgatcttgaaatccgtccaaaatttaagttatatgaagagtgtatcaagcggtcgaggagtgttccggttaatcctagagctatttaccttgacacttgggaaattaatgaaaag

SEQ ID NO: 1567 - DNA, 325 bp, Lychnis mottle virus
  misc_feature 1..325: note = isolate Andong segment RNA2, complete1
  source 1..325: mol_type = genomic DNA
ttgaaaagcaatctgcgaactttgttactatttgttctcctcagctagttattggacttatccaattctctccgttttcgcacttactagcactgggcttatccagatttccttttagtacactctcactttgcacttccagcacaacttaattttccttggtgcttttagtgcattcacaacgtttactttaagcaatctcgcttccccgatttgtcaagttaggggtttttgtttttcctttgttgtcacgcagcaatcttttactcttttccttttctttctaattctttgttatattctcatcccaccagcaatccaaaat

SEQ ID NO: 1568 - DNA, 325 bp, Soybean leaf-associated ssRNA virus 2
  misc_feature 1..325: note = isolate SaSSRV2-1, partial1
  source 1..325: mol_type = genomic DNA
gaagttggaattgatgagggagacttcatcgttgcggctgcccttgcggggaatcttacgggtcgactgtccagggtcggttcgcatgggtgacctcatgtgggatttgatgttcacaccacatccagaaagcatcttggcgccacctcgtcgttagaggtaccttcacagggcggagcagaccgttacaagccaatgcaccagtggcgcctttgccgtaggtgtagataaatttacaaaagtggggggagtccaaccagtacatacactcccatcagtagtgatctgggtctggcatactgctgccactttccaattcttaatc

SEQ ID NO: 1569 - DNA, 326 bp, Black grass cryptic virus 2
  misc_feature 1..326: note = segment RNA 1.1
  source 1..326: mol_type = genomic DNA
tacatggggagataaggctcactcgactctaagcgtcgaactctcatcaaagcctaatctcacctcgagcgccgatcttcacttctgaagctctcctcccgctcaccactcgcaatggatttacatcacaaagctcttcgcaaactcggaatcaaccccgattcagatcctggactcgtccacatctacaacgaaagccctccgccccgttttcaggtcatcctttctataaggagaattatcaatcagtcgtcattgacgcactcaaagaagtcctcccatcagaagacctagatatagtccttcacggctatttccgaagtccc

SEQ ID NO: 1570 - DNA, 326 bp, Cnidium vein yellowing virus 2
  misc_feature 1..326: note = isolate Yeongyang2 segment RNA2,1
  source 1..326: mol_type = genomic DNA
ttgaaaagcaatctgcgaactttgttacgatttgttacttccagctagctattgggcttatccaatttctttcgtttccgcaatcactagcaccgggcttatccggatctctttttgttttctttgttacctctgttctgtgcgcgctttaattttcctttgcgttctttacagcagtcacaacgtttacattaagtaatctcgcttccccgatttgtcaagttaggggtttttgtttttcttttttcgtttcacagcaaacttttgctcttttccttttctttctgctcctctgctatatagttcttccccctttgatttctaac

SEQ ID NO: 1571 - DNA, 327 bp, Diatom colony associated dsRNA virus 16
  misc_feature 1..327: note = genomic RNA, complete1
  source 1..327: mol_type = genomic DNA
tgattcaagcacaacatcgtagacacgatcttgtggttgaatcattttaataaaacttcgcgtaccaaaaacgcgtgtgcatacgcactaattctggctgtcgaacttcggatcggctgaaatttgtccgcacccctctgttggccgggggggtagacgtaaaaacttccagaggtgaccctacggggatcgtggctcttgcgttgtaagattcgcagtgtgttacaagcattcaacgactacacgccacgggagagaaggaatagtctggcctcatcgcgcacaaagtacgaggaagaattgggtatttccttcatcgagcagata

SEQ ID NO: 1572 - DNA, 327 bp, unidentified
  source 1..327: mol_type = unassigned DNA; note = Mutant Zaire ebolavirusisolate Ebola4 sequence
gccaatctcccttccctccgaaagaggcgaataatggcagaggcttcaactgctgaactatagggtacgttacattaatgatacacttgtgagtatcagccctggataatataagtcaattaaacgaccaagataaaattgttcatatctcgctagcagcttaaaatataaatgtaataggagctatatctctgacagtattataatcaattgttattaagtaacccaaaccaaaagtgatgaagattaagaaaaacctacctcggctgagagagtgttttttcattaaccttcatcttgtaaacgttgagcaaaattgttaaaaat

SEQ ID NO: 1573 - DNA, 327 bp, Avocet picornavirus
  misc_feature 1..327: note = isolate MW13 genomic sequence.1
  source 1..327: mol_type = genomic DNA
gggggccgcgcatctttacggagatgcgtggtccaccggcctgtttccccattcccctatccctttattttgcccatattgggcattaagatcggatttctcaggtttgacgcggattgggtaatggataaggtttggtgtattgcttaggtaatgttataccaagactgtagcagctagactagggggcacagtgtttatggactccattggatatcctgccctggtaggcactcactgtgtacgggaggttgggaagcctcgccctggccctagactgggtgatagcctggcgcttgctgagccagttgcttacagtataatcag

SEQ ID NO: 1574 - DNA, 328 bp, Picobirnavirus sp.
  misc_feature 1..328: note = Equ2 segment 1, complete sequence.1
  source 1..328: mol_type = genomic DNA
atttgtataaatggcattctgatatgcagcgttggctgaagcgtaacctgctccagcgttagccattccagtagcataattggcttcgatttgtttacgataattactttcactggctttgtttgatcttttagtttcattttctatttaaatctcacaattctaaaagtcttagcatggagattcacatgcgacacaccaatgagtgaaattttagtacctatcaaacacaataggaactacatccagtgagatttcgtgtagcaagcgaagttaagcaggatgaacaattattatcagtgttaaaaacattcagaaaggaggaaag

SEQ ID NO: 1575 - DNA, 328 bp, Calhevirus 3
  misc_feature 1..328: note = clone V11B putative nonstructural protein,1
  source 1..328: mol_type = genomic DNA
cgctcaaacttttacccaacaatttgaaggtcgtcgtaatgcttcgaatattgctcagtcattcgacagtggtaatcgtatccaagttaacagaaacgccaatgttgttccaacccaaacgttaagatgtgccccgagcattcctcaagatcagactgttttggccgatggtcgggttgagaggcgtgtccgggatgcggcccaacaaattgctattgtgaataacaacgttcaatttgagacttcatggaaatcgtttgtttatgtcctatgtcagaatgggtcacaacctataatcgatgcctccacttcgattgagactggtcgg

SEQ ID NO: 1576 - DNA, 328 bp, Wenzhou picorna-like virus 35
  misc_feature 1..328: note = strain WZRBX39547 hypothetical1
  source 1..328: mol_type = genomic DNA
agggacactccctacacccaaattcataacacgcggcggattctcgtaaacccctgcatactcttagaggcttgtagcttaatagcgcgtttccttatgtgtgttatttccctttttctccccttccctttttaagttcttagtaatttattgctctgaactaaatctcgtggagattcattatcccttgtctatattatgcattgcgaagctttgataacaacagcgtcaaggtacgacgatcttgtaaatatggactttaaacttcatagctatatttatagcgagttgttgttggtagttatagtacgaatctaccagtaaaacc

SEQ ID NO: 1577 - DNA, 328 bp, Hubei orthoptera virus 1
  misc_feature 1..328: note = strain ZCM21319 hypothetical protein 1 and1
  source 1..328: mol_type = genomic DNA
tatagagcgaatactctatatacaatatacagacctaagttggtggtattcatggtctctaaataaagcgaaaccactacgttgtgcgaataatcaaattgcggcagtgaacccagagaacggcaattctgaatattagcattcgatctcacctaagtttcagcttgtgtttcatggtgattaaataaagcgaaaaacaagcaaaatttttgttattaataagcaaccccgaagcatttttgagcgaaagaaagttattaatacgagtattatcgaagaaaccattttagctaatactccaggaaataacgtttatcgcccaacaaca

SEQ ID NO: 1578 - DNA, 328 bp, Hubei toti-like virus 12
  misc_feature 1..328: note = strain HC21305 hypothetical protein 1 and1
  source 1..328: mol_type = genomic DNA
gagaaaggaaaaacgtgtctccctagccatggattgaattcacggaccatggttagtgtggtgaaggcgataccgtgagtcgatcctcaaccacccttcggctggtgaacctgtgggttggaagcccactgggggtggacaggtcgaagtgtaaaaaatccacaaaatttcctctaaaaatcaaagtgaagatgacgcattactcgaagtgatacgtaacagcgcagtgaaacagactcgggaaaactttgaacaggaggaggaattcactgtggcctcaggtgttgcctttttggcggcactgaatgcccgatattctgactccgta

SEQ ID NO: 1579 - DNA, 329 bp, Picornavirales N_OV_064
  misc_feature 1..329: note = putative non-structural protein2
  source 1..329: mol_type = genomic DNA
gctgtgatgttcggcttcggccatgccaatcagcggctgtatttgatcactattgtacttaataaacatatcatacgagtatatttaacagcattacagtgtcagtgggaacagcttttcagctgtactgattcttaaccgcccatctttaagacttagcagtctaatagggtttgaatctgatatgtacgcctagcaccgggtcgaggcacccagctagatcgttttaccgccttcctaacactactacatcccagcctgccggctctacaggcaccgcatccgacaaaggtgccgaggaagttatttccgccgacaattttcaagtt

SEQ ID NO: 1580 - DNA, 330 bp, Wenzhou tombus-like virus 14
  misc_feature 1..330: note = strain WZFSL15005 hypothetical protein2
  source 1..330: mol_type = genomic DNA
tggcgctacagaagttacttagcaacttgtcgtgatgttagaattggtaacatacaacgaccggatgttaaagtaaatgtcgactctgttggcagccataaattttctaaatactattcaatattccacagcaacaatttaccaaagtggttttattacaacaaatgtccttgcaacgaatatgaagccatattaaaacgacactgtgtttcaacatcatgcaacactactcatccacttttcctaagagcaaaggctgtatctaatgagttagcgacactagttcgggaagatttactcgattataggccattaactcataaagagctt

SEQ ID NO: 1581 - DNA, 330 bp, Changjiang tombus-like virus 19
  misc_feature 1..330: note = strain CJLX57318 hypothetical1
  source 1..330: mol_type = genomic DNA
cttacttctgggggaaatacaacggatattttagcatgccgtttcgcgacagaagtttggcacagagtgccgttctagccgtaacgtctctgacaaacggtgaggtgcgcgtgagagcactagtggtgggcaaccgcgggtccgcaaggacttgtgtagcaaagcaacttcgacgtctcgtgtcaatctgcaatacggttgactaaagttgcgctaacccggctacacacattcataagtatctcccataacaccccggtatgaggccaattgcgataagagccaatatttttagcacgaaagcacggaggaaacggagagaaatccata

SEQ ID NO: 1582 - DNA, 331 bp, Atrpec virus 1
  misc_feature 1..331: note = replicative protein and structural protein genes,2
  source 1..331: mol_type = genomic DNA
atccagagctaggagctctctctaatcgccgcaaggagggagcagcaaagtccggtctctggtcttcgttttagaagggcggagagtttcggctctactggctggtgtgtgccgcctaaaatccaggctaccagctcggcgcttttgaccagatccgtttaatcgagcgactgggagttagccaactcaatcgattgctacatcacaaaatcaagatttgtcccatattgggccgcaagaagacgttcagcagatcacgacattcgtcgacgattctaacatccagtcgtacgaaaagccacatatatcatctgtgactgcatggacaaaa

SEQ ID NO: 1583 - DNA, 331 bp, Lychnis mottle virus
  misc_feature 1..331: note = J genomic RNA, segment RNA2, complete1
  source 1..331: mol_type = genomic DNA
ttgaaaagcaatctgcgaactttgttacttttttgttttccaaaactagctattgggcttatccaattctcgttacttgtttccctcactagcaccgagcttattcggattttacttggttctctttgttacttgtttttaaaaaacgcgctttaattttcctctgcgtttattacaaacagtcaccacgtttaccttaagcaatcttgcttccccgatttgtcaagttaggggattttgctttcaattttttgtctcacaacaaactcttctctttttcctctcctttttgttgctttgttatcttttgctccctcccctttattggacg

SEQ ID NO: 1584 - DNA, 331 bp, Sanxia picorna-like virus 1
  misc_feature 1..331: note = strain SXXX37713 hypothetical protein 11
  source 1..331: mol_type = genomic DNA
cttcatcgggagcccgttgggctcctaggaggtacagccaagtgacaggctgttttgtgttttacgttgtctcaaaaacaagttctaagactatttatgcttttatgaaagcaccgtatgtgtcattgtatattttaaaaattataaaaatttcaagaaatgtgttactgatcagattagttaatcagaactatgggataatgttccccgtttttggccatttgaatgttatcaaaccccagaaggcctagatgtgcggactaggagtcactgtataaattcacagacataggacttgcccccctgtgtactagttaagcgatttattttt

SEQ ID NO: 1585 - DNA, 331 bp, Beihai noda-like virus 5
  misc_feature 1..331: note = strain BHZC36307 hypothetical protein 11
  source 1..331: mol_type = genomic DNA
cccggatttagagcagatcgactacgccctattaatagggtgtcggttggtcttgctcatagccggagcggtgattctgtttaatttgcagcggaaagtgttgagaacgatctccatcaccaatcctgttcgacaatatgtaatcgagttgtctaagattaaacagtaccctgacgatctccgaaagaaatttcggaatctcaatgtcctcaagtatgctccgtctttgaacggtcatagccatggtgtgtgtgccgcattccgagctgcggccgatgataccatcaatacgtttatacaggaaaacggttttgaggtttactcggtcggc

SEQ ID NO: 1586 - DNA, 332 bp, Wenzhou qinvirus-like virus 2
  misc_feature 1..332: note = strain WZRBX42684 RNA-dependent RNA1
  source 1..332: mol_type = genomic DNA
aaccactgtatcaacgtaggcatgacaactgactctacatgttgaggcaactccaattcgacgttacttatttctacctctatttttaaatcctgcagtatctcttcttcattcagtccagggggccgcaagtccaaagtgccgcgggcacggagatggccgccttgcctatggggaggagggatgcattgaaggcatagtccggagaatggtagtgccctgtcggtgtcggaggagacggagcaatcaggggaccgcgtctggcacaggcaactggccggggcgatcccgacagtagttcgctggcacaccgccgtactcgttaggtccaa

SEQ ID NO: 1587 - DNA, 332 bp, Wuhan Mosquito Virus 8
  misc_feature 1..332: note = strain XC2-7, complete genome.1
  source 1..332: mol_type = genomic DNA
tcgaaaggtaacatcgagtacttataccatatacatgccattaactagaaagtaagtttaatagtaaggaccatccatgtaaccgcatttattagaatattaagacagttttaatccatatagtggttttattgtaaggttttgtagtacttagagagagttttaagaaagagttgaacgtggacgatagattttggatctcaccatacgagcttgcgcgaaccctaccccaactcacctcccctccccttcctatcctcaccctatcccccaatccgccttttggccttagcggattggtttaaaaacaacaagaggtggcccgagggcac

SEQ ID NO: 1588 - DNA, 332 bp, Jingmen picorna-like virus
  misc_feature 1..332: note = strain JMYJCC71227 hypothetical protein1
  source 1..332: mol_type = genomic DNA
tgtgtttttgtcaagataattgttctgtgattaacagtgattgtggttcgtgtaatgcgacgcagtcaaatgctagttttgatgaagtgtatgagagagtggaaaacttatctcataagaagattgaagagtgtgtagatcaggctattgatcgagcttctaagcttcgtgattacaagcttaatgttcacaatggctcccgacgggaatcatctgatcctctctttatttcgccccattcgttgttatcgcttggggtatctaagtttgttgcgtttgagcagcatcacagtttcgcttcagttgagtctctgaagttgcttgctctgtct

SEQ ID NO: 1589 - DNA, 332 bp, Riboviria sp.
  misc_feature 1..332: note = isolate wpk049shi06 genomic sequence.1
  source 1..332: mol_type = genomic DNA
gtgtataagagacagcatctctcgtttgcccgccaaaaattctggtagctagcgaccgcccctgtttcatcttcacccccgaagggtggacactaccggaggttcccacatacccacatatgggtatggactccgcctcttgtgtcaggaaaccggagagatcggctaaagctgccagcccttcggggtcattgggaacggtccttctcgacgattttactcggagaaggtccgcgcaccgtgccctcggagggcgtggtgcgtagcaatcgaggctcgtcctcctttacactctcattcaaattcgcatagatcaatacacgtataacaag

SEQ ID NO: 1590 - DNA, 332 bp, Hubei tombus-like virus 11
  misc_feature 1..332: note = strain WHSFII11317 hypothetical protein1
  source 1..332: mol_type = genomic DNA
cggcaagtacatgcgattccttttcgccacgttagtggtttttgcttcactacccaaaacagaagtttttgttttggggccgtgctatgcacgaccattcccactaggtcaggaatggttgctatgacctaccatatagtagagagcggcacagggggggttttacggcaaagcccatatgttttgatgttttaaagaaatgtcagtaaaaaccgtgtgccccggaggttgtattggtgtatcacatagtgctctacatcggtacctcctcaggatggggcacggagttacaactccgcaatggcgacctacattaattggtcacaaacctt

SEQ ID NO: 1591 - DNA, 333 bp, Botrytis cinerea negative-stranded RNA virus 7
  misc_feature 1..333: note = isolate BCI7_Contig41R
  source 1..333: mol_type = genomic DNA
cagggatgggagaggtgggtcttttttgaccgttcatgaggctctggccgtctacctcttccagccctgctgggtggatacagcatacctaattttgaaacatcaactggaatcttagaaaaaagtataagataaaaacggcctttatcatatcgagacctgtataccacccaaacaggtgacgatctacacgctactctatctaggaaatcatcaatcaattaggaccagaaattgttacctttaaacaaaaagtaataacgttaatcttgtatcgttcatctagcactggtataatcttataacaaactagcgaatacaggttaatttaca

SEQ ID NO: 1592 - DNA, 333 bp, Sifaka hepacivirus
  misc_feature 1..333: note = strain SifHV_H5-L75 polyprotein gene, partial1
  source 1..333: mol_type = genomic DNA
agggtctgcgcctgtacactcccccacgggaataacaccagctccgagaaagtctgacgagtatcggtgttaaaaaggtggtgtgccctaccaacgtcataacgggtcgtgccgatgttccgaggcaaggactaccactgggtgcccgtgggaaaaaaggggcggatagggagctggggtgaaccgaacggccgtagacggccgaggtcacaggcatgggacgctttgagcctccgtagcctggttggatcttggattcccggtgtagctaccagtttactgcctgatagggtgcgggccagcgcatccgcccttctggttgttcataacgcc

SEQ ID NO: 1593 - DNA, 333 bp, Bundaberg bee virus 3
  misc_feature 1..333: note = isolate QLD-7 nonstructural polyprotein gene,1
  source 1..333: mol_type = genomic DNA
tgtactaatgtgatcttgcaactagaagtaaataagagatgtaaaaattttagttgtattgctattagtataaagaggttggttatttaaccttacttccaggatgcctcgtgagcagccctcataatatccaggaaccatctctcgagcatacattataagtgacatgtatgctttaaattcgaaaaccttggtgcaggttcaaatgttaccaacgacaacgactcgaattaccatgaccagaaacaaattatttctttccaaaatcaaggtcaaacggtagctgatgaagctttgccaaagattgtagacttgccaaaatcatatttagac

SEQ ID NO: 1594 - DNA, 333 bp, Culex pipiens associated Tunisia virus
  misc_feature 1..333: note = strain Ayed, complete1
  source 1..333: mol_type = genomic DNA
cctcattatagtaatattatatctcctgaatactatgtctattttgatggttatagtggaaaacctcatggtgaaactctttccgatttagatatatataaagcatatacaacatattacagatatattaaggaattttcagaattttgtaacaacgataatgattctaatactagcaatattattgaatatgagaataaggttagaaaatccacgaaggctaaggataaggatttaaaaaccaaaaactttcctgtgtttaatccagcattacaagaattgtataatacatacatcaaagataaatcggaagttaataaaaccaggttatta

SEQ ID NO: 1595 - DNA, 334 bp, Salem virus
  misc_feature 1..334: note = complete genome.3
  source 1..334: mol_type = genomic DNA
ggcagttcatcgtgcttaggaccagtgctggatcactttctccaccttcgcccagcacccacaggcctcaccatcctatctctcattctcaaacagcaccagtagaccagtcccctcccacagaatctctccaataaagaccatccaaaatcagtctttccaccacatttgtctagtcctagaatttcaatattccattaagtatagtaattattattttaaaaaacgtagacctactaacctcttttaaaacagcactcaggacaagaaagaaaattaggagcaaagaccaaactcctgcgatctcatagatcaagttctaatttggtataca

SEQ ID NO: 1596 - DNA, 334 bp, Jingmen tick virus
  misc_feature 1..334: note = isolate JMTV/Pteropus lylei/Cambodia segment 3,1
  source 1..334: mol_type = genomic DNA
tttaaatcactcttagactcactttacaaactcgaagataaacaggaaaagaaacaagtgagttgttcatgaacttgacatggctgccccagtggtggcggccttgagctgcgtattaggcgggctgaggcggtagcatctgctgctggcaccagaattggtgttaggaaactcaccatgagtagaaaccagttacatacagcgccatttccgtgagatactccccaccataggatggttatctctggaatatgtggcgcccatcgacatcgttctaaacgaagaagacagcccttaccaacttgacaggaaggtttacgagaaagccctagca

SEQ ID NO: 1597 - DNA, 334 bp, Ginkgo biloba picorna-like virus
  misc_feature 1..334: note = strain pt112-upi-2-NY genomic1
  source 1..334: mol_type = genomic DNA
gtttccacgagtcatagctttatctttaattccttgcatatttattttatatcagcttaatggagttagaaagacttcatcaaccaacatatttccttctctgagaatagtgcggtaatcctccgtactatctttcagtgaatcacggctttcaaagattagaaatgctatgagaataatacttttatatatattatatcattaattataaataacaaagtttagatctaattttgtccccttgaggaaaagacagaacaataaagaccagtccacttaacccattggaaagctattttagaaatcccttggcggtggaactaattcgactaaa

SEQ ID NO: 1598 - DNA, 334 bp, Wuhan arthropod virus 1
  misc_feature 1..334: note = strain WHCC81862 hypothetical protein1
  source 1..334: mol_type = genomic DNA
attgaattacgtacaacgttttaaattgcactgcgtataatacgtttagtgtaattggctgcgatcttattggtctgtataatacagttccaatacccaaagtcccccccgtgtagctcacggggttttattttccgtatatttacggctccccaaaatatttcgtatagcttacgaatgccaatatttttatttagtttaaatagatttttaatttggttttgttttatattatatatttgttttgctctctttgttagttttatcaacttatgtttacgttatattgtagtaagtgtcgcaggcccatttgggactgtatttgttaatttta

SEQ ID NO: 1599 - DNA, 334 bp, Wenzhou picorna-like virus 37
  misc_feature 1..334: note = strain WZSBei69579 hypothetical1
  source 1..334: mol_type = genomic DNA
gttttgtagctttattcttcgtgtaatcgtagaagttgtgtgtagaatacttcaaatatttattgagatattcaatgcgcgatttccttctcctaaacaaactatacaatgaggtaagttgtatttttaatgttgggctccacccctatgtgaagtgtcgactcacatagtatttagacatacggttttcgttttgtagcaaattattggcgatcaagcaagagagacaaaccaattacctgtctcaaacaacgttgagttaggtggttggaacgaattggaagtatctactacacgtgagactgtagaaacttctattagtaactttaaccct

SEQ ID NO: 1600 - DNA, 334 bp, Marine RNA virus SOG
  misc_feature 1..334: note = complete genome.1
  source 1..334: mol_type = genomic DNA
tacctgtgattccttgttgtctttgacaactaaatattcactaagagaatgatctcactagacattctcgaattgggcaagcgcctcaccatcgcttgttccacccgcgcccttgcactcatcaacgataggcagagcatcggaagctatcactcattgtttgacaattgggtgacgctcctgatgtttgtgctgcttatcaatgttgtagcgcaagttaccggacgactgcgcctcctaccgggccctcttcagcaatggattggctgcctggctgttagggttatcgtgttcgatcaactgtggagggtgttccactacttcctgccttgca

SEQ ID NO: 1601 - DNA, 335 bp, Aspergillus neoniger ourmia-like virus 1
  misc_feature 1..335: note = strain AnOlv1CBS 115656,1
  source 1..335: mol_type = genomic DNA
ccgtttgttaacccagtttactctgggggacacgatcggaggggttcgccgggagactctctgagttcggcgtccaacgagtcgttctttggaaaggagcggcgagtggggcctgtggatttggccgtcacacacgttaacagaaacggcatcccgcaaccaactcgtaagtggtacctactcgaaggtagggggatcgcagtgtcctgttcgggggcttccccgggttcgcccggtgtcggagccacaagatctttgtggtcttacccgatcaacaccctctggcttgccggtacgcgtgtgccacaaacacaactgccattttatattttaaa

SEQ ID NO: 1602 - DNA, 335 bp, Hubei picorna-like virus 24
  misc_feature 1..335: note = strain WGML142000 hypothetical protein2
  source 1..335: mol_type = genomic DNA
acttgctaaattacgtaaataagggagttataaagtagtttagtattgctatctctaggacactgttggctatttagtcttaatgatcaagatgcagtggagcagccctctaaaaatctaggtcacctccctagcgatagttaggatgatccacctacgtcgcgaaataccggatcgctacaattaaacaagatgaaacatctcctcaatctcaaaactatgaggaggcaccacagataacccagactgtggaacagcagcaagagttaattacttttgaccaggataaagctatagtggcagagcattatccgggagaaattaattatcctcgt

SEQ ID NO: 1603 - DNA, 335 bp, Hubei toti-like virus 2
  misc_feature 1..335: note = strain arthropodmix13450 hypothetical1
  source 1..335: mol_type = genomic DNA
agccgtggtgggatcaggcattggggaggactgatgcagatgaaataacattattgaacacaattcctgtgcaaggtggttctcataggccaaatagcagtaataataagaataaagataaaaaaggagaatttgtgaaaactgtgaagctgaccaaagataatataccggtatggtgtagtataaggaacaataatataacggtggttgatagagctaaggctagatttgtactggtacatgtgtcgtatgaaaacacacagggagtgggtggttttggtgctcataggataggtgatgtggtcgttaatagtcatgccatacaacttgatgat

SEQ ID NO: 1604 - DNA, 335 bp, Hubei tombus-like virus 16
  misc_feature 1..335: note = strain spider58816 hypothetical protein1
  source 1..335: mol_type = genomic DNA
tagtacccaacttgacccacgacagtaagacagtaacattcataccctacatcaatcaattcggctatgcaagtaacgtacactccagttgtgtttgcaatgaatatcgtgccttggtcgatcgccacatcacagatcgcacatacatcaagtttgatgccaaggcctggcgagaagccgcccgtcacacccttaaatactaccccgggggtgttagtaaatgtagttacacccagatcatcaatggctacacgggcgggaagaaggctatctacatcaaagccctagaaggactgcgcgcgcatggtttacgaccatccgataccagggtgcgc

SEQ ID NO: 1605 - DNA, 335 bp, Beihai levi-like virus 22
  misc_feature 1..335: note = strain BHJJX24892 hypothetical protein1
  source 1..335: mol_type = genomic DNA
cttacggcctctaagaggaatatcctctccggctctcgccggtcacctatcttacgatggtgatatcccataaccagcaactataggagagaagatcatgaaagacaagagccttgcggagattgctgtatcttcgccatactttgacgaatacgacatcaatctctacgtcgcaatgctcgaaatctctcttggtctcatcgaacctacagacgctgtttgctcataccattatggttgtgtgctcgcagctgctgagttgttgggttttgactggtccaaccagttgaaacttctccccagtgtcccgtccgaccctcttcacggagggttcc

SEQ ID NO: 1606 - DNA, 335 bp, Beihai narna-like virus 14
  misc_feature 1..335: note = strain BHJP52694 RNA-dependent RNA1
  source 1..335: mol_type = genomic DNA
ccggcggcacgcgtgagcgtgctgtcggtgaactcggtggcgttggtgtaaaagccacgtcccgtgcctcccgcctgtctgggctgactacccaggcaggtgtaaaaccagtttacaaatcgaatcaggattcggcgcttgctagccagggggctggagacatccagcccaaaggcaaggaaacgcggaatcctgctcgtgggaaaggcataaccccgagtgccaaacatcaacgtgtttcgcagctcagaggcttcgcaaccgtgatcaacttctggttgtctcagttgcggctccgctgtagcctgtcggaactccaggatcacttcacggaa

SEQ ID NO: 1607 - DNA, 336 bp, Culex mosquito virus 4
  misc_feature 1..336: note = isolate OTU50 RNA-dependent RNA polymerase1
  source 1..336: mol_type = genomic DNA
agttaatatgaccggtcgaacatcaccctggaattggggaagaactaccgtacttaactaaccacactagtatataagatatatactatatacccgcatttacataggaagataaggattttaaactattttgtaagttgatgttaaggtttaatctgtaagctaacagccataacagtagaaataagtttgccatatgttgtgtttcatctctttgtttctggctcttcaatccttgggtgtactgctgatagatgctcctctttctacaatcgcgctaaactgcccctccccaatctaccttttggcctcggtggattggtttaaaaacaaact

SEQ ID NO: 1608 - DNA, 336 bp, Avian avulavirus 20
  misc_feature 1..336: note = isolate AAvV-20/great black headed4
  source 1..336: mol_type = genomic DNA
aacatatgtatcatctcgctcatgctagccaggatattgtcataattatgtagattacatatgtttcaatcatatgtcactattgtagtgtaatcaattcgcgatggtactgaattatcatcttatattccctggacagatttccgaaattgacaacatactctcttacgccaataaacgaaaatatctgattacggtgcaatctgtattcaattctaaacagtatatacacaatcatacacaagatagcttatttggattgttttacaaattactcactcataattaagaaaaaatcaaagagaacttaccggtgggggcgaccccaaatcaata

SEQ ID NO: 1609 - DNA, 336 bp, Lasius neglectus virus 1
  misc_feature 1..336: note = isolate Cambridge-Lne, complete genome.2
  source 1..336: mol_type = genomic DNA
ctccctttgggtttgagtcgtcaggctttgttctcgaagggtcttgatggtgattcgtcccatccccaatatagctgtgaaatgcttgagggccgagaccatgtagggaaaggtaagtcgagccgataagatttgacaacgctatatctgtgcattaaatatttatccagtaccaaaggaactcaagtgtaatgctgacctagacaagtcttaggacgcgctgcttgaatacattccttgtacgacactcggtggtgatcgtaatttggtcggagttaacctctggataatatttgcccgtgtcggagcggtgatatagtcggcggactaatttac

SEQ ID NO: 1610 - DNA, 336 bp, Ginkgoaceae-associated picorna-like virus 1
  misc_feature 1..336: note = strain pt112-dic-10,1
  source 1..336: mol_type = genomic DNA
agattggctgtgggtagcgcataccacgttaataatatgtgctagcggaaatagaggtattttagagatgcgcacatgcttgactttgccggtgtgtctcgaacgcgcgtactactcacacgtttatggagaggagcgaagtccgaagtgcagtgattgagcatccgcacgggtttatagcttacaaaaacagaaagtgacgtcacgacacaagacgttaaatgtgaagagtttgatgggttaactttaaaccctactcctgagctacttggagtagcttcctttagcaatgaagctggtcaatgcgcggcaattaaggctacacagtactattcg

SEQ ID NO: 1611 - DNA, 336 bp, Wenzhou tombus-like virus 7
  misc_feature 1..336: note = strain WZFSL44625 hypothetical protein1
  source 1..336: mol_type = genomic DNA
gaacaggagagtaacgaaggtggtacggccgctacagaggcgcctcaccttacaaaatctaagttcaagcagcaggcgggacggccaccccgcgaactaataactggtgttgatcacaacacaaacgctattattgagaggcaggactgcgtgtccatcgtacctgccttggcagccagtcagaagatccacgatatcggagttggaacttcggacaatgtagtcttgaggattaataacgctcggaagagaaaagtgaatactgatcctcttgactcatgtgtacaagcaacagagtccgactgtgagaatcctctaggattcaggcgggttcgg

SEQ ID NO: 1612 - DNA, 337 bp, Wenzhou Crab Virus 1
  misc_feature 1..337: note = strain RBX2 nucleocapsid (N), glycoprotein2
  source 1..337: mol_type = genomic DNA
ctgtatgaagaatttacaaaaactgacaccatggagaaatcattcaaagagtgggaagagcttctcaaccagagacccccctcctcgacacctgcaccccttgtggagaccaggttctactgggagggtcttgtaatgggactgcttggagctgctctggtgattgcactctgtggaattctcaagcttgtgggatggaggtactgtcgcaatgtgattagtacacctctctagggctgagatgtccgggtgggtgggtgggatgggtccattgtggtgccttctcgtggcgggcctgtctagctaaaccacaactataaaaaaatgacaatacaca

SEQ ID NO: 1613 - DNA, 337 bp, Lactuca sativa marnavirus
  misc_feature 1..337: note = strain pt151-mar-12, complete genome.1
  source 1..337: mol_type = genomic DNA
cccgatatttggcataaacctcgatgacacgtctagcgtaatggctacgctggatgcgacatgtaaggttgatcaaccgtttcaaaactaaagctgctagctgcgcacgcgcgtagtacattggcctctgctctttttgagcatgttcacctctggaccatgaatcacaagtgacagctttttaattgtttttgatcccgttgagataccccaagtctcgctccgctggacctctatctgagagtaccgagcaggtgaaagcccagctcagggaggtaaccctttattccaccgggcctcgtcccacaacagcacaagaatcagatacaaccgaaca

SEQ ID NO: 1614 - DNA, 337 bp, Bole hyalomma asiaticum virus 1
  misc_feature 1..337: note = strain tick109109 hypothetical1
  source 1..337: mol_type = genomic DNA
gaattatagtaagattttctttgcgacttctccctgcgtttgtgattctacagtcatttctgctcaactttgttgctgcggccgctgtggacacaattttatttgcagagaatttttccttggtgaatgtttgcaattttatttagttttgtaatagactttgcttattattcattttcaggttactttgtttgtaatatttatcaattttgctctgataaagattacttgtcgcttatattttccttcttactatacactataattcttgttgctctttgtttattaagtttttgtggtgtaagttgttttatattcttattattagtgcttcatt

SEQ ID NO: 1615 - DNA, 337 bp, Wenling levi-like virus 4
  misc_feature 1..337: note = strain WLJQ103632 hypothetical protein1
  source 1..337: mol_type = genomic DNA
cccctcccggggttctgcatccttatctattactagataggttgtcctttcggctcttcaaccacctaggaggcaatcatggaaactaatttaagatttttcttaaccatagatacatgcactctttcagaagatgaaagagagtatctaaaaattaagttaatcataaaatttcctgaatttagaaattactctttctgcaaccactttttaggcatgctacgattccgtgttttttctacgggtcgttacatgtacttaaaagaggctatacagaatttgtatcctgaattcgctgatcgcatccggtttgacttccaaacagacggggtctggc

SEQ ID NO: 1616 - DNA, 338 bp, Wilkie narna-like virus 1
  misc_feature 1..338: note = strain mosWSCP70929, complete genome.1
  source 1..338: mol_type = genomic DNA
gcaggagtaaagttaagatcatccaagctacatacctaagggacgtagtcggtgaccgaaacaaggctttctacagactattgcctgttctgaaagccctgcaaagtgaaggagctatcgatcgatacctctaccacttaccgtccggagatctcctatcggagaagtaccgaggacagtctattaaagaccaaccttgggaccggccggaaaagttcttcacacctgatcaggctgaaggacttcgaagaatcttaacccgagatatcggattaaaaccccgagtcaccaatatcctgatctcgcgaccgcgagttcaattcaatcgaattcaggat

SEQ ID NO: 1617 - DNA, 338 bp, Sclerotinia homoeocarpa hypovirus 1
  misc_feature 1..338: note = strain ShHvLT11, complete1
  source 1..338: mol_type = genomic DNA
gttctaattggaagttccctggtaaaggtgcacctgaaggcattcaagataaatccagttttggcgagggtgtattagagcctgccaaatccgaaggtttattttactatcatcctgatctgatttctactccagtgttcaaagtactaactgtaggcaaaggaacttgggctattggctaccttaaatgcgacgatggtttagcgccagtgcattacgatgcggacattgaatctttctatagcttttcatattctggttatacttggctcaacgattttaaatcgagtctgacatctggaactgagttgccaaaggacaatcctggacatgtgcaa

SEQ ID NO: 1618 - DNA, 339 bp, Lutzomyia reovirus 1
  misc_feature 1..339: note = isolate piaui segment hypothetical protein 11
  source 1..339: mol_type = genomic DNA
tcttcctactacttcgtgtctgtcgtcgttcgtcggttctgttatttaacaatcttaattcatgtcattttcatcaaatctgtcgaatctttgttgtggagggaaggaggattctccacagagcaatcaatcagagaaaaatttcgatttcgtaaacgagatggatcaactgattcatggaccgacattaactcattgctagaaatcattgattatgaaacaggttcacaatatccaccagttccaaacatcccagatgcgttactacccccaaattcaacaactggcgtaaatacacataatgtcaatcatcttgttagtaatattctttgcactagt

SEQ ID NO: 1619 - DNA, 339 bp, Raspberry mottle virus
  misc_feature 1..339: note = isolate HCRL Glen Clova, complete genome.1
  source 1..339: mol_type = genomic DNA
cgttttctccaaccatttcctgtttgtctgtcgtcgagccagccgcaaacagtttctatcaccgtcccctttatcttttcggtgaatccccttataccctaaccttcgttggttttccgcttttacccgcacgtccccttcttttcatcctttcggtgaaacccctgcaccctaactttcggtttttcgcctttttccttacgtcccctttcgcgccccccctttttctttcttctctttttctttggttttgttttgttctccccttcctgtcccctttcccactttctttttggtttctcggttcttcccccttcttctgttttggctttagccaat

SEQ ID NO: 1620 - DNA, 339 bp, Kotonkan virus
  misc_feature 1..339: note = complete genome.1
  source 1..339: mol_type = genomic DNA
aaataagtaaataaattaaactaaataatctaacaaaacacacactaaagacttgtaaacaatgactatatactgacttctttattgttaatagttagagataagtgagacagtcgttaaagtatccaaaatttgaggtaatatgtcttaaggagaataatataatcaaagattgactaggcactgaccgtaaatacatcagaactaaagtacagggggggtgatggctgagatgaattgtaacttgcaggtatataaaaaagaaagaactataaaatgaattaaaacaactaaattaaaataaaggagaaaagtaaaagaaaaaaatcaacagacctc

SEQ ID NO: 1621 - DNA, 339 bp, Beihai picorna-like virus 22
  misc_feature 1..339: note = strain HOU126951 hypothetical protein2
  source 1..339: mol_type = genomic DNA
cttccgctcgctctgccctcggatatggcataaaactgtcccccccgtcgatccatgggggtccggtgtatagttgaagagatccgtgttgtattggataccacgcaagtagaacggttttatcgttctttctaaacctacttgtacgaaggcttgcaacacgagggctgctcctattgaggagagcgtacccgcgcaccgagaaacaacggaccttctgggttgggtgacccaggagtgtatataatatcacctactaattcatatttcataaattttatagatagatatagtagaaatacacacccgtcacaggaagaaattgaagtggctactgcc

SEQ ID NO: 1622 - DNA, 340 bp, Rinkaby virus
  misc_feature 1..340: note = isolate OTU75 hypothetical protein, RNA-dependent RNA1
  source 1..340: mol_type = genomic DNA
ttctatattacttttaaagtataaatggatattcgtaggtacttactccgggagttttcaaccctctcctggattgctatcgtaattttcattaacgtgattattctggttataaactatccctcaccacagtacataggcgaaggtcgcgttacttggcgtggtatagtttacacccagcaggatattacttttgtctgtcgcactagcaccaccgtttgcgtttttcaatcactcatttcactaatcattgctctgggttaccctttgtacccaattggaattgttgctgcttttatttatctgcttaacaagtggatttatttcctaaagcttcgtt

SEQ ID NO: 1623 - DNA, 340 bp, HVAC-associated RNA virus 1
  misc_feature 1..340: note = putative polyprotein genes, complete1
  source 1..340: mol_type = genomic DNA
agcgcacaagaagagaacgataggagctttatgaaatcaccaagagttgacaaaaggtttcccaagtttggtactaggttttgtgagagctcaacaatgaaaaccgcactaggcacgttggggctggctatacgcaagtctttttgtcaactcttggtgatttcataaagctcctatcgttctcttcttgtgcgctttaagcaaaacccccttttcaggcttctccgccttctaattgagagagttataggctcctccccctactaatagtgaggaaattatatcgtatacttgggaccattgtaagtcgctaacgcttttgttagcccaggatacagcc

SEQ ID NO: 1624 - DNA, 341 bp, Diatom RNA virus 1
  misc_feature 1..341: note = Chiba4 genomic RNA, complete genome.1
  source 1..341: mol_type = genomic DNA
tgattcaagcacacaacgaggggaccctctcgtctgtgtttggattaaataaaaacttcgccaagcaagcggtgagtgcatgtgcacatattccgggttcgatttcagtggtgttttaccatggattcgttctgtatttatccgagcctcttattgctttaggggggtttcgtacaagctgccggaggtgagtctacggattagtagtggcttttgcgttgtaaaattcgcagcaggtaataccctgtacactgaactctacgccactggaaagaagaatgagtcggccttaacacgtgcactaggtgaatacttacttagttcatcttcgagataataca

SEQ ID NO: 1625 - DNA, 342 bp, Picornavirales sp.
  misc_feature 1..342: note = isolate hbl169shi1 genomic sequence.2
  source 1..342: mol_type = genomic DNA
tttcgtggatagcggagtttccagtctctttaaaatggtgacttcaggaaagactggaccgtgtgagtatggcagccacacggatagtgcccctcaaatgtttgatcatcatttgttgtatgggaggaaagatcctctgttggttgttgaactgcttgttatgttggacggaagcgggagggtcgagtgcgaacccaactaagctggagaaaacacagcatgccggtgatacgagcgcaagatttagtacaatttattcccgatccacaccatatttcccccgtattaatttacacatttacggcttgcgtggttaattccgcaacatagctggcaccagtc

SEQ ID NO: 1626 - DNA, 342 bp, Warroolaba Creek virus 2
  misc_feature 1..342: note = strain WRCV2 205660 hypothetical protein2
  source 1..342: mol_type = genomic DNA
attaaaatgtgatcttgctttcttatacaattttgagaggttaataagaagaaagtagtgctattttaatatctaggttaactatttagttttactgttcaggatgcctagtggcagccccacaatatccaggacaccctctctgcttcttttatgattaggttgtcatttagaataagaaattaacctgctaactttcaaacaaatactagtaacattgaagatgaagaccggaaaattacttccgaacaaaaagagattgtacatttttctagtgaaggagttacccctagtaccactgcggtgcctgatatcgtcagcctttcaacagattatttgtca

SEQ ID NO: 1627 - DNA, 342 bp, Weivirus-like virus sp.
  misc_feature 1..342: note = isolate zftfla02pic3 genomic sequence.1
  source 1..342: mol_type = genomic DNA
aatttaaacaagctcaaatgttttattccgacatttgggcttttaaaacaggaatagggttgcaacctatagcatagaagaagtgtatatggttacaagagaaatgttgctgtcgctattcgccgtgctttcttctatatttgagacagttacacgagttatttacgtcgactcgttgaaatttaacgcgtaacaaattttacaaataatgatcaaaattttataaaacaagaacaacaaacaatagatattattgaatctgaaggctccactcatgtagagaatcgagtggcgtctatatccacaagaacaacacaggttgctaaggctgtccctaatcaa

SEQ ID NO: 1628 - DNA, 343 bp, Magnaporthe oryzae chrysovirus 1
  misc_feature 1..343: note = A gene for hypothetical protein,1
  source 1..343: mol_type = genomic DNA
gcaaaaaagagaataaagctttctacttttttgctccacacacgctcgactcagatggctgctcaaccaaacagaggcttcgactcattcttcgcagattactacgatcaggacggcttctcagatctcaccagcgtacgcgcgtccaccatccggccggcgaatatagtcgtagagccggaccacacggttttcgacacctaccgcacacacggcgggagccccccagactacacaaccagccaagtggcggacgcgttcggccagcgtgcttcagcaagcgacagggttcacggagtgaggagagacacagccgcttcagtgtacagcacgagaccgtacg

SEQ ID NO: 1629 - DNA, 343 bp, Solemoviridae sp.
  misc_feature 1..343: note = isolate ytb135shi04 genomic sequence.1
  source 1..343: mol_type = genomic DNA
tccataggaagcccgcacagatcagtaaccatgccggtctcaggtaccccaccacgcatagcgtgaccaagtaatgctcacatgcaaaccgggccacaaccagcgagatggcaaacactatctcagcaaccttccagatcgctaggcaggccggtcctaaggactgggcccacgctagggtcactctgggttcaacaaagtctcgcacttggttaataccttccatctttttcttgacttgtggaacggacaagattagtacaaagaaagaaagtgatatcttcaagaatctaacactcacaaatatgtacggatcttatccgttccacaagtcaagaaaaag

SEQ ID NO: 1630 - DNA, 343 bp, Kelp fly virus
  misc_feature 1..343: note = complete genome.1
  source 1..343: mol_type = genomic DNA
caaccctgctggaactggatcatcagaaaaaggagaagaattaacacctttcgtaccactagatcagatttcgtttatttcacgttatccccgaaaattgccctctggagtgtattctggtgctcttaagaagattaccattgaaactttctttcactggactactagtacaactaaggaacatctaggcttactattgtcactagcctcgtttgaaagttgcttgtgggaatcagaataccattcagctattacaaaggaaattgaaaatttattgtcaaaatttaaatatataagatcttttgtctatatctatgacagagaagttgtagcagactctgtc

SEQ ID NO: 1631 - DNA, 344 bp, Atrato Chu-like virus 5
  misc_feature 1..344: note = strain Psal 1739-1 segment L cRNA sequence.1
  source 1..344: mol_type = genomic DNA
cgaaatcaattactttaaaacttatatgttgaatttataatgagtggtaaaagcgtagatctgagaaaagttcgccacatggcaactactggcaaccctgtgactaaggtcgatttggaaatgattatgaaggagttgatggagatcaagagagagatcaaatcaatacggcaactaatagagggtgcctcatccaagaggtcaattagtgaaccaactgctcctactttggccctctcagaagttccgtttcatatgagatttaaataagggaaatgaaaacaatcattcttttttaaaaaatcttgagtattttgttggtaaagcaggaatctttgtggaaa

SEQ ID NO: 1632 - DNA, 344 bp, Beihai tombus-like virus 12
  misc_feature 1..344: note = strain BHTSS17936 hypothetical protein1
  source 1..344: mol_type = genomic DNA
gtaacgaggtcgcgctggtgtacccgccactcgccggagtccgaggagcagtacgctccctcttctccttttgcgggctctcctcgctgttcgcatggttaggttgctgggagtaccagcaaataccggtccatgtgcggctcgcctccgagctgcgatcgtctacggcgttcagcagtatatggacggcgcgaggatttgatgccacggcgctgcagttcagagtgcggcgcgcggaagctattgtgaagcgcaacgagtggaaagtaacaccgggtgtggtggaaacgacggtggccttcgtgtcggtcgaacaaccgagcgaggttgacgctgtccggttc

SEQ ID NO: 1633 - DNA, 345 bp, Wuhan insect virus 26
  misc_feature 1..345: note = strain WHZM10161 hypothetical protein 1 and1
  source 1..345: mol_type = genomic DNA
ttagcaagaaactacgctcaagtgacagaggaaggtaggttcacgttggttaacaacagtatcgtaacagttaaacaaggagaatcttcttacaggtccgatctgtccctatcagcagacttccagtttgctggcagaaatgtaaggacaaacacgagtaacgtccacacggactactcggggtataacaacaagtacatcacgtcagatggagtcttcgatgctgggctcgcactgaccgagtttgcaagaactacagcggagagacgtctcgtaaaagaagacactttcagcttactctctcagcaaactcaagctgatagccacgaatctttcatttacaac

SEQ ID NO: 1634 - DNA, 346 bp, Marmot picobirnavirus
  misc_feature 1..346: note = clone c1336805_g1_i1_libraryA_2521 segment I1
  source 1..346: mol_type = genomic DNA
aaacattgtagtttacaaatctgagaaaggagaaaccgcttatggttttacaagtaaacatccaatttacacacatccttagctcagccattagtggtctgagatttggagtaaatctggatgtagaaggaggtcgaatgtgacccgaaatcaaatagcttggtatgaagctagagaagggaagcgtcacaatgttgcaactgaacagctaggagttagagctcaaggtgagactgaacgatcaaatcgtgcgagagagttagaaactatacgacacaatgtgatcacagaaggtcaaacagatcgtactatccaggagcaacgcaggcataatataactggagag

SEQ ID NO: 1635 - DNA, 346 bp, Beihai picorna-like virus 105
  misc_feature 1..346: note = strain BHHK79817 hypothetical protein1
  source 1..346: mol_type = genomic DNA
cgaggggcgaatcccctcgtattcttttcaccaattgctaggtatactgggactcttagaggcggtaccgaaactatatatcatgatagtgtgtgggactcttagaggcggcactagattttgatatgtattgcatttggcttttcttacttcttcaaatttgatgttgtgtttaacacctagttaggattgtgtctaagtaactacccgtcctttggataggctctgcttattgatacgtcaaacctgggatgcggattaagaattgtgcactctatggacatggctcgaacacgatttgttttgacgacactttgaacccacactttggtcctgcgaactatat

SEQ ID NO: 1636 - DNA, 347 bp, Beihai picorna-like virus 49
  misc_feature 1..347: note = strain BHZC36855 hypothetical protein2
  source 1..347: mol_type = genomic DNA
ccctgtacactggtccaggcagatcggtgtgcagtaatgtaccgtctcagaggaccccatgtttggctcagaaagtacttgagccccagttgatatctgtcactggaagtacagataacttctatggaattgaccgaccatatgattttagtaggtttgaactgcagtcggaggtggttgatgatggaaccgttccaagcgtttctgaagaagaagttgtacaaacagtttcttttacggataacgctagaggcgtttctgtcgatctgccaacctcaacgaatgcagtggctgtcgtagataatacggacgatattggtttaggaacttttttgtcccgtccagtc

SEQ ID NO: 1637 - DNA, 347 bp, Beihai picorna-like virus 63
  misc_feature 1..347: note = strain BHTSS17878 hypothetical protein1
  source 1..347: mol_type = genomic DNA
gttcctgatagaacaaaacagtttattatgaattcgtaacatccaggtcaacgagcaagaatagagtgaatgaaaagaccgattataaatgtaggtcgttcagtaattcattgatacattaaggtcgcctaacacccttgtatatctatttttcgttctagtaagttggagaaatgttatcatgaaattttaaatttgtctagttttaccgttgtagtgacggaaacccctgcagaaagaaatattttcagagaatacaggtatcaaacttattattttctatatctaaaaattttaaatattattattgcctaaattgaattgtctcaaccttaacttttaacaat

SEQ ID NO: 1638 - DNA, 347 bp, Changjiang tombus-like virus 7
  misc_feature 1..347: note = strain CJLX49320 hypothetical1
  source 1..347: mol_type = genomic DNA
ccattgacgtcttgctcatggccttcgattgggcaagaccttggttgtaaccggccagtagggtgggtgtgcgcagcatccagcccgagtgtgcgggtgtgtggcgtgctggggagcttatgcttgtggagatttgcggtcatttagggacgaggacctaggtgcgagcaatatcctagagagccaacagcgatgacctaagagccataccttgatcactgaccagcacagggggattccaccgcggtgtggcgctcatcccggggaccggcccgtgtagagtgtatgaaccggataaaaccccacgaaccagccacaacctacgcaacacgatttgctacttcaac

SEQ ID NO: 1639 - DNA, 347 bp, Matryoshka RNA virus 1
  misc_feature 1..347: note = strain MaRNAV-1.2 RNA-dependent RNA1
  source 1..347: mol_type = genomic DNA
accctagggatgttgtcggtgtggggtattcacccttttacgattaccttccggtactttcgacgaaagtacaaccggatgggagaagacttcgtctttacaccatcccggagggaaccatacttcaacgttctcatggcggtcaatccttaggaaagctgccatgggaggggggaggctccttctcgacgagaaggaggaaactccttagagttgtactcacaaagtccttaggcctaaggcctaccgttgtggatatcctattgacgaggtcaataaggcattttcaacggatagagggagccatcaatgccgtcgtcgacagcctagtgtgctctgaccctact

SEQ ID NO: 1640 - DNA, 348 bp, Diatom colony associated virus-Like RNA Segment 6
  misc_feature 1..348: note = genomic RNA,1
  source 1..348: mol_type = genomic DNA
tgataaatgagtcaacgtcacaactggacacggaaacaagaaagcgattcgcaccctcgtctccagtgctggcatttacacgactcatagtatcagctgattgatcccttagctgcatactgaacgcgaaccgggcggtccgcagggtgccaaataaacgagtgggaacagctactttgaaaggttgttgtttggcgggctgcacttgaatccaatgtggtgatggttgggataatgtacactagtcactaatgcggagacgtatttaaaataatatcacagttgaaatgcgtaatatgttaagcatattaagtccgattgtaacctgaacaaggccaacttaatcgg

SEQ ID NO: 1641 - DNA, 349 bp, Chaq virus
  misc_feature 1..349: note = strain MARplus0002 hypothetical protein gene, complete1
  source 1..349: mol_type = genomic DNA
ccttcttaagttcttaagaaagaataaaaactttccatccggttttggaataccaaaccactttctatcgttcgttgaaggtttttgtgttatcacaaaacagaacgactgctttttggaaatccaaaagctaacagcttagtcaagcatactaaaaacttggaataccagtttttgcctttaactactagatccatgcatttaaattgcacttataacatcttctacagtagttaccactgcgatttggacgattttacgatccgtgctagcagtgaagatacttggcaagtattaatttttaccacgctatttatcctgtccgcttttatattcattgtcttctata

SEQ ID NO: 1642 - DNA, 349 bp, Shahe picorna-like virus 9
  misc_feature 1..349: note = strain SHWC0209c12638 hypothetical2
  source 1..349: mol_type = genomic DNA
gctatatacggggctaacatgtaaaaatgctaaacggcatgttagcttgaacggataaaccgaaagcgggttgtttaaccttactactcagagcttatcagagagatttagcaacttgtatgaattgggcgattcatgcatgtacatatagtctgctacaataacaaaagaaacaaattgtaatgaaatagaagggatttctaatcctactttcactgatttaacaggcactttggtctcggcaggtgttgcaccagtttgtgctgagattccttacacagtgccatcatcttttatttctacttctgaggtgtctcaggatttgagagactatttttccagaccaagg

SEQ ID NO: 1643 - DNA, 349 bp, Cylindrotheca closterium
  misc_feature 1..349: note = RNA virus 02, complete genome.2
  source 1..349: mol_type = genomic DNA
tcactccggggactttaaatccggcccagttttaaatctgaaggtaagcaaaattaatgtatgcatatggataccaagtgtagtgtatatttgtatgttttgtaaactagcttaggctttgcatatttaagggtccgtactgcggaagagagatctgagttccccctgctcaactgtaaatatacccttccactatattgagcgtagttagtggattgtacatagttcgttcggtaataattgtaaaacttacattaacatctgtcgagatgctaaaaacgacgtcgaggtcggtactggaagccgacctttgattgaggtaaattccaacgcccatgacaaacctgaa

SEQ ID NO: 1644 - DNA, 350 bp, Soybean cyst nematode virus 5
  misc_feature 1..350: note = strain ScV5 polyprotein gene,1
  source 1..350: mol_type = genomic DNA
aacaacgctaaaccctcaaacttttaatcaccacaaacaaacgaaacaatggcttcgaccaaagttttctgtgtgcgtgacgaggacgcgattgcggaacgtgctgccttgctgagcgacgtaggtctcaaaaccttcatgtcggcaggagcgcgcaacgctgagagggccgccgagtgccaatcggagtgcatttaccgtccaacggtcgagcctctgactgggctgtgctcaggcggtgatggtcacagtggcacccaccctaagcccactgaccaaggagaagaggcggcaaacatcgtcgtcgggagtgacccttctggcgggagtacttgcctttatggcatggc

SEQ ID NO: 1645 - DNA, 350 bp, Beihai picorna-like virus 8
  misc_feature 1..350: note = strain BHNXC41454 hypothetical protein2
  source 1..350: mol_type = genomic DNA
ggaacttcagaccgtcatgtcttaaaactgtctggaggcctgcctaggtcgtcattactccaaggagaaaccaaaaggcgtgctatgtactggatacctgatccttcttggtttgtggttttgccaggagtgtcttgcttgcatagttgatggactgtagtggtcgaggctgtttagcttcaggtgtaaagtcgccatcagtaaaccactgaaggcagttgtgctgatccgcgcagctgaccttgagaaaaataaattggattactaacttatatacacttttcaaagagtcctgggtctctcaatacctagggaacacggacggattcttctttgacccctgtctcgag

SEQ ID NO: 1646 - DNA, 350 bp, Wenzhou picorna-like virus 52
  misc_feature 1..350: note = strain beimix75583 hypothetical1
  source 1..350: mol_type = genomic DNA
gtcgtaaaatattttctacgttaaatttctttcttcagatttcaaacgttgctgaagacaaaaccagagtttgcacatactcttaaatcaatgtacatgctcccttaattgatccggagcttgataggattttgtggtcctattctcaaatactgtaagaacggcaacagtacacaatatgttacattatcatttaggtcagaaataccgagttgattgaagcagatatacttctgtgaaatccactattagcatttagtggtcatgtctttcaagaagacacaggcttaggtccttggcgtgccaaaaacaacagcctatattaaatagttgtttgaacgtcgtaaaca

SEQ ID NO: 1647 - DNA, 350 bp, Changjiang tombus-like virus 10
  misc_feature 1..350: note = strain CJLX21891 hypothetical1
  source 1..350: mol_type = genomic DNA
gttatccttaaccacagcactttgtgacccttcagggggatatacctgtatcattcatccacgccgtcgaaagagggcagcacgtatctgcacagaaggccagccgtccggtggtggcgggtgcatgattacaaggccagcgggaatccgccctttgcggtaccgctggctggcaggtgcatgagcaccggtatgtgctgaccggggggccccattggggcccccccggttcattgatttgggatggcagggccccaacgcctgctccggtcacccatggtcggttatttccaatgggagctttggaaatttgggctcaccaaaccatttaacaaccatgaacagtacac

SEQ ID NO: 1648 - DNA, 351 bp, Melon necrotic spot virus
  misc_feature 1..351: note = strain SCM43651 hypothetical protein 1,1
  source 1..351: mol_type = genomic DNA
aacaaactaatcctcggggaagaagtaaagaacgtggtgacagcgggggaaaacaaaagaactcaatggggcgaaagatagccaatgacgctatcgctgaatcgaagcaaggagttatgggtgctagcacatacattgctgataaaattaaggtgaccattaactttaatttttagtgtatggcctgttaccgttgtgactccagccccggggattactccggagcattgcttatattatttatctcatttgttttcttttatattacctcgcttagcccgcaaggaaatacttacgttcatcacttcgataattcttccgtcaaaacacaatacgttggcatctctacaa

SEQ ID NO: 1649 - DNA, 351 bp, Caledonia beadlet anemone dicistro-like virus 2
  misc_feature 1..351: note = isolate I38,2
  source 1..351: mol_type = genomic DNA
aacaagttaagatgtgatcttcaaaattgaaataattttctcaggctaaattcattttgtatgctatcttaactcttggtgttacctatttaggtttacttccaggatgcaccgaggcagcccctcataaatccaggaaccctgagtgcttgatatttgtttaggtagacgatatcgataagaaatttacctgctgactttcaaaaaacaaactcaaactcaaatccagaaattgctaattctagcatctcgactgaacaacaagaaattgtacatttcgcaagcgaaggagttactcccacgactagcgcagtccctgatattgttaatctttcaacagattatttggat

SEQ ID NO: 1650 - DNA, 351 bp, Renmark bee virus 3
  misc_feature 1..351: note = isolate SA-4 nonstructural polyprotein and2
  source 1..351: mol_type = genomic DNA
tgcactcctcaccacttgggcttaactcacaagtccttgcttcggcagaaaccaaaagagagtaaatatatgtagtcactgtgcgtaatgcgtttaattgtttgtcgcttcatgttgcgtaagaatggatgtatatttgttaatccgccagggcgatccctaaagtctcttttcagagaaaggttcggctgattcctagagtgcgtaaacaactcgctcccttatagttgtaaaggagggttttaaaaatcaactgcccaaaatcaaaataatccaaattggcgagatgagttccaagatctcctcgacctctcaaatgaaaaacttggcaaattagtgcgggatacgtgg

SEQ ID NO: 1651 - DNA, 351 bp, Beihai picorna-like virus 5
  misc_feature 1..351: note = strain BHNXC41415 hypothetical protein2
  source 1..351: mol_type = genomic DNA
aaggtccctctctccggttgactcctggaggtgcttgtatatattaagctaaagagtcatgtgtatatatggttacggccactgcatgttattttgtgtcttgttgactgcttgtggaacgctttgtacataaggaattgatgggtatttacccatggtctcgccaaccaaccacaacgcaccgtgcatttatggagttaatacgctcctatgtaacgttttaaatgtattactacgcttgaaaataataacaatgtaaattcatatactttaactgtagataatcataaagagtcgatcgttgcgttccatcacgctgatgccgcctggactacgaaggtggattctatt

SEQ ID NO: 1652 - DNA, 352 bp, Picornavirales Q_sR_OV_036
  misc_feature 1..352: note = putative non-structural protein1
  source 1..352: mol_type = genomic DNA
gaattttggaagtaagatcgattttaaactttgtagcctccgcaaagcaaaataagagaagtacccacttgttgcaaccgcaagttgaaataagagtagccatttttgtagcataccgcaaattgaaataagagtagccttttctcaaatacttatttaaaccataaagattgacaaatataaaggattgctgatactgttgtatctataccttcctcaaataacactcctattgtcttcaattgccctcctgaatacgttgagagttttcgctcaattcttttcgtaattagattacctataaccattcttagagttatcaagagatcaatagacgaaatactcgctgaat

SEQ ID NO: 1653 - DNA, 353 bp, Solenopsis invicta virus 7
  misc_feature 1..353: note = isolate Formosa, complete genome.2
  source 1..353: mol_type = genomic DNA
atcttccgtatgatccctcacatgacggaagaatccatagcaacggtaacgttgttggaggaattcttgagggcgctggaaaaggaatcgagaaagagaaggagcaagagtggacacgagaagagcgcaaacaacatgagcagtggcagtctggagagtcatctaaagaacgtggatggcgctctggagaaaacgccgctgatcggcgctctcgtgagagagagaatgaacttgatcgtcaatggcgcaaatggcaatctgaatatgaaaatggacagatagccgagcgccagagacaaaatcaaggatggcaatccggcgagaaccaaaaaggaagggagtgggaatctcga

SEQ ID NO: 1654 - DNA, 354 bp, Sanxia picorna-like virus 1
  misc_feature 1..354: note = strain SXXX37713 hypothetical protein 12
  source 1..354: mol_type = genomic DNA
caaagcaacatggataccaatgtgtaggaagcattaggcttatagctttgtttaataccggcatcccaaagccaatcttaagataaaaatgagtgtattatcttattatatacaacacttactaattttttaaatttatatttatcagagctgggatatgtttcccagtattgcagaaatgcaattattatagaacataatggtgtttttaattatagtaaatttgtggagcaatccgggaatttaatatctttaaatacaccattagatacaaacgtgcagcaattcacgctaggcgcccctataaacagtacggaagtaccgggagaatcggatgagacttttcacattgct

SEQ ID NO: 1655 - DNA, 354 bp, Wenling picorna-like virus 5
  misc_feature 1..354: note = strain WLJQ102796 hypothetical protein2
  source 1..354: mol_type = genomic DNA
gattacatgttttgtgatttatgtgtttgtttaagtgttagtttatgtgttttacgcaccatggctaggggtcacaacaatgggattagagttgtgtcagcagagcccggtccatgagtgtaagcaaccagggttactttggccctatactagtgttcgggttgttaaatataggatactagatcccgagtccttttttaagagtaactcgccttactacgggactttaatgaatgagttgccgatcatcataaaactaaggaggattattaccacgacaatgtgcaagaaacttaccgtttcttgaacaacaatcaaacaacggaagcgacgcgcttagaagtacagacaccc

SEQ ID NO: 1656 - DNA, 355 bp, Culex Bunyavirus 1
  misc_feature 1..355: note = strain CBunV1/Kern, complete genome.1
  source 1..355: mol_type = genomic DNA
agacagagtcttccatggtcttactttggcgccttgagatacttttaccttttcataggcactttaatagttgtaccactgcttgtaatggtgtataaggcaataaaaagtttgctcaacttcatgttcaaaaggaaaagagttagggcctgtcatccaaagaaagtttaggctagataactaggtgcgtggcttgattaacacaaagcagccttgagttgataagagtttaattttgatagacaaaggtgaaaactgaattattggtttctatcaaaattactttctttgcttcaaggtggggctgggaattttccctcctcctgtaaaacccttaaaggccaaagaaaacgcc

SEQ ID NO: 1657 - DNA, 356 bp, Picornavirales sp.
  misc_feature 1..356: note = isolate tou80rnanc1 genomic sequence.1
  source 1..356: mol_type = genomic DNA
cgctaaacaagttttccgtgcgttcgactaaacgtcggctgggtggacctattaacgataagatcggcgctcatgtgctgattactgataatctcccggataaattaccacttaagtattttgatggtattaatctctcaggaaagaacatccctgggaagtattcatatattaaggtacctacgcgtgcgaatccagagatagctgaccaagagaaagactcacctgaagcattgaaacatcaagatgcgggcggacctgaccagacaactgtcgaccaatcagcacaatcagcaataacaactcagagagatgagtcagcacatgaagtccccgtagttaataaggattctggc

SEQ ID NO: 1658 - DNA, 356 bp, Picornavirales sp.
  misc_feature 1..356: note = isolate ybw202shi06 genomic sequence.2
  source 1..356: mol_type = genomic DNA
tcctttcatttaaaactcattaatttcattatggctcaatggaggatgtgaatctctcatatatggccgcacgtaccatatatgttagataagcactatgaacttagtgttttagatcatcttcacttgtataattattttattatactaaatttgagtcatgttagatttgttgaattatcaaaatagtaaatgtagtgtattctctccaaaggagaactttagtgctatttctttgtaatatccatttattctaggaaagttccgaaagaattgtaacaatagatatacagagtgttttgatatgaaaacaaatttgacaaccccttgtaaccaacagtattattttaggcttt

SEQ ID NO: 1659 - DNA, 357 bp, Eimeria brunetti RNA virus 1
  misc_feature 1..357: note = complete genome.1
  source 1..357: mol_type = genomic DNA
tgaatgaaaagcgcgagcgcggcgtcgtgtcgaccgcttttctgatcctgctggttgctggaccaatacccatcagtagcaggcagggggagtgcctcgagtcacagttaacgtcggctgtgtcacgacggtcagctcctagtaaattgcataggagttcaccctgtgtattcgccctgcggggtggtacactggaaccacggtcccttagcccagggatagcgccgtggggggatcgcatgagggcgtagttagggttctgctattcagacgtacgcacattaagtgtagtaggccgtcatgtggtggtaagcctaccgctggtaccggggtacagcgcctacgacctacaagctc

SEQ ID NO: 1660 - DNA, 357 bp, unidentified
  source 1..357: mol_type = unassigned DNA; note = Hepatitis E virus ORF1, ORF2, ORF3,complete cds's;1
tcttttgatgccagtcagagcactatggccgccggccctttcagtctcacctatgccgcctctgctgctgggctggaggtgcgctatgtcgctgccgggcttgaccaccgggcggtttttgcccccggcgtttcaccccggtcagcccctggcgaggtcaccgccttttgttctgccctatacaggtttaatcgcgaggcccagcgcctttcgctcaccggtaatttttggttccatcctgaggggctccttggcccctttgccccgttttcccccgggcatgtttgggagtcggctaatccattctgtggagagagcacactttacacccgcacttggtcggaggttgatgctgtt

SEQ ID NO: 1661 - DNA, 357 bp, Apis rhabdovirus 1
  misc_feature 1..357: note = strain Apis/USA/A, complete genome.2
  source 1..357: mol_type = genomic DNA
tccaccctgatctccgaaactccccaagtcagcagccggacatcaaagcaaccagagcaaccccaaaccactcagaaccaacctcactataaaaaatacatatcttttctttctcaacaataacttaagctccgcagctctcaatctctcaaccagaagaagcagctccatctgaccctagtcaacacactccgatttagcaatcaactacacccaaactcaaacaccccgttcaaacagtcctgcaaccgctgcacgcaccaccggaacacatagataggtgcatacttctgcactttagaaaggttaaaaacgctccaagtcaaagaagtcccttaaaacttaatagaagccaaa

SEQ ID NO: 1662 - DNA, 357 bp, Hubei picorna-like virus 81
  misc_feature 1..357: note = strain CJLX25805 hypothetical protein 11
  source 1..357: mol_type = genomic DNA
tgtagggcatcatttcggattgtgggttgatgtcctgggcaacggaagccttgagatggtacgaagcatttttggaacatatgaaccctgacatggtgatattgtcgtttgacttcggttaggaccctcatgcggaccagtgaagaaaattcctattggaatgtcctgtacgcccgtctgagaccgtttaccgtggaatgaaagcgaagacttatcatgtaaagattgtgtggaaagaatttgtgggtaacatggttcattagagctccttataaaaaacaaaatgggtttcgacttcccaaacaaaaacataagaaaaataaaatgtagtgtaattagtaatttgcccctaaagag

SEQ ID NO: 1663 - DNA, 357 bp, Picornavirales sp.
  misc_feature 1..357: note = isolate H4_Bulk_46_scaffold_10 hypothetical1R
  source 1..357: mol_type = genomic DNA
ggccggccgggtagccacaagctacccgacccatgctttaggagtcctttaggtgtattgtatatattaaacttcttgtatattattgtacttatattcgggacggtgatgtcccactcttgtcaacaggcgttgagagaactccattgcggcgttccttgcactgtgaggctgcagactgcacattgcgttgatctttctgtagtagcaaggttactggatgtagtgccagttggaggaaatacctttctagcgtccctaggaaatgttcccccctgggcccaatttggcccgagtctgataggtaattcagaccccttctcgtgtttgagcgtcacgcgagaattcagggaacag

SEQ ID NO: 1664 - DNA, 357 bp, Solenopsis invicta virus 5
  misc_feature 1..357: note = isolate formosa, complete genome.2
  source 1..357: mol_type = genomic DNA
atgtgatattcaagaggcattctttcatggtcacccatcacataaggaaatttccaataaacttgtgtgtaaggcttgaaagaatggtcggagtactctatttagagtgaggagctccgctggcagccccagcaaatcctctattggataggaacagctatatcgggtagctatagcagtcgtacagtaacatgtgcggcgttccgaaataccatacctggcgattcaaacaaagaaaacaatactaccaacgtacataacacggagctcgcgtcgagttcccaagaaaacagtgtcgaaacggaacagattacaacctttcatgatgtggaaactccaaataggatcgataccccc

SEQ ID NO: 1665 - DNA, 357 bp, Gamboa mosquito virus
  misc_feature 1..357: note = strain GW polyprotein gene, complete cds.1
  source 1..357: mol_type = genomic DNA
cagctctagcggtctgttattttgtttaaactttttgtttgcaaactagactttgtcgaaccccttgcttacaaaccattaaacaatttatatctcacttactgcccatattagagttagcactttgttaacttacaaagttaaatagacagttgtctatcgcttcgcaaggagcactcaccctctccctcaatcactactaagtgtgcgagagagatccaaatttttaacatttttataacttggttttgtttcatcagtctcacaatattttctgtccgacaaatccaagttattcaaatttataagtttttaaatttttatttttggaaagttgtctgacttcccccggaagcc

SEQ ID NO: 1666 - DNA, 357 bp, Beihai picorna-like virus 120
  misc_feature 1..357: note = strain BHSC167783 hypothetical1
  source 1..357: mol_type = genomic DNA
cagggatcgaaaccctgtatatatcttagagagtttagcagtcgcgcattgtaaccaagacgggccggccctcaccaacacgtagtgattctgcggtttggtgttcggtgcagtgtaagtccctacccttgtttatcttgtgatcagagtgtaagtctactcgaccaaagaactcggtttttacataagtttctattccgaatccaaagaaactcaggagtgatcgggctccacgtacagttgcgacactgtgcgtggcgtcgtcaggtagtgtaccttgaaggttatcctagaataatttgcaaatttaggacatttgcacgtctcccaggacgttaaacggttcgaaaagacagt

SEQ ID NO: 1667 - DNA, 357 bp, Changjiang tombus-like virus 5
  misc_feature 1..357: note = strain CJLX42586 hypothetical2
  source 1..357: mol_type = genomic DNA
gggtgcctagcgaaggtgtcgggtgtggagacaaacacccccattggtcatgtggagatcgatggtgacgttttgagatggcgtcagacaaataagctggggaggtcaaaagtgcgtgggttgtggacggtgactggcgccgggttccacaacagatatggcgtgcacaatgcgagtaaagccaacttgctgcgaggtgtttatgagagggtgctctaccgtgtggtaggtggagtagcacgcctccctccaagaccctcgggggatgtgttcaatgaacgcttgtccaagtttcgctctgccttggtggcggaaatccctgaaagtctccccataacgcgtgcccactttgtggac

SEQ ID NO: 1668 - DNA, 358 bp, Mapuera virus
  misc_feature 1..358: note = complete genome.2
  source 1..358: mol_type = genomic DNA
taatcagacatgatcatatgccttgcaacagctgtctgctattctaaaagtttcagtaaccaccgatccaattaactggcacccatttaatccatctatttgcctttcttgactcccagctgcacactcctccgggcaactctgccatcttctggcttctatagactcacgatctgcaatccggcccccgccttcctgcatctggcattccaaagtgaggctcgatctcagcatttagaaaaaaccatataggcccgactggcaccacccacccccccgacccaaccgccagccgggaacacaaccccacaccccacagcaagcccacacccgcccaccagcggagacccagcggaga

SEQ ID NO: 1669 - DNA, 358 bp, Darwin bee virus 1
  misc_feature 1..358: note = isolate NT-5 nonstructural polyprotein gene,1
  source 1..358: mol_type = genomic DNA
acgtgattatgtgatcttgctatactgaataaataagtgatgtaaaattagtatagtattgctataatcataagaaggtggactatttagtcttacttccaggatgccttgaaagcagccctttcgaaatccaggaaccatcactcgattatacgtcataagtgtcgcgtataatttaaaaactgcacttgccgaaacgaatacgaacgaaaaccctggtacaggtttaaatgttaccaacgatgatgattcgagatataacgaggtaaaacaagttatatcttttaataatcaaggccagacagttgctgatgatgctctagctaaacaaaaagatttgcctcagtcttatttagat

SEQ ID NO: 1670 - DNA, 359 bp, Blueberry necrotic ring blotch virus
  misc_feature 1..359: note = segment RNA4, complete1
  source 1..359: mol_type = genomic DNA
cacaaatctgaaccactcacgctggtttgtcacctgtattattcaggtttactaccttcactacttcttcactaccatgcgcttaattgcgtgactacatgcgcttcggcgtgactagcgcttcgtgcgccttccactactgtattatgtaatatatccgtttctttcttcctcagtcaattgtgtcggattgtgattattaccaatcaaaaagcgcggttcctactacttcaccgtgtgttattggtactttttggttaataattacattctgatcaattgacactccctaaaatccaaattctttccctaaaatccaaaagtgagtgctattatacgtattagtactttataatatt

SEQ ID NO: 1671 - DNA, 359 bp, Picornavirales sp.
  misc_feature 1..359: note = isolate bfb201hbp01 genomic sequence.1
  source 1..359: mol_type = genomic DNA
tgaatactgcagttaatacagctaggccgacgtgaagtatcataggcggagaagggaaaatccggttatgtaacgtcgttaatataaactcgtgcgttgtgtgtttggcgacatactcaacttaaaacaatgttctttggatggagttcagctaacccctgttaatttcatcgttctggagtagtttaaagtagtgaagacgagtgtatgtgaggattccagcgatggatgaaagtaaggctcccgaaaggtgcaacctcatatgtctcgttgtagtagcgaaatttatgaaactcaaggaatggaccgttgggtaaaaacactcaaaactctctcttttcttatttggtacactacat

SEQ ID NO: 1672 - DNA, 359 bp, Guangxi changeable lizard picornavirus 2
  misc_feature 1..359: note = strain GXSXC1285591
  source 1..359: mol_type = genomic DNA
cacaaattaccttttccccctctactgattggttcactcgttatgactaggactggatgtttacgttacggaatttgcgatttcactgagtttggccagctcggaatggcaattttggcgaatgtgggttattgtgaaacgcaccgaatatactcccgaaaggaggttagtaggggcgtgtagcaccacatagctgagaccacatgcgacagagcagataggagccaggaaatacgcctcatttgttgacaagtgtaccggctctgaatgtgtggggaggggtccccacatgggttctgtactgcctgatagggttgcggctgatcagttgcaatgtggtataatcagttggaattcac

SEQ ID NO: 1673 - DNA, 359 bp, Hubei picorna-like virus 1
  misc_feature 1..359: note = strain WHSF7464 hypothetical protein 12
  source 1..359: mol_type = genomic DNA
gtggggcacacagtagttatagtagttatatgccggacccggctggggggccctgtcactccttgacaggcagtgaacgtcactggcttatgcaaaatagcggatgcctgttggaaacatgggctgaaaacacaagaaccaacttagtattggataccactttgtatataattatgaatatactgtatatatacaagtaggcttgctaagtttagacacgtccctcgtggcgatgccatttttatggttgtatggtcgtacattccagtatattcctttctgtggtgataatcatatatcatagggagtagaacttgattgctacaaattcaaattcacagagtagcccactctataac

SEQ ID NO: 1674 - DNA, 360 bp, Firefly squid flavivirus
  misc_feature 1..360: note = isolate Wat_scin_armtip_sample_41
  source 1..360: mol_type = genomic DNA
gttgacagctgcacaatacaattcctaccttgaaggtacgcgtgttctcggacacaaggcgtgcaagtggaccttcggtctgcgaaccccaaagcgttcaaaaacgttcacatcgttccgatctgctgtacaattcgctcttccgtatctaccactctattgatttagtatcactccttgctgttagcctttcaagaaatttagatttactcttacctctttgcacctccactgctccgcagttgtaggtgcactctctcaattcgtagttccgtcttccctaaagatattctacccgcggctcgtttacacctcgtaaaccccgttacgctccttgccacctccctcaaagaggcagtt

SEQ ID NO: 1675 - DNA, 360 bp, Sanxia picorna-like virus 2
  misc_feature 1..360: note = strain SXXX37883 hypothetical protein 12
  source 1..360: mol_type = genomic DNA
catactgccatagcggaggaaggttgcgcgtgagatatattggatacttatggtttaatagcttgtatctcacaatttattggtggaattaaccatttcatcaaccagtatcatataatgagtgtaatatgatacttaaacgcacttactaatttaaatatttacacatcagagtgggagtatgttctcccacatgcgcataacagcattaatcaagatagtatactatatgcaagtatatcatgtatatcagagcattcatcggtagaatttaatgatacaaaagtcgaggatacgaatgtgttgcgttacgcattgggagaaaccagttataaaactgaggttcctggtaatcgtgac

SEQ ID NO: 1676 - DNA, 360 bp, Beihai levi-like virus 15
  misc_feature 1..360: note = strain HOU158632 hypothetical protein1
  source 1..360: mol_type = genomic DNA
ccttgggggtcatctggcaatgccagggttcggatctgtagaaatacagactatggtaatccataggaaattaatctccggagtctgtctggatactgctgagacagatatgtcttaagtaggttaagtgtgctttgccagcacacgtgtcattgtgtgatatacgtgtatagtaacgttggctaacgttaccgtgctagttgttatatgatggcgcccgtgccgacacgagtacattctagtagttcagtatgcttagcatgctgttctgctggtctgtacagatgtcatacacacaaccagggctgggagtagtaactaggaccggtccttaacactgtcaaacagacaggaggactt

SEQ ID NO: 1677 - DNA, 361 bp, Changjiang picorna-like virus 8
  misc_feature 1..361: note = strain CJLX30776 hypothetical1
  source 1..361: mol_type = genomic DNA
tatagacgtacaacttaaacagttgtcgtactagtatatatttgccgtatcaggtgcgtaaacccgggcggctggcagacgcgaagctccaaacctttagaaaacacaattttaaataaaagttatgtaagatttgtccctatcatttgatcgaactcttaaattagatcatttgagaactccctgtttgtctctattcaaactactatttgagagtagagagattcacatttcttcgttaccctttaacgttaaaagggacattcttaaagcaaatggagtttggcttacgttattgtgcgttaatcttattgctggaattgagctggattgctcttccaagcgtaatgtttgatctacg

SEQ ID NO: 1678 - DNA, 361 bp, Hubei sobemo-like virus 39
  misc_feature 1..361: note = strain mosHB229649 hypothetical protein1
  source 1..361: mol_type = genomic DNA
aagaatcaccagcctcggcttcagttatggtggaaaagtcagaccaatccacagagatcttgctccagcaagcgagaataactacatcgctcgagcgtttgatttgtttaatggaatccaagaacttcaaccatatggagtccctgacttcacagaccagtggtccaatacaagggccgaatatagcagcttcttaaggcatgcggaaattagaagtgcgttagaggtccccactattactcaacaacaaaagaacgcactgttgaacatcgctgaggaccgatattctataatcaaacataaaatacaggatgattatcttgatcctgtaaatgtacgggatattatttgtaatttgaat

SEQ ID NO: 1679 - DNA, 362 bp, Sanxia picorna-like virus 7
  misc_feature 1..362: note = strain SXXX37313 hypothetical protein1
  source 1..362: mol_type = genomic DNA
ggtagaaggccctgcaaggcctccctctatcttagtgaattgatgagtagatatatgtatgggtgggttgggatacgaatgatccctcccacaacacaccgtaagactacatgttggcacaaacgaccatgcttgcctctgaaacactctgcatgtgatgatgaatcactgttagccaggtggaggttttcaagaagtccgctttgtgttttcacgaatattacgttgagaatccatatgatcgaacacccgcgacaacacatgctcttatgggtacgcattaaaatataacccttctaaaccacattcgtccaaatgtggtccattgacttaggacaaccaaccccccaaaccaacacgcc

SEQ ID NO: 1680 - DNA, 362 bp, Beihai tombus-like virus 1
  misc_feature 1..362: note = strain SCJXSX39078 hypothetical protein1
  source 1..362: mol_type = genomic DNA
gatcaaagagttcttcaccggagagaagtcgggaagggtataacaagggagcaatgaagaggaaagtggccattgatgccattgataagaatgatggttcagctattgggtcgatggtgattaacgcagatgaagtaacaatgaccatcaacttcaatttctaatggagtgtcccaaaggattcatgtgtctttaccagaggcccagggaatacgagccatcattcctgattgttttattcattgcagttctgctgttcacttgtacaatccttagtgctacacaacaccaaacaataaacaccgacaactcatctgttaagactcagtacatcggcatttctacaggttcgaaatcttaac

SEQ ID NO: 1681 - DNA, 363 bp, Mount Mabu Lophuromys virus 2
  misc_feature 1..363: note = isolate MOZ135_2, complete genome.4
  source 1..363: mol_type = genomic DNA
tgattaaattggataaaagcttagctgcttggttatgagtgatattgtgataaataatgtgatcaattgaagatacttgattactattagtgataaatagattgttgtgtatgtctgtgattactaatgtaactgaattgttgagtttaatcagaccacaaatgctgctatattgccaatgagctattatctcatgactgatgacactatgcgagagattagtcccaacacaattgattgatataatttatttacaatagttctcaaggataattactaagaaaaacttaggcggcaggtcataatccgtcaaaagtttggatgcatgacttctgtctttaagatctgttaaatcatttttta

SEQ ID NO: 1682 - DNA, 363 bp, Botrylloides leachii nidovirus
  misc_feature 1..363: note = strain SRR2729873, complete genome.1
  source 1..363: mol_type = genomic DNA
aaatattcatcactattagtatatacgcatacccatacccgagattataatacggtttctattaggtcgttaaacgagaccaaacagaattttcttgtgcttctttagtctatgttactatcgcataaccagattcaacaactatagtagttcctgagaaaaattccgcgaaaacgcgcacagaaacgttataaaaggtgtagtgtatcctattatacccatagttggtatacagatactagtggtgaaacattcacactcgcgacaaaagttttacattttaaaacaaaaagtaaaaacaggctcgttaataaaacaaacgatcccgctcaaaggaagtttgtttagtctcctctaagcagg

SEQ ID NO: 1683 - DNA, 365 bp, Posavirus 1
  misc_feature 1..365: note = isolate Ishi-Ya8/JPN/2015, complete genome.1
  source 1..365: mol_type = genomic DNA
ttcccggtgtaaaaagctgggcgcggtctggctcccgtcgggtggaaaggtccaccaatggctggttgagtgtaagctccggtgctctggttgtcgcaattccagacgtcgtaataacctatattgcatctgactctaatatttgtggccctactgtatctagttcttcttctgctcaatctgactctaaaaaacaaaaactacaaaaaactgcttacaaccttgaagaattctttgatcatgatcttcctgatcctatggtctcttatcgttctaaaatttcaacaagaattcttgaaaatcaaggttgcattcactctgattctcatcttactcctcgtgtgttttcattctctactgttggc

SEQ ID NO: 1684 - DNA, 365 bp, Picornavirales sp.
  misc_feature 1..365: note = isolate H4_Rhizo_44_scaffold_11 hypothetical1R
  source 1..365: mol_type = genomic DNA
ggacctacacaagcgttaattcgcctgttcgtcccacccctttgcggcgcatgccatcgcgtcgcggagctagctccacaccaactgaggcacacgatgatagttactgctctgaggtcctgagtgaatctgaagagagaatggatcatcatgtttctgcgcctgagcgtccctcaaagtccatttttatggaagtacccggcacaggtataaatacgctcaaggatgggttgggtttcggcgaaccttaccctggtaaacaaccgcctactaaccaaacaacatacatgtcgggagactttaaatcacacacacagattgcactgcaagtgcaatcacaagatgagtatgaggagttgttgcaa

SEQ ID NO: 1685 - DNA, 365 bp, Hubei orthoptera virus 1
  misc_feature 1..365: note = strain ZCM21319 hypothetical protein 1 and2
  source 1..365: mol_type = genomic DNA
aacttctggttacccagcttaaaggaaatttccagtaaactttaaagtcaaggctttagttctaggtcgaggtgccctatttagggtgaggagcctcggtggcagccccatcaaatcctctattggataggagcagctacattcaggttgatgtagcagttgttaggtaacactagcagcgttccgaaacatccagacctgcccaatccaacagtacgaacaatggccctaacggcccaacgattgatacgacggacgtcaagatcaacacaacccttgcttcctcttcacaagaaaactcccttaaagaaatcgaaatcacagctttccaggatgtggaagcccccgcgcttgccctcactcca

SEQ ID NO: 1686 - DNA, 365 bp, Wenling toga-like virus
  misc_feature 1..365: note = strain WLJQ101932 hypothetical protein1
  source 1..365: mol_type = genomic DNA
tgtggattgcttctggctccgttttgttttgacttcgttaatcgaagcttcggatatttccgagacttgactcaaaccggcgttagacgcgattggctggcgtaaccgttactgaggctagaagggacgcgtcctcgcgatcccttcgtttctcatatttggtgcagctgtacacgtccgttttctcttaagtgtaggtgataggatagggtgagaacgcgggcgccacgttttagctttttctaggacgtccccagtggtttaatacctcggagcttcggctctcgggtccttccccccccgggtggtgtagttagttgggtccccagggttgtttcatcagcgcttcgttgtttttaaaaaca

SEQ ID NO: 1687 - DNA, 365 bp, Hubei reo-like virus 6
  misc_feature 1..365: note = strain WGML611819 hypothetical protein 31
  source 1..365: mol_type = genomic DNA
cgccattactactgtaccaagaaaacttcaaacaaacaacaactgcgacaaccctaactaatgtaaccgaaaccaccaatgcactcgaacgcggcaacgcatcgaacgtaaatccgtatctgcactcaacactcaaaaagacaccaattccaaacgatagattaggaacatatatatctggaccacagttaggtgatgcacgcattacaactggtttggtatacccactatcatttcaaaaaatatgggctaaattattttacagtttttacaaagtaaacaacaattcatactacggattagatcgtttcattcatcaattaagtaacggataccttaatgttacaggaacagaagatgatttc

SEQ ID NO: 1688 - DNA, 366 bp, unidentified
  source 1..366: mol_type = unassigned DNA; note = capsid protein [Nudaurelia capensis omega virus, Genomic RNA, 24481 sequence
tttctctctcttaccaagtgcggtaaaacaaacaaagaaaggaaatcgagtgacaacggcctctacacacctcacgtccgtgaccaccggattatacgtcgcccgcgcacggcgccttttccgaccactcgtgagagtcgctggacagctgtccgtgaccacccgattgcagtcaaattactgctttcggaccactaagtttgtcctcgaacgacatacattcgttcacacactgtcttagcgagacctaaactcgccttgatagacagctcatgacagatcgttgccggcgcatctgtttcatctacctcctggctattccgttgctattatccctcccgagcaagacggctgggaacttttaga

SEQ ID NO: 1689 - DNA, 366 bp, Wuhan astro-like virus
  misc_feature 1..366: note = strain DSYS3171 hypothetical protein,1
  source 1..366: mol_type = genomic DNA
ataacgttgagaacgtgtgtgggaatgcctttcctagactagcttgcttggtaaaaaggtaagacccatgagggtcatatttgattttgttggttccgcttttggaatttggactgttcatgtgtgtacagtgagttcatcgacacatgtttttgaggaacgcctgaattggttttcaggggtgtatcagccccctcatgagtgggtttatcccactctttgggagcttttgcagcgtgtgtgtgatgaactaaatgagcagatcttatggaaccatgatgagggcgacatagacatacaacaagaggtgtgggttgaccctgaggagtttttgaattaggctcttgagttgcggcaagctctcaa

SEQ ID NO: 1690 - DNA, 366 bp, Changjiang tombus-like virus 17
  misc_feature 1..366: note = strain CJLX30686 hypothetical1
  source 1..366: mol_type = genomic DNA
gggagcttggtcaaacgaccaataacatgcacaggagttcatagtttagagttgaagcaccacacttggtgtgagtgctcctcgaacaagaattttaagcttcgtgttgttggcctgaccgagctcccttgcgattgcagggggtttaaggaggttgtgcacttaccccttgcaatcaagaattgtagtgagtggttctaccactgcaattgcgtgcacaatatagtcagcgcgttggtgggtcgcgttgctttgtgcgttccgtcacccaccactcatcgaattgagcaactttcaaagatatcacagtctttggctcgatcactggggcatgttctccctattagccaggaccaggttattagg

SEQ ID NO: 1691 - DNA, 366 bp, Ellsworth virus
  misc_feature 1..366: note = isolate Antarctic22 A2 maturation protein and1
  source 1..366: mol_type = genomic DNA
gtaacactcaactgtatacccgcgacgcgtacgggtcaacttacgctaacccttcttcaccagactacactgtcaggtttaaaacccaaaaggcagttaaaaccattaacggcatccgagtgacgaacttcgtcacagagatcatcgtcaatgatctggtgggcgttgatgtcaaaggcacgagtgccgttgataacattgccatccgcatacgggtgtcgggagccgctgaggcccatgatcgcgtgaaagcgattctgaaagccttagccacccaacttcccaattggtgcgacgagaacacgttcctcggttttgaaccgaagacgcttccttccgtcgtgagctgataagaggtccaataag

SEQ ID NO: 1692 - DNA, 367 bp, Linepithema humile virus 1
  misc_feature 1..367: note = putative capsid and putative RdRp genes,1R
  source 1..367: mol_type = genomic DNA
tttctctggttacccagctcataggaaaatgtcttttaactattgagtcaaggcttagaaattagaatggagggtcctatttaggatgaggtcctccggtggcagccccaccaaaacctccaaagactaggaacagctatatcgggttgctatagcagcatcaaatttatttgatgcgttccgaaacaccaaacctgctgataatcaaacgaacaacgagcaaacttctaccctcacaaatacaggacttagcacgacttcagaagaaaataacatcgaaacggtccaaatcacgacctttcatgatgtggaaactccaaataggtacactaccccgctggtgcagaacactgcagcaactagccgt

SEQ ID NO: 1693 - DNA, 367 bp, Micalovirus SF1
  misc_feature 1..367: note = gp1 and gp2 genes, complete cds.1
  source 1..367: mol_type = genomic DNA
gatctccggtctggtgagaccttaaaccaccaatcaggccaatggccttcagcttagcctggcataatcgcactcgaccgtaagctgaacgaaccaaaaccggatgagtgagtgcaactcatctggacgactcatgtaccagcttgacacagctaagtacatgtaaggaaaatgtgtctctaaaaatcaaactcaaaataactatgattttgaacagttatcacaaactgttgaactcacggacattgacaacactaatgttgtgtctgcgcagtccccagaagtggaactctcttctggtgacccttttccagatataactcccacttcctttctctcacgccctgtgaagataggaacccatgtg

SEQ ID NO: 1694 - DNA, 367 bp, Penicillium brevicompactum ssRNA virus 1
  misc_feature 1..367: note = isolate MUT10971
  source 1..367: mol_type = genomic DNA
gcccgctgtagctcggcggcattagggagttcagggtttccatatggggatttgtctgtcacacctttgataaagaaacagaatggccgcaccacatgttcgttagtatgtagctcacgcgggttggttacctaaaaccctctgcctagttggatgaaaaccagtaaggcatatatttacaaaaatgaacatctgagtgggatctcagtataactcttccccctgtccgtgggtccacggtcgatggtatgattgggggtgatgcaccatctaaacgcaagtgcagtgcggttcagtctcgcgcggcttgtcagccccccccaacccgggttcagagaccggtcttattctatttagtggtcacaac

SEQ ID NO: 1695 - DNA, 368 bp, Picornavirales sp.
  misc_feature 1..368: note = isolate nut158shi3nc genomic sequence.1
  source 1..368: mol_type = genomic DNA
ttttgattactcccgaggtggttagcaacacatttgcaggtgttgttctaaaaaataatgcaaaaagcgaagagaaccttacagcagtggttcaaattcaaaaagaattcttagcagcagctgaattcgaaaacgaagaactcgttacagcagtcgagtgtggaagtggagctagtagcagcagcgctagcagcattgggtttacagaagtgcctgaggaaagtagtgaggaagaagaagaagagcttacagccgtgctcaccgaaaccagtgattttgatgaaatcgaagaaatcatagttggtaaacatcattacaaccaacgcccccgcaattcatatgtcgatgacttgtcctttgtgaacagc

SEQ ID NO: 1696 - DNA, 368 bp, Barley aphid RNA virus 6
  misc_feature 1..368: note = 14BaA2 gene for RNA dependent RNA1
  source 1..368: mol_type = genomic DNA
cgccgaatagacgtcatgctctacgtttccagatttctggagatgtattgtgctacgcctacgtaggtgcgttcccttcccaactccccctgctcattagagcgggcttgttgggaaaacgccgtagggacatcgattctcgtttgaggctaggcctcaaacgcgatgttctagcggtatccgatttaacaagcaaccgtctcgcggttgcttcgcagatctggtctggtatcattgcatgtaccgccggatctggcttcgtctcccttcgccttgacaaggctcaaggaagagaagctattcatggtctcgcgagactagctttgtggctagtctcgaccattcgaaactctggcgcaactcacgtc

SEQ ID NO: 1697 - DNA, 369 bp, Cryphonectria hypovirus 3
  misc_feature 1..369: note = complete genome.1
  source 1..369: mol_type = genomic DNA
gggggttagagaaatcttgggagatttctatcgtcatagacatatgtgatgtacttacgtctctaggacgcctatgactggtttatactctgtcgagttgaacgtctggtggttcctacgtataagaactgcagtcttatgtgtgaaaccctacccctcgctaaccgagaacggttgtgtgatttgaggaacgttcgctgtttaaacttctttggaggaactttaaattgtattaattttgcatttgcaagagttagcccatctctaaaatgaggctatcgctgtgaacagccttaaagaccctctgggcaaactgattatgaattgagagttagacttctcagaaaaagtctggtcttgtcctagatt

SEQ ID NO: 1698 - DNA, 369 bp, Picornavirales sp.
  misc_feature 1..369: note = isolate H4_Rhizo_Litter_21_scaffold_1082R
  source 1..369: mol_type = genomic DNA
tgcggtttactggtttatgtttatcattttaaagtattaaacaacgtaatggcttcatcagcaaaaactaacgaacaagctttagggactacagtagcagcacatggcactagtggccaagtgttagctgaaccaagtccaattgatcaacaaattcatgataaccctggtacgattaaggcgtcgactgcaattgaaactcttttcaaccttttgttcaaagattatatttttaaaggattgtataccatctctactgatatggctcccggacaaatcatttggaaattacctattcatccagcagtttgtaatcaatataatgatcacgtaagaaaaatgtttaatgtttggacaggaggaatgaaa

SEQ ID NO: 1699 - DNA, 369 bp, Beihai picorna-like virus 58
  misc_feature 1..369: note = strain BHBei77093 hypothetical protein1
  source 1..369: mol_type = genomic DNA
agcctatgtgaaatagttggttttggcttaccaactagcgccactgtaatacgcgccgcacagtcagcttctgtaaataatgtaaatactgtcatcgccgagggtcaacaggttaccccggctgataaagacactaacctgacccacttcgaagatcttaacactggcggagacgccaagatctcggaggtagccattgccagttctggcaagtatactgagtccgctctgggggattggtttaagagacccatccttataagggaatttgtgtggcccgaggacactttgctccttgactcatttgacccttatttgctgtatttctcacatagtacaattaaaccgaaattgcatgggtatagtcga

SEQ ID NO: 1700 - DNA, 370 bp, Karang Sari virus
  misc_feature 1..370: note = strain JKT10701, complete genome.1
  source 1..370: mol_type = genomic DNA
actaaagaaaattttgttttctcccataatactactactacaagtatcaaccccgtccgtctgctagagacgctaaactctagcaccaaaaatctagccacatcagttgcttaaagaaccccttgagacactctcccacttaacatcttttaggaatcttcgatgctacaacaacttggctagtaataacagcaaatccatatatttcaacagttataagaggctttatgtccttactttgaaagatttgtttactattgtcacgattactttaattaacagaggctatatttagtgctcagcacgttaacgaaagcatttgtacaatagtatgagtttgttgtaaattgtcttgatacgacaccctatc

SEQ ID NO: 1701 - DNA, 370 bp, Boghill Burn virus
  misc_feature 1..370: note = putative non-structral polyprotein and1
  source 1..370: mol_type = genomic DNA
cataagtacctatattcagcgccccggagcatcagttccgaagaatcgataacgattatccagagcattagctacaaaacgccttacaaagtaagaagacacgatacgataacgttgagtgtatgcgaacacaaagagacgaatacttgtggcatttaaagctgataacagctttacgtggcaagattccgcgtgaggagttgagggagataattataaaatatcaagtacattttaaaataaccccatcaatatatagcagtcataataggaatatagttagacctaagttagaagaatactataggatagcatattaggataagttagattataattagtggaactttccacctaatctacctccact

SEQ ID NO: 1702 - DNA, 370 bp, Changjiang polero-like virus 1
  misc_feature 1..370: note = strain CJLX30310 hypothetical1
  source 1..370: mol_type = genomic DNA
cgatgggccggtgcttaccccgccaccatccaagtgcccggaggtcacatgcttgacctacgaatgccccaaaccccgggcacttacctcctatcccttcaacgagctgctgcaagccgcttcgcagcgattgtggtcagacgcccagagcgtctgttcccgcttttgcgcgaagggggtagaggcctcagctattttgctgaggcaaattcgagaatgggcctccaagaccgcgtttgcagtcttgagtatactcctgtattgtgtcaccttcgtatgttgggggacgctttatggcccgtggctactcgtctcgacctacccggccgagaccctcaccgcatgcttattggccctttgcgtgcgcttt

SEQ ID NO: 1703 - DNA, 370 bp, Hubei levi-like virus 1
  misc_feature 1..370: note = strain WHWN53257 hypothetical protein1
  source 1..370: mol_type = genomic DNA
tccgatctctcgtcgattggcagtacgatgttggagatgtaatctccaattatgcgtccttccaaggcgacggccttgtccttcgttatggctatctgatggacaccacaaggtgggacatcagtgtgtcgacgaagaacccgggtatccggggtcttccgtccacgttcgacgctcactggtggagaatccagaagcgtagaacgcgatcgactccatacggatttggctctaatcctggtgaattctcatcaggtcagtgggccattttggccgctcttggtatgaccaagacgccaagatcgctgcgataactttgtcgctccgatttacaactgaattaacaatttaataaacgaaggacaatgct

SEQ ID NO: 1704 - DNA, 371 bp, Hubei rhabdo-like virus 7
  misc_feature 1..371: note = strain QTM26925 hypothetical protein,1
  source 1..371: mol_type = genomic DNA
aaatgaatactaatgtatatcatatgataagtattactacaactcatttcccgaaaattcaggatttttacgagttgaacgtggaatacttcaatttaataagagaaaaatatgatgcatacaagggagataaaaattctcctgaattctttgcatcaatcgacaatcaaaaacttctcttattaattgaagtatgtaactacataaattcaagacatggattattccaggtgccaatattactgttgactccacagtcaacattgaacgcatattggcagaagatcgtaaaaggcgatccaacatccctgcaagatctagttcgattttattcagctaaataatgagaaaaacccgtaagagtcaggaag

SEQ ID NO: 1705 - DNA, 371 bp, Picornavirales N_OV_001
  misc_feature 1..371: note = putative structural protein2
  source 1..371: mol_type = genomic DNA
atagttacataaattcatattcctatgccacaaatttaaaacaaaaaattcttgcacggttaagtggctcgtgcctacatatttccaaggagccttgattcttggagtgacccttgaggtccctgcatatagtgtgatggtgtagtataacaaatctggtaataaatatctccaggttttgcttgctgtaaagtacctagtgtctggctcatgcaagcacacgggaatcccgtggttgctatttcttcatattatatgtagcctgtgtaagatcaggtcgattggtggcggtaccaccctaggtgactgagttgtgtcacacctgggaactgaggttaatcagaacaatcttaaactcttatcttttcact

SEQ ID NO: 1706 - DNA, 371 bp, Riiser virus
  misc_feature 1..371: note = isolate Antarctic79 RNA-dependent RNA polymerase and1R
  source 1..371: mol_type = genomic DNA
gtaaaactcaacttttatcacgcgatgcatacggcgttacatatgcagatcccaacgaccccgactttactgtgcgcttcaaaaccgcacctaaagcaaagagtcttaatggggctcgcaccactaactatgtcacagaaattatcgtaaacgataatgtggctgtaacagttggtgggcaagcggcggtagatgcagtatcattacgtatacgcacctccggcacccgcgagtctatgccgcgcctgaaggcgatgctgaaaagtgttgcctcccagtgcgaaacatgggctgacgataacgttctattaggttttgaacctcctgtagggaatgaacccgacgttgttgtttaacgggagtaaacgaaa

SEQ ID NO: 1707 - DNA, 372 bp, Menangle virus
  misc_feature 1..372: note = complete genome.3
  source 1..372: mol_type = genomic DNA
ctcagaattatctgaacatctacatcaccaacttctaacccaataaatttactgtgtggtcatcctgcaggactcacttgctattgccaccctacaagtaaaagccaattcaacaaatgcattgctttaccgcacatcaactgacctggcacttcaaattcaaggaccccgccacagcgcatgacagcagccccgaggcaaccccctccccacaacccactacacaattcctctcccatcacccaatcccctgctagtttaataaaaaattagagaggtgaaatgcacacacacaacgaccggaaaggagcacgaacaggtgcacccacacaccaccccacagcgaccaacccgccagccatccaaagcatc

SEQ ID NO: 1708 - DNA, 372 bp, Human rubulavirus 2
  misc_feature 1..372: note = complete genome.2
  source 1..372: mol_type = genomic DNA
gaaatctatcacaagtctatatatgtccacaattgacccttaagaaccaacttccaacgattatccgttaaatttaagtataatagtttaaaaattaacattaagcctccagataccaatgaatatgaatatatctcttagaaaacctgattattatgtgatagcgtagtacaatttaagaaaaaacctaaaataagcacgaacccttaaggtgtcgtaacgtctcgtgacaccgggttcagttcaaatatcgacctctaacccaatttaacacccattcttatataagaacacagtataatttaatcacaaaagacctcaaaaactgacacagcttgatccactcaacatataattgtaagattaataata

SEQ ID NO: 1709 - DNA, 372 bp, Human parainfluenza virus 1
  misc_feature 1..372: note = complete genome.2
  source 1..372: mol_type = genomic DNA
gtctacactcctcaataatgacacccattagctctaaatcgtaccattaatcaaatacagatcaattcgatacaatcagttcaaataagaaaaacgtagggacaaagtcctctaccaacatcaaggaagacaagagtctcaaaaagctcagcctaagcagagagaaaaacaacaacacaaagaaagaaaaggacaagatcacaaacaagaacaaaagcaaaaacaaaaacaagaacaaaaaagggaagaaaaacaaaagtatacacaaaaaccaaaaaagaaaaaaggccagagacaaaaacggaggcaagaacaaaaatttaaacaaaaacagaatttaaattcataataaacaccaagatagagacaaaa

SEQ ID NO: 1710 - DNA, 372 bp, Picornavirales sp.
  misc_feature 1..372: note = isolate H4_Bulk_47_scaffold_38 hypothetical1R
  source 1..372: mol_type = genomic DNA
agtttagttttcacatttaaatttgtaaagactgaatttcactctgggagacttgctttctgtttcttcccccaggaaggatacgataatcctaacgcgcctgttccctcttatgcgaattctaattatgttcatagagaaattgtagatattaggttatgtaatgaagttacatttactataccattcatttcctcctcaccatggagacctactgacaacacaagttatgctagtcacaccggatatttatcagtgtatgtagttgaccaactggttgctccatctggagtatctacaacagttactattcttaaagaaatttctgctggaccagattatgaagtagcactgcctaaatcaataaattat

SEQ ID NO: 1711 - DNA, 372 bp, Sanxia tombus-like virus 6
  misc_feature 1..372: note = strain SXSSP2574 hypothetical protein 11
  source 1..372: mol_type = genomic DNA
ccctggggcccgcccacgcgcaacaagcaagtgcagctggaggccggcttgtatgcagccctgcgactggaagccgcctttaacaacaggcgaaacggggcactcccactccagctcaaggcaaaggcgattaggcaccttgccgcgtacgacactagcgcttattctccgctagagttgacggatttgatcctcaacacggtcgtagccgccatgcgtcctagtggtcccgaacacctcctagcctcgatgttcggcaaccatcgcttccaaaaggagctcgcccgccttgaccctctttataaactagcttgaagaggccctgctaggcttgacgccacctgcgtgaagggcacccccctggggcccctc

SEQ ID NO: 1712 - DNA, 373 bp, Narnavirus sp.
  misc_feature 1..373: note = isolate H4_Bulk_Litter_23_scaffold_4 hypothetical2R
  source 1..373: mol_type = genomic DNA
aaataagacataaggcagttcctatctcaatatctccaaaactaagaaacctacatcaagactcgctccggcaatcaagaagctcaaataccaacgttatattcttcaatcatcaataagcaatcaaacttgtttatccatcatcaagcatcagtaataatgtcaggaataccatctgagtttggaattggtgttgatatgagcaaaacgattgaaaacatgaagaaacttcaaactgccatggaaaacgacccaaattttgatccttcattgttcgatgacaagaaacctgataagaaagtgaagggtaaaggtcctatttccgacttctttcgacaatctggcgactttgttactgaaactcctatgggta

SEQ ID NO: 1713 - DNA, 373 bp, Hubei picorna-like virus 16
  misc_feature 1..373: note = strain SCM51353 hypothetical protein 11
  source 1..373: mol_type = genomic DNA
tgaaaataaagcgctcacaattgagaacaaatatttcaaacaaattatattgaaaatttaatttaaaattttattaaaagtcttttaacagaaaggggtattttagtattgaggtattattttacgttgagtaattaaaagcagtataaatctttacttttggctagtagtgctgcggcatattaatcaagagaaagttagatcttgtcatttggtataaaatcgaggttttatattaaaccaatttctagtaaaaatccttacgaggtagttattattaaactaaaaataaattagcaaaatccttctacttgaaaaacactgtgaagtaaggtaaggtaaaacaaaattaaaataaaacaaattatataaa

SEQ ID NO: 1714 - DNA, 374 bp, Marmot picobirnavirus
  misc_feature 1..374: note = strain HT2, complete genome.1
  source 1..374: mol_type = genomic DNA
gtaagaacagagaagtgaaggtaacgaagtcaccttcagaacagacaaacggagcctcaaagccgcagcagaagcagcagcggcgttcgagacccacaaagaaatcgttcaaagaaagagcgaaattcaacgttgacagatcacttactgaccagtcagcaacagaagtaagcgaaacactgtctaacaaaccgacatcctcttcggttttcttcccgagccataaggcatctgctctcagtgccgggaattttattgagtccgcaggtcaggaaaactttgttgaagatttttctcgagtaaaagagaaatacagaccaggacacacgttcagtattcgggctaatacacaggcaaagcgtactccaaacgct

SEQ ID NO: 1715 - DNA, 374 bp, Plasmopara viticola lesion associated tobamo-like virus 1
  misc_feature 1..374: note = isolate1
  source 1..374: mol_type = genomic DNA
ttgtacttcgaattatctataacttactgaaatttttgttttgttttgttcgttttgttttgatttaatatttgaattatgagaataattttgtcattcgcgattttatgatccaaacttgaccacctgggtgatcacgattcgggtgcagggaatgaaacgctttccagcgcgtgtagttttgaaagtttacttgttgttatgatgtgctggactaaattaataagcacacattgtggtttgtgacggtcaaccataaatactaagattgacctaatgacgtagtcagatggcgaaattaattggtataggttttgagtatctattaggtcaatcatcgcatttcttatacaattttgcttttatttagaatc

SEQ ID NO: 1716 - DNA, 374 bp, Mivirus sp.
  misc_feature 1..374: note = isolate TTP-Pool-7, complete sequence.1
  source 1..374: mol_type = genomic DNA
agtgaagcagagcggcacgcgggctcaggaaaaagcgcctggcttccctccacctcgctctcactggaggtagaccaaacatggccctccatgagccaagcagcctattatcaacccgtatatatcatttatgtttgtatatcttatgaggacgggtgccgttatgtactctgaagggccctcactcctccatgacggcctctctattagattttttcgccccgggaacacaggaacgagggcgttcagctattagatgagaagatcatggaggcatgtatccaaaattgtatcctcatctagccctattgtaatcctcttctcagggcaacgtttttctctgtttgtattaaaaaggatgatggaacgataca

SEQ ID NO: 1717 - DNA, 375 bp, Partitiviridae sp.
  misc_feature 1..375: note = isolate H4_Bulk_46_scaffold_395 RNA-dependent2R
  source 1..375: mol_type = genomic DNA
caatgcgtatgtcgcccgatggggaaatccgaagaggcggtatatctgcagtatcatgggaactttgttccatgctaatgcacgtgtattctaagattttccggtttgcttggatagtattaatcaatactacttttataacctaagccggatatattaacaaagagagacttatgtcaccttggttcgcatctgctattgtccgtattctaattgcagtcgttgagatcatatcaaaagcgcctttaaaatagaactatgagacgactaattcgacaagtttactattggttgcgttatcgctacccttggtaataattttgattcgttctcctctttgacgtgattacctatttatttaacaaggattataaa

SEQ ID NO: 1718 - DNA, 375 bp, Picornavirales sp.
  misc_feature 1..375: note = isolate H2_Rhizo_Litter_49_scaffold_13612
  source 1..375: mol_type = genomic DNA
gaagctgagtccttgacaagacgttaaactgtcgctagatgagtgtgatcttgcaaaactatataaaatccaaagtttcaaaagttttgtattgctgctcatcagttggtagggtcctatttaggattactgctcaaggtcctacgaaggcgtccccttcaatagcctagagcgctttggtacggtctcatttatgggtttatatgagtacttaaattttaacctgcttcaaactctaatattaaagtaggtggggaaactactataaaagcccaaaacagtatgcaagaagacgtcacttctggcaagttatctgatgaagttcaggaaactactgtttttaaaactgacgctaatattgtcaaagcttctatg

SEQ ID NO: 1719 - DNA, 375 bp, Beihai noda-like virus 6
  misc_feature 1..375: note = strain BHWZXX9026 hypothetical protein 11
  source 1..375: mol_type = genomic DNA
tttttctgcaactataaagaaattatcgtgacgaccgccgctgttggcggagtcactgccatttgcgtcttagcttataagcgtgaatggtttgtttcaaaggatgccgtttatgctaaaatactcactgtatttagtacgaacgtgcagccggattatagggaaactgttcgccttgttcgctatacgccgctgaaagtgggtggagctcattcacaccccgatgctgcagctgggcgcacaagcgcaaacattttcatcgataaagtgtgtgcgagcataggtcatatcccgttctccctttcgagttcgaatcgtgatgtcagagctggaaatgacggatgccgcaatttttatttcagtaaggatttgacc

SEQ ID NO: 1720 - DNA, 377 bp, Feline morbillivirus
  misc_feature 1..377: note = strain 761U, complete genome.3
  source 1..377: mol_type = genomic DNA
gcactgaccatatgatccactgtaataagtccaatgaaagtatcaattaataatattggtagtgcaatgagtattgattgtataatatactcctttaaactagatagtgataaagggttatagatgatttcagttattttaatataatcatatattgattttattatcttacatgactattatgtaattgaattatgtgtcatcaattaatagcttaataatatcgtttaatgtacttatattgatggatagatgtgttatattgtaatcaaggatttagtatttagaaaaggaaagagtttaatttgttgttaattagttattgtgtattcaattagaaaaaacttaggaatccatgttaataaaaatttattatc

SEQ ID NO: 1721 - DNA, 377 bp, Wenzhou picorna-like virus 42
  misc_feature 1..377: note = strain WZFSL74289 hypothetical2
  source 1..377: mol_type = genomic DNA
tagcacctaggggaagaactcttttgttcttcctctatgtagtgtagaataatatataccagttataacatgtagactcacatggctagggaacttctacacttgaaatacatcgtggagtctcacgaaaactactgcacattgtggcgttatgtgtggtttttaattttaatgccagtaaatctcgcgataataatgatacaaattcttctctggatagctcattatccaattttaacaatgagcaactttctagctcagaggcagttggctctgacaacaacacgacgacgatcgagagtcatctatcagatattgtactccgcaccatatcgagaacagacccaatttataactcactccccaaaccatatggt

SEQ ID NO: 1722 - DNA, 378 bp, Valsa ceratosperma hypovirus 1
  misc_feature 1..378: note = complete genome.1
  source 1..378: mol_type = genomic DNA
gggtgtagagaactcctggggagttcaatcgtaatagacatgtgtgatgtacttacgtctctaggacgcctattactggtttatactctgtcgagtttgctaggatatggtggttctacgtaaagaagctacagttctttatggacacactctaccccactttggacctctttaaaggtcaactttctttaaatttcttatttgttaaccctgatgggtgttcatttctatgcctggagcaacgttaagctggagtgaaaggcccgtgtgcctgaaacgtgagctgataacgagagtcagcgaaagagaaatcccgacgaagggtaaattttagattttaagttggagactgcgacagactgcagacacttggtcaaa

SEQ ID NO: 1723 - DNA, 378 bp, European roller astrovirus
  misc_feature 1..378: note = strain Er/SZAL5/HUN/2011, complete2
  source 1..378: mol_type = genomic DNA
caaaacaattttaaaaattcaggactttttggacaatgccggtatggaatatcccatacttacggatgtgaattaccaggccttatggggcttataattatggtaaccaaaatattttatgtgcttaacgtgcgctatactcatgttcggaaaatcagtcaaagacgaagaagaagcaaaaagagtgctaggacaagttttaactgacgaagaaaccttgggactgttcatactatcttgtattgaacagcaagagttagaaacagaagtagtaaataaagaaggagacgaagttgactgttggttggtacccatagtcactgcactaactgcttttatacctctagctcaggatataattagatactttatatcaaa

SEQ ID NO: 1724 - DNA, 378 bp, Barns Ness breadcrumb sponge aquatic picorna-like virus 3
  misc_feature 1..378: note = isolate2
  source 1..378: mol_type = genomic DNA
acctgtgatatgtctttaaaagatcagctcagttttaaatctgagttctacggaatagcaaaattaatgtgtgtatttggttaccatgtgattatacatttttatattattattttattgttatataggctttgcacatatgaataaacttaggtttaccctatttagggaggcgtcgttcaccaatgtaaataatgtcacccatagagttgagtcactctttgggattgtaaataccgacttactaattttaaaacacaaaataaaaacaaaaattctttacagaagtccaagaggcttcttcaacgggaaattgatctcaactatcatgttgtttttgataaaggtttcccaaccgtcttccaaattttgacgaat

SEQ ID NO: 1725 - DNA, 378 bp, Hubei picorna-like virus 54
  misc_feature 1..378: note = strain ZCM19837 hypothetical protein1
  source 1..378: mol_type = genomic DNA
tcttaaaaacgtatatatagtttcgttaagagtttttacaactcttctcagaaactacgagcttggtttttataaccagctcaaaacgatcagtccggatagacttttcgtctcacacttgtgtttttacagcacaaaatttgtttctcgatttctcaaatcgactaagattttatatcttaggttgcaccgcaaacataaaacggtagttcatttattgaacgaaacagtgttaaagttcacttacaaaactcttaggattttatatcttaaggtcgtcccgacgaacataatcggaaaagtgttaaagttcactcacaaaactcatagaattttatattctgtggtcgtactctcgaacataaagagcgtttcacg

SEQ ID NO: 1726 - DNA, 378 bp, Hubei hepe-like virus 3
  misc_feature 1..378: note = strain WHYY20710 replicase, putative capsid1
  source 1..378: mol_type = genomic DNA
aaattggaactatgaatttaataaatacagctgagaagattaagaaattttataataataaattaagttacttatatatcaaattcaggaaaatggagttcccaaaattctatatggatttccagacagcgactcactttaaacctagaggaggcattcaatatttagatgaagcgaaaagagaaatgtattcgatatcttttgatactaaaggggactatgaaacggttagaaaatatcttcagcaaagccaaataaccggagcaagatttgcagcacttttgaaaggacaggaaagaattattggaaatggtcaacccgaaattttaacagataactatcaagctcaatatattaaaatttaaacaaataaataaa

SEQ ID NO: 1727 - DNA, 378 bp, Riboviria sp.
  misc_feature 1..378: note = isolate cfe153shi05 genomic sequence.1
  source 1..378: mol_type = genomic DNA
cttaactcggagatgagaggagttgacggcactgcatcgaatttctgatccgtcgtctctggttagcgacgctataggtataaagtccagcactttcttgcatgggactcgtgccacttccatgtgggattcgcccaattcgggcggcactaatctgctaagagctcccttaacggtctgctcttcagcatcgggcatatttattaatgcacgacgggctgaatcgcctaactcccgtagatacacatctccgacccaagaggggctagagaacctgggaactccacagatcttctaggttctctagcccctctttagttagggggagcagcccttgtttttgttctattcttttctcgttcgtataaaataaaaact

SEQ ID NO: 1728 - DNA, 378 bp, Changjiang tombus-like virus 5
  misc_feature 1..378: note = strain CJLX42586 hypothetical1
  source 1..378: mol_type = genomic DNA
gacttattaagacacaaggatatccgtacattgtggtcacgaccgggggttgtcaagttcatggcgataaagcttggcgggataccctggcccatttggaggaggtggcaaatcattagtaattagtagattagtgtgcaatacgtttcgctgacggctagaacccgttgcttcggaaagcgcacatcgaacgtggaaaagacaagccacccggcctcacgcagatgcgggttgggcacaccacaatgtaggtacctgcgattcgcaagtgggtgcgcggcggcaaccttcagggcaacctgttgattgcgggacctggcgaggaacgctgactggaggggaaagacctaccaacccaaaagcaaacacacatacaca

SEQ ID NO: 1729 - DNA, 379 bp, Hepacivirus I
  misc_feature 1..379: note = complete genome.1
  source 1..379: mol_type = genomic DNA
cagggtttcgaccctggcccggatacctatcgccttacgccgaaaggtaacgagtaggagtcgggtccccaggcccttaccgccaccaagccaggtggggaggtatgggagccggggggtgcagctggtagctccatgggggacgccccgtgagcggatgctgcatcgataccgggttagctctctgggagagcggcacttgacaccacgaatccgggaaccggacaatcgccggcgtgggacgcgttgcctccgtggccgagcaatttggcatgcccgtggtgaagagtgatggtgggggggggccccccttccagtaccgtactgcctgatagggtcttgcctcaagcccagagagtcgaggctgaaaaccgccatc

SEQ ID NO: 1730 - DNA, 379 bp, Beihai picorna-like virus 62
  misc_feature 1..379: note = strain BHBei74566 hypothetical protein1
  source 1..379: mol_type = genomic DNA
gtaggggataaccctaccataatatagtgtgatgatttagtcatctctattgattcacgcttgtaaaaagtcgtgttatgcacgacttcccgttgatcgggtttcacagagtttatgactcttaaagaattttctatgcgtgcactgccatagtgtgtatatgtctcccttgttcaacaaatgttggacatgttacaacgtcaggagaggaagaacgtttgccgggttaccacgggagtttgccgacactccgcagtacccaatggctttcgggattagccaaactggcttttcccttttgtaggatgccgtggcgggcctccgattcgcgtgtgtttgattcggcgcacgcgtcttatctcaatggattgcttcactt

SEQ ID NO: 1731 - DNA, 380 bp, Hubei narna-like virus 8
  misc_feature 1..380: note = strain WGML132164 RNA-dependent RNA1
  source 1..380: mol_type = genomic DNA
ggagtctgactcacgctggtgagcagtagagcatgttggaagaaacctgaaagccccgttggctgatggtaatggaccgggcgaagtccttaaactcaccattgggtctcacaatataaactacccaaaacggtgaccaatcctgtggcgtcgatcagccgtctgatttcttcggaataagatgtgtagctgaggtcagcaggtcgggtcttaatacttccgtgctaagtgtgttgaacctgtagcggtaaccccccctcctaaagtcggcgaagggtacttcgaaagtttggcactaaatgccgagagactacacgggtaggcggcgcgtgtaggaagacagagaggtctggactggcgatatatgccaggcttcttgg

SEQ ID NO: 1732 - DNA, 381 bp, Guangdong chinese water snake rubivirus
  misc_feature 1..381: note = strain LPSF323051
  source 1..381: mol_type = genomic DNA
gaagggggttagaggacgcggcgcgatgatacccctggccatccggctgctcatctgttccgtggccctcgttctgtgtcagctgctgcgtctcacccctgaacagctgcaggcgcttgagaatttcctccaggcgatcggtgtgcccggctgcgtgttggcgctgtttcacaaccgcaccgcatgatctgggccgctctcctcctttggctgctcgcctgtgtgcttagcgccaccgtcgccagagtcacagcggtcctgttcctcgggcttgccgcgctgtacgtgctggcccgaccgtacggatcgcccctctgcaggttgttcgagctcttatgaactccgtctccaatctggtcagcggcctcatcggggtgggaa

SEQ ID NO: 1733 - DNA, 381 bp, Plasmopara viticola lesion associated mononega virus 1
  misc_feature 1..381: note = isolate1R
  source 1..381: mol_type = genomic DNA
gtgacagtcaccttaacctcgcaaaatcttagaaaataaatccttctgaaaaactcttgagttcataattatacctaggcttaccggattatgggtgcatggttgatacttttccgcactagtattattcttgaactcgtgcaagtctgtttcgagattactaaagggctggttttatcacaagcagaaaaagaaacgcttaaagaagaacgcaagataatcaaggaaaagatcctcacttcgttgccacctagtataagagattctgctacgcattcgtcttaaggaaaaaccgagttcacaattcaatctattacaaatcactaaagctcatcttaagtgccttatttcctctgtttttcttccctcgtacgtgtcttc

SEQ ID NO: 1734 - DNA, 381 bp, Beihai hermit crab virus 3
  misc_feature 1..381: note = strain BHJJX21702 putative glycoprotein,1
  source 1..381: mol_type = genomic DNA
agcacttgagtagacaaatgtcaaaaccaagcgctgaacactttctaagagaaatcatccgtcttgaagcggagtctcgctccatgatggaagattcgtacaaggattctcctgcggtgattttctgtcaacagcactttggtcctggtcggggtctttgcgcctgtgtattcctacgggtagccggagttcccctcctggactgtgtggccatgggggatgttgagaggtatagccttgaggcacaggagttgatcggaagaccattcgcatggaggagtgattgtccaaggtgtggaagggagtaccactgccccagccagtgagtagacccagtaaagatagctgtttaaaaagcattcttatctgatttctctctgc

SEQ ID NO: 1735 - DNA, 382 bp, Riboviria sp.
  misc_feature 1..382: note = isolate war203pic1 genomic sequence.1
  source 1..382: mol_type = genomic DNA
ggaaccggctttcctctgattcaagaaagcgcagtgtgtgtaaagcaatagtgcgtgcaagcttacattagatgaattgttagtacctatacgaatgaggcagatattctttgttgggatcatatatggtaacatatacccttcgaaatgcgtctgaacctcaggatcatgtgcggaaaacagattcttttgtaagatcttttactagtgtttttacttttgcaaaattgattaagttcggttttacgacagtttaaagaaatgctagagtttgttataatatttctggagagactttgcggctaaagcaaaagtaagtccagatgactttggtcactttgaagaggaaagtgacaggtgtttttcccctctctttttaact

SEQ ID NO: 1736 - DNA, 383 bp, Picobirnavirus sp.
  misc_feature 1..383: note = hypothetical protein and capsid protein genes,1
  source 1..383: mol_type = genomic DNA
gcctcttttgcaatgttagatcgatgtgcttcatcttccatagcctgattatgtctcttcagttcataattggctgcagcactctgtctttcagcttccatattgtgacgctgatcttcggctgctttgaagaaagcaatttggttacttgtcatcattcattcctcctttctgttgatgatgaaagttgtaatcatgtaatttgcgaactagtccacagcaccgaatggctgtcgctagtttacatgaaagtgtggtttttaaactgtgtaaaaccataaagtgttctcctttctgtaaactagcgacagccattcagtgctgtggactagttcgcaaattacatgattacaactttcatcatcaacagaaaggaggaatga

SEQ ID NO: 1737 - DNA, 383 bp, Mud crab dicistrovirus
  misc_feature 1..383: note = complete genome.2
  source 1..383: mol_type = genomic DNA
ttagggaccgttgacgacagctccacgtatatgctcattacgcccactgcggaaacaatgtgatgctgtggtgtatacgtggtcaagctagcggcgtgtcccgcttattttagttttagtctatcttaggttaggttaatttagtttgtagttttcttttctccatgtctggttacctatctatcttaactacgctccagacgactaaatttagtatggctttcatggagaggtttgctattcagcgtgcgtgtaccatcggcagccccaaaaacacgcgtcaggagatctccccagccaccatgggctaggttggcagccaggttttaacttggtggggagtaaaatagcctgctccaattcaaaattctgatacttctata

SEQ ID NO: 1738 - DNA, 383 bp, Wenling scaldfish picornavirus 1
  misc_feature 1..383: note = strain XDXMC49056 polyprotein1
  source 1..383: mol_type = genomic DNA
cagtactcagtgtatcactgcttactgtgactagatccctagtaaagattttaacacgtaatatttattttgtttatttattatttatgtgtgtaagcgactttgtgctttccacacacaacaaaccattatttagactgctggacgcgtgtagtctcgtgagagttgcgtgaaaatggcttgtcccgagggacgtagttatctggtagtttattaatgcatttgttgtgtgcccatttccttttgtgtgctggaccacggtggtgtaggtgtggtgtgcttaaatgccccacagcgaaccactttaagatttaccacggttttcgtggtattgatcggcacacctgtatttccatggtttgggtacacctaaaggcccacca

SEQ ID NO: 1739 - DNA, 383 bp, Probopyrinella latreuticola Nege-like virus
  misc_feature 1..383: note = strain PlNV1, complete1
  source 1..383: mol_type = genomic DNA
taacctatataaaattacaagatgttgatcgtagattacctgagttggtttagcttcgcaatgagcgtagcggatgaacatctggtggtatcgcatatggcgatgattggttttgcggaaaaaccggcgaatcgtagtcggtggtcggagtgtttccaggaacatccctgctacaagcataaccttcgagaaaattgtacccacggccacttgatcgaggctaggttcggcggtgtaatgcactgccggaactgcctaccgcagacgtcggaacaacaggtcgaacatactaaacaacacgacaaatgtcggaaagaagcttacggtatcttggttacagctgccccggaccatagtaagtgcgggtatgcgttcgcttatga

SEQ ID NO: 1740 - DNA, 384 bp, Fusarium graminearum hypovirus 1
  misc_feature 1..384: note = strain FgHv1HN10, complete genome.2
  source 1..384: mol_type = genomic DNA
atcactataaacttccatgtgaacgttttactgcagaagaaatacaaaatggacaacagggcccaattcacagaactattgttgctagtgatagggtgagccacgtaccatccaccagtggtggggtattattcttcaggtttttgacgcatggccgttgcactgatcaacgtttcgagttaacgcagatcgagcgggagtgacccgtaatagcaaaagtctatcaccatccatgcgttaagacgtggacgggtgtgaagcttggatgagcgatattgtgccttcatgctctcaggtccacttaattgtgggatgcaattcattttgtaatggtgtttatctcacctgatcatggtacggtcatccgaagactaatttcccctt

SEQ ID NO: 1741 - DNA, 384 bp, Newfield virus
  misc_feature 1..384: note = strain MARplus10845 putative RNA-dependent RNA1
  source 1..384: mol_type = genomic DNA
agtcctagtccaccctctctccgttgttatgtttatagtgtccctatacctattttataacacagcccccctgacgaaatttgcaactacccttaacaactctactctcctgaaaccggttggaaccttcatttcatcccatttgacccagacagcgggtctgctatggttggtacccatatcattcgtagcggccaaacctgcctgggcctttctggcggcactcatcactggcatcttcacaactgagtacctccaagctcccacgaaatattgggagtatgcttttttaggagcagcgatggtgctcctactaaaagcgaggaacgtacctcagttcttcatagcattggtcgtggttatactaaccattggcgttgggct

SEQ ID NO: 1742 - DNA, 384 bp, Wenzhou tombus-like virus 10
  misc_feature 1..384: note = strain WZFSL57346 hypothetical protein1
  source 1..384: mol_type = genomic DNA
aataactcaacatcttacaatcataacgctgtaggtaatgcggctgatagcggccccattagggtaaactacgcaacacacacaggcaccccaactatcctccacacacctcagacgccgatagaggcagagaagtgtgggcaacggttgggcagaccaatatacgtcttgtcgtatgacgacgagattttgttcaaaacttctctggagcttcacgagctctttgacaatgatctttgcgattttagtatctcaattctcggtgaagacaacgaactagttatcactcgcgtgcacacaaaattagatatatacccagagccagagaagattaccgacattcgacaacagtttgtcgcaagaccccaccaacagaccacacct

SEQ ID NO: 1743 - DNA, 385 bp, Serbia mononega-like virus 1
  misc_feature 1..385: note = complete genome.1
  source 1..385: mol_type = genomic DNA
tccgcaaacaacaaaaccaaatcaggtcttagcctttagttgtgagccattgcggtatgacgtactggttttgccagtggacggaagtcgctgagtttttaataaaaccccgtagtctagcgtcaatgtgccatgtgcctatgtgtattgtatcaactaacgtatatgcgtgttataactaatacaaaactacagttttaagaacccagacgagtaattacagaattgaaaggcagtgatagaagagaagaaaataaaggatcgacaacgtgaaaagtacctgtggtgataaactaagcaatacaaaagattgtgaagaaaaaatagtgaaggaatcacagtgctcataaattttcaaagagaaaaagatcaataattactaaag

SEQ ID NO: 1744 - DNA, 386 bp, Magnaporthe oryzae RNA virus
  misc_feature 1..386: note = complete genome.1
  source 1..386: mol_type = genomic DNA
gggaaaaacggttgcaacgttttgttccattcgcaggcccagtgttgtcatgggactagttatgcggatggcccacgggtgcgcgcagagcctgtgcgcgttaaaatcgttggagtcacttcgacaccccataggggctcctttggccggttggtggcgttatacactggtgatggggctccgtttcacggagctggacctgtttcgccgttatcaggtggtggtccctcgcgttcctgcatagcgagcctgctcaagcagttgggcaaatcctcgtggttctcaaggtcccgtaaaacaaggaacccgtgcgcagccccgactagaaacacgtaaactgttctacggggggtgctacctacctagtggtttcatagaattttgtg

SEQ ID NO: 1745 - DNA, 387 bp, Picornavirales sp.
  misc_feature 1..387: note = isolate H1_Rhizo_26_FD_scaffold_168 hypothetical2R
  source 1..387: mol_type = genomic DNA
caggattatatcgttgaaccattaattaaactgcggtatttcttgaacttattatcatgagaaagtcttttctatactgttttattaactattggaattaagatagttgttgactttgttatgaataaggtggtacctcagatttggaatttcattaagggaattatatcatatatgtttccagatgttaagattaaaaattatgaagaatatgctgaatctcaaagtccaattagagaaacacctggtaagaaaggtggaagaaaagcagtaagattgatacgagcacaagacggaaataatgaatttttaaatcatgctgatagtgtaatgaggcgtaatatgtttagtttccacttgattaaagtggaaacaggaaagacacag

SEQ ID NO: 1746 - DNA, 388 bp, Picobirnavirus sp.
  misc_feature 1..388: note = hypothetical protein and capsid protein genes,1
  source 1..388: mol_type = genomic DNA
taacgtaatccaaacccatttgcgtcatatttcttgactcctttcataagtattcgcccttttgatctgaattcgtgagataggtacattgacctaccgtgttgaatcagagaagtagtagcacacttcaatcttttgtaggaagatttaaacctaattttcgaagatgtcaatgcatctccctcctttcggtagttctagtaaatttatatttactagaactaccgaaaggagggagatgcattgacatcttcgaaaattaggtttaaatcttcctacaaaagattgaagtgtgctactacttctctgattcaacacggtaggtcaatgtacctatctcacgaattcagatcaaaagggcgaatacttaagaaaggagtcaagaaat

SEQ ID NO: 1747 - DNA, 388 bp, Aspergillus fumigatus narnavirus 2
  misc_feature 1..388: note = J-YC-2 genomic RNA, segment 3,1
  source 1..388: mol_type = genomic DNA
gggcacacgcacccatggtgcattcggtctgctaaacagaccactggcgcaggtcggtgaggacctgcgtaaggcctttaacaaggccagggccgaggcccttaacttggctcagccaagaaccaaggggttcccccttgatcgcctgcgtaggcgattcgcagacactctaggatggagtgtcgtgttccagccgaaggctgtaaaggtcaagaccgaccttgagaacgtcccaaaatgggagccttctccagtgtggagagccgcaccaagaggtgcgatatggagatcttacaagatctcaagtctgctaacaacgatagcagtaagcggttggagagccaactgcacgcacgatctcgtgcgtcttgccataaacacatggcat

SEQ ID NO: 1748 - DNA, 388 bp, Rodent hepacvirus
  misc_feature 1..388: note = isolate RtDs-HCV/IM2014 polyprotein gene, partial1
  source 1..388: mol_type = genomic DNA
tacctcctccataggagacacactaccctggcccacgtccgggactgggttgcttcttcccaactttccgggaagagcggcgcgtgtgtggattacatgttcgacgccaatgaagctagaccgtgcgacaccattcttcaggtctcggtgggtctgtaggctaaggcgcaagtgtatgaagcactgtggagtgctatgtgaggggggacccctctggggagaggtcaactcctaccactgacgggggaactcgtcagcttgtcggtaaagcggagtctgtggggataaagctgcacgcgtagacgctaaggcctctgatgcgcggttggtagctccacccagatgaagtgtaacggcgagtagggcatgccctgtgactagggggggg

SEQ ID NO: 1749 - DNA, 388 bp, Beihai picorna-like virus 125
  misc_feature 1..388: note = strain BHZY54174 hypothetical protein1
  source 1..388: mol_type = genomic DNA
atatagtatatgtgtattgtctaacaagaatattgctgctcgactatgtcgaggcttattcattggtgttggacgtgcagattttgctagttgttggtggtaccttttcaaacccctatctcagattttctcttggtttagaggacagagatgtctttaaatatgtggtcatgttctggcctactactctcatcatgttttgtgattgggtgattagttaatttgaatggttctggcaaatcgtttgtcagtctcgagatatcgaggctaaataaatatgtttggtctacgagccagttgtgttatcctttaaggaaacaatgtcatcactagggtgaagtacagtgcccttgtgttgattctatttgaactgtcccgtgcgctcagg

SEQ ID NO: 1750 - DNA, 389 bp, Equine hepacivirus JPN3/JAPAN/2013
  misc_feature 1..389: note = gene for polyprotein, complete1
  source 1..389: mol_type = genomic DNA
acctccgtgctatgcacggtgcgttgtcagcgttttgcgcttgcatgcgctacacgcgtcgtccaacgcggagggattcttccacattaccatgtgtcactccccctatggagggttccaccccgcccacacggaaataggttaaccatacctatagtacgggtgagcgggtcctcctagggcccccccggcaggtcgagggagctgaaattcgtgaatccgtgagtacacggaaatcgcggcttgaacgtcatacgtgaccttcggagccgaaatttgggcgtgccccacgaaggaaggcgggggcggtgttgggccgccgccccctttatcccacggtctgataggatgcttgcgagggcacctgccggtctcgtagaccataggac

SEQ ID NO: 1751 - DNA, 389 bp, Wenzhou picorna-like virus 14
  misc_feature 1..389: note = strain WZSLuoII97619 hypothetical2
  source 1..389: mol_type = genomic DNA
tttccaggaaatgccaagctctgggaacttctagggcgtccgaaacgcgtcctgtttatgttcttttgagcatcaaagccaaagcacagaatttgggactatgtactcggttttagtgaccggattgatagcccagctacctaaacttggaggaatcccaaatattggtagtcatgtggatgacacttggcgaataaaggcatagcaataagtcctactcttagctatctaggttccagaccttgagtcaggcctggttctgaaactaccgacttgcaacaattataaataacgaagacaagtctagtcaagaactagataatccaccagatgtggatgaaagaaccaccacagtccaagctgtaggagacactgaaactgccgaagtt

SEQ ID NO: 1752 - DNA, 389 bp, Hubei toti-like virus 13
  misc_feature 1..389: note = strain QTM25941 hypothetical protein 1 and2
  source 1..389: mol_type = genomic DNA
aacggagagatagaatctcatacccggtggatggcagattcccggtcacggccctccaatatcgcatcgcctatgacggctcacatcctgaaatagtggatttgagacctaacgtcgaggttgagggattgaggaggtccgaggaggggtcatccagatgggacttgggttcattctcttcacctatctcatactattatactgcactgtgccgagcgggacaactcaacgtcgcgcattgtcttgaaggaatagtaactacaatccaaaaacagatactgcaaagggcaatcagccccgaattcaaagatgatttcatacgcaaatggtttaaacatgtacacaatttcttttttacaaaaatatccgaaggactgggcaactcccta

SEQ ID NO: 1753 - DNA, 390 bp, Hubei myriapoda virus 5
  misc_feature 1..390: note = strain GCM10499 putative nucleoprotein1
  source 1..390: mol_type = genomic DNA
gcgcgaggatagacacccccgttcccagttttcgatcatacagacagatttctgccggtaagattccgaactgagctgtattgccaggtgactgatactactaggtagtatcctttcatttagataccctgaaaaaggtttttttgtttgtttgtttatttggtttttgtttatttgcttctattactttatccaattgtttttcctattaaattttagatttagttcaatttaaatctttgtatatcaattgtttcagtgcattttgttcaaatttgattctgtatcaatccattttcacttctaaacttcttatataaccagtatatcctatacttttgattatatattcatataatattttaaaaaaaccatccagaattgtcaatc

SEQ ID NO: 1754 - DNA, 390 bp, Kummerowia striata marnavirus
  misc_feature 1..390: note = strain pt119-mar-10, complete genome.2
  source 1..390: mol_type = genomic DNA
gggtttagaggctgactgtatatatgtaaatagctcggtgaacgtcactagaaaatagcggatgcctgtgggaaccatgggctaaaaacacaagaacccttcttgtattggataccatattttgtacattattaattagactatgtattttatataggcttgcaagaatgtagacacgccgctcgtggtgatgctgtatttacagcttagtcgcaattttgtctgattcctctgcgtagaataatgataactgcgtagttgtaacacctcattgccaacactaacaacaacaacgacggtgccgcgtcttatcaaatcggcacaactagttctaggataaattcaaatactgtaacgtttagggatggacaagagcagtgggatgctgct

SEQ ID NO: 1755 - DNA, 390 bp, Changjiang crawfish virus 7
  misc_feature 1..390: note = strain CJLX29643 hypothetical protein1
  source 1..390: mol_type = genomic DNA
gggggaggtgtaggcccccaattatctgacggccgggaaagaccgctggcagcccggaaagacggcacccttaaatgaaaatacaacatatacgataaaccctctatgcgcgccgatggcacccctactttcgattctgctcactgctgctgtgatcactgctatcttcggactcgcttttttgttgcacgcgtgcacttatgagcgaacctacaccaacgacgtatagacatccacagcatttcgtcttatgggtcagtagagctactttcatagtagtataccttgaagttttaaccacttttcaccccggaaggggaatacgcatccagttccgtttccccagactgtacgggccctaccaagtacccaccgctccagcagcgcctg

SEQ ID NO: 1756 - DNA, 391 bp, Amazon lily mild mottle virus
  misc_feature 1..391: note = 3a, 3b genes for movement protein,1
  source 1..391: mol_type = genomic DNA
cgcatagcataagtgttgagtcaatttgcctttcgataactggtttttggattcattttcgttgttagctcaacgcttgtccgatttccggtgtgtagtgccccagcgtgttggtccacgacattgctccgcacttgttcgattggtactcgaggcctgttactagttgctctgaccctagcttgggtgagtgactttaaggctagctgctaaacccattgatcttgttgagtaaagcgtgagagttaggcccccgtttgtcaaagggctagactagcgcagcttcagatacaaggattgaggtgacatcttgaggccttggccttcaagctctctttgggtggtgtgacttacctgtttcaggtctcgtttataagcaaatcttgtaaat

SEQ ID NO: 1757 - DNA, 392 bp, Fish HDV-like virus
  misc_feature 1..392: note = complete genome
  source 1..392: mol_type = genomic DNA
gacatttctctatttcgtcctcaatctcttcctttcttatcagcaatttcttgtattcatctccgagcttcctcctctcttgctcttctttctcctccttggggtcaggttcctctgaatccccaactcttccccgactcttagacctggatctccccccactcttctgcttctctggctctgcagcctctttccgtggaatcttggatttctccctttcgccctgcttagccctcgctagtactttctcagccatttcttggtttcttctcgagattcgggtggggggcggtctcttctggactactctccttgttttctatcaaaagaataactcgagtagagtcctttgaggcgcaccgcatcccgaggtatcgagatagagagtaaga

SEQ ID NO: 1758 - DNA, 392 bp, Marmot picobirnavirus
  misc_feature 1..392: note = clone c206723_g1_i1_libraryC_2746 segment I1
  source 1..392: mol_type = genomic DNA
atgaaaggaggtaaaaccattgtttagatggtacaataatttacaaaaatttcaatcattattattttcacaagcaattgaaactatcactgaaatcatgacaggtcagtggtgctttcataagcaagtgaaagaaaaggaggttaacatgacacaaaatcaattaagctatcttgggttggaagaaactaagcgtaataacatagtaactagcgctgaaatcaatagacacaatttagcagatgaaggtattcgtagtgccgcgaatgctgaggctggacgtcacaatttagttactgaacagcagggggctcaatcgttgaaggaaacacagcgatctaatttagtgaaagaagcgatttcacgcgatactctgtctgaaactgctcgac

SEQ ID NO: 1759 - DNA, 392 bp, Wenling thamnaconus septentrionalis picornavirus
  misc_feature 1..392: note = strain LQMMT12081
  source 1..392: mol_type = genomic DNA
gtcgaaaccagatttaactctggtgtagacggcatgtccactttcatatttaatttaagttattaacctcattggttgatcaataattataacaacaacttaggttagcgctgtagcaccatcatataatttatgatcggatggtgtgaggctctagcccaaagcactccgtggggctgtcactgcgacacattcccacaagtcaaaacgatagagtacgtagccacgatgcagccgaaaggtatcagcatagcattgctcactgatgtagaattattattccggcacgtggtatgtaggattgggaaatcctaccttagacgtatactccctgataggggcgcggcaggtcgatcgtatagactttaaaacctgttgaaaactctctcaac

SEQ ID NO: 1760 - DNA, 392 bp, Wenzhou picorna-like virus 21
  misc_feature 1..392: note = strain WZSBei23778 hypothetical1
  source 1..392: mol_type = genomic DNA
tagctagactggattctagctgtgacatttgatcacttctctttttatataaacttcaggtaataaatgagaagaagctatgtcatgaaagtgggagtccctattcagggagtatgggcctaggatgccttcttaattgatgacgagtcaaataatgatccaggtcccctgaagtcgaagtgtcagtgattgagctgtcaggcactttagattagtagcttactgataacaataataatagttcatctcccggagctgggtccgaggggacaaaagattacacagaaacccagcgttcagcccatgtaaatgaaactgtacaatttcaggagggtggtccaacttacgtcgctgaaattacacatggaaatgatgttactttcgacgatgga

SEQ ID NO: 1761 - DNA, 392 bp, Shahe isopoda virus 4
  misc_feature 1..392: note = strain SHWCII5333 putative glycoprotein gene,1
  source 1..392: mol_type = genomic DNA
cccccagtgacctctatcaaatatctgtttagttgatgtctagggctattgagagactcattctgatcactgtgctaggctgccttctcttggaaatctttgactacatacagagaaataacaaggaaagtgaagtgactgttctcgggagaggtgactgtgttatatatacagggaaaaggttttgtgaggaagggaggaagttgagctgccctggtgtctatgaggatttcttctttgtaacaggtatcctgatttcaaaaggtttttcattggctgctattgcaggttctgtagcactgctagcatttgtttacgggaaaataacccgagagttgagaaccagcgaagtgatagacagacgactggacagggaagaagttgtgtaaagt

SEQ ID NO: 1762 - DNA, 393 bp, Beihai hepe-like virus 8
  misc_feature 1..393: note = strain BHZY60925 replicase, hypothetical1
  source 1..393: mol_type = genomic DNA
tcgttcttgctgagtgtttgttaaccccagcaagtttcaatcattgaacttttggtgttgttgcaccatttgttcatttcttttccttatggaaaatacaattgctcaggagcgtttgctttctgagtttatttctcttttaaatattcttagtgataaagctaattttgttcatcttgacgaaaggtttcgttgtttagtctgtgtaattcaatacggttctaaggttgatagcaaactttttagtgaatctgttaggtatattaagtatctttgtcataaacatcaaatttgcattgcagttttatccacaggagtttttgctaggtcaaatacacatcccaattgctcttccacagttggttattattgtttccgctgtgatccttcaat

SEQ ID NO: 1763 - DNA, 394 bp, Erysiphales narna-like virus 2
  misc_feature 1..394: note = isolate PM-A_DN17411 ORF2 and1
  source 1..394: mol_type = genomic DNA
cctgaatcggaacataaggaaaaggctttcgccttacccatttgtgacggttaaggggcgacgggcactctgtaagagtgacccgcctcgatcgcgatgcgctgttcgtgcctacttcattgcaggctctcgcaggtcaaaacgatcaatccctagtcgtcgaattaatccgtttaccaaacagttatggaaggctgtttggtgtggtcttatctcttgtggtctcggaacacgtgctggttcttgggaattgaggaggtggttggcgcactctgttgagcgcaacggctggctctgtgttgcaaaggagttgaaggacctttgcggttggctgcgagccagggctcttaagagcactggtaagtgggattccaacacacacactcatattccc

SEQ ID NO: 1764 - DNA, 394 bp, Mount Mabu Lophuromys virus 2
  misc_feature 1..394: note = isolate MOZ135_2, complete genome.2
  source 1..394: mol_type = genomic DNA
tagtataacaggatctgaccattaagcactccaatcttaatgcaaattaaccttgaaccaacactatcaaagtacgattatatgcattggtggatattaattgactaaccagtctaataattattatattaatctacatagcaagttcaacaaattaattcatgcaattataatcaacacacaaattggtagaaaataaggtcatgattaatgtataggataactgatggcttactgacaaatgaagtacttacgacttcaaatattcagttagaaaaaacttagggtcaaaggcgagtcaagccattaaaacagactttaaagtgtgcattatcaccggtacgataatagaagtaggcttacaatttagctagatcttgttaatgcaattaac

SEQ ID NO: 1765 - DNA, 394 bp, Mawson virus
  misc_feature 1..394: note = isolate Antarctic86 RNA-dependent RNA polymerase and1R
  source 1..394: mol_type = genomic DNA
ccatgtctaattacaaaatccgttcaagcggcgaagccaaaactgtgttagtgaacccaacgacatataaaagtacgttggaaataactcataagtttaagcgagataccgcgctcaacgtcgatcaggtccgtattggtgtagcttcggcttataccgataatattaagacctgcaaagacgcatgtggactcgtacgccgtgaggtagtaaatcttgaaatgtccgttcttttgggcatggaagatgaatactacactcgcagaaaacaacagttagcggatacgctagctgcgggccaaaaattgttggaagcattcgacgaggtaaaactcggtctcgtcccgtcaattgaaatcgacgcgacagtctcttaaccttataaggaataatt

SEQ ID NO: 1766 - DNA, 395 bp, Picornavirales sp.
  misc_feature 1..395: note = isolate ltt163shi1 genomic sequence.1
  source 1..395: mol_type = genomic DNA
gccacaaaaccatacaatcgttggttcttgtcttaattttgatttttgagcgccagatttcatacagtcgtcagctaataactttgcagcaggtagcagacgagcaataagatcagtatttgcgcgatttaatttaatggcagaccatcatatatgtaatctttgttgaccatgatcttgtttccattaatgattttaaatattcttccgaaattaattcaaaaatttgtttgacacaactagccgattatattggttggttctacaatcatccagaccccgataatttagattacacttctcgctatattgctgaaatcttcgcttcatttatatgttgtaacttgcatttcactaatccactcgcaatttctgagtcagagttctttagtgat

SEQ ID NO: 1767 - DNA, 395 bp, Hubei picorna-like virus 2
  misc_feature 1..395: note = strain WHBL73152 hypothetical protein 12
  source 1..395: mol_type = genomic DNA
agaccactgaccttgaaagtcacaaaacttatcacggtgtagtagcatcgtaaagcaactacaatgtttatgtatagttactgtatatatgtgagtttttcatcctttaatttgtaagagtggatacataaataaatcctgcatgggcgttccccgaaatctgtttttacagatgatgttgctggacatcaaaaattgaaatcgcagtgagaaatgggaatattcttagctgttaaataaataaataccttcccggaaatcttttcaaaaccaaacaaaataaaaacgaggagggagtgaaatgctccacacccggttttcgtgcctactctaaggaagaatcacaaaagttcctaaatattctgatcgatgattatatcactagattagaagaa

SEQ ID NO: 1768 - DNA, 395 bp, Hubei tombus-like virus 8
  misc_feature 1..395: note = strain WHCC116238 hypothetical protein 1,1
  source 1..395: mol_type = genomic DNA
ctggatagtggccattggcgcttatagggagcgcttagtgtacagtaccctccgccacccgggcattggctacgggtggcggcgtctgcgattgccgaaggacacgatagttcgatttagccgtggctagctgtagtggttggtggtgagtccaggtgagaaagcttggtaaccaatccgaccgcggtgacagtgaaggtgaaatcaaacaggggattccgccaaccccggacgttgtagctaggcccatattagagggtccgacgtagccagattttggatttgttctgtaaacatttccagggagctgtagcggtatactgcagctggtgtgaccgaccataaggcttagatgccgttttaaataaagtcacccctcaatttttcaatccacc

SEQ ID NO: 1769 - DNA, 396 bp, Hubei tombus-like virus 13
  misc_feature 1..396: note = strain WHYY18977 hypothetical protein 11
  source 1..396: mol_type = genomic DNA
ggggaactggtcgagcagcctcgagttgcgtcggctggtacggagggagtcgtcccgacactccccctaaaggttgcggtggctgcagacgggtctgcagtcggcgcaccagtggtagtaacgcctgagcaatcaggagccacaaaagcgatccggaggccccggggcggttgcgccgttggtgatgatgttgcggaaaagccgtgtgggtgtagaaggaaagatggcacgccgtatcctttcgagtgtgagacctgttactttgaaagaagtcacagggagagaaagcaagagaccatcaagaaggtgaaggaggcggcgaaggttacgaagaagcataggtgcagcaccaggcattgcatctatcgagacggtgccaggaagagcaggcactgg

SEQ ID NO: 1770 - DNA, 397 bp, Tetranychus urticae-associated picorna-like virus 2
  misc_feature 1..397: note = isolate Lisbon,1
  source 1..397: mol_type = genomic DNA
ttcgcagcagatttattgtgtggaggattactatttatttagcgtacctatcacagtgaacctaggattagtagattacgataatatagcgtacctatcaaagaacctatttttataagatgcattttacatattcaatcatatttgcttgcattttaaattcataccttgttccagtagcattcacggttagttgagaaatactggttagtgcgttgtatctacaggcatgcacagaaatcactgtaggggagatcacaaactcgattaacaatgtgcgccgaagcataccggagcgatatctgtatgcgccccccttacgttctaagttacaacctgcccacgagagttaacgatttgtcttttgaatttacaaactacaaattaaactttaaaa

SEQ ID NO: 1771 - DNA, 397 bp, Wenzhou picorna-like virus 19
  misc_feature 1..397: note = strain WZSLuoII97616 hypothetical1
  source 1..397: mol_type = genomic DNA
cgggggggtctatacccccccgttatgaagaaaacatctacttacgtctctcactttttgaagtgttattttgcaagtttattgttcttttcgccttttggccaggcttatcacctgatactagaaacgattacacatacaactttccccattacgttacacgtcacaacttatatatattttgcagtcgttattcgaatgcgcttaagattatcggctgtatatatattcggaagaaaagttagtttggcagctgacaccccgttattatgtaacatagagatttatattgacattttatgtattcggggattcatgtgacaggagttgggctcttaattgagtccttcatttgttatattgccaacccttttataccttcctagcgaatagcgat

SEQ ID NO: 1772 - DNA, 398 bp, Borna disease virus 1
  misc_feature 1..398: note = complete genome.2
  source 1..398: mol_type = genomic DNA
accgtaccgaccaaactcttaaaaaccctcttctcgggacagaggtctctttctgccttaaatcgagttcactcccccatcacgtacgagcattgggccagattaaagcaaagaacctggcatcctgtgactattacttgctattccgccaagttgtattgccccctgaagtatatcccattggtgtcttaataagagctgcggaggccatactaacagttatagtatcagcttggaagctggatcacatgacaaagaccctatactcctctgtgagatatgcactcaccaatccccgggtccgggcccaacttgagctccacattgcctaccagcgcatagtgggtcaggtctcgtatagccgggaagcagatatagggccaaaaaggcttgggaat

SEQ ID NO: 1773 - DNA, 398 bp, Plasmopara viticola lesion associated yadokari virus 1
  misc_feature 1..398: note = isolate1
  source 1..398: mol_type = genomic DNA
tacattctggtttccccaacgatttgcattctgaatttcttcgtttactttataccccccaacagcttgaaaacccggacctcaacgtccgtcgtctcccgcatgtgatccgctcacaccctaagttcgactccgacttaattcttcctcaacagattcccattacttatggatctaaggaaggtcgtacttgggttaatgatcgtcgcgatccttacctgacgccattcgctgttaaaaacaaattagcttttgaattcccccgccccaacggttccacacaactaaaatctttcggccctgaccccttcgtattcgtcggttccaacacgagatacgccacttctgacaagctagcctaccggctacgcacctggcattctcgtcctaacttggac

SEQ ID NO: 1774 - DNA, 399 bp, Dicistroviridae sp.
  misc_feature 1..399: note = isolate rbu035shi1 genomic sequence.2
  source 1..399: mol_type = genomic DNA
tcttgctaaactgaaacaaattctcggatataaattagtttagtagtgctatttctcagacaggctgggctatttagtcttacctcccaggatggcctgtggcagccccacaatatccagggtaaccgagtatatgattaagagattaagtcgtcctttttcatgaatatctgacttgcgaataacgatacaaatacgaatcaacaatctcgtattaaaactgatgatgttacttctgctcaagcatctgaactttacgagattgctcctgaaatttcaaattcagcagagcagcgtgtgcagatcacagcatttgctgatgattctgcagttttagccgaacatgtccctggtgaggctattttacctaatagggacacgacccagcatacagatagc

SEQ ID NO: 1775 - DNA, 399 bp, Hubei picorna-like virus 23
  misc_feature 1..399: note = strain spider70066 hypothetical protein1
  source 1..399: mol_type = genomic DNA
atgtaaacaacatgtatacaatttcttgcaagactacagttggtagtacgttacaagtatttactgacttcggagtttcaaaaagatgatatgcaaaagcgtaagtgattctcgagacgatgatgaacgaaaacaacttagtcaaaaagatctgaaacccagaaattagatttaaggcgcacattaaatagtaccaactcagaaatgagagagatgatttatatacgtgcaaaattgaaaatggaattgtagaacggatttgaacaaccgcatgttagacatgtattatggcggtggaagatacagtataattaattatcactatggattaatagaactgtatatgcctggcctccgaaaggtgattgcaggcaatccgtgagggattaaaactcatca

SEQ ID NO: 1776 - DNA, 399 bp, Beihai bunya-like virus 1
  misc_feature 1..399: note = strain BHTSS17606 RNA-dependent RNA1
  source 1..399: mol_type = genomic DNA
gccaaacaaaacccccgattacaagaacaatcgacctatctttataaccatatcgctttatatcacacagatctaaataatttggctagatgtaatactcttaacaggactgtaataagagaagaatggatctctcagtcagcaggagaactaaggaatctacctccaattactgttagtctattaacagaaagaagggcattgattaatattgagacagaaagtccagaagctaagggatctagtttgggaactgagagcacaaaccatataattggagatgagcaattaagaacctttgcccatgatttcacgttcaaaatactatctgagaagacggatgttcctcttatcaagttttttgaagcatctggacctggtgataatttaacaccagat

SEQ ID NO: 1777 - DNA, 399 bp, Beihai bunya-like virus 2
  misc_feature 1..399: note = strain BHZC35426 RNA-dependent RNA1
  source 1..399: mol_type = genomic DNA
cctgagtcatcccaaggggggtatgtgtacattaaggatgtcaacaaatcctttttaaatgccctaacaactgaccgccccaactcaatacctagcttggatttggaatatgattatgtcgttcgtattcaacatgatcctagatctcacatcgacttgtctttcaaacctacagagcagtttgtgattgtcaatgtaaagaagagtggttccatttactttgaggatcacaagtattgtctttcaggccattctattaggaagtttccccatgattttactctccgtctcttgagtgttttgcctgagagacacatttatgaattctttcctgatttaaaatcttctcttaatgagcttagtcctgacattgttttttggtggcaggatgttttctac

SEQ ID NO: 1778 - DNA, 400 bp, Schistocephalus solidus jingchuvirus
  misc_feature 1..400: note = isolate SsJV-SsAE segment L,1
  source 1..400: mol_type = genomic DNA
gaccccttggggacaaagatccacacaccacacactatttacctacttaactaactaccaaagcattgcctgggctttttcacaggtgtgttctcgaggttgggatttaactgggataatgtgttgactaagatgtatcctgaagaggggggataatacactatctccagtaagaaataagaggctcgacgtataccctaacaattaacatctgaacgtataccattacatcgtgacagataatcctggatgaattaacctggaaactgtatgagatatcctttgaactacccgagggagaaattaagagactcgatgtacaaaggacagttccgagggctgaattttcagaccccaaaaggtgagaaaaacatctcacaatctttaaaaactgtttgct

SEQ ID NO: 1779 - DNA, 400 bp, Guangxi houndshark hepacivirus
  misc_feature 1..400: note = strain NHJSG30635 polyprotein gene,1
  source 1..400: mol_type = genomic DNA
catcgtgctggccttacggccggggttcgccccacgtaggtcactatgtgaccacagcgcggaagcgcacgtcaccttaacctattggtaaggcgattcactaccctctagcagctagctgcactcggaccagattctgtatccgacactacataagactagcgtacctagggctaacgtctaacgtctcaggtacggggccagtccgccggttagctcacgcgccggctgatcatgcccttaatcctgctctgctagggttagaggtgaaaaaacattgtgcaagtgaagctatgaaaccatccgtcgtcgagtgggcttgggcccccactttaacggacgatgctacagcctgatagggcgttgccactaccttgcactcttaagtggttgtaacaca

SEQ ID NO: 1780 - DNA, 400 bp, Vespa velutina associated ifla-like virus
  misc_feature 1..400: note = isolate VVAILV/144I,1
  source 1..400: mol_type = genomic DNA
gccccttaaaatttaattttaaattggaatatcttttgatactccgactgtttatttggtaaccccaactaggcagtataaatacaaattggaatatctccggatactccgactgtttgaatagtctctatttaagcagtataaaccaaacaaaagcgattaaaataaactttaagtggcagtgtttgacttggtaattttatcactcaaactaggagaaatccgaatcccagaggacgcacttaatagtctaaatgaacaatttttcaataatagaaatcgaatctagcaattttgaaagcgacacgcgaaattttgaaaacaatccatataataataatttaatagaacgttttgaatttgttggtgaaggaagatatcttatagaagaaaatcaaca

SEQ ID NO: 1781 - DNA, 400 bp, Arivirus 1
  misc_feature 1..400: note = isolate A0197177/6176/2010 non-structural polyprotein1
  source 1..400: mol_type = genomic DNA
aaacgaacacagagataaatactaataggactacatatagaagtgtaccctattactactcatctgaataataagaataagaatcataagaataagcgaagcacactaggatatatataatacatatatccacgaataagtataagataagtacaagaattcacaatatcacaacagcaattgcaaatccagaacgaaagttcatcacaattcaatacactattaatacataagatacaagaagtaattgatacactatttgaacaagtcgacaacgataagaaattacaatatctaatagataaagtcaattcactatatagattggttaaagattatacggattcacaaacagaaactataatagcatatataaataaagatatcgataataagaatc

SEQ ID NO: 1782 - DNA, 401 bp, Arracacha virus V
  misc_feature 1..401: note = isolate CNPH, complete genome.1
  source 1..401: mol_type = genomic DNA
ttagtttcggtagcagtagcaagtatgatcagattaggtatagatcggcatttaataaattagtagtttaaataaagtggcggatagtggagttgtgctgctaaagtctttcctgcgttatcacagatacactaaggaggaattctttctgcttgcagacattaagggagaaagcttggtggattttcacattcgatcgagaggcaccttgagcgttgaggatttaaagaaggtagcgaacgacaatttctcacccgagaatttgagttcgacagtgaataacatcctcaatttcaaaaagctgacctgtgaagagaaggacgttctgctatttattggtccgaggattgtggagatagtgcctcccagatactccagcggtttacactacagcacttacc

SEQ ID NO: 1783 - DNA, 401 bp, Rodent hepacivirus
  misc_feature 1..401: note = isolate 05VZ-14-119 polyprotein gene, complete1
  source 1..401: mol_type = genomic DNA
cactccccgaggggaatgcgccagccctggccttgttggacagggtagcgagagggtcactccatttttctttacctctcgccactgggctggtcaatggcacagacgtgggacgctataagcctccgtggtctggttggctgtagtctggccggtctagtgggcccccttggaatgataacctggaagagggctaacgtgaactacccggacggaactccggggcttgggattgagcgcaccagtagacgcttcggcctctgatgctgggttggtagccgcctttatggtacccaagttgggcatgcccataggaatcggggaaggcgttgggttgcctcctgcctactgcctgatagggtcgtgccgtgcgtccaggttcttacggctgtataacactt

SEQ ID NO: 1784 - DNA, 401 bp, Beihai picorna-like virus 80
  misc_feature 1..401: note = strain BHZC36213 hypothetical protein2
  source 1..401: mol_type = genomic DNA
agaggtcttttacgtttcgaacaaagacaatgtctgcaagatgattaaagagctttctttgcatcctaagtcgacctttgatgaacattgtccgaagattttacgcgcttgtagagaaaatttgggttttattccgtacccgaatacgtatgatgagtgtcagagagacatcttgtcatccggaatctgttgggaatgatggtcgtaatcgactacaattggagtgaatttaacgtcagcactaaaagatgccttgaatatgctgagggacactcccaggtgggctatttagccttacttatcaacttacctgagcagcagtcctgctaaaaagttaggcaaacaaaaccaactcttagggattaagtggtccctaagttttaaacacacttgctgaaact

SEQ ID NO: 1785 - DNA, 402 bp, Rudphi virus 5
  misc_feature 1..402: note = replicative protein and structural protein genes,2
  source 1..402: mol_type = genomic DNA
gtgtgcaggagctgtcactgtggagacaataaatccaccccagttttaaatctgatggcagcaaaattaatgtgtgtgtatggataccacgagtacaatatctttatatgttttgtaaacttactcgtaggcttcgcatgcagcaagggtccctaatggggaacgaaagtgagtcctccctgctcaaacggaaacatgtcgttccacatcgcttaatccagcgtgtggtctgtacataaaaggattggtaattgtaaaaccaaaattctcggcttaataaaccgacgtgaaagttgtccacccaagaagggtcacgaaagagacaacacagaagccggcgtcagctggcaagactggaatttcaaaacccagtcaggagttgaacaaaatgatgcctacatc

SEQ ID NO: 1786 - DNA, 402 bp, Hepacivirus E
  misc_feature 1..402: note = isolate RHV-339, complete genome.1
  source 1..402: mol_type = genomic DNA
accatctacactccccgttccagggattcccagcgtgctagggtggcacgtatctgctccgtttacattatttgagcagggctggggaactgaatggcaccggtgtggcaccgctattgcgctgcgtgaccgggttggctggagtctcagtctctccatgcgggcctggacggaccacaggggaggggagagagcaactgaaagtgtatccatgagtacatggagcgctgcagcgagcgcacatctaccacgcttcggcctggctaagatggttggtagccgcctatatggtactgcagtagggtatacccgcactggaggggggatagcgttgggtcgctccctgcttactgcctgatagggtcctgccaggggcccctcccttctggctgtaaaccactt

SEQ ID NO: 1787 - DNA, 402 bp, Trichosanthes kirilowii picorna-like virus
  misc_feature 1..402: note = strain pt111-ifl-1-NW1
  source 1..402: mol_type = genomic DNA
cagacgttagtaaggcagctctattcattatcatatgaaggtttggatacaagttagctatcgtataggatggaccaacgtatgttcccactccggtcacaacctcaatttcaatgcgaattaatcgcaccatgtggttcggattgtaaccctgcttatgtgtgacagatgaaatagcaaaagccaattcatccacccaagatgttgcaccaacatctaacatgccattacgtatattaacgtatggcgtgcgcgatgtatgcgtgcgactgttagttaatggccccaagcgaccttcgtgatcaatgttgcggtaaataacattgaagcttttaagtctcattggttcgtcagtgattttgtaagaattaactattctgaaatcaaaatcttccaagctac

SEQ ID NO: 1788 - DNA, 402 bp, Hubei unio douglasiae virus 2
  misc_feature 1..402: note = strain WHBL72658 hypothetical protein1
  source 1..402: mol_type = genomic DNA
gacagctccacactggaggctatatgctacgggcctgttaaagagccagagctcctccccggatgtagtcacaacgttccagtctgcgagtgcaagtgttcaagagtcacaacaaaactctttgacttcataccagctattccgtcgttggtatggactcataagtcatgtgtttgtaatgaaaaggtagcactttcattgcgtcatcagattgatacaggcgatcgctatgcaaccacattagacttacgttctgtcctgaagccctggatagaacatgttagccccgtttcacctagtgttataattaggcatgctacgtcacgtaagaggctattgttggaacaagctcttgaaagtttgaaaggtgaagaattatcagttaaggacgctaaggttaga

SEQ ID NO: 1789 - DNA, 404 bp, Beihai paphia shell virus 2
  misc_feature 1..404: note = strain YYSZX17625 hypothetical protein2
  source 1..404: mol_type = genomic DNA
ctgcaaaataactgtatataatttatttgaggtgtgtaccatgagccagtcacatcttttgtacaaaacggcttactacattgtataggtgcaaggggagcacgaagtcaatatccccctctaaatacttgggtaaaagtacgatttgccaagcggtggatgccgcgaaactaccaaccgttccaaggaaggttaagatagtgcgaactgcatcttttgatgaagtgtgtacagcatacgattcaggagatcctagggagccgatctactattctgcggaatgttctcatggtgatgttttggatgttcagtccggaactgagaaatttggagttactatcaccaaaccagctaaaggtactaaagagcagaatgtatcatttaatgatcaaaatccttctttc

SEQ ID NO: 1790 - DNA, 404 bp, Shahe picorna-like virus 6
  misc_feature 1..404: note = strain SHWC0209c11084 hypothetical1
  source 1..404: mol_type = genomic DNA
tggagattgtgctatccacccaatgttaattctgggaaaattgcacatgtataacatagttacttagccctaaattagtcctacatgcacagtagggtgagaggatgttatgcagcgtagcttagttgccattacgttttgcgcgcgttgtatcgtaggttttcgagcaagcttcggtcggcttgtttgataaaatttgaccacctgtttctaatcataatattttgacgtttattgatgataacgtcggggaggtgcatgctgcaccttccattactgatcccacatttcatcgtggtgaggatcatgctgcccccttttctggttggttttctcgacccttgcgtgttgccagttattcttggtctgagggcactcaactggccgagggttttaatccctgg

SEQ ID NO: 1791 - DNA, 404 bp, Hubei toti-like virus 17
  misc_feature 1..404: note = strain tick107859 hypothetical protein 1,1
  source 1..404: mol_type = genomic DNA
ggaagttccctccctggggcctcctccccttcctccaatgggttaacattggagggggtggtagggcggaggccgccctgcccgagtactactctagttggccccagttccgtcgggcacttgaggggctgcgggtcaccagtagtaggctactgctcgcgagcagggaggccgaggggaaactcttccagtggcgtagggaaaatggtctcgagtggtctcctgcgtggacgacatctgagggggtgtgggccgggggtgacccgggcccccactccctcggactcgacccccgcggagcccgcgccctctcggcgtgcaagcgcctcccggctaccattggccaggacagcgccgctgccgcccatgacgcgtgggtcttgaggccactcaccaaggatgag

SEQ ID NO: 1792 - DNA, 404 bp, Bruce virus
  misc_feature 1..404: note = isolate Antarctic42 capsid protein gene, partial cds;1R
  source 1..404: mol_type = genomic DNA
tttatgactaacattacagttaacagcaaaactttcaaagaagtagctgaatacccagatagaaccgagtattctaactcggcggttgcgactacgtcgccagagtcaatttctattacacaaaagtggaataagaaacctaattcaaaaagatcaactacactgacttgcagaaaagttgtcccatataagaatgagaatggtattgatgttgttgaagttattcaggcatcaattcgtttaactcacctaccaggccgtctggctaatgataaactagagactattcagaatctatttaaagatctcttagctgttgcatctaattctgatgtacaggtatccctagttgctggtgagcataatttgactctttcactttagtaaaacttaaaggatttata

SEQ ID NO: 1793 - DNA, 404 bp, Ousland virus
  misc_feature 1..404: note = isolate Antarctic81 RNA-dependent RNA polymerase1R
  source 1..404: mol_type = genomic DNA
ttaaccttcctaggagaaaatccttatgccacaagcaattgagctttatagcaatgcaaccgaagctgccttcgtacaccctgaagacgtcctcactcgtgcgcgtttcacacgcaaactaagtgaaaagactgtcaacgggcttaagactgcaaaccttcggtctgagattatcttaaaccaaacggtcggcctgcgcgtatgcgagcagacctgtgctggtgacgaggtactttccgcccgtgcttcaatatctggttcaatcaagaaccatgagaaggtcgacgcgttagtcgacaatttgattgcagcgttacaacagtggaaaacggataagggtagccgaggcttccctgttaccgacttcacgtttaacgattaacaattaaatcaacggagggtcc

SEQ ID NO: 1794 - DNA, 405 bp, Hubei leech virus 2
  misc_feature 1..405: note = strain SZmix21584 hypothetical protein 1 and1
  source 1..405: mol_type = genomic DNA
tggctgcaagtccttttggacttgcagtcagtattgtgtttagttgcgttaaaaataagccatcgtcgtttagacgatgttttgtttgtaattatcacctttttctcggctttaaattgccggcttttgcgaaaatttaccctttctttgctacctacaactttttgtagtacactcccttgtcattttaggagagtatctagcttgatactaagaaaaacgccgtatgtgtctgggacgcgattcggctacctttatggtattgatgacaattttatcttagtttagtaaaactaagcatttcttaatgaccttagaaatgaccaaggccttttatgtacacccagcagtactttatgtgctgggtagtgaagtagcttccacgattggtgctacagttcaacc

SEQ ID NO: 1795 - DNA, 405 bp, Rymill virus
  misc_feature 1..405: note = isolate Antarctic21 RNA-dependent RNA polymerase and1R
  source 1..405: mol_type = genomic DNA
tatgacaaataaagccatacttctccaggcaactggatcgaatcgcgtgtacgctcaccccgaagacattacgcgaactgttagccaaaaattacagctaaaagaacgcgtcgtcgacggtaaacgagtaccacatgtgagaacagaggtgatcctcggtaggcaagctccaatcgctgtgtgtgaaaacacctgcgctggttttgaaaacctcagtgtacgtctaagtctgagcggcagtttatctaattctgctgccctagacagtatgttggaggaattaaaatccatcattgaccgtgccaagagtgacaaagtcagcaagggcttcccgttaactgaaattactttcaatagttaaggaaggttaatgtgaacacacaatctcgcgcgcgagcgccgaaa

SEQ ID NO: 1796 - DNA, 406 bp, Aedes aegypti anphevirus
  misc_feature 1..406: note = strain Ab-AAF nucleoprotein (orf1),1
  source 1..406: mol_type = genomic DNA
gttgggtgtgtttggggttgtagacgagcgatatctccaagagataagcctaattgcaccgatcagggaagacaatttcacaaattacgagttcacggaggttatctaccgaaagggggcggcctcatacttgttgaacattgggattcacaaggagacagaagaaagggctgtgccgggatacgatcaccaatccctttgcgcggcactcgggaagatctgcccatttaagggggagcgatctatccctaagggtgtatctgatgcatcagttacgatcctgaaccctcaacggattagagaactatcgcaggttcttgctgcattgcccaagataaaactcttcgatgagactggggggatcaacatctctatattgctagcactcctgcgatggattcccggt

SEQ ID NO: 1797 - DNA, 406 bp, Thrips tabaci associated dimarhabdovirus 1
  misc_feature 1..406: note = isolate Tamono1 RNA3R
  source 1..406: mol_type = genomic DNA
gtgccagggtggatcaatcagatctgaatgtatcatatgtgtagaagtcagtgaaccctccctagaaccgaattgagtgtttcacattacgtgtcaggatgtgtacagcaccaaacgcacgattagaatagttcaattgttgacgagtcatctcaacacgctactggacttgtgaatgtccctccacttgattgcacaatttttggattttaatctatttttaagactatttttactgggctaacgggtgtgtaatagacgtcttccttgttgactgtctgggttaatgtttgaatctcgcttttaacttttggtattacatatatattaaaggcccttttgcctcatatcaatatctctgaaaaaaactaacagatttaaattgatcttaattgtgaattcagct

SEQ ID NO: 1798 - DNA, 407 bp, Mella virus
  misc_feature 1..407: note = isolate Antarctic59 RNA-dependent RNA polymerase and1R
  source 1..407: mol_type = genomic DNA
ggagtatatcctatgcaagcacagaactttagtgtaaccgtgacagacggtgaaaagacctttgaggtcctgtcacctgccggcgcatcagcgcctgcggaattccgtttacaagacgacggagttgcgcctacgctcctcccgtacttatcaatcaaggcaggaaaaacaaatggtacggcaaagcgccgcgccagtattttgtttatcaagccgattgagaaggacgggctgcgtattgggcagaacgtttttcaaattacaggtacgattgatctaaatcaacccgcatctgtgactgaaaaggacgtcgagttgctgctcgaggtcatgaaggaggactttatgaaagaagtcctctccaagtgtatcgcccctaattaaaagggacataaccaggagaattt

SEQ ID NO: 1799 - DNA, 408 bp, Beihai hypo-like virus 1
  misc_feature 1..408: note = strain BHZC36965 polyprotein gene,1
  source 1..408: mol_type = genomic DNA
ctgaaagatagcaaacagattataacaagtaggcatgattatgttaccctgctcgatgggagtggtaaacagtcttgtgatgctgtcaaccaggttgattcctcaacccaaaatacggatggtacggtcagcgcaagcaaggccaaatataaccaaccgcaaaacccgattaaccaaagggtacggaaaaaggtccgcgtgaagcggaatgatttgttggacttggatgataagttcatacccgaacaggccttaaaagccttaagggatcaagagagacgtggacaggcgcggtccacggcgtcaaaaagacctgcctacgtttgcaatctgtgtggacgggagtgcccccatgtatgtgattatgtatatatagaattagaagattggcaaagaatcccccaccaa

SEQ ID NO: 1800 - DNA, 410 bp, Totiviridae sp.
  misc_feature 1..410: note = isolate trb102shi2nc, partial genome.1
  source 1..410: mol_type = genomic DNA
ctcgtatccctcggtgattgaaccattgaatgacttgtgaacgtatgctcctcgtctgacaaatcctccagctccagtagatggtaattcttcgacatgttgattcatattgttacgtatgaatttcactgtgtttggttttgttgttttgtttgtgcttcgaacagttcgtttttcttctactcgttctaatggtagagtagtttccctgttgtgtgctttgtgtttgcgtattgtaataccagtattcagaaccttctatatcgtgatatagaagccaaacaaaacacaaacacaaagcacacaacagggaaactactctaccattagaacgagtagaagaaaaacgaactgttcgaagcacaaacaaaacaacaaaaccaaacacagtgaaattcatacgtaacaat

SEQ ID NO: 1801 - DNA, 410 bp, Riboviria sp.
  misc_feature 1..410: note = isolate rfb198shi5 genomic sequence.1
  source 1..410: mol_type = genomic DNA
ctccgcaattgagttctaaactacgagggtggtatttaattcccggattacttaacgttcccgaaggccgtagaatcttgattactttagacggaatccaaaaacgtggatttcatcctgaccagtgtgatttgtttacccgactacaagatactaacctcaaaattgctttgacagcttggtcgtttgcgaacgacggggcttcaaaatacaaatactccaacagcccaccctcggactatccccctgagggacatagagctgttcattggctagtagattctcgcacagctggcattactaaaagctggctatatatatacgattggcacaatacaactggtattataaccccaaacaactttccattcttcccggatagagacgagtttgatgtatcagctgtacgc

SEQ ID NO: 1802 - DNA, 410 bp, Hubei orthoptera virus 2
  misc_feature 1..410: note = strain ZCM20815 putative glycoprotein1
  source 1..410: mol_type = genomic DNA
ccctgtaattttatatgatttgtagtagtaaacaccagttcctccaaactataagttacactacacaaatcatataaaattacagggtgtaaagagaagaggtactggtgactacgctgcaacagtgtttcactagcttaaagtgtgatagtgtttaagtgtgtttaattgtgtagtattattgatccagtattttagatatagttactgtttgttctcgcatcttagggtttaatatttatagtatttaataacaactgtattagtagtgtaagtttgcagtgagtgtttttatcctttagcacagcctttcctgaccaaatatagagttgttgctattgttgtttcacaagttaatctgcgtgcctgcttagattagaataacttttcaatatatcagtgttacttat

SEQ ID NO: 1803 - DNA, 411 bp, Barns Ness beadlet anemone chu-like virus 1
  misc_feature 1..411: note = isolate F99 segment1
  source 1..411: mol_type = genomic DNA
tccacttgtaggctctccgtgtcacgactgatccatcactgtgggatgcatagtcacaccagcatggttagatcaggaatggcagactatgtggttgaactaggtcgaagtgcgtgtatggaagctgtggagactcggaggatcaagtggtcaggagtcatcctagatggattgaaactaggaggggaactacacagcttacagactatagcgggtcatgtcactgcatcaggaaaatgtgaaggatcttcatactcagaccaatttgggagctggacaggagttgtggtgcaggctgaaattaagatgttcatagacagatatgccacaacagcaaacatcagaacgggggatattacgatcagagggggcctccggtgcgaatgggagtcttagtcatgtttcgacaat

SEQ ID NO: 1804 - DNA, 411 bp, Melon yellowing-associated virus
  misc_feature 1..411: note = TGB1, TGB2, TGB3, CP, NABP genes1
  source 1..411: mol_type = genomic DNA
tttgccggggatgacatgtgcgctaataggaagttgaggcttaagactgagcatgatggattccttagtaaactgaaattgaaagctaaagtggatttcacagtgcacccaactttttgtggctggaatctcactaagtatgggatatacaagaggccagagttggtatttgagaggttatgcatctcaaaagaaaatggaaattttagagaatgcctggacaactatgcaatagaacttagttatgcatataaacttggtgagaaggcagtaggcttgatggatagtgatgctgtgagttgttattaccaatgcattagaataataatcaagtggaagcatttacttaggagcagtgtggctatagactttgtcgctaatgtggcttaggtttcttgccataaattgaat

SEQ ID NO: 1805 - DNA, 411 bp, Hubei picorna-like virus 77
  misc_feature 1..411: note = strain WHCC115343 hypothetical protein1
  source 1..411: mol_type = genomic DNA
ctagatcctttgaaagagttgtttggtagttatattccatacccacatcagaatcctgtctccgattttcttatcttacctagttctctcactactttcaataccaatattgatggtttagttaaagtcaatggtgagttttttgattataactggcgtggttatgtacgtatagttaccggtttttctgcaacccaaattggtttaggttatggtcttcgtatttatatagagggttctgatcctagttatcgagctggtgtaactccatgggcttcggatgaaggttttgaaaatttccgtaatccaacaagtcttaagaaacgcttttctaattggaactctactgtatggtatactaatgctttaacttctaaaacaactctttctaattctggtgctagatattgg

SEQ ID NO: 1806 - DNA, 411 bp, Neurospora discreta fusarivirus 2
  misc_feature 1..411: note = NdFV2-W683 RNA, complete genome.1
  source 1..411: mol_type = genomic DNA
gttccataaacacaccttcgtgatgaaactggtctcacggagccgccaaaatccagtgtttgggatgtttaggttggcgaccaggggcacaaccctctgtagcttggctggaacgggtgcgtgcaacgtgagtacacgcaacatgtccgtgcaagggaacctgctagccagtggtccgttaagacagtggtgtcttgaacaggccatccatttcaacatggagaacccgagtgtaacgactgcgaagtctttaaacctacaacatgaacagtctactccccaggccttttggttattgggtggtgtgttagagccccaaagcaaccttttggaccgccggcttaggcccattgatagagctcacatcaaacgtgaagtacctcaccagtcttcacccacgatacaacactg

SEQ ID NO: 1807 - DNA, 412 bp, Potato yellowing virus
  misc_feature 1..412: note = isolate Hco-030B segment RNA3, complete1
  source 1..412: mol_type = genomic DNA
agtaaatctacccatcttcctcccaccctagcatgacgaaaatccagaaatggagattgcctggtgcgatgtaaaacacaaaattcccggcggacttcagattccttgaggtccactcggtctttgaaggtccctgggggggagttgggaggcgaccccgtaaatttactttacgcaaccgaattcaagtctttgtgagtgtcagattgtgtcgtcgttcgtgaggtgaatgctgtcgaggaccactccaattcaactcactcgtcagtcacatagtccataagacttaggaggttgtagtagtttacacccatacacaactttgttgtaagattcaattctacgacgcgttgttagttgaggtccactcctttcaatctgtcgtaaaggcgaatatcgagcttatcttaag

SEQ ID NO: 1808 - DNA, 412 bp, Hubei picorna-like virus 44
  misc_feature 1..412: note = strain WHYY20621 hypothetical protein1
  source 1..412: mol_type = genomic DNA
cctgggttaatattaaacccagggagcctgttttgctccatttgagctcgaagataaagcttcggctttatttagagtatcatgtagaccgcggtcattcgtgatcgcctatacatgttggagcaaagccctctgatggcgaggattttaagcctgtagttcgctgcagggccatcataaacacaaccacccaaacaaaataacctacccaaaccaatcccattccttagattgatttccgttgacaattttgctattgatttgtgacgattttaccgtgtttttactggtttttccgtaagaaataaccttgaaagattacacagatgtcggatctgtggtcaaggagacgtagcatgttttacgctactatgtactgaaatctaggggcagccccccaccaaacctttat

SEQ ID NO: 1809 - DNA, 413 bp, Gengado virus
  misc_feature 1..413: note = strain Anda 1734-1 genomic sequence.1
  source 1..413: mol_type = genomic DNA
ttctcgggccccactccgcccctttcctgcgttctttcctttctgcctccagcctccccgtcccgttcacaaagatccatcagcataaaccttcaaacaaaagagccaaaactctcctaagcaacctccgctttggctttgatggcatcctcaaggtcaagttggctcaaggtgaaggtttggaccccgatctcctctcttcttggagtcgccgtctcacctacgcacaacccaggcaagttgaactctgcctcatccaaggctttccaggctgtggcaaatcccatcccatccaacaattgctacgcaaccgacacgactatcgtgtagcagttccaaccactcatctacgtgaagagtggaaaaacgccctccacctttcaaaagaaacttggagagtgaacacgtgggaa

SEQ ID NO: 1810 - DNA, 413 bp, Beihai octopus virus 1
  misc_feature 1..413: note = strain BHZY180716 hypothetical protein 1 and2
  source 1..413: mol_type = genomic DNA
agttgtcaccccagtcctcgagcacgacgttaaactgctccccccgttggtccatgggggttctgtatatagttaaagagacccttgtataattggataccacgtacatgtttatgttttatcgttctttctataatatgtatatgtaggctttatatttgagagtggaccctatttagggtagtgtcctcgcacaaacaagaaacaacggccctacaacttaacccggtttgtaggatgtaaataaatgggttggtcaatgtttatattttaacaattggtttctatctaagccagggacagaaactgtagatcaaaatctggttggagctgatgctctacagaagactcaccatgaatatcagggaggtgagctagtgccacagagtggcactaccgacgatgtatctttg

SEQ ID NO: 1811 - DNA, 414 bp, Beihai picorna-like virus 27
  misc_feature 1..414: note = strain BHNXC41439 hypothetical protein2
  source 1..414: mol_type = genomic DNA
gatcttctggtgtttgtacatatgcacatatatatgtttttatatttatatacttttatactttatgttttatttttatttgttagtgacaattgtgatttatattcacaattagtacttacgtctcgggacgttaaaggaccaagtgagctgcctctcactagaccctacggggaatgggcattgtgtatattatgatttacttttacaggaatttatttctccttttgtatttctgtaattgaccctgtatatactgtttcataaaagcttgactcgctagaggtgtataacactaaacctcattgagtataaacatagtaaagtgttggtcaatgtatatataataataaaactgaagaacctagtgtcgtttcttcaggctttacacgtaagacacaatctttaaagggt

SEQ ID NO: 1812 - DNA, 415 bp, Little cherry virus 2
  misc_feature 1..415: note = isolate LChV-2-TA, complete genome.1R
  source 1..415: mol_type = genomic DNA
cgtggtgaacgtgtgaaatcgctaaaggatttttaaagagacaaattaacaaataaaacgacggacgcaccgcaatccatcaaagtacaacaaaaccctaaaaaccactacaagaatttacaaaactcgtcacaacccaccctagtaagggtgtttcgagaaaacctacccgactcacaggacttcaccaaccgggcggaaacagaactaggagaatctaccactaccaggagctcgtcacctgccaaagcagtcctgagagcccaaagaatatgagctaactccaggcgacgagaaatactcgcacacgagcttcatatctttgccttgctcgagctgcaagtggtgcgcgttcacaaccacgactattcgcggtgggtaagaaacccgggagacgacttaactccctaaaccg

SEQ ID NO: 1813 - DNA, 415 bp, Dongyang pangolin virus
  misc_feature 1..415: note = isolate DYCS, complete genome.1
  source 1..415: mol_type = genomic DNA
gtatgaagataaatcaaagaggtgagagtggattaccacagcaacccgcttcatacacattggactataccaaactgatcttttaggctagattgggaaatgtgaaaagaacagcattaggggtgaagggcgaaaggatgttagccatacaccgagtagcactagccctgataatatgcgagagccccaacctgagtagatgaggaaggccgtagcagtgagtacactgtagccaacaaggttcctactggtaaggatcacccactaggtatgacctgtagttgggggcatgcccaggccatccttaatgcaaccgggggttggttgcatgaatccaatagggaaatctacacagcctgatagggtatcggcgccgatggggaaaggctctataaaatggcgtggaacatagcac

SEQ ID NO: 1814 - DNA, 415 bp, Hammarskog picorna-like virus
  misc_feature 1..415: note = strain SW13, partial genome.1
  source 1..415: mol_type = genomic DNA
aaatacgacgcgatcgccacagctgaagcaactttatgatgtcgtccacgaggccaagaggggcagaggtaacccggacgaaaacgagtgatgtcttatctagggacttttacgatcctgaagaacagcacggacaaggtgttacggtgaggaataagatccagtatcacgtccaataacagtgtcgggaacaggggagaagtgtaaaactccggataaggcaaataaatctaattgaaaggagagctttgctagactagtaaattgtgaaagcaatccaggaaatgataacggttgaattcttatactcagcatagtatatctctgtagcagagagtacttgcgaaaacgattctttgaatcactagaccttcgcgggtcgccaactcagaaccaaaccaatttttacccaaac

SEQ ID NO: 1815 - DNA, 415 bp, Riboviria sp.
  misc_feature 1..415: note = isolate brb141rna1 genomic sequence.1
  source 1..415: mol_type = genomic DNA
atctgggaatccgcttcctaacccacccacaggatttttcctaatctggctgggaggttacagtcgctgtaatgcgtgcaccaacgtttgcgtgctgtacgtatttagagcccgatgtttttctgagtttattgccaattttcttttttcagtattttcattttattattgtattatttttattcaagtgccttgcctcctgtggttcgtgcagctatgtgtaaggttttcaatactatttgtaagtttgatcctctttggttattagcactcggaattcgcaaaacccaaatgattttatgagcaagtagaggagatttctgatgcatgtagtagtttcaggtcagccttttggcgccccatttttgggttattacagtcgcgtgtcgcttttggtaagggcttcggatgcgcg

SEQ ID NO: 1816 - DNA, 415 bp, Hubei picorna-like virus 19
  misc_feature 1..415: note = strain SZmix17531 hypothetical protein1
  source 1..415: mol_type = genomic DNA
aagcgatcatattacagctttatgttatagccttgtgtgtgtgagagacacactcattttcctataattattttccttagtcggcccctgtgattcgggaggtctgctatgtcgtataatcacgtagatagccggtggcaatatacgtaagaccaccatgtcggcacctgtagtgggtgatttcactttttgatactgtgagagtttccagtattctgtgttatgggcacacttccattcatcctttcaatggattccaggacacgaacgcgtgcatgaagaagcacgttagtagcgatagggtttatacggccaaacagagggtgggacattcccaccagattgaattttttccggtcttggaccacaaaacaacttacgacacagatacaacatactgatatacgaatacaat

SEQ ID NO: 1817 - DNA, 415 bp, Hubei tombus-like virus 21
  misc_feature 1..415: note = strain spider121926 hypothetical protein1
  source 1..415: mol_type = genomic DNA
agcctattgcgccagggatctcgcttaacagaacaaaggtgttgggcaccttccgatcctactgcatgtcagcaacctccagcttacggggagtgtttagcatccgtgctgactatgatatcgctaaaaactgcaaaccagtatatgacgatgtcagaaggatggtggcgatggcccctagggatgaagcaaccatgagcattgctcgcaatgctgccatacgatcatgccgggaacacaaagttgatcctgaatgcatcccagtcgtgttggcaaaggctttgcaggtgactaaatccgaggtcaatgcagctgtgcatctcagtcgccgcaaggagcgaaaggctacgggtcttttaaactccttctaccatgtcctccgaaaatagaacctgcaacctgtgttccattaccc

SEQ ID NO: 1818 - DNA, 415 bp, Cooper virus
  misc_feature 1..415: note = isolate Antarctic61 RNA-dependent RNA polymerase gene,1R
  source 1..415: mol_type = genomic DNA
gtatgcaagcaaaggatataaccatcaccttgacctctggtgaaaagaagtttgaggtcctttctccggccggggctgagaagcccgcggagtatcgtctagctgacgattccttaacccctactgccgcgccttacttaagtgtaaaagcgggcaatgcgggtaaggtagtgggaactcgtaaagtttccatcttactcgtcgtccctgtccttaaagacggggtacgcgttgaccagtcggtcatgcggctagagtttaaagcatctggattagctacgattgcatccattaaggaggcggtcgaaatgctcactaagttagtagagcatgatagcgtccagactgctttgaagacaacgactgctcctaactagaacagtcatttaaacttaatatcacaagaggatgtttc

SEQ ID NO: 1819 - DNA, 416 bp, Taura syndrome virus
  misc_feature 1..416: note = complete genome.1
  source 1..416: mol_type = genomic DNA
ctttaaaagtcgtgcgtggcttcaccacgcacgatcagtactatcagttaaccactcttgaatatgctcaatgaccctattcaacactggtgtctcttagtacattattttagcacttaacgtgcatgagttttgcccatttctttcaaaaaaatgagtattcgaggagacgtcccgctccccgtcttatttcaaccgtagactcgacatctattggtggacatttaattccagtcgccgtaagttgcttctgccccgcgctatattttcttatacttatggttctataggtctggtttaaaacgtaaatagacggcccacaaactatagaacgcgtacccggaacgccaatcccggataagtccctggatatatagatgcaccgcaatataagcctgcagactgtctcatatact

SEQ ID NO: 1820 - DNA, 416 bp, Posavirus 3
  misc_feature 1..416: note = strain 10611 polyprotein gene, complete cds.1
  source 1..416: mol_type = genomic DNA
actgttctcgcacgtgtcttttgtgtggtttgtttttgtttatcgtatcggaaccatcactctattaagcctctctattgtttggcagcttcagatggttataagaacacggtcataaatgacaaaccgatttatgaatatgaaggagaagcgatttgtgatttgcatattccatcaaaacttgcttacatttggaaaactagcatgttttctggtggtggtgttataagatcaatgacagtttcagatactagaacgtttttttatgataaccctgagtttgcagatatctggatctttttttttagaaactgagttatctgattagtgtgaacaactgtgttggtgtaaaagtccctgctcctactatttcggagtatggtgtcacctttgtttatcttgtttcccatcccaca

SEQ ID NO: 1821 - DNA, 416 bp, Wenling hoplichthys picornavirus
  misc_feature 1..416: note = strain XYXMC41402 polyprotein1
  source 1..416: mol_type = genomic DNA
gtaaggactagatactatttaaactagagtacattttctaattttgcataaactatggcggcattgaccctggcgtaaacttcgccagcaccaccaatgtcaaatgggttatgtatgattatttcttgtattaggtttatttacttctaccgaccactccttagtttccgatgctagatgtatctggagcgcggaaaaccatttatttggttagtacgagcactggttttgtttagtattcagataggtgtatgatagaaaaagtagcaaaccctcaaacgaatggccctctttttgagtaagccggaagtgggttatcttttccgtgggggcacggttaaggagcgctatgttggatgacagtctcgcggcaggtcgttctatcagcactataaataccacctgttgaccttcac

SEQ ID NO: 1822 - DNA, 416 bp, Beihai mantis shrimp virus 5
  misc_feature 1..416: note = strain BHXG25299 hypothetical protein1
  source 1..416: mol_type = genomic DNA
ggtttatgcgccacgcacgatttaatactaccagttagtcacacttgagtacactctattgactctactcaattctgacgtctgttagtatcattgattaaataaggcataagtgctcatagcacattagttttgttttgtctctaattaaaagacaattcactcgaggagacgtcccgctccccgttttatttcaaccattgactcgacatcaattggtggacattctctatcctccgccgtaagtagcttctgccacgcgctatattttcaacacttgtggtttcatggaagtagtttaaaacgtacctagacggcctacatgccatgaaaagcgtatccggaacgccaagcccggacaagtccctgatatatagatgcactgcaatataagcctgtaggaggacccatatatt

SEQ ID NO: 1823 - DNA, 416 bp, Wenzhou shrimp virus 7
  misc_feature 1..416: note = strain beimix73547 hypothetical protein 11
  source 1..416: mol_type = genomic DNA
tgcaaggtttgcatcccttgcacgattcactatgagtcctctttgtggcacactagtataccctactttgaccctagcttttagctacgctcatgtacgctgtactactctgtcatttttggttagtagtgttttgagttttcctcataatttgcacctttattcggagagacgtcccgctcttcgtcttatttcaactcacggactcaacatccatgggtggacatttcttaactcccgccgtaagagctttgtgccccgcgctacatttctcatacttacaggtttgcaggttctgtttaaaacgtattagacggccagtatactgcaaatgcgtagccaggattccgaccctgggtaagtccctcagtatgtagatgcaccgccgatatagccgatagggagtacgatacatc

SEQ ID NO: 1824 - DNA, 416 bp, Beihai razor shell virus 1
  misc_feature 1..416: note = strain BHBJDX18719 hypothetical protein1
  source 1..416: mol_type = genomic DNA
gccgggagtaaatatatgtagcgtaatgatatataataattatattttcattacgttacgtatgtttgccaggtaaggtggtttaccagccatcatttccttttttcggtccattggtgatatgaccactcacccttcccattgttgttttcaacatttcagcttacatccagccgctcttgcggctctgttccagctgtctgtaagtttaacagactataatcacctatgaagctacaattagcagagttgtagtggaggagttcggttactgaaaccaaatcaagggcattgaggattctctgccgagattagatgccttatttaagttttgcgtgctttccaatttttacgtggatcaaacgcaaggtagcttgtagtcaagccgttgacctaaacaacagtactacaccatt

SEQ ID NO: 1825 - DNA, 417 bp, Aphis glycines virus 1
  misc_feature 1..417: note = isolate North Dakota, complete genome.1
  source 1..417: mol_type = genomic DNA
agaaaattatttggtgtgagcgattatgatgtaggctcttggattatataaaataattgacccctttgttgaaaggataaatcaacctctttcgttttgaagcgtggaatttcaattcgattgtagtagtgtcattcctatttaggatacggttggacacataaataactaatcttccgcccagctccttgaactataccatctaccactaggagttgtgtaaaattatggtggtcaaaacaacaacaacaattcttcacaatctggcggttcccagtctacctcccccgctcagattcacaatcccgataaaatggtagacaatttgtcaacagacgttcaacaggaaactaatactacgtatttcgaacaacgagcagttttcgatgagacaaccttccaggctcctctctctca

SEQ ID NO: 1826 - DNA, 417 bp, Changjiang picorna-like virus 3
  misc_feature 1..417: note = strain CJLX28786 hypothetical2
  source 1..417: mol_type = genomic DNA
tttgtggctttgggtgtctgatatcacatccaacatacaaaccattagatatcctgacagttacatttactgcttgaatactatttcaggaaaataattatattcaagagcgtgggtgctgtcagaagaacacctgggcgtttcccgaataatctatttagattagagatgaaaataatattttaaatataggtgttactcaaatattttccaaactctggtgaactataagtgaagtcactagttttataatcacttactaaaaagaataacaatattggcgtatctcttgcccaaagagatctgacttgtggttggcagattcaatccgaacaagtgtcttatgacacaaaaaataatgatgcacaagacactattgtctcttttcatgatgcggaaattggcagtagtgttgat

SEQ ID NO: 1827 - DNA, 418 bp, Husavirus ACS178
  misc_feature 1..418: note = polyprotein gene, complete cds.1R
  source 1..418: mol_type = genomic DNA
aggacaaggctttgcgggaaaccgtgaagcaggcaggtggagaggtgaagactgagctcgctcggcttcctaagccgagagagcttaagcagagtctttccactgtcgcccgagtcttgccgacgaaggtgcctttggcacctttggcgacgatggctcgccgagcgagacgccgacagctcaatgctgcgttgaagtcgattgtagcggtagtgagtaattggaatcgctcgtttgacgtcgctcctcagacgtgatttcgaccctctgcgcgggcagtaacaatagcgcctcctctggcagttctctggataagaactgttcccagtgcgtgggaaacaatagcgcgcgcgtcttggatgattccgctaagaatctcccaactaacatcatttgcgggtcccccgcttgcagggtg

SEQ ID NO: 1828 - DNA, 419 bp, Hainan hebius popei torovirus
  misc_feature 1..419: note = strain LPSC33749 1ab protein, spike2
  source 1..419: mol_type = genomic DNA
gttttagtcgtagtttggttaattataatgttagtttagtgttatataatatattagttggtaaatatttagaaaaaggttataaatgggtgaatggtgttcttaaacgtagtgatgttttggttatacagtatgttcaggaggcttatgctactaatcctgtgttaatgattgtagttattgtttttgtggttgttgctttgttaagtttattgttttcatattgttgttctaggcctttacataaggttgagaaaaggttattgtaatgtttttgttagaaattatatttaaagtattagctttaattattttacaccaactgctaactttgtaccttaatggtgcaagtgcgttaccagttgtgtgtgatatatttgaacctcctttttatagttgtaggttgagagaggatagtt

SEQ ID NO: 1829 - DNA, 419 bp, Western African lungfish astro-like virus
  misc_feature 1..419: note = strain FZFYG1494061
  source 1..419: mol_type = genomic DNA
ttaacttactaaccgcttacgtaacgaatgagcacatctacctaacttacacggggggatattggtcaatttttatctatactatcatattacgtgatgtcctagatcgtttaattttaaatggggtggttcctgttttcctaatatacaagcctagtgaaaaggatttaatccaatttaacagtgcgaagagtatcttattatctaaatatccaactgccagattcaacgtttatgacgttgttactgatattcctgtgacgagagtagctattgatccagatgactttcaagaatctaaagattttttgacgaagggaattatcaatttatggggcgaaaagaaattatggaacgaatggtacaacttcactcagaaatttattaacgagtcaaaatcgggttgtcgaaacacgcta

SEQ ID NO: 1830 - DNA, 419 bp, Mackintosh virus
  misc_feature 1..419: note = isolate Antarctic98 RNA-dependent RNA polymerase1R
  source 1..419: mol_type = genomic DNA
ggataattcccttgattaagtatattaatactttacgtgacaaaacctcctctgagttcgttcgcattgaaccaactttcgacggtggtcagttgtctttcactgcagctgtagttaaccctatggtggcaggcgtagtcgtacctatggtacgaggcgccgtccgcattactttaccgaccgaggtggtcgtgtgtggtaatgtgtgccctcagaagattaatcaatctgtggaagtgaaattcaaccttcatcagggcgctgctgatttagcagaacttcgtgctgaagtgttacgcgcaatggatattgctattacctcgtaccaacttggtaacggtattgtcccacctaccgatgcttcttttgcttcggcctgatcttttacaagcttcctcacctcctactaaggaaaacat

SEQ ID NO: 1831 - DNA, 420 bp, Boutonnet virus
  misc_feature 1..420: note = putative polyprotein and hypothetical protein2
  source 1..420: mol_type = genomic DNA
tgtactcgcctttgtttaaaatcaatactctttgtcaattgaattgggtgcgaacttctattataaataacactcttataaaaatgcaatcctacaatttcatgtcttctattgatagacccattatactaatccttttctctaatcttctctctttcaaagatttgcgtaacaatagtagatatcctgatgactatcctctttattgtctctcaaaagaccctttcttaacttatatatctaatattctcaggtgtcttaatattagtaaaaatgtcgatattaacgagctcatcacttttaataatcaatattcctatgctattgaaaaatttaaatatttcttaaatgtctctaattatctatacaatagagaaatctttgaaaacgaatatcatctaacttggagacaataataaa

SEQ ID NO: 1832 - DNA, 420 bp, Hubei tombus-like virus 24
  misc_feature 1..420: note = strain GCM76561 hypothetical protein 12
  source 1..420: mol_type = genomic DNA
agacgcgagccccctctatctgtgtgccggtacggagacattttgcagccattaccggacggtgcgcggattttgagcatacccgcaaccccatgcgatcatcgtcatgtcattagtaaaatcgcatggttttccgattgggttggcttcaaacgcctttcttgttttactgggtgcctgaagaacgagctggtttcgttgcataaccgacaccttgttcgtagggtggaaccagaattcaagacagtgaagcaggttgcctccaattggttatcaaagtttcctcggttcaagaattaccatcactggactgaagaggaagtgatcagccatacaacacagagtaagcgacaaaggacgcgtgacgcttttcgcaagtaccacgaggagggtgttgcagcctcggaccgccgcattaag

SEQ ID NO: 1833 - DNA, 421 bp, Pineapple mealybug wilt-associated virus 2
  misc_feature 1..421: note = strain HTS 2, partial1
  source 1..421: mol_type = genomic DNA
gcggctgagcacaaggcccgacccagacatttttccgccgattacgttgctacggtggacatattgaaattgttctccggggtccatatattggagaattcactacgacctgttaatggtcgaactttattgaaagtcgttagtggcagcgtgagcgttgtgggcgtaggtggcttgccgctacgacttagtcgcccgcactgacgcgtctttgttagacgtgtctcgatttagattataccaccttagggtatcgtccagcgccctggtggtagtatattcgtgcactggggttgcaacgagtaatacttcatcaaaagccccacctgctaaaatcgagaggcgtgagtctccacgggtagcggtgccagtagcagatcggcaggctatagccgatgcccgatggaaaaagtacgaagtt

SEQ ID NO: 1834 - DNA, 421 bp, Strepsipteran arli-related virus OKIAV104
  misc_feature 1..421: note = cRNA sequence.3
  source 1..421: mol_type = genomic DNA
gcagacatacaacttctatctcaattatgcttacctctatctctcttctaatactcgggttgtcgataaagccgaattacataatttatgctatcacgactagaaaaaaccttattttcagaagattgtaattacaactctactcatgagtttattcaagaatctggaattgtaacatcagatccaacattctgaatgaattggactgttctgagtacaatgagtagagaaagcttaatctcatattggattttaaataacggaacttagaaaaactctgagatgtgcaaattgaaattatatttcaagctttcgatgtcacatcagctattattattgagacacaaggaaagttgtttgttttagaaaatactctacttctagtaaaatagcaattattagaattatatttacaagagac

SEQ ID NO: 1835 - DNA, 422 bp, Possum hepacivrus
  misc_feature 1..422: note = isolate GV, complete genome.1
  source 1..422: mol_type = genomic DNA
taaccggatacactccaaagccaccggacaggctacctgccgtgacccgcagccgagggtctcgtagggggaagtgcgcgcttctttgcgcacagccggcggccataacctcggtgaggcaggcggagtgataagctagtgtgaatacccatcggcggggaccacaccaaaccctgtcgcccgctgcggcggtgggtcctggcaacaggaggccgcagtgagtggttcttcaggggaacgctggtgggggcttagcactagtggaaccttgcgcgctgaagccctggggcggtcgtgaggaggggtgaggaatgctgggaaggtacccgaaaggatctgatcccaggctaattgtctagcccctcccgacctttttccttttatttttcttttctgttgttgactgattacatagatacaag

SEQ ID NO: 1836 - DNA, 422 bp, Chaetoceros tenuissimus RNA virus
  misc_feature 1..422: note = genes for replicase polyprotein,2
  source 1..422: mol_type = genomic DNA
gttttcctggtatcttgtacatatacatatttacatgttttcatatttacatatttatttgttatattttattgtgacaattgtgatttgctttcacaattagtattttcgtctcgggacgttaaaggaccaagtgagctgcctctcactagaccccacggggaatgggcgctgtatatattatgatttacttttattaaaatttatttctccttttgtatttttataattgaccctgtatatacaatccataaaagcttgactcgctagaggtgtataacactaaacctcattgagtataaacttagtaaagtgttggtcaatgtttaaaaccaaatgagttaggtgtaatctcagaaacaccaacatccggtagggatacaatttctctctattattgtgatgcagatcatattaactat

SEQ ID NO: 1837 - DNA, 422 bp, Beihai levi-like virus 8
  misc_feature 1..422: note = strain BHTSS17667 hypothetical protein1
  source 1..422: mol_type = genomic DNA
cgattggggatctcggaaggtaccttattcgccggggacatccgtccagatggtcacctcgtgaccattctggtgcgtatgtggcctggcaatttggttggagtcctcttattagtgacctttatcgtcttgctgacttggctgatgccacggaagcgaggataaaggcactaaaggagggacatcgtgagcagaagtatggtggtaaactaccaccatccataccattctcacagtggaagtctggagtgaagaagactctagtcaatggctatcgccattgggtagagtacgagattcactttaaacgcgttgagaccaactggttcactaccagatttgagcttaacgacgagtatttaccagacttagacaacccgtcagcgaatattagaagagcccttgggcttgatctttctaat

SEQ ID NO: 1838 - DNA, 423 bp, Bat Paramyxovirus Eid_hel/GH-M74a/GHA/2009
  misc_feature 1..423: note = complete genome.1
  source 1..423: mol_type = genomic DNA
tgatagaccgggaagacaacgacaataccacaaccaacagctcccaaaatgcggaacaaacaagccccagaaccccaaggagacagcccagacaaccaaacccggcaccccgcagatccgaacaaagccccgcattcgaccccgaagcgcaaaccaaaaaaaccaccaaatctgccacagaacagccaaccaaccccaaaggacaccaacgacgcaaaacccgcttaactataaaaaacttaggatcacaaggtacaaaagatccaacagaaagacaaccagcccgactgcacagaacccgaaaacaagccccaaaagaacaaacaaaaccccgagaggagaaacaaccaatccccacacccgaacaaccctccacacccacacatagctcgaccacttgctcccaaggagtcttttcacttc

SEQ ID NO: 1839 - DNA, 423 bp, Marine RNA virus BC-4
  misc_feature 1..423: note = non-structural polyprotein and structural1
  source 1..423: mol_type = genomic DNA
tttttgttataatggtaaccataacgacggtttaatcaatctgttattgatttagtccgtgtcctagtttattctagggactttttggtcagcctaccagctgaccttttcactcgtcacattcttgagtgaataaattgattcttctttgtgaagatgtacaactatgcctggtttctgtttttaggcgatttaatgtattagttctttttgatttgtagcgtgtagagcgcactaattgaggtttccgtcaattcctcattagcttctcctttcggagaataacgaatcacattgaactcatgcaaatcacgtatgagaactcagtattgtatatgtgtgtaggccggtaccgtatggataaatccgaaaacctgatcacatatgttttattgcttgcagaaaactatatgactcacctag

SEQ ID NO: 1840 - DNA, 423 bp, Bundaberg bee virus 1
  misc_feature 1..423: note = isolate QLD-6 nonstructural polyprotein and1
  source 1..423: mol_type = genomic DNA
tttttagaaacaagctgcgaaaagatttcttttaaaacaaaatttcttatattatattttaagaaactattttggttcatatttatagacagttaagtcgctactgtaagctacttcttaattgttagtttaaattgctaaagtattttctacctcaagcttttaaaaacccaatcaattttttcgtgatttttaaaattttgaaaataatatcatcaaaaattttctgcagtataaacttgatcgctcgctttttaaagatcctgtttatatttgcgcttaacatcttcaaaattatctttgttagatcgttcacgatcttatctcatttggtacttttgactctgttgatattaggcattttgaaaccaaagcaatacgcgctttttgtattggtacttcacgcatattcgttaacacaaa

SEQ ID NO: 1841 - DNA, 423 bp, Wenzhou picorna-like virus 7
  misc_feature 1..423: note = strain shrimp14504 hypothetical2
  source 1..423: mol_type = genomic DNA
gtttcggaatttcctttaataaaaccgccccgttgacccgatggggtttatgtatacagttgaacagggttgtgtgtatatggataccgtgcaaatatttgtttttcatattttgtattatttgtataggctttgcatgcatagatgtcgtcctcgtgcgatacccgtatttacgggaggttgatcacccatcaagatatgacgtacaatgtggattgagtgtgcccattgtattgtatattgtagcttactaaaacaattaaaagaaataaaaacaggggtttccaggattaccctacgaaaaatagaaatcttggtcaagattacaaaaacattaaatgcttgaatgatttgccacatgctttagccaaacaagaccctgatggttggttgggcataaattattgtgcatcttgtaatctt

SEQ ID NO: 1842 - DNA, 423 bp, Wenzhou picorna-like virus 34
  misc_feature 1..423: note = strain WZFSL80163 hypothetical1
  source 1..423: mol_type = genomic DNA
cctaggttaaaacctagggtagatgtagagagcaatggaacattaattaaatcttaacagagatgttccatcttttaaaatctactgaaaagtattttgccgtaaccacacgtaacgtggcgtacttatacgacaaataagagagtagcacacttagtgttagaaatttttatttaaccatgcgttagatgtgactttctatgcacctctgcagacaagaagaggcggtattccaccgatagcaggaaggtttgtttgtgtttctttagcagaatgaaacacagcgctcttgcgcgctttgatttcgtcatgagagcaagatgacgctggaacagacagctattttcttaagtgtttggacataaacacacgttgtgctacgttagtaaacgagccctctcgagagttgtaagtttaacaaat

SEQ ID NO: 1843 - DNA, 424 bp, Picornavirales sp.
  misc_feature 1..424: note = isolate wpk049shi02 genomic sequence.1
  source 1..424: mol_type = genomic DNA
ttgattcacaatacgggatgtagttacatgcttcatttttacatcataatggggggcttggtttttaataatagttcgaacagcgttacgcgcttgtcgattttcgtaaatggcaggggcttgatttaaaatttttgttacaggagctacacttttgacttttgtatcataaaggggaccttgagtttgattagggttatattctggtaacaccggtatatctctacacccatgttgagatataccggtgttaccagaatataaccctaatcaaactcaaggtcccctttatgatacaaaagtcaaaagtgtagctcctgtaacaaaaattttaaatcaagcccctgccatttacgaaaatcgacaagcgcgtaacgctgttcgaactattattaaaaaccaagccccccattatgatgtaaaa

SEQ ID NO: 1844 - DNA, 424 bp, Dezidougou virus
  misc_feature 1..424: note = strain DEZI/Aedes africanus/SEN/DAK-AR-41524/1984,1
  source 1..424: mol_type = genomic DNA
ctccactgtctccgttccaactgttgcagactcgtgatcgcatcttgcgtgaaggtagcgcctgattttcaggaaaactcaacagttgtcggagtttccattacacaggtttcttcctcgttcttcctgtgttgttctttgaacgagaatcggttatttcttgcccttataacccgggttttattatttttgcctaaatttctattcctataatttctttactctcactatcgcacaatttaaaaatttgaacaaagaaattcatttgaatcaacgtctttctgatagtgaaaaaacatttcactaattcaagacgataaattatttcctacattgttttatacattgccaggagatcgattggatttttctgctgtaagatttgtgaatgaataagttaaatatgctttagtcaattatcatc

SEQ ID NO: 1845 - DNA, 425 bp, Mytedu virus 1
  misc_feature 1..425: note = replicative protein and hypothetical protein genes,1
  source 1..425: mol_type = genomic DNA
gtaaggtcagtcactttggagacgttaaatccaacccagtttcaatactgatggttagcaaaattgatatatgtatatggataccgtgtttgttttaatctttatatgttttgtagaaaattcataggctttgcatatattaacggtccctaccggggagttttgttcgagttcaccgtgctcacttgtaaatatgtcgtaccatatgagtcaatccactctatggtttgtaaataaataaatggattggtaatatctttaattataaattatgccgggatgtacaagccaacataagttttggtcccggggaagcaaacgtacacaataaatctgtgtcggagacacagtcagcagtgactgaaaattctttattgaaaatagagaaatttaagccacaatctggtccggaaggcactactgtt

SEQ ID NO: 1846 - DNA, 425 bp, Termite HDV-like virus
  misc_feature 1..425: note = complete genome
  source 1..425: mol_type = genomic DNA
gctccccgcctccagcccaatccctgtcgttgcgggccgccagtccaacggaggaattgtcaggtccaccctggatggagcttctcttggttggaaacaggcctacccggatcgtctgacggagcccctcatacagcgggttcccgagatatcctgtgccctattgcttaccgtatgtaccaagatgttcacctgttgttcccctgctttcccaagtcttgggttgtgtttcacctgacgacctcctcttcctcccctgcccgcaacgttcccgacccctcttctgtcccgatcttcgcaaagttggacttacctgctgcggtccaacggggcgggaccaccaacttattttatctcttaagagaaaattgttgatttgggtcccagcccttcgttgaggagcagcagaaccaacacagcgaagg

SEQ ID NO: 1847 - DNA, 425 bp, Shahe bunya-like virus 2
  misc_feature 1..425: note = strain SHWC0209c12742 putative1
  source 1..425: mol_type = genomic DNA
ctttgcataaagagatttaagtgaattgaaaagttctattaaatttgtttaatgtcaagggcagttgagagacttattttgattacagtcatcgcaacactttttgtagttatcactgattttattgttgaaaatagcaaagaaggtgaagttactattttaggtagaggagattgtataatctactctggtaagaggtactgtgaggagggtagaaaactgtcctgtcctggtgtctatgaagatttctttttcgtttcagggttacttctgtcaaagggtttcacttttgcttcaattgcaggtgccatagccttactagtctttgtatacgggaaaataacaagagaattgagaagtagtgaaatagttgattcaagatttgatttagagcaagcgagagaaaagaggcttctttgtaatct

SEQ ID NO: 1848 - DNA, 425 bp, Dundee virus
  misc_feature 1..425: note = isolate Antarctic90 hypothetical protein gene,2
  source 1..425: mol_type = genomic DNA
attggagaaataatatggcacaagccaaagacttcacgtttaatgacggaacttccgatctgaccttcgaggtcttatcacctgcaggaccaaatagtccagcagaatttcgtcttgttgatgacagcaaggcaccaatgaccctcccatacctcagcattaaagcacgaggtgtgaacggagcattggcccggaaggcatcaatcatgtatatcgaacccatcgtgaataacgaaggggtccgtacaagtcaaaacgtatggacgctcgagtcacggattgatttgagtcaaacaaccgctactacccaaaagggtgttgctcgtttgatcaaactgctacaggaggacttcatcactgaggcccttacaaaagctgtagctcctaattaaacaaaccctaatcttacatacgaggtttattaa

SEQ ID NO: 1849 - DNA, 426 bp, Rosellinia necatrix hypovirus 1
  misc_feature 1..426: note = genomic RNA, complete genome,1
  source 1..426: mol_type = genomic DNA
gggtgtgaaaacttacacctgctctatatactttcgtattatagaggcgcaagttcgcttcgctaagtcgggttcaaatcccacgcaattttacctgttacaggtttattgcagcttaggtacacttagacttaggagtgtacatccttcaatgtagagttccgagctggaactctcataaggctcgtagtgagcacccgggattggtcgtctcgggagtagaaaagaagactactttaggttagactatcttcctttctgactttaacggctgatgcgctaactcccacaccgcaggtgtggataggttggttatttactcagagtaaaagttggataaattgtttagtttttttaaaaatgaggtactggccatagaaccagaaactgcggctaccccgcacatatcaacaaagatatgccatc

SEQ ID NO: 1850 - DNA, 426 bp, Picornavirales N_OV_039
  misc_feature 1..426: note = putative non-structural protein2
  source 1..426: mol_type = genomic DNA
tctgcaagcacgggaagccccgtcttggggacgttaaaacccagttttgtcaactttaaagacacgagagggtactcacgttaggcaaatactctttgttcggcaggttaccaggatttggattttataagcccgagtttgccatttccttggcaccgaacgattataaaacatcggaggagttagagtggcgttgagttatgccattctttagagctatttgctcactctatacattgacttactacatatacatatacacaattacataataaagaaatagatatagatatagagggatcttatacatcccaaaacacactagaatttttgctagtgtgcacttgttgtggaggttttgttcctcaagccgatttagcagaaggagaaatctcatccgctcaggacaacttcgcacaacagacc

SEQ ID NO: 1851 - DNA, 426 bp, Picornavirales sp.
  misc_feature 1..426: note = isolate xftphe89pic1 genomic sequence.1
  source 1..426: mol_type = genomic DNA
ttattggattatggagatatatgatggcctggcatggaatccaggaattcttacatattggaattgtatcccacgtgaacggggatgtggcaagtcccccagtaatgctgggctctacccaatgtgtgaggaccgtgacttcaagactagttatggtcgtgtgacaagggaaagagtttcttacccgcctgtgtattaggtgtgtacgctgggaaaccataagcgatcgaaggtaaagtggtgctgaaatattgcaagctcaatgccttctatcgtgagtcggtgccgctgcatttgatacacgcccctcttttggggtaaatggctgacacgggcatccgcacttgggaatgtgcggctggaactagactgggtgatagcctgccggctggcgctgttgtcatggtatagccagttgattgccac

SEQ ID NO: 1852 - DNA, 427 bp, Plasmopara viticola lesion associated alpha-like virus 1
  misc_feature 1..427: note = isolate1
  source 1..427: mol_type = genomic DNA
ccagcactttagatttacagccacggcgtgtaaatctccagtgtttcgagttgcgcaaagcgttttctggataaatgagcattttcgaatacccactgactgtcacatcagtcattgacgtaattttcgcaacgttcaaaaccttcgcctcttcttcacccagccttggtctcttcctgaagaccatttgcaactttccaatctgggtagcttttgcaatcggtttgatctgccttacgattgacaggatcagcaagcacaagtacattcggtatttgaatacgagacatcacatcgtagagtcaattgccgagagaggtggagtcgtgccagttcagcccaagttgagaacgcacttctcacctagacttggcgatcgggacatcacgtctgccacacccaccagtgcatcacgcaggtggaacta

SEQ ID NO: 1853 - DNA, 427 bp, Picornavirales sp.
  misc_feature 1..427: note = isolate bsk136shi16 genomic sequence.1
  source 1..427: mol_type = genomic DNA
aagagacaggaggttcgtcgtattgtcgattttgcgtatttatatgcatatccgcactgccgcttatcgtggtttcttttaaatgacatttggaaagacaaatgaacacttgtgtttgacgtttgtgtactcactatatactagtatagtgagaatgaataaatggctcgattattatgtgaataagtgaatgaaacttcaagacttagcaactcgattgtgtttagctaagtgtgcttgaaagtaacttatttatcatatgtatcgcttgaatttattttgattgcctatggtgtctaacccacaccagcctcttcatgaccctctgtgcacgcagggattaacgtgcatgcaaagtagcgctgtttgagaacagttttaaatccacaatatgtggtctttgcattagattttactcgtgggaata

SEQ ID NO: 1854 - DNA, 428 bp, Lilac leaf chlorosis virus
  misc_feature 1..428: note = isolate LLCV-BJ segment RNA3, complete1
  source 1..428: mol_type = genomic DNA
tcagtcgatggaaagttaatatcactcaccaagtaaatcgctctttgttagcgtgttgagttgagtactcgatttcatttcgacttcgatctggtattatccgattgttgtgtttggtggtcccaaggcagggttggcccgtttgggaattgtaaatccaagcaacaaggagagcagagagaatcgtgataagttcgatctatctcagttgtaaatccgatagagaattaggagcaaaatcaacggtatcaaagcgatacttactcttttgaggacagttgattccagggttgctccgaatttctcgacgcggtggctgatacgatttgagtatcacgaggcttaggatcttcggttggacggaagagtaagggttggccctgctttcgaaagaacgactgattcgaatctgtccagagacgagaaga

SEQ ID NO: 1855 - DNA, 428 bp, Iflaviridae sp.
  misc_feature 1..428: note = isolate dwb184ifl2 genomic sequence.1
  source 1..428: mol_type = genomic DNA
tgacattgacaccaggtaaagagaacgagggaatccgaccctatccgttctctttacctggtgtcaatgtcaacaggctccagtggggtgtctggtaatcacccccgacaagtacagtcgttaaaatgcagaccccagtaaggtatctggtacttacctccgacccggattaatatttctgtggagtcgttaaataattagcaagaaataagccgaccactggttactccctcataggtttcagagttaaagtgggctcctaaatatgtgagtgtaccgcatttttagtgagtacatcagtacaccggtctatgtgttacaacttatgaagttatattatcgagtgacagagttaacgtgagaagctcttactgctaatcttgcatttactgcctgtaaaggtaacagtgagattaggggctgagtag

SEQ ID NO: 1856 - DNA, 428 bp, Mekrijarvi negevirus
  misc_feature 1..428: note = isolate P39, complete genome.1
  source 1..428: mol_type = genomic DNA
gcaaagttgtcaaccagcatcctcaccagatgtaattgccgactgctaagattgaacccgaattctaaacgaatttatcaatcgctcacccttgtccggtgagtccaaccagctgcctaacccgcagaaacatttcacgcgaattaatttgacgtgaatccaattgtcccagttatctggtacaaatctccgtttaaaatttttattttaaaccttttcgtcactttcacccagtgacacttcctgcagatccttctgattctgcaaaaattgtccgctcactccggatttctttgatttgttcacatcaaatctcccccaccttcattttgaagtcctgtctcattaatagtgagactcccccttgaattgttttcttcaattctcccctttttcgttgttaagttctgtcctaatccgacattacg

SEQ ID NO: 1857 - DNA, 429 bp, Mizyes virus 1
  misc_feature 1..429: note = polyprotein gene, complete cds.1
  source 1..429: mol_type = genomic DNA
taccccctttcagtgtttgttaaacagactcttgatttgtaacccttgttgttgaaagaactagctattcaaaactagtgccatcatttgactaacccgacttctgtcggtggaaccctgtctttgacggctcttatctgcgcattgagcccagtttgctatgtcatcaccaccaagaaccatttcacgattcgtctgcgttaacttctccgcatttccgcctgattgcccattagtttgttcgactttctcgtttgcgagacttgaacgccgcacttttatgctctgctcagcatattaatccatcgtattaaacacaaacgatcgcagatttacccctgcgttaccaatagcgtactagtgatgtcgcactagcctaaccctgatcgagaccacactcgtaaccatggattccagccaagccttaaa

SEQ ID NO: 1858 - DNA, 429 bp, Mytcor virus 1
  misc_feature 1..429: note = replicative protein gene, partial cds; and protein 21
  source 1..429: mol_type = genomic DNA
ctacactaaggtagttttcccactaactctaggagtaggaatagcattgatagcattcaccctaacaaggcccactctccccacggtcggggattcacaacacagcctacctcacggtggctggtaccgtgacggaacgaaaacagtggcctacaactccccccactactatagtagtagtttcatccctttcttagctgtgcttggtttaacactcttaatatatgtttctagtctatgttctggtcggggtgctactaggagttgccctcattgctgtggtcaacactaacaatcctcagtgtactatagtattcaccggtcattccactactatccaggggtgtgagcggttaactaatttgcatgacatcatagcagcggttaataaccgcttaagttttagctctagttgtgaaaactaactcc

SEQ ID NO: 1859 - DNA, 429 bp, Beihai hermit crab virus 3
  misc_feature 1..429: note = strain BHJJX21702 putative glycoprotein,3
  source 1..429: mol_type = genomic DNA
ggcatcctataacaccgggtgaggactgttcagtattgttctcctatgcatgcttagttttagggtcacaggccgataagttctctgtctggaccatctttcttagtagtttgtaagtgcctgtttcatatatagatgtactattaagggtttagtttttaagtatatttttctcataatcatttagcatcataagattgtttttctcagatgaatgacagatacttctgttccactactcaaacttcccctctttctttcagagggaaggaagacggggagttggactcccagttatccctattagtccttatctcaaacctgcaattccatcagatccaatatttttgctcctaatgttgtaattggctagtttaaaagaacacccccactgagtaaacattataacacaattacacagttccaacc

SEQ ID NO: 1860 - DNA, 429 bp, Wenzhou picorna-like virus 31
  misc_feature 1..429: note = strain WZFSL72092 hypothetical2
  source 1..429: mol_type = genomic DNA
agaacttgtccacatatttgatgcttcgggataagtgagcctccatgttgtcgaggtgaagactactactcagtctttaaaagagaggagagcgtccagagtgtgtgtcttgagcagaccacactttagtatttgcttacagaaaatcatattaaagtggatggcaatgccactgaaaaagataattgcatagagattgaaggtatttcaatcactcctaacttagagttgacgtctggggtcaccggttttgatagtgaagccacattgtgcgctgaagtgccttctttaaataagggaactttgcgggcagatggcgacatcaatcagttgaagcattatttagcgaggccatttttatggcgtactgggacttttcttgtttcccctgggccacaagagattgcaccacttaacaatcacgcagat

SEQ ID NO: 1861 - DNA, 429 bp, Beihai picorna-like virus 9
  misc_feature 1..429: note = strain BHBJDX18814 hypothetical protein2
  source 1..429: mol_type = genomic DNA
tttgtcaaaagcctgaccgtcaagtcgttaaactgtccggatgcggaattatctgtagtcgaaactctaaggaggaaccaaaaatattctgtatatattgattacgatgtgttatatgtgttgacaactacatatatattatagcgcttgtatactgctggttgccgtagtggcaaggagtttttactcctggagaaggaccactccaaagaagtgttgtgataggcaagtgctctgaggcgagcacttgacccgtatacatagtgccttactaatttttataatttttataatactgaagttgacagtataaacaacttatacatattatatacacctcaatcgggtacggttggggtaacagatagtgtagcccctaatgtgaggagtgaaactatcacaaattttgaagtgcagaatgcaggagaa

SEQ ID NO: 1862 - DNA, 429 bp, Shinobi tetravirus
  misc_feature 1..429: note = RNA, complete genome,strain: shinobi.1
  source 1..429: mol_type = genomic DNA
gggcggaaggccgcctcctcgccggttatctgcctccggccaagtgactagcgcttctgctctagctctcaataaccctctcttctctacaactggataaagcaaataacatcatggacgcctccaacccagtcaaatctgcccagcgctatactctctctgagctccgtgattctcgacttgcatacaaaagacaggacctgaaagcgctgcaagctatggcggcttccgcggagaggcaactgttctcttcaggaggcccaagcaaagaagcttttcacagtcttactatggacctaaacgaagacctctcttcagtgcgcgcggcctctggcttatgacgtgaggagtgagatcgacttcctcgacaaactcccgcccgttccggtagataataccaaactcggggacaggcagatacaccccgcc

SEQ ID NO: 1863 - DNA, 429 bp, Wenzhou tombus-like virus 13
  misc_feature 1..429: note = strain WZFSL80420 hypothetical protein1
  source 1..429: mol_type = genomic DNA
aacacatccaacatgtcttctttaattaaatcaaagatatgggatgtgttaatatttccggggccccaacttgtcagcagttgttcatcttgggatttacgtgggcgctcaaccactatggaacttccatatgtggttttaatgggttacccgccatattttaaacgccaacgcgagcgtgctcgcctttggtctttgatatgtagagtgattaaataacactctggttggttataaacatatatcatggtattaattttaaacgtcagttaacaacgggtgtcttgcgtgcaaaaacacttcttgctgaatggttattattaatatggtcatatatgcttataaatggtgattaggtaaattaataccgggtgatctgcgtgcagaatcacctcatattgagatacctgttagtcatgttatcattag

SEQ ID NO: 1864 - DNA, 430 bp, Scaldis River bee virus
  misc_feature 1..430: note = glycoprotein (G), putative nucleoprotein2
  source 1..430: mol_type = genomic DNA
gctctcaatattacacttatttactttatttctttatctatgaatttgtccttcaattatatatatccctcatctaagctgaaagacattattactttaaaaaataacatattttgtccttctgtatagttaagtctgttctcttactccatccatcatggcacgtagacaaccacatagatcaggtttgtccgagattaattacatatatgatcactgtaatgaagcacctataaaatggttaattgatggtgtaaaattgtgtgtgaatataaagaatcattggttcttccagggggcaaacctcgcatttgcatggtatagagataatgttcatatctacttattaccattatatgattaccatatggtaaaattgatttacaatgttatgattagaggttaccctgattacatctagtgtccattg

SEQ ID NO: 1865 - DNA, 430 bp, Picornavirales sp.
  misc_feature 1..430: note = isolate H2_Rhizo_33_scaffold_45 RNA-dependent2
  source 1..430: mol_type = genomic DNA
atttagcaacgtcagagatgacattaaatatctaaagccgcctgttagggtttctaacagcttatccgtggaagtgccacggaacataaattaagaccccgaaggtcgagcgttggtgtgatcttgcctcatcattttatttctaagcagagattatagaggtagtgctgccagcgtaattccctgcctatttaggatactaatcacacagggattaggcagcccctaaatcaaagagagatgcttagactcaggtgcaataaaagtgtaagccctgttttataaatcacttgccaataataataataataatggtccgggcgcaccaataagcgtccaacacacagaaataccttctgacatacacacaagtggttctgccacagaagcggtgccagaagacccgacagttagaggaggagagcataat

SEQ ID NO: 1866 - DNA, 430 bp, Wenling rattails picornavirus
  misc_feature 1..430: note = strain XYHYC192101 polyprotein gene,1
  source 1..430: mol_type = genomic DNA
tccgatctcggcgctaggctcactctctgagtgccctagtggtcgttcccttttcaacaagaataaaacttgtaaaaattgaaaaactttgagtaaagtataaataccctcataactgagtaaaagtctgttatatatgtttgtttgtttgtaggcatctccgtgccttctacactactatatttgcccctgtgcgtacgcgcttgtgccgtgaggcctcacgtacgttcagatgcttatcctgagggatgtagcacaaggtgacacttatactagtacctttttccctgcccacgactggacctgggcggtgtaggtgtgtctctctcaatgtttcactccgaaccgttctataacaaggttgtactttccaacctgatatcagtgtgctataaattttctatcattgtggttagtccactacccaaac

SEQ ID NO: 1867 - DNA, 430 bp, Beihai picorna-like virus 60
  misc_feature 1..430: note = strain BHBei55726 hypothetical protein1
  source 1..430: mol_type = genomic DNA
cagcgctttatttctaaatacccttatggtagatgacatacctcctgtgtacacttaatgagtgtacatacgagtgaggattttactgtctggttgttatgaaaggatgagttgtttcccagtccctttttcaaataagattccctttgacttttataagtcactgcaatcgtagtctggaatcgaatactacgtcgagaacaagagtttaccaaacgttaacgtgcgttcatgtgagcgttttcgtttagggcttgtttttggttaaaccgagtgtttaaatatcacgagatatatacccggaggttttcactgatccggtgtattaattttaggtgaagctaatactaatacttatgttattaagggtgtcaaagcccaaaccctggcgatttctaaccatgctaagcaggaggaagctcaagcttac

SEQ ID NO: 1868 - DNA, 430 bp, Wenzhou picorna-like virus 1
  misc_feature 1..430: note = strain WZSLuoI85940 hypothetical1
  source 1..430: mol_type = genomic DNA
ggaaggctctttgagccctcctatggaatcttggtatgatgtaattggaaggtaaagccctcctcttggattatatataaacatttttctacgttaaattagatactacgttttaaacgttagtagtatcacccttaaacatttatagtcacgcaatgttaaaactcatgacttgtacccttaattgatccggtactgacaacttaatacgattgtcatttatagcagttgaacggcactgctagtattagttcttttgtaatgaatttcttactcctcaagaaattacatttaattgcaataacgattgcagagactacttaattgtagcccacggtgtgagcatagacgctaagctcacggtaacggttagggaagcccaaaagagacgccaacccacaagtgctcttgaaccctgtattatacaatc

SEQ ID NO: 1869 - DNA, 431 bp, San Bernardo virus
  misc_feature 1..431: note = strain CoB37dA hypothetical protein 1,1
  source 1..431: mol_type = genomic DNA
cataaaactatacaaccgtaaagtcttgtccgcttctcttcagggagaagcaaaaacttggataccgttatataccgtattctaacttggccaacgtgcactactttggtcgtaataccggtttcagttaatctgaagctataataattgggttgtttaaaacatcccgtaaaacttacgagtttaaatactcgtttaattttctgctctttccttgagtagaataaaaattttcacacttcaccgtgtgattaacttgttttccagttaactgtgaaaaccgtcttttcgtttcctgtcaatcagggagctaattctttgagattaattatctcttttctgttctctcgtaatcgagagaactctgtctttggtcctcgcaagagaaccactaccgtctatagacttctttgtcttctcttgatcttcag

SEQ ID NO: 1870 - DNA, 431 bp, Picornavirales sp.
  misc_feature 1..431: note = isolate zftwig05rna4 genomic sequence.1
  source 1..431: mol_type = genomic DNA
gcaattaaacgagaatattgattgttaaaaaattcaaaagtgtcactgatgcctgcgatataactgagtcaggcatcagtgacacttttgaatttttaaacaatcaatattctcgtttaattgcagagcctcaaataggtatctccattaatcatacaattgatgggagcctagatgacgctattaataaatctctatcccttttttcagaattatctaaagctctatccgataaatatcaaacaaccgttaatgattatcaacgtaaaattatcgcctcaataacgtcaatttataatttatatcgtttcacaactcacaaattatctcttcaagatttttgtgttaatctctgtggagttattggtgccgctggtcttgcctccgacatcataactcaactaataataactgttaggtctcttttctta

SEQ ID NO: 1871 - DNA, 433 bp, Marmot picobirnavirus
  misc_feature 1..433: note = clone c332668_g1_i1_libraryA_2587 segment I1
  source 1..433: mol_type = genomic DNA
ctcttgtatagtttacaagtattctacgaagggaggtgtagcatgttgctataccaatcgcaattttatcaagcgattaacaaaaacatcctgacgttactgactagctacatgctggcatgcacagtaggtacagtcattgtaacggatctgtggaaaggaggtaatttatatcacagatattcaggttaagtactggacattgaacgaaagtaaacgtcacaatgttagtactgagacacaagcagccaatgaattggctgaaactaggcgacacaatgtgtcgactgaaactttgggacgtgacaccctaaatgaagataaacgtcacaatgtcacaactgaaacggagagtagacgccataatgtacaaactgaacgtgaggcgaagcgtcataatgttgctggtgaagtcgaaaccaaacgacataat

SEQ ID NO: 1872 - DNA, 433 bp, Bremia lactucae associated narnavirus 2
  misc_feature 1..433: note = isolate DML-A_DN379211
  source 1..433: mol_type = genomic DNA
gaagagtcaagcacacagaatatcaaacaccgatatccaagcggagaaccttagggtccccgtaggtaccgggtttggattacgtgagacggggaagtctggtaaaaagagtatcgcagatctctttttgcccattatctatgataatgatgactatacccttccgggtcgattcgactcattacttaacttaaagtttcgtaataagcgattgcggttttcaagaaaccgagatattaagtatctcccggactcgtacgcctcgttcgttagaggtaggttagcaaccgaattgggacttagtcccctaaaatctaagattttagtcggtagatctattaccactatattaagaatagaggagttagtaagggctatcattgataaccttctattgtcatttaaaggatttttcttagaaaaaggccggaaa

SEQ ID NO: 1873 - DNA, 434 bp, Anopheles darlingi virus
  misc_feature 1..434: note = isolate MAC, complete genome.2
  source 1..434: mol_type = genomic DNA
ttgttcagcagagttattctcttcaatttcattgtttttgtctactgtattgcatgattttattaaccaggatgactattatatacatatcatcttggtctttgccacttattttatatttgctatattaatctgtgcgttagcacttaaattaaacaatcccaggcgtgggcaactgtgaggtttctttgagcatgtacgcagatatttgagtaagatagatttcaggtctttccaccaccttggcggaatgtactcctttatgctatattatcatacacttataattttactctgtgcattggcatttgacccaaattggttagggagtgggcaactatgaggcttcctcgagcatatacgcaggtacttacacaggacaggtgtaaaaattccccatgacatttttttcaaaaaacccgctagtcagaaag

SEQ ID NO: 1874 - DNA, 434 bp, Riboviria sp.
  misc_feature 1..434: note = isolate cfe153shi03nc genomic sequence.1
  source 1..434: mol_type = genomic DNA
tgattgaagaaccgacccatgaaggtaagctattcataaatcctgccaatgtggtccaagtttcatcagtatcaccctgaggggtgtctgcttctgcttggtccgtgataccacatcggcttgcaatggctgccaccgtcgtgtcaaccgtctgtgctgtctgtcctactgactggattgcgtccatcgtaactgtataagggttacgagggaggtaatcctgccagcctgcttctgctattgggagggtgtccaaatccgtatccgaatcgtcatcgtgtggggtgtctgcgctgggtccttgtcgaatataaatccatactgctttatcgtcaatcgtcctgtacttttccatatccttcatcatctgtattcgtgggggtcctcgaaaataattgtagtttgcgtcgtctccaagggcttggtatagtgtc

SEQ ID NO: 1875 - DNA, 435 bp, Cherry virus A
  misc_feature 1..435: note = QLD11 RNA, complete genome.1
  source 1..435: mol_type = genomic DNA
aggagggttatttggggagtgtgattttggaaatgatagtatcttcaaagattacattaatagagtaaaaaacaaagttgaaattgatttattgaatgagagaattttgaggataaacactgagatgaatcagtttgacccaaggatatacatgatgaataagatagggtttgtcactagcacatcaatgtttgaagcaggccacattgcatcaaatgaatccaaccagtcaaaaggtcttcctccacaaacaagccggccatacgatgaggtgaaaccatacatgccattgagtttgaggaattcttatgagtcaaggacaaaaggcaacaggcttctatctatcctgagaaatcaaaaacgtttatgtgatttaggatcaggctctaccttaggtttaagagttttggagggcttgaaaatgttcaaggagga

SEQ ID NO: 1876 - DNA, 435 bp, Hantaan virus
  misc_feature 1..435: note = XAAa10091712,nucleoprotein, glycoprotein, and1
  source 1..435: mol_type = genomic DNA
ttagtgaatgtataacccttattatgtgatcattatatactactgaatcattatcaatcatatttgcactattattatcaggggaatcatcatatcagggtatgggtacatttatgggtgggaatcattattcaaagggtgggtcagttaatccgttgtgggtgggtttaggttcaggctgccttaagtagcctttttttgtatatatggatgtagatttcatttggtccttgaactaatcttgctttctttcctctttttctggcttcctctgcttactaataacaacattctacctcaacacaaaactacctcaacctaactacctcattagctgtcgctccttgattgtctttttagggagcatcctatagtagtagacaccgcaaaagaaagcagtcaatcagcaacatggggatatggaagtggctagta

SEQ ID NO: 1877 - DNA, 436 bp, Papaya meleira virus 2
  misc_feature 1..436: note = isolate Valle_R RNA-dependent RNA polymerase1
  source 1..436: mol_type = genomic DNA
tccgggaaggctatcagcgcgaggtggggtgggagcgtctccactggcggttcggtaacatttggtctccatctacgaagatggctagtcgcttacgtggacacttcggtgcccgcgtcccgagcgctgctaatgcagcccttggagagcactggctgttggagcagtatggtcatggactagatgcgtcccttgctgtctgcgtagcggtgaaactctggcttacgccaaccattaaggatgaggctatcgcacagtttcatccttttctggttggccggtaagttcgtttccaggtgtgtcccgtccttttgcaattccagcgggcgcaccattaaggaaattgcggggggttcataccggccctcaagtccgtgcgagtacgtctatctactcccaggtagtcggtggcttgtatagagttcatgataacaca

SEQ ID NO: 1878 - DNA, 437 bp, Cryphonectria hypovirus 2
  misc_feature 1..437: note = genome.1
  source 1..437: mol_type = genomic DNA
tttcagtagttccgcgctaaaagcgactcctttggaatcggtgatttgccgattacatggaggctccctggagggattgcctatctgaaagataagatggctgctgcacagccgtgggcgaaacgtttgcgtttacaacgcgtaggagaggtcctaacaaacaacctctaacgtggtccaggtggtgacactctccattccgtcaaggacgaagctcgtccgtgaaacgagtgactcgcaccctgaatgagaagagagaataacggatgcttctggtagttgtggagtagtgaccctagaaactaatccccagaagacctctcgctcatggatgccggaccaggtccacacctagtttaggtgttttgatggtaaaagaaacaccgcagactctgtcttgacatgaccggttgaccccgtacgaggtccgacttata

SEQ ID NO: 1879 - DNA, 438 bp, Myrmica scabrinodis virus 1
  misc_feature 1..438: note = isolate Cambridge-Msc, complete genome.2
  source 1..438: mol_type = genomic DNA
tgagatacccgaagaagtgagttatacgactttgcacacaaatatatataagttcataactagttgttttgcaagaagaactctacggatgccagtgagttatttaacatcaagcacgccttgcaggatgtgcatattaaatcttacgcgagttacatgctctttgatatctttgagtggccggttagaaattgtctcctgtagtgcccaattgataaaggtactattttagtccctggcaagcagattcaataacgacccaccgtcctatactctttgactcataacatggttaatcagcgagagttaatatgtgcgtgaccttacgcagaaatgcacagggtaatgacctccaagtagaactagtatgtgtttgtatccctggaattgatttgaaataatgatggatgattaaggcgaagatttattcaatgaaat

SEQ ID NO: 1880 - DNA, 438 bp, Beihai picorna-like virus 14
  misc_feature 1..438: note = strain BHHK130444 hypothetical protein2
  source 1..438: mol_type = genomic DNA
gctggctgccttagtcttgggcagacattaaatgcatccgctgtgtcttgggcagacgaaaaatgcatccaatattgtcctgggaagacaataaaagcatccctctgggcgtaacctaccacgtctatcggaaccaaaagggggcactctgtattgggttaccacgcattcccaatatgtcagtcattgggggatgacgaaggcttgcagagtgaggcattttcctcgtaaaatacccctatttaggggagtgttcgccgcacgtaagactgacgcacgctgtactggttgagtcacctttacgagcgttaatgaagacttactacaacaaatacaaaaagatttaatgttacaattaatgaggaaaatttggagtcacaacaccaaaatgttaggtttagtgatcagactccacaatgggactacaccgtagatagt

SEQ ID NO: 1881 - DNA, 438 bp, Hubei picorna-like virus 22
  misc_feature 1..438: note = strain WHSF7472 hypothetical protein 11
  source 1..438: mol_type = genomic DNA
ccccaaaaccccccccttaaactcaacactgtagtggattcattttccgttgcaaaacaaaacattactacccgcatttatgtaggctctgtgttttctatgcgaccgttacattaatctctactctgacccactagtttataaaaccgaagacctgaatgaaacgattttccttcttttcaacctctaacgaacctctgacggcttgagaaacctgaagttagtaattatgtttaaaagaaaggaaagtcaaacgcgatgactcttacatccctattccataccgttgctccacaatgtgagcgatgcgaggtcgggactgcagtattaggggaacgagctacatggagagttaattatctctcccctcctacgggagtctcatgtgagctgtagaaagcggttggcacctctcgttacctcgcctgtacatgatcc

SEQ ID NO: 1882 - DNA, 438 bp, Beihai astro-like virus
  misc_feature 1..438: note = strain BHWZXX13371 putative protease,1
  source 1..438: mol_type = genomic DNA
caagtatcccatggcttttaacgattggcaggctattgactttgtattttttgacttagaaaacgaagttgtggaaatatatagaggacacggccttgccaaccctgagagctttgtgacatatacgatcgatgatatcaatttgtatcaccttcatcatcgttttatttgtgacatcattgttagcgcgtatcttgagcagtatcaagtcattgtacatccgcttgtcaacaacgctgcactgcaaagtgctcttggcgggtaaacgcttaaacaaaaaacgctttattcgcgggaaagcagttgacagacctgtacagctaataaggcgcaaacgattgaacacaatcccaaaaaaacaacaaataattgacgcaaaaaactacggaaatcaccacatctctttgcaacattacggtgactccaaagacatacaaa

SEQ ID NO: 1883 - DNA, 438 bp, Yado-kari virus 3
  misc_feature 1..438: note = genes for RNA-dependent RNA polymerase, complete1
  source 1..438: mol_type = genomic DNA
tttcgggaaagtaggatgtatctttcaaaggaaagataagctaaatgtgcggtcgcacaaggttagatggaaggaaatgtccattggcataaactcagattgattgactttcaaatagaggaatgattcgcgtcgcgtggcgcctagtttacactgggcgcatcggccttgcatataagcaaggagcgctacgtcgtagcacgcattgaaaagtccccttaagcaagggagcctttgctctatcgattgcagatagagacggtgaacaatataccgaaccgcaacagagaaagcggtagtcaaagcttacaagtcgcaatggaaaccgtgatcgtacggatcacgtgaaccgaagttgcgcaatctgacaacttacgtgacaggattaaacgtccagaaggcccatggtccccggcatcgggaatccacagaaccaac

SEQ ID NO: 1884 - DNA, 439 bp, Hubei rhabdo-like virus 7
  misc_feature 1..439: note = strain QTM26925 hypothetical protein,2
  source 1..439: mol_type = genomic DNA
aaattttatagaactatacaaaatatttgggttaagctggagactttctgcttgtttatggaataacatgtcacaattaattttacataaacaagccagaaggccattaaagattaatcgaaaagcattaatggcttataaaaagacccctcaaaacttagatctgacagaatctgcttaagaaaaacccgtaagagtcaggatgccaaaacctacaataacatttacttgtcctaattgcggtcatatcattagatatgaaaggagtgatctaccagccgtccctttgaaaccaggaggaagtgcttcaaaataacaggtcattaattaactttaactatgagactgtattggagataatccacatcattgattatttttaagttgttaaaattttgttttctggtagctaagattaatctcacgatgcagtacaaca

SEQ ID NO: 1885 - DNA, 439 bp, Zaire ebolavirus
  misc_feature 1..439: note = isolate Ebola2
  source 1..439: mol_type = genomic DNA
atgagcatgtaataatgggatgatttaatcgacaaatagctaacattaaatagtcaaggaacgcaaacaggaagaatttttgatgtctaaggtgtgaattattatcacaataaaagtgattcttagttttgaatttaaagctagcttattattactagccgtttttcaaagttcaatttgagtcttaatgcaaataagcgttaagccacagttatagccataatggtaactcaatatcttagccagcgatttatctaaattaaattacattatgcttttataacttacctactagcctgcccaacatttacacgatcgttttataattaagaaaaaactaatgatgaagattaaaaccttcatcatccttacgtcaattgaattctctagcactagaagcttattgtcttcaatgtaaaagaaaagctggcctaacaag

SEQ ID NO: 1886 - DNA, 439 bp, Changping earthworm virus 1
  misc_feature 1..439: note = strain CPQY105740 hypothetical protein1
  source 1..439: mol_type = genomic DNA
gttgcatgggggaataccccatgcaacgtttgttttagcctgtggcgacacagggaggcgtttggacagcttgctgcccagcgccttgacttatcgctcttttcttttctttttctattacactttccgcaatagttctttatttcctgcaacgaaagccgttctaaaagaagtgattagttgtacatccacttttacctttctttatttacttctctctcttgaggagttcttttcagaaaaagacatggtgtgagtaggagtgagtctgatggccgagcgtggttcacgcataactggtcagattcactctggagaagcccttgtcttggctctatattcgtttgtgtaagcccgtttaggtatgtgaaacagtttagtaatacagtattcgtagtttttgaggggaaaccttcttcttcttttacttaggctgaaa

SEQ ID NO: 1887 - DNA, 439 bp, Wenzhou picorna-like virus 42
  misc_feature 1..439: note = strain WZFSL74289 hypothetical1
  source 1..439: mol_type = genomic DNA
atcagctcacgttatttttccataacgcttgtgtgtaagtatcgttacgttccctaacgtaggttgggtaaggtgacgcttctcgtcataccatcgttattttaacaactttaagcgagcaaagaaaatttttaatttcttattagtatttattttcagtctcatatagctatatatatgtgagggttttgccacttgccctttaaaggttaaaacaaaacactattataactagctaacgactagcctacctctgagtgttgttagagcaattgtaaaactctaacatcaacaggttcaagggcgaagtgccacagatgttataaggtgtgtggtcaattgcaccttgatgtgcggggagtgacgtcctacatacaattagtcacatacatgatggccaaaggggatgcttcggctgaactgagtagcaacacaaaat

SEQ ID NO: 1888 - DNA, 439 bp, De Gerlache virus
  misc_feature 1..439: note = isolate Antarctic85 RNA-dependent RNA polymerase1R
  source 1..439: mol_type = genomic DNA
taatcacccgaggggtcttacccatgcaaaatgtaacactaacaatagcggacaaatcttatgcacgttttcaggaaacgccagataaaacaacttacgttgcttctggccattctgtcggcgatgtcgatttgctgctactcggccgtaccgtcccaaccacaaccagtggtaatgccaaagttcgcgccaacctcgttaatgactttacgtcaggaaccggggatgataagaccgttattggacgagcgtatgctaatgttgaaacatcggtgcctgctatggcatcagatgaagacaaagcacagctgctatctgatttacgggcctacgtggcatcagaatcttttgccgaattgtataataaacaatcgatctagtatggaattacccgtactagtttaaatagattgtaaactttaacaacaaggttaagatt

SEQ ID NO: 1889 - DNA, 439 bp, Hubei sobemo-like virus 13
  misc_feature 1..439: note = strain WHYY18840 hypothetical protein 1,1
  source 1..439: mol_type = genomic DNA
atatccaggtggaagagcctacacgtgtagagccagtgcaacaggtatacattccagaagctccatatcaaactgaacagaaccatttaaacttgaggacggcctctgccattgcggaggccagacagttgaggcagggcgctcctgttccgccaccaaggagtgtggcgggaccagtatctttgagtttgcagaggcagacggttcgtacgggtggccaacaatcgattcctgcagtgccaagcgtagtttcgcacggcatttgcgaatcgcagcagggtcgagagttgatatcccgtggagccaggcgcaaacgctcgaagaagcagaaaccagcgttgtcgcaagacttagttgtctaaagcattatccgcaatatgcagataatgctgaagacaacctcaattggttgtttttggcggcggttttggatgttgac

SEQ ID NO: 1890 - DNA, 440 bp, Ceratobasidium virus A
  misc_feature 1..440: note = isolate Murdoch-2 hypothetical protein gene,1
  source 1..440: mol_type = genomic DNA
attcagacctcccacccgacgacagccccacacccgactcgcgtttttttcaaaaatataaaaaccaaaaaaataaactacctttacatccaccccctgtttccaagcaccagcccgggtcgacagccgacctaaacctttacggccataagccatgggctccctactcctaccctgacccgttacacacaccttacctctctctgctaaaatacgcagcggagacaaatttacatgctcagaaccatgtcctcgccttgttactgaccatcacaaagcacaacttctctgactttcaacgactcatcgaccgaactcgcaacaaccaccttctccaactgcggaggagacaagacgctgcgttcccggatatctcttttccaccgggaccaaggaacttcccccgcttcggcaaaaaagacgagctcaacctcgacctc

SEQ ID NO: 1891 - DNA, 440 bp, Ceratobasidium virus A
  misc_feature 1..440: note = isolate Murdoch-3 hypothetical protein gene,1
  source 1..440: mol_type = genomic DNA
attctgtcctcccacccgacaacaaccacacaaacgactcacgtttcttcttaaaatataaaaaccaaaaaaatgaaccgactctacaaccacccctgtttcacaagaaccagcccgggtcgtcagccgacctaaacctttacggccataagccatgggctccatattcgtatcccgatcccctgcacaccccttacctttccctcttgaagtacgccgccgaagtgaaccttcacgctcaagaccacgttctggccctacttctgaccatcacaaagcacaacttttctgactaccaacgcctcattgaccgtactcgtgacaaccacttgctgcaacttcgacagcggcaggaaagcgccttccctgatatctccttccctcctggacctcgcaactttccccgtttcgggaagaagactgagctcaacctcgatctc

SEQ ID NO: 1892 - DNA, 440 bp, Hubei rhabdo-like virus 5
  misc_feature 1..440: note = strain WHSFII19440 RNA-dependent RNA1
  source 1..440: mol_type = genomic DNA
tccatctcaagtcatcagaagaggaaagtgcaggaagctctaatctaaataggtaagttgagtgatctttatatataataattttaggtaattgtattggtttttaataataaatattctctttttaggacccacgtctgaaggaattggatgcatcaagtgtcaaacaattgtcagatgttagaaatcacaaagttgaaactgtgcaatatatccccaaaggggtacaattaagtgttttgtctgaattgtattttctaggagatagcttactataaattgatcaatcaaaaaattattttgtattattgatgttagaattagctttagtgattttgagtgtgattcacaatcaaggtaatcatacacttctttaaaggactttgttataattatttattctctattgttttaagaaaaactaacaagtcaaaatcaca

SEQ ID NO: 1893 - DNA, 440 bp, unidentified
  source 1..440: mol_type = unassigned DNA; note = Mutant Zaire ebolavirus isolate Ebola6
tttttctcgagattgcttcatggaaaagctcagcctcaaatcaatgaaaccaggatttaattatatggattacttgaatctaagattacttgacaaatgataatataatacactggagctttaaacatagccaatgtgattctaactcctttaaactcacagttaatcataaacaaggtttgacatcaatctagttatctctttgagaatgataaacttgatgaagattaagaaaaaggtaatctttcgattatctttaatcttcatccttgattctacaatcatgacagttgtctttagtgacaagggaaagaagcctttttattaagttgtaataatcagatctgcgaaccggtagagtttagttgcaacctaacacacataaagcattggtcaaaaagtcaatagaaatttaaacagtgagtggagacaacttttaa

SEQ ID NO: 1894 - DNA, 441 bp, Avian metaavulavirus 21
  misc_feature 1..441: note = isolate APMV/dove/Taiwan/AHRI33/2009,5
  source 1..441: mol_type = genomic DNA
tgctgtataagcatcttatgatgacatataaaactgttgcagaaacatccaagttaatacacaaataagttatgtttcaaagggggtaatacactatcacgagacctaaattattaagtacacactaagtaccactgggtcagacagattgagtcttctaaaatgattgtcgcaaataatctctatgacactactgcacttaactattagatctgaccaatactatgataaccagtttcttgattattgatattctgattcgcagttcaatttatgtgggttaggcttatcatatattaattccgccaaagtagggggaaaggtttctcaatcagtagtgacagttccaggtctcttcacaattactgttcttataagatattaagaaaaaactaacaattcagcagggattaaacaagagacaattgggggagaattacc

SEQ ID NO: 1895 - DNA, 441 bp, Solenopsis invicta virus 8
  misc_feature 1..441: note = isolate Formosa, complete genome.1
  source 1..441: mol_type = genomic DNA
ttaacgaattcgccctttgctacggcgggttgacggcatagttatttaatcaccagtgaatggggtgtgtaccttcacaaaattcttaaacggtttacgattctgatatacgacacaacaattttaactgatctcttatgacgacaatggaaacatttacagaatatactagcttgccatcaacaaggaattctccagacaaagttttgcggttttctattgttcttggatgcatttttatactgaccttgcttgttattatgactacgattgagattaaagaatatacagaacgaagacatcttgaaagaattttgatagagatagaaactcggcgaaattatgtagaagagtctcttttgaaatcaaaatctttcaccccgattgattctgttgatttttcacaaacatcaacagttcactctcactatattgatttta

SEQ ID NO: 1896 - DNA, 441 bp, Picornavirales sp.
  misc_feature 1..441: note = isolate ltt163pic3 genomic sequence.1
  source 1..441: mol_type = genomic DNA
atatcgtcccggcgactagccatccaggaactgtaagtaccaaggcactcgaggttcccttcatccgatagggcataaaccctgtgatcaactttcttaccactagtcggtccagattttccgattggcttttcggggcagatactagcttcatcctcagattgggcgtcgtaataaccatccgaaacaccatcatcagaataatcctctgctggggtagaatttaggttctcgacttcttcattcatctcagcaaaggattattctgatgatggtgtttcggatggttattacgacgcccaatctgaggatgaagctagtatttgccccgaaaagccaatcggaaaatctggaccgactagtggtaagaaagttgatcacagggtttatgccctatcggatgaagggaacctcgagtgccttggtacttacagttcctgg

SEQ ID NO: 1897 - DNA, 441 bp, Hubei zhaovirus-like virus 1
  misc_feature 1..441: note = strain WHBL52766 RNA-dependent RNA2
  source 1..441: mol_type = genomic DNA
cctggatgatactggggtgtaggtaagaggcctacacattgaacaacatattgttctaattacgtaaggtatacggtgtagtcagctctaataagaacaactggctatattcatgcacatatcagtgaaaattattattattctatatatataataaaattcaagtgcaagtacagctttaaagcacgccctaccaaggaccgactgtaagttttgctgaattaataaacttaatgtagatattttgtcgtttgtagaaataaactaccactactgactgtttagtggtaccattcattgggttgagtggaaaagacattctcagttgataataataagaacaataaaaacaaaaagcccttaaataaaagaaggcaattgaaacgagatagacgtgtggtggtctaaaaatagccatataaacgttaacgtgtggtggtg

SEQ ID NO: 1898 - DNA, 442 bp, Hubei picorna-like virus 82
  misc_feature 1..442: note = strain spider133992 hypothetical2
  source 1..442: mol_type = genomic DNA
tctttacgaaaatttcagagatattctgggagtccgcgtgaagcttttcctgattaacatcaatatcgtggatgacaaaatacaaaaattccttgactgcgttgataggatatttttgccgtcgccgccccacgcaggaaatgggtttgtaatcgctccctcgtaaatccgaagggttgaggtagagtggtggcgcccatgtagccttacgagcagatcgatgcgtctcctttgtctaaattgacggaatttgagcgtattgaacaattcatgtaaccaaaaactttttctttatacaaattttacttatcatgtttctgaagtcacagtagcttacaagactttagttagttgttcaggatgaactttaaaccatatgggataagtggttgaaactttcccgagagtggtccaggatggactaaaaaccaataaaaatttt

SEQ ID NO: 1899 - DNA, 442 bp, Changjiang crawfish virus 1
  misc_feature 1..442: note = strain CJLX30787 hypothetical protein 11
  source 1..442: mol_type = genomic DNA
gctgcaagtcccttttgggacttgcagtcagtattattgtttaattgcgttattgagcgtttggtcgtttagaccaacctttagtaatgtttttatgacatctttttctcggcttataaattgccggcttttgcgaaaatttacaactttttcatgccaccaacacttttacgtggtacactcccttttctgttttaggaggctaatctagcttgattagtgagaaaaacaacgtatgtatcttggatatgatccgtttactctatgagtattgacagaaactttttatcttagtttagtaaaactaagcatttctttaaaacaccttagaaatgaccacaggtccttagcatcgactattttatatagttaattttgggagttatagcccaaacactgtaaaatgaactatcagtgaaaagttagtcaaccataccccacc

SEQ ID NO: 1900 - DNA, 444 bp, Nackenback virus
  misc_feature 1..444: note = isolate OTU38 RNA-dependent RNA polymerase gene,1
  source 1..444: mol_type = genomic DNA
agacaacccaactcaagacataagagacaccaacgaacttcaataaatctcttaaaggttgtctcacaagcaggcccaatgataagttaatttaaaaccttttgtctgcttgtgaacctgatatcatcaagaatcgagcgtctaacctgaattttgaatattttgtccctgctgttctcgttggaaaaaggtttgttgtctctatatgcttcttctctttgatttccttattgtaattaaatttaaatctgcgttatatccagattcagatgacaagtttctaattttaccgatagatattctgcataacttatcagctgaacgctcaacctttccaaacctgaattgaacattggtataatccttaagaggtatgtacatctcttaactgttcaaaatatcacatttgatggtgactaacacatatctttcatttaaacagag

SEQ ID NO: 1901 - DNA, 444 bp, Soybean leaf-associated ssRNA virus 1
  misc_feature 1..444: note = isolate SaSSRV1-1, partial1
  source 1..444: mol_type = genomic DNA
gaaaagaaaaggaattgcactcaaagttagttcttcaaaggaagattgcaaagaaagctctagtgatggcaaagatgtagagaattttatcttgaacagagtgtgctgggaaaatttacccgatatttgcacctactaaagcaaaattcgggcgtgtagactctaacccgttcgcgggggtgagcatcctgcctccccgggggccagcatcttcctgtcatgggaagagcggtggcgagcctgcttttagaccggggtcgaaggcttcgtaacgtggcgccacttggtacacgctttgggaaatgatgccacggcttgtcattccttctgattgtcggctgggaagcttgaaatatcttcgggcctgggaaagcccttaaatttcccccttgactggggagatccgtctaacagggggtggtggccaacaccgttcatgaaact

SEQ ID NO: 1902 - DNA, 445 bp, Marmot picobirnavirus
  misc_feature 1..445: note = clone c322866_g1_i1_libraryA_2590 segment I1
  source 1..445: mol_type = genomic DNA
acaaataaatataggaggaagtgtctatgaaaaactgctttcttaccattgtgatggcgataaaacattggattctcagcgtactgttacgtaggtacgcttgtagaaagaaacaaaataggcgaagcttcaaatcgctcacgaagcaacagaaatatataatttataaagactttagggaatcgccctctaaagcaaaaggagaacagtatgaagaaagagatcattgccactaatgttattgaagcgatggaattagttgacgaagatatgcgtcaggtcatgcagagttggtgtcgtcaagatgtgatgtttagacatacaacagctgataaacttgtatctaaaggtgagagatggatcgctacactcactattgacgctaaacgtcctaacattcaattccagtttctaactatctactatatttggaaggtgtctaaag

SEQ ID NO: 1903 - DNA, 445 bp, Beet necrotic yellow vein virus
  misc_feature 1..445: note = isolate YJZP25-5 segment RNA3,1
  source 1..445: mol_type = genomic DNA
aaattcaaaatttaccattacatattggtatttatttaccctcagttggtgatatatgtgaggacgctagcctgttgggtttcctgaccgaccaaatccaagcgagcttaatccaagtacctcgtctcaaattgagtgtcaagtgaataagcatagtgaccccatcgtttcagggtagttgacggctattaatagacatattacagacgcttctctttatttatcaccaacatgggatgtaatgtttatgcgtgagcctatggccgcattgtaaaattagtggttttgaatttctattcttcggaatatacaaggtttaaaagaccagcatttgggttaaaaatttttaaaccttactatctttaactagtaactcgaattcgatttatattcagattttgtatatcaagttgttgtgttttctgatcatcattaagtggccgtc

SEQ ID NO: 1904 - DNA, 445 bp, Hepeviridae sp.
  misc_feature 1..445: note = isolate sbr121hep1 genomic sequence.1
  source 1..445: mol_type = genomic DNA
ttctagtcatcatcaccgtcacgatcatagcaagcagcatttactatggccaccggcgtgcatcacgacgtttgcggtttccgcgagataaatgggcagacgcgatgcctgagctgcatggcgaagccaggcaacaatccatccccttacgggaagcatcaaccggggtgtgagtgggtggctgccatctgcatactcaccggccaaccgaccttccccgtgtgcaagctacactgtagaaaccgctacctttcaaatcaatccgtctgcacgcataccacacacacaccatccactctgtgccccatctgcagcatgaagaacagaactttaccaacagtcagcaagtgctattcagcccatcaggccttcctgggcccactccacgccaaacacaccagagtttgcttgatctgcaagcagcattcggtatgtttagtgtgtg

SEQ ID NO: 1905 - DNA, 445 bp, Scaphoideus titanus bunya-like virus 1
  misc_feature 1..445: note = isolate St_USA segment S,1
  source 1..445: mol_type = genomic DNA
actacagctgcagcacgctgtgcctatatcgtatgatacaatacactcttgaagttaacaaaccagaagacgaagacatagttttaactgtagaggacttatcttataggttatccatttcaagtgagggtcatcccttagagacacaaatatcatattgtaattgtagttgtaattattattatagttattctagtgtgggttactgtagattatcatattttagtagagttattaatatcaatagtagtcttacaatacattattcagggagttatttagaagtgttagcatttgtaaatacaataccacaaagcccattcaagcaggagatttctcacaaagtgatattagatattcacaggtctgtaaggcatcttggtgcactttataataacaacaacacacttagattcatctgcaacaaccctttaccgtcaccacc

SEQ ID NO: 1906 - DNA, 445 bp, unidentified; identical to SEQ ID NO: 488
  source 1..445: mol_type = unassigned DNA; note = Hepatitis GB virus B genomic RNA.1 sequence

SEQ ID NO: 1907 - DNA, 445 bp, Picornavirales sp.
  misc_feature 1..445: note = isolate H3_Bulk_Litter_16_1558 hypothetical1
  source 1..445: mol_type = genomic DNA
ctcgaaatgtgagattggcggcaagagtacgaaaatgatgtttccagtgattttggattgaatcaaactggaagagctattggcaaaggagttctgtaacagcgacatcatcgccagaccgggcactagaaaggcggtatagcgaaccccggggtaaacttgaacgtgctcttccagtacatgggagaaatctccagagtcaatgtgcatgactaccgtaaaaagtacataaacctcgtgccaactgaaattttcaacttcccggactatgacctcgttgttcttcgactaccccctggatctacaggtggattgaccccacaccgttctattgaaaaatgctgcgtaagcgaagtagatgaacacggcaaaccacatccgcccaccatctgggtcaacagaaaactccggtacattaattatgacgtaaacaacaaacactgcc

SEQ ID NO: 1908 - DNA, 446 bp, Sugarcane mild mosaic virus
  misc_feature 1..446: note = isolate PSR07106, complete genome.1
  source 1..446: mol_type = genomic DNA
tctttatctttaccggcacttccagcaaagaagtcattcctgactttctctgttgttccactatcattacgccagcgcccgcgctcccattcctgtaaccccaggctgttgtctagggttcgctcctccaccatcgccacaccagcgccctcgctctccttcctgtaaccccaaacttttgtttagggttcgtttgttctcaaacactctcacgctcaacccgttcgttttcccgtctctgtagaaactctgctctggtgtgtttgacctcagtcacgcactgtttacgcttcttctttttccaaaaacacaaaaagatttgttgtttcgtttctgtagaccagtagtagacttgctcccttttaccccttcccttcttacctttaatcctcaaaggttcttttatctcaatatcgtacatacctttcgccttctagttttccagt

SEQ ID NO: 1909 - DNA, 446 bp, Hubei noda-like virus 4
  misc_feature 1..446: note = strain WHBL72570 hypothetical protein 1 and1
  source 1..446: mol_type = genomic DNA
cctttcgtcttttggtggtggccggcacggtcgcggccgctgccgcgtcaggcggctcgggacagacatatctcgagttcttttttggtcaagtcgggagcgccgtcgcgtacttttacgcctgcgcctcgactggccccttgtcggccatcgccaacaccatttcgaccggtggctggtttaccgccgccgcgggccttttgtgctcgcttttcgtggaactagcgatagcgctcggctggctcactgccaacgcgctgttgctcgccctgggagcggcacattggctcgccgccgccgtgcctttttcctttttctacctctcctgcaacccggtggccgcggtcgcggccgtcgggttggccgtcgccaccgcgtatgtcttgcgccactcgcaccgcgagttttacgcgcggtacgtgggccctttcgtcggagacgccgac

SEQ ID NO: 1910 - DNA, 446 bp, Hubei sobemo-like virus 16
  misc_feature 1..446: note = strain WGML146458 hypothetical protein 11
  source 1..446: mol_type = genomic DNA
acgatctatcacccaattttctcacggaatttggctggcccgatttgcacgggattcgtgactctctttgctatcacgcaaagaaagttcatacgacccgtgcatcgacggttaagccaacggaggatgaattcaataaggtttgtttttatttggagcaagcatatgcgcctattcgctcggccaaattggttgagctgaatcgacccacgctgcgacgaataatcttaacacaactggattggacttcgacccccgggcatccatatcggtgttacggtaccaccaacagggaattgtttaaattcgacggacttgatgttgacgacgcgcgttttgaagtgatatattcggcagttgaagcacgatggcaggaactcctgactcggccttcggcagaccccattaatctcttcatcaagcgtgaacctcacaaaaccaagaaa

SEQ ID NO: 1911 - DNA, 447 bp, Hubei odonate virus 10
  misc_feature 1..447: note = strain QTM133243 hypothetical protein 1,2
  source 1..447: mol_type = genomic DNA
taaagtaaagacagatagcaattgctgggtacaaagaatttatgcagagaatactcatcaaataataggaaagaacgagaaaagcactcaagcaggatacagcacatgttatgtactatttaattgaagatgctgtttcactttaaatcatgcaacattctggaataaggtattgatgcacatataatattcttataatgtgttctgttagacaaaactgtattataatattcgatgacacctgatactttgtgatttcctgtaatctacctatgatatgatggtagagtgaagcatttcatagttgatatacaatcaattgtaaagcaatctattaataaaaagacaagtctccaaaggatcttaaattacatcttatcagaataaggaattcctagtgattcatcaatccttgaatgcccagtcagagataaggcaactataaac

SEQ ID NO: 1912 - DNA, 447 bp, Lactuca sativa picorna-like virus
  misc_feature 1..447: note = strain pt151-pic-8 genomic2
  source 1..447: mol_type = genomic DNA
gggatttatacgagttgcgaccatggggcaaacccccgaaaccctatttagggtggcagttggtcgagcctatccgcgtcctaggagaatattgtgagttgaaatattttccgaagacaatgactcgctgaaataaaaacaaaacaaaatttagtcacatttgttcaagatgaatatggtcagagtgccggttcaggagctatccttgctgacccaaccattattcatacagatgaaggtgattataaagattttttctctcgaccagtcaaaattgcatcatatgattggacagagggtaattctgttactggacaaattagcccgtggactttgtattttcagagtgttcccatagcagcgaaattgcgaggtttttctcgtttgcgtgctaatttgcatatacgtattttactcaatggcagtccatttcggtatggggatatc

SEQ ID NO: 1913 - DNA, 448 bp, Southern pygmy squid flavivirus
  misc_feature 1..448: note = isolate 201405, complete genome.1
  source 1..448: mol_type = genomic DNA
ggagtcgtgccatgtgcaccagcctgtaaaatggccttctttgaagatgttcctaggttaatgaacgtctaaccgcccactctttggttgagacaaaccttctgtgtttgttctgagtaggtaaggttgtgggggtgtgtccccccttgcgaagggaaaaaaggctaatcccttgcaggcggataatggtaagccttgtgtgagcacctgaacttccatgactcgtttgctttaaggggagaggccggatttccttgagctagttaaagttttacccctcaagggatgaagactagtcgcggtagtaaccttcatcagctttaacttttcccatcgaaaaaaccgtggggaaccccaagctagcccaaaggtgcttggggaggttgccagtgaccgccagaggataacctgggcacactggtatcaaatctaattattaattctcact

SEQ ID NO: 1914 - DNA, 448 bp, Culex Iflavi-like virus 1
  misc_feature 1..448: note = strain CIVL1/Sutter, complete genome.1
  source 1..448: mol_type = genomic DNA
acacatacttgtctagcacctgcattccaaggagtattagcgaaaacctttttcttaaaaccaattcttaattttaagtacaaccctcgcagaacttacaaatcgtgctcacgccttttgttatgtttagttaatttgtagttgaagaatttggacgaataatataacgtgcttattattcacgagaccctctaacgtttttaacgcattgatctcgtaaaatctgaagactgatcttacattgacattaaattaaacaaaagaaacgcaccacgacagtagtgtggccttactgttaaaacaactaggcctaacgagtatttctaactgtgacgttcgatgaatcattccgaactatgtactaactgatctaaatcgttgttctacaaggaccgtttcaccgcctcaatagatcctaactatagaggaaaagaaacaacaaacaaac

SEQ ID NO: 1915 - DNA, 448 bp, Bivalve RNA virus G2
  misc_feature 1..448: note = partial genome.1
  source 1..448: mol_type = genomic DNA
aaaacccacgtttctaagtttactcgccggccaagaatggctactggaggcacgttggaagctacttatttctagcataacaagttcagtgtcgaggttctgccctatgtttgcagatttaaggtgctgggtacgcttttaggtctgaggaccaagaattacctttactactgtacaatatcaacatgttcgctccgcgttcgggagcccaccctactgtaatttcgaaaaacagtatatagggcctagcaacatcaccacgatttgcgctggtgtgagctggggtctatgttacccaggtgggaatttcattccttatttcaaggtaaggatgatcttaggggttgagataccccacgctacttgagggcatggcctatccatgacttgcgctaaaaattacgttgcgtatagtaatcacgttcccatttctctcaaaccatgaaaa

SEQ ID NO: 1916 - DNA, 448 bp, Sanxia atyid shrimp virus 3
  misc_feature 1..448: note = strain SXXX37589 hypothetical protein 12
  source 1..448: mol_type = genomic DNA
aataccggcgtcacgagtaaggaacgtgtggacagggcggcctgtggactcgtaactatttagttttaccacctaggaccgagtttaaattgtccagggaagtggcgtcactcacgccttgttgagtcgcaaggcgtgtgtgaaatgactcgccgaaactacagaccatattaagagagtagctactgagactagcagagatgagactgaggtttgtgaggttattgaaggtctcacaataaataatgacgcccaacccactggagtgaccagcttcttgcaagaggcatgttcatcagtggaagttttgggtaaacatcacaaaccgcctcaagttttgaattatcaagaagatgttcagaacttgactgattattttaaaagaccccggttgatatccagaggggctttggctttgtcttccattgcttctcaagggcagtgggat

SEQ ID NO: 1917 - DNA, 450 bp, Wenzhou picorna-like virus 23
  misc_feature 1..450: note = strain WZFSL85852 hypothetical1
  source 1..450: mol_type = genomic DNA
tgcccatacggcatccttgttgatagtttcacctttcgaggtgacgtcgaccgaaattcctgtttatctaggttgtaatctagtctattagtgtaattgtacatatttatttatacactatgtaaatatttgtaatatattccccagcggatttgtaatatagttagttttgttagttttccttgagaatttctttttctcaaattttagcaatcgaaccctattggatggcattttggaattgaacgacgcgaatgttcacttcttcgtagtctgaccccatttccatttttccattagttcgctggttttgcgttacgccttttgtaccttaaaaagatatgtgctgcgcactttggtctggactagacctaataaaacttgttccccgttgtgcttatgtgagtaacgcacgagtacgtaactcaaagactcacatatattttaatt

SEQ ID NO: 1918 - DNA, 451 bp, Guangdong red-banded snake picornavirus
  misc_feature 1..451: note = strain LPSG108441
  source 1..451: mol_type = genomic DNA
ccttagggttatttttattgtaactagttggaacaatttacaacaactaagctactttacctccggtctcatgtagacatttggggtgactgtcatgcggtggaacacttcctgtccgtttgtacatggtatttggtttcactgatggctttgtcgctaccatctaaatgcttgagttctttttggatgataacaatattcttgtttcttggttggattatgtttgcctggcagaaaggtgttaaccatgcactaagtatgacatgcaattcccagccaagggcgaactgtacattgttgagtgcacgttagatgttagctagggaactagcttaaccaggatatatccgacattgatacgttggtagtgggggttgctaccatttatgcacacagcctgatagggtcttgaccagagataatgtgcagtataattggtctgtccgtataa

SEQ ID NO: 1919 - DNA, 451 bp, Beihai picorna-like virus 30
  misc_feature 1..451: note = strain BHNXC41477 hypothetical protein2
  source 1..451: mol_type = genomic DNA
gtctggtgcggtaccgactcagcagcgcctggaactcaggcgcacagggctttgtagctgcagatgtcttctttttcctgtaactacaagcaatgtggacgaggggccacaacagcaatccaatcccccacaaggtagcgcaccggccgtgaataagccggtagagtatggatttactccacccgaaatctccaaggatcagaacgtaaaattcttggatgccgaggtaggcacgggtgatacacgtggtaccccttccgatcctctccgtgattctactttgatcggagatgccggattgggtgatttcttcaagcgacctataaagatagcgagttttgactgggccacttctgtcaaactcaatgaacgtttcaatccgtggcggttcttttgggaagatcgtagggtgattaatcgtattgccaattacaaactcctgaaggccacc

SEQ ID NO: 1920 - DNA, 452 bp, Erysiphales associated totivirus 22
  misc_feature 1..452: note = isolate PM-A_DN31210 coat1
  source 1..452: mol_type = genomic DNA
aaaacgaagaaactacctctcacaagttgggagagaagctgtatagaaactcaccctcggtaaacattcttacggactttgaacaagagctagtttcgtacaactactcacaaaagagtgaacgcactgtcacgcatgcctggggttctaacttggttccctcaagcatacgcgtgtgtggtgggcgcgtgtatgcctcaccatttgaagatgctactcatgtctacctcagaccgtacgcaggaagggcatgggaaggcgaagacgtctggctgcatatactcggctgcagcacgcttgccactgtgataacgattgccgggcgtaagcactcctattacaagctagatcagtactgccggtattcagatccttcgattattgctgtagtatcacgacacttgacggggctgtttgagtcactaaacttcaaccagcctaatgatgatact

SEQ ID NO: 1921 - DNA, 452 bp, Bombus-associated virus Pic1
  misc_feature 1..452: note = putative structral polyprotein gene,1R
  source 1..452: mol_type = genomic DNA
tatctcacgtcgctcgtacgcaaacgttttacaccagattcgcttggtctacaacggctacagcaggttcagtgttgtttagcgcgcccatcaccccaaacttctatcgttatactatatccgccgctcagtacgcccctacaactttagcgtataccgcagctgcttttaggcaatggagaggtggaattaatttcaattttaaatttgttaaaactaaatttcattctggtagagtaagaattatttatgtgcctggagattattcagcgggcacaacgcttcctgacagctttgatatagacgctaattattcaactgtggtcgatcttcgatcagatacagatgtggaatttaatgtaccgtatgttgctattcaacaatggttgttagtcgataatgctttccctggcacatcgcgtacgaatttgtttagtactggcaccatttat

SEQ ID NO: 1922 - DNA, 452 bp, Wenzhou tombus-like virus 1
  misc_feature 1..452: note = strain RGYQSMGReov43160 hypothetical1
  source 1..452: mol_type = genomic DNA
tgggagtgtatgagcccttacaaaccttgtgaggatgatacgcgatcgcagtcccgacttgtctccagacgaggttagacaggaagcagtgttgcgggtccgacgggcccggacagctcctgagctagtctggggcctattcgacgctgtgaacaacgcctgggaaggcacccctggacagttcgcgagtacgtgctgggatctctccgcgcttctgcgccacatggccatcggcgccaacgggcgagtgcagacagtccggagatcagaccggtgcttagcaagagccgtccttgaaaacgcatttgggaggagcattaggcgcaacctaagccttcaccgctcctaccgccatcttcccaggaatccaaccctgcgcgaggctttcctcgctgagagattggtggcattggaacgccgaatagttcactacacggtgacctggtcggacg

SEQ ID NO: 1923 - DNA, 453 bp, Sclerotinia sclerotiorum hypovirus 2
  misc_feature 1..453: note = isolate SsHV2 RNA-dependent1
  source 1..453: mol_type = genomic DNA
aaagatgttttcattaatcagtgaacgaaagttaggggatggtactcttagggttgatctataaagatcctaactaggaggaaacatggccctgtctcgtgatgatttctttgttcaatcactaaagcttctcttcaccaaaaaggagagagctttgagagcttagctgtttcagctatttgaaccccgaaggattcatgtcatagacatttgacttctatttgaagtcgttcattcgttcatccgaagatgtaaaactactgcgcatgtgcgtgatggtcctgaattttcagagtagaacggcagggatgattgttctgtggagtagtgccctagaagaacaaatcctcattcccactcttgaaagtggcccatggcaacccgtgatgcccggatcgtcttctggacgtaaaaggttagaggctacgagagactgtagagaccttggtcaaa

SEQ ID NO: 1924 - DNA, 453 bp, Beihai picorna-like virus 7
  misc_feature 1..453: note = strain BHNXC41478 hypothetical protein1
  source 1..453: mol_type = genomic DNA
ctgcagggtattcaccctgcagtcttgttggaatatttgatagtatgctacttatgataattagctcgttcgggtattctaacccgtcgacttaattacatagctagtatggtattgtatgtattttgacattttaatctaccttttttgttattttattatggttaaattaaaatatcgccttttcgtcttccaaaagacacaaaactattggttctgacttcgcatgatcaggtaattaacacttcgtgtaatgcaatctccagtactttacagctgattcaaactggattaacaacttttggaatcgccgctaatacacgttacgtatatgacgtgccctttgatggtacgcaaggtgtctgtcctttttacagaacgcggtttaatgggctattatatgccggccatgcaccgaagcactatttgtgcaagcaaaacaggtacgctcct

SEQ ID NO: 1925 - DNA, 454 bp, Botrytis cinerea fusarivirus 1
  misc_feature 1..454: note = complete genome.2
  source 1..454: mol_type = genomic DNA
gttagaagccgtctagctctcgacgttaaattgagcagacatttcgtttaagaagggggctagagaggtagcctggtgtaattcctcaccccttaaaaagttggttcgcagccatccatattcttaaacggtccagaaagtgtaaactggaacctgtgaaaattaaactaaggtggtgacttagataacctgttgtgagtggacgctcaccctcaagtgaagaaagctggatttgtacaggaaggcacttagtaagggtgtgggtgttagatgacgagtgaactgagggacccaaaaggttgcataccagctcggcatctgcccacacttctgaaacagtgagcaccccaacaaggaaggttctccaagcttgattgacagatgtgtccactgaccgggcgaaagtgccctgacggtcgtgaaagcacggcaaaacccactaacatcactcatc

SEQ ID NO: 1926 - DNA, 455 bp, Phlebiopsis gigantea mycovirus dsRNA 1
  misc_feature 1..455: note = complete genome.2
  source 1..455: mol_type = genomic DNA
gccccttcttcgtaggcagtaaacctaatactgcctctaagttctctgtgtccggacgcgcggctgtaaaccgcgacgctgacctcgatatcctgctggcgggatgtcgtgcaacaaaaaattcaaaaatatggacggaagcggtcctgaggagacgtcacgaaacggctggtccgtcggccgcgagtgcagctgggctgtgcaatcaacaactgctggtggatagtaccccgaacccccctattagtgatgctggacccaccggtgctggcccaagagctaagctttctgcgcgagcttctcgtttgcgcgtctgcgaccccacggttggcgccaccgggaccggcggaacgaacggtgtgcacggttccctctgtccacctgttaccgcgggcgttccttgtacggaacggcctgtattcaaagccacccctgccatatcgcaggctccgtcc

SEQ ID NO: 1927 - DNA, 455 bp, Robinvale bee virus 1
  misc_feature 1..455: note = isolate VN1-10 nonstructural polyprotein and1
  source 1..455: mol_type = genomic DNA
ctacccgcatttatgtaggctctaagagttaccttatgattggacacagtttatgagtgatttggactctttccgaatttgatatattttaaaattcttacaatttagagagaatacgaacgcgatggaccttgagaaaatcttagctagtaattgaatctttattgcgtaagaatgagatgaacggaaccttaccaatcccaacccaaatatggaggagctattgcctctttcctgagggcggaaatcagtattaaccgacgtaaacccaaacccaaacccaaaccgaaaccgctaacctgaactctgcactactctacttggaacgcaaaggaaaaatttcactagaccaatgctgttcacgacattgtgaacgcccatattttgtttatcgatttggaagacaagctgtcatcaaaacacttgatgagtgcattcttacggtcgacactccc

SEQ ID NO: 1928 - DNA, 455 bp, Wenzhou tombus-like virus 6
  misc_feature 1..455: note = strain WZFSL85189 hypothetical protein1
  source 1..455: mol_type = genomic DNA
acgggctctgcactgcgcctggttttaaatctcctttctgtattttgggagtaccaggtatcagtgtaacggcgggagcccgattacgtaaggatagtagtaatattaggtatttaacacaaaccagcctaggactaccattccaagcccctgaagcaagcctacacaatgcgctcgttgcgatagaacgccgggttttcacagtaggaaagggctccgagataatcctcccaccacaagcacaacatggtatttttgaggaactcggctacttcagagatgaggtagtacgtcattcggggtattgtaggaaattcagcgaggtcgagctcgccaattcgtaccattctggcaaaagatcccagtactacaaagcaattgcttcattaaagactcgtccatacgaagaaaaggatagctttgtcacagcatttatcaaaaaagaaaagcactgg

SEQ ID NO: 1929 - DNA, 456 bp, Hubei coleoptera virus 3
  misc_feature 1..456: note = strain QCM109726 putative glycoprotein,1
  source 1..456: mol_type = genomic DNA
cctacttctttatgggctattttaaaacttgagttggactaatatattttcataatgtctaatgatagggttgagtctctccatcagatcagaaacaaatctttgccaagccaaaaatacaagactccagataaaaaaccagacttagatgttgacaagcgtttggcaatcattgagtcgaagttagattctgccttggctctaatcagacaattagtccaacttaaaaatgctgaagcttcaaataataatactgttaaatcttctgcacctcctatgtatccccatcttcctcacaccacccagcctagctatgttactgcattccaattgcccaagccttattaggttagcataaaaagtttaataaaaatggctgtaaattagctattttaaaagtaatatcgcttttaccctctttattaccaaaccagctatttttcagctatctcaatc

SEQ ID NO: 1930 - DNA, 456 bp, Solenopsis invicta virus 4
  misc_feature 1..456: note = isolate Gainesville-Sin, complete1
  source 1..456: mol_type = genomic DNA
cagcctctgaagcttttgaagctgaagaaggtattgaaagcggagttaaagttggtgagtcatttggaggaccattaggaatcggtgcaatcattcttcaatcattaggtgatgtaacaacaaacgcactaactgctggaatgaaagagactcaagctagcgattatacacagaatgcaacgcaacaaggaattggagcacagttgcaagctggtttaattgaaaagaatgaaactgccactattgatcaagtatctgctgtttctaaaggatttgatcttttgggacctgctggtgctggaattggttatgcaattggacaagcggcttttcaacctggagatccttatttgaatacagtcaactcctttaatggaatgacgaaccctcaagacactggaattgtacagtcactgaatactgatagtgcaagcggtgcaacacaacaagtagaaa

SEQ ID NO: 1931 - DNA, 456 bp, Trichosanthes kirilowii picorna-like virus
  misc_feature 1..456: note = strain pt111-pic-61
  source 1..456: mol_type = genomic DNA
actatatgtaagggagaaagccgtggctgattcgctagaactttgttcaataggactgttcttttacgttttgtaacgtagtggaggttaggtccgcaaatgaaagctgcctttggaaatatagtaatgtaaacctttatagaagtataaagtggaggtctttatcgaactcttgttcattctcctcccattctcacatgttagtgggaaataatttaaaatggatttttctgtttgaagtttgagaaactaataatagaagtagcaactaccaccgaggtggaaaaacgtcattgagttgtgcgaaagttgtatttcgatgatttagaggtctatcaaatgaatggcagattttgaagtttcaaattactttgtgtttggaactctgttattaacataaagcgtcgaattggagacgttaaatcgaactttttcttattatttaaaccaatcaat

SEQ ID NO: 1932 - DNA, 457 bp, Partitiviridae sp.
  misc_feature 1..457: note = isolate H4_Bulk_46_scaffold_395 RNA-dependent1R
  source 1..457: mol_type = genomic DNA
taattatacataagttctccttgttttaaataaattatatttaaaactaaatatattagttggtgttcatgtgagactcaaagaagcattaaagaagtttgacttcgtcaaacgtcttaaaatacctgagaagctatatcctacgatagtagctaatttagctgccgtacttaagggctcagacaataagtacattacacctttgggtaaaacacacgatcctatcgaattaatcgtagcttgggatgaagtattccaagctaatgcacataaactaaacgctcctttactagacattgaagcagagcaacggcgcaagtttggacctcgttcaagggctaagccatgggttgaaagaaaaccaggtttattagcctcatttcatagtcagattgataattttacgccacctttcttcaaattcgaagatggtgaacataatttatgtcctctttct

SEQ ID NO: 1933 - DNA, 457 bp, Trichosanthes kirilowii picorna-like virus
  misc_feature 1..457: note = strain pt111-pil-51
  source 1..457: mol_type = genomic DNA
tccaaaacttatggtttggatttaggcaagttttacttgtgctttcttgatcttgtttttggcattactaggttaatagtgtattgatttagtttttatatttcaggtagttaggcgagatgctctactagcagtcctaccgtttacaagtatagaaatgatagttggttacttttagcttttagtacttagatggatgaaagatgtgtagcatattttagtatgatttatgatacacttaagttattgaaaagtaaatcttgggttccaccagtttctttgattaaataccatcggcaaaattcttagctcattaatctttcttcctgaagttcagttttaactgagcgtaacagagattgtatttaatgcaacattagtaagattttggcctgtatttgttagagaactacagcgaataaaattcctaagtgttttctttaatgacatcaggaag

SEQ ID NO: 1934 - DNA, 457 bp, Beihai picorna-like virus 69
  misc_feature 1..457: note = strain HOU158647 hypothetical protein1
  source 1..457: mol_type = genomic DNA
aaaggatggaagattgaaaaactggaactgtatttagtgaaagagaacaactgaaaaggttgcagttttaaaccaaaatgatctcagttatgagagaaattcggtattaaatctatcacccattttcctgattgaccctagttggtgtcaactgtaatttgttttgtttatttgttgttttatgtgttaatgttactaagtttttgtgaatatgatgggaaagcaaccgctctaactccaggagatgtacctgcccgagggtaagggaacctttgtaacggttttagatgttagtaagtactatagttcacgaagattgagtatactgcgctggagtggggatggcagcgcttaattaattatcttcccccggatggcagtccgttagccactatgtggtagccgatgctttggcaaggcatcgacataccctagtacgcaatgccagtatgagtgt

SEQ ID NO: 1935 - DNA, 458 bp, Marmot picobirnavirus
  misc_feature 1..458: note = clone c329629_g1_i1_libraryA_2570 segment I1
  source 1..458: mol_type = genomic DNA
tctttacatctatattatctttaattctttattctattccaaacaaatgttctaattcgttctctagtaaagaaatggacaagtacgtccttggagaacactaattggaacaaattacaaagaagtcttgaagcaattagtcctaggagattagtgtaggacggaaactttacttcaagcaaataacatccagaaaggagggtgatttgacacagaatcagatcaactaccaaagaacgctagaagataggcgttcacatcttgcgaacgagaaagagacgaaccgagctaacactgctcgggaaacagaagaacatcggtccaacgtagcgcgcgaatatgagaccaatcgatctaacgtcgcaagagagacagagactcatagagcaaatttggttcaagaaaatttgacgtctcgtagagaccaggaaacgcgtagatctaatctagcgcgggaa

SEQ ID NO: 1936 - DNA, 458 bp, Wuhan house centipede virus 1
  misc_feature 1..458: note = 01BaA1 genes for replicase,2
  source 1..458: mol_type = genomic DNA
cttccggttgccgacgcttccctcagttataaagattatcttaacgaaaaaatttttctcgctcctcctcaacctcctataagaaatcaaacctcggtctctccggccttaagtactactactgccgttagtgtcccgactacaacacccgagatcgttactacatctcgtccgataccatctactactagaaagtcgagaccagtccctccatcttccattcctccatacatcgattgcggatgtctcgaaccacatcagtgcggtcctcctttaggcctccctcagaatgaccctcgtatgtctcgtgattaccctagggtttattcacctaactgcaattggtctgatggaaaacctcaggacacctatataagacctcctgacactcgcaatcgtcatcaaaatcaacgatcccgcaatatttaatttgaatataatttatcaattctataaaa

SEQ ID NO: 1937 - DNA, 458 bp, Wenling narna-like virus 8
  misc_feature 1..458: note = strain WLJQ103992 RNA-dependent RNA1R
  source 1..458: mol_type = genomic DNA
gtgtcatctgcgtgggcagaagatcttgtccacccaagtgcgaccgcaaggtcgcgcctggccgatccagggagccaaagcacgaagccctcccgtgcgggcccgggggcagagaaataacatctctctgtcagccgggactcgtattcggagagcaagcgctgaacgctcccgctagcgggaacaagggacaccgaagggagacgacccccaggcacgcccttattcgcctcaagtccgcggaacatcttgcggactctcacggcgatctggcggggggcaacccggaactcgtcgcggggctggcgctcaggtcccaggagcattctgagctcccgggccatacgagtcgtcagttgctcgacacagtccactgtgccgagctcagagcctttgccctcgaaggggactttccccctcttgcaggcaacggcgctgaccgcgagcttgtgccgggt

SEQ ID NO: 1938 - DNA, 459 bp, Colletotrichum eremochloae totivirus 1
  misc_feature 1..459: note = strain CeTv1CBS 129661,1
  source 1..459: mol_type = genomic DNA
caaactcacaatttgggggactctgccacaccgtggatgacggcctagattgcgccgttattgacgtcgtgtatggcgttgttgtcgtcccatgcccggccggcccccccctccactcttcggtggtgtgcggtgccgcccggcgtggccggttcatccccatatacgcttcgtcaatgacgagcgccatcgtggccggctcacatcctgggcagggggtccgtcgccgctcgactcttgttgacaaagcggcaaaccgcagcgcagcggttgtgacgtcattttgcgcgcagaaccttggggtgcgcacccataggccataccatccgaacagggtggctccctggctgaaaagtggttctttggtacacggagtagggagggctacggcctccgttgatcccgtgtgtcaacgaattatctgctcgcaatcttcaccttgtttaccccccccaagcc

SEQ ID NO: 1939 - DNA, 460 bp, Chinese broad-headed pond turtle arterivirus
  misc_feature 1..460: note = strain WHWGC150683 1ab1
  source 1..460: mol_type = genomic DNA
gtggaaaccccgcggatatctctgaggcggcagcctgtgtacaggtactgccgacccttctatagcgactccaaactcgacccgcccctagcctgacaacgtcaggaaggcaagccttgaaaagcctccgtaaccgtccaacggaggtggtcgtgctttgcagcgctcgttcttagtcagcgacccaaactcagttgaccatcgtttcagactcgagagggcgtgccctcatctgactcgacttctgagatctagctgacggtctgtgaccttcatcaacggaccattattttctacttagttgctcaccaggctaaacgcgagtgttctcgcgcactaagtatacttaaaatcctatttgctctgacgttatagagcttaggttcagtgttttatacactgatctccatcaatctccacgacatctcagtgttgtctcctgtgatcctaactactggta

SEQ ID NO: 1940 - DNA, 461 bp, Marburg marburgvirus
  misc_feature 1..461: note = isolate Marburg3
  source 1..461: mol_type = genomic DNA
aatgatgctcaaataaaacagaagtccatctgtataaggagtatggcttaaatgggtatttgtcagattcttaagagattagtttgtattgatttaaataatgctttaaccttacattgctgctttaaatggttgattaagctgattagcttgtaatatataatctcttctgggccatcagatctgtaatgggtttactagattatatacaagacacagtaatattttataaacaattcttgctcagttttgctttgatttaataacatacatcattgtgcctttcattgctaggtcaacccaactgataatgatattccttctgaaatagtaagaaaaactaatgaagaacattaattactgggtaaaagtgattaagttctttaaatttgatcaaagtaatattttgtcagtgaatatattctcatatcacttgattaaaaacaggaaattatcctaac

SEQ ID NO: 1941 - DNA, 461 bp, Plasmopara viticola lesion associated dicistro-like virus 1
  misc_feature 1..461: note = isolate1
  source 1..461: mol_type = genomic DNA
gcaaggtttatctcttcggagtttttacttgtatcggagacagttctggaccattcctgcggaattcgctaatgatcgtgaataacaccaacggaaaagtttgtatctctactgtagaaatctccaaccccaaaccccaacccccaattttaaactcatggacgaaggagtataactttcccaaactcatagtattgagtataactatactagtcagtaaaagactttaatccgacacacgtagtgtcgttaaatgaattctatttgtatcaaatagtcttatctccccgtaaccaacacgaaaatattgaacgtttcgtactaagttacatggatgtgatcttgctagattatactgacgacaaattctagtaatgctatccaactacaagagccctatttagggatggcctcttcgcagcagccctgcaaactgccactcgtcaacctgcttcgactct

SEQ ID NO: 1942 - DNA, 461 bp, Picornavirales sp.
  misc_feature 1..461: note = isolate rfb094shi2 genomic sequence.1
  source 1..461: mol_type = genomic DNA
catcatggaattttggagctatcaccgataggcttaaaaattgggtgaaaagtatgagtaaagactgcattcagttttttattgattctccattcgtggctggactcctttctattattgctggaattgctcaattccttggattgtatatggttatgcctactacaagaactggaattgctgcccttgttgataagtttcagaactcaacaagaaccatgcattatgcgaggaatgggttcaaaggagtaatggattcggtaaaggactgttttgcatgttgtaaggacatgttgggcatttcaaataatgcggaacttgaaaagtttaaagaacaggtcacccaatcattggagctttgtcgtgatatgttaataacagcacagtcaaaaccaggaacatttgtaaatgattcacagagatatgtcggatgcagaaaaagagtataggagacgtcatct

SEQ ID NO: 1943 - DNA, 461 bp, Sanxia picorna-like virus 11
  misc_feature 1..461: note = strain SXXX37695 hypothetical protein1
  source 1..461: mol_type = genomic DNA
cgtgtatattgtatagtatatgcgtaaaatttatttgcccgacttacgacggatttcgtttgacgagcaggagcgttgacttctgcacaaagtatgatacaaaagttagagtattcacgccttactattatagtgacgcttcatttatttttattttcatattatttcgttaaactttttcgttaaaagttaatttatatagtatagagagctggacttacattgtcttcgcttttatgcgtgcttagttagagctggattgctcacgacgtatgtgtttaagttgagattgtgtgtgaaattttcagtagctttatatagggggatatcaaacctccaacccaattagaatttgcgcttttaattggcacttgaaagtagtgatgtaagcaaataaccttgtgtgggatggctcccacacattgtatggcccgtcggcattgccgtcaatcgtaacacct

SEQ ID NO: 1944 - DNA, 461 bp, Hubei polero-like virus 1
  misc_feature 1..461: note = strain WHCC118254 hypothetical protein 1,1
  source 1..461: mol_type = genomic DNA
aatccttgcggctacaagccgcgagatggctggaccgcgcccagcatgctaaaatcccctcgactgaggagcgggagcgcgtgattgctaagaccgtgagggcgttctcaaacgcacaaacaaatggccccacggcaaccagagatggacggctgacctggagaaactttctccaggatttcaaaagtgcagtgttctccctggagtttgacgccggcatcggcgtcccgtacatcgcgtacggtaagcctacccacagggggtggattgaagatccacgacttctcccagtgttagctcgcctggttttcgaccgattacagaagttgtcggaaattaggtttgaagatctttccgctgaggagctagtccaggctggactctgtgatcccattcgactatttgtcaagggggaaccacacaaacaagccaaactcgatgaggggcgctaccgcctcatc

SEQ ID NO: 1945 - DNA, 462 bp, Wenzhou picorna-like virus 17
  misc_feature 1..462: note = strain WZSBei69283 hypothetical1
  source 1..462: mol_type = genomic DNA
ggtgaatccccccctcttcctctaacgtctattagcaggtagatgtgtcttctcttattttgaagatgaacatactgtggattctcgagtgtattgtggctacacaatatagctcaaagagctttttagcgagtgtgtattcgctagattgcacactcaaactattaagttctggatttggtgactatttcagaacatttctttgttcgtatgtattatatgtaatatattctgaatttaaggttgcactttggtggttcgtcctacgcaggaatcaccatgcaaattcaaaagttttgtcattccctatacttcgggcaaaacttcaacaatattttattgttaattatagggcggtctagtatcaatcgttatatgacctaaatatgtagtatgcacgccactacgtatttagtattttaagtgcagcacctagctcaaggttatgagcccttatataaa

SEQ ID NO: 1946 - DNA, 462 bp, Hubei dimarhabdovirus virus 4
  misc_feature 1..462: note = strain SCM46012 RNA-dependent RNA1
  source 1..462: mol_type = genomic DNA
tgggaaatgaagatggtgtgtatttatttatttatttattaagttaatgtttaatattccaagttctatatttgtttaactgtgtgcgtttccttagatattgatctactctcttttaactttatctcagttgttcttgacaacttcattaagttgatccgagtcctgtcatatagtcaatcgtatgggaagtaccaatacccttcttaatcccaacgagtgagatgacaataacagcatttggcgttccatgctgttttagcaggaatgtcttattgactcgggaatatttacttggtaattgatgtgataaactggtcaagtgcctgcgataatgacacacgtatacaatcaaaatgaggcctaaatacggcttttaattggtgctatgcttcgaagcaatgatacaatgatataacattacatcaaattagatcctgaaaaaaactaacagacctaaag

SEQ ID NO: 1947 - DNA, 463 bp, Beihai picorna-like virus 11
  misc_feature 1..463: note = strain BHZY60905 hypothetical protein2
  source 1..463: mol_type = genomic DNA
ttcatattgcataccgaccgtcatgtctttaaactgtccggaggcgctgcggtagtgtcgtcgttactagaatgaaaccaaagccgaactcaacattgattacagatgttatgtatggtctagcacataccatgcaagcagactgctttgttgagacaagaatgacgcgaacatgcgagtaggtatttacttacagtggtttatagccccacaaacaaaggtgtgaataggcagacacaatgatgcatgtgtctgacccgtatcaacaaatcgcattagtaattttacaaattttattacagagccaacgatctctataaaccgtacactatacaaaccccagtccggtgcactgggtactattcaagaagaaggtgttgcaaatcttacggcacaaatcactaactttgaggagcaagatgctggttggaccacatctattggcgcaggttgggattctacg

SEQ ID NO: 1948 - DNA, 464 bp, Hibiscus green spot virus 2
  misc_feature 1..464: note = isolate WAI 1-1 segment RNA3, complete1
  source 1..464: mol_type = genomic DNA
cataaaattcaaacaattctactgaggtgatcccttggtagtcttattttgtccggcgacgaggggtttggccgttatcaccctagacgctgtagtcatcaggtactggcacctgtactggagaggggctgcacgttgccatgctcggtgtggacgcgagatagtgctatcgcatccgagagctggtgtcctggggactgcctggggcgtagctacactattatatatatatgttggatcgatctgaggcaaaagtccactgcttttcattatatacgtttggactaccggttagcgggtggtacgattagggacgcctgataacctttcgtatctgtcagtgtgataatagtgctttagggtaagtggtgccgacttgtcggttttggtcgtggtcatttggcctggatgtgtttaggtaaggttgtgtattggttgttgcatcttgtctttgggacctcgaa

SEQ ID NO: 1949 - DNA, 464 bp, Wenling fish picornavirus 1
  misc_feature 1..464: note = strain XYHYC180303 polyprotein gene,1
  source 1..464: mol_type = genomic DNA
gggggaccatcgacttatactcgatgctttccccctctccttttcaacgtcctgggcacgatacgcccaaccctactaatcaagcttgctagatttgctggtaagacccgtttggtaacgtaattacccgtaacgaatctaagaggtttggctggacttagtacctattaagatatgccttccggttatgtctcgagctctgctgtggaacaacacttggtaacaagtgccccagcagttagtgatctatccggttgaaacagtcttattgtgggaacagtttaagtattccgattacattcggcgtgaccttacgcagtgcacggacggatagtaccctcctttaggatcgaatccgttctttaggcccctcttggcatcctagcgagtcacctctccgtgacaagatagtgctgtattggcaaatattttcactttttaccaaaaactttcatgatgacaaa

SEQ ID NO: 1950 - DNA, 464 bp, Wenzhou picorna-like virus 5
  misc_feature 1..464: note = strain BHZC35527 hypothetical protein2
  source 1..464: mol_type = genomic DNA
gtgccttaaacctattcacccagttttgagtctgggctctacggaaaagcaaaacttcatgtgtatatatggataccaattctcgcacaaattttgtgtacttttatgtgttagaattaggctttgtacataaagacaatctgcctgcggattacccctatttaggggagagtttcgtctactcaatgtaaactacaccactcctagcactaagcaatgcctggagattgtaaataccgcttactaataatgtaaataataataataataatatatatacatcgggtattacgtacccaacaatttttgaaattttgtcagacctcaggaaatacaaaattaatccaaaccgttttgataaactatggcataaacatagatgggaattagggaaaactgtttcatcatttgatggagtggagattcctcctaaaagagtgaaccaacgcctagttaaccaggtt

SEQ ID NO: 1951 - DNA, 465 bp, Wenzhou picorna-like virus 31
  misc_feature 1..465: note = strain WZFSL72092 hypothetical1
  source 1..465: mol_type = genomic DNA
gtgttagttcactagggttttatattaccgtagtccatgccgcgttagtgctgggcgttttgtgccatgaaacggtacttagtttgcgtttgttttgagagtgtgagctgagtgaaaatatttattctttgatgatatatacgtacgaagtactatttaagtatgtgtatagcttcgggttggcaatatacccgttacttattgattggccgatatttttaagcggttggagtaaattgcatcgcatcatgtaaacaagaaaatgttcctgtttttgtggtatttcaccgtaagactcagtgttgagcagggtcatatcatatttacagtgtttgaattattgtagatggtggcatgcatttgtagccaattgtcggttcgttattgaacccccaagcttgcgatggtagtagcaagttgagccgggataggccggtggttacactatcaaacaactcagcagtg

SEQ ID NO: 1952 - DNA, 466 bp, Leucocoprinus gammaflexivirus E
  misc_feature 1..466: note = isolate Won, partial genome.1
  source 1..466: mol_type = genomic DNA
cccccccttcgtaaaaatttgcggcaattacctccaagctcgaccacacgaacgagctttcacgttcgtgacttatactgattccctccgaggtcacatcaaatctcaacttaaaactttcggtgacgtggagggacatcacatcaagacgtgggaactggctctgctccaaccatgcaacccaatcgtcatctttgacgacgttggtctagctcctcctttgttggacttattccttatcacccaccccaacgttaaacactttttctttaccggagaccccgcccaaccccaatacaacgcctacaagcgcttccctaatgccccctttgtacccgataaccttaccattctcgctcaatcagcttgtcgttacttccgagaaactcgccgggtcccaatcgctactgcttccgctcttgggctaaacacctcatccaccgctgagggtggccttggactctcc

SEQ ID NO: 1953 - DNA, 466 bp, Hainan oriental leaf-toed gecko picornavirus
  misc_feature 1..466: note = strain LPXYC2131221
  source 1..466: mol_type = genomic DNA
gccacacgggggtttaattactcccgtgtggttcgctttggacagggtttttgctatgccctggggaatttcttcccgaaatagccttctgcagttcagagtagtagctggactgtgggagttcttttctttctttttcttactttatgtttgtttgtttaaggtttgatataatggttttatgtaatgtagtagccagtacgctggtgagcctacgtcaagattttattagagggccgtcctgtcctcgaatgttattgatgggtatgtcaggtgggttaaaccatttggcgggcagtcactggctaaagggcgtactagtgattctacttgtgcatgacatgatggttctgtaagtcgcagagtggagtacggacctggatgatgctgctgaccagtggggccttatcccctgccgtttttacgcaattggcggtatgggtggtagttgcagtagctcagtatt

SEQ ID NO: 1954 - DNA, 466 bp, Blacklegged tick picorna-like virus 2
  misc_feature 1..466: note = isolate RTS-11.2 hypothetical1
  source 1..466: mol_type = genomic DNA
ggggtgtcgctgtgtgacaaaacaaccacttttttctgacttaaagctacgaaagcagcatcgaacaaagtcttagacaaagtgccaagtgctccatgtagctttaagtcagaaaaaagtggttgttttgtcacacagcgacaccccgcatgataccagtcagttcggaattcaattcttccaggatagtgtgcaggtgcatccaaaaagcgccgtgcgccatttaccagcggaaatttcacctgtgtgcaaagtttatggagtagtgggtaatcaatccacggcctattctacagtggtgacgtcacccatttctgatgcggtcgagagacactgtggtattgaacagcgttggggtcctccgaaatttcgcagtaattacccatggcaagcgagtttacagttttcatcccaacctactttaggcttacctgccgaagatttaatttatgcggtagattcctac

SEQ ID NO: 1955 - DNA, 467 bp, Wenling crossorhombus picornavirus
  misc_feature 1..467: note = strain XDXMC21480 polyprotein1
  source 1..467: mol_type = genomic DNA
cgcggttaaacccgcgcaaccttctttcagccgcgtctgagtagcgcggttagtcctgatacacagtttcctgttgggtactgtgtcttcgggtgaatgctcttgtgtgaatgttttaggctgtttaagggaagcgtttccccgtgcgctgtgagggtttctcacgctctttcggggtgcagtctcttctgttgttcattaagatgtatggatgcactgttgtgaaggatttgtgaactggggatcgacaccccgtgaggggtgccccagtgtccataggagtttgctggagaggtgtgttgctgtagtgactatccgtgacctggcattctaaggtgttgaccccaacctgtgagggtctggatcgcagtgttgaagtgctttggagggttcaatggggtttctgtagtggatattatgtgcttgacgactactggtacgagtgtattgggggtctacatgtgtga

SEQ ID NO: 1956 - DNA, 467 bp, Picornavirales sp.
  misc_feature 1..467: note = isolate bpk205shi03 genomic sequence.1
  source 1..467: mol_type = genomic DNA
gatgagccaaattacattacgttgtgttgctgttacggctaatggcgcaaaattcgcaaacctcgctaatccagcggagtctgttacttttaaaaccactaaccaacagcgttcacgcaatggtgtacaagccgttgtcggtcgctcttcaatcgtttggattgcaccgcacgtcgtaaaacaatgcgatgatgcttgcgctccgtcgggtgatttcaccgacttgctacgtctcgaattttctaatgcgaattcaggggaacagttgattacccgccttaatgatttggcggactggttaactgcacacccggaattccttcgaggctttggtccacagcaatcttctgacgttgttcttggaacagtatgaatattcaggtaatgttattaggtagccttgcgattatcgcaactaccatcataacggtaacaggaatcgtttcttactacatccactaacttgc

SEQ ID NO: 1957 - DNA, 467 bp, Hubei yanvirus-like virus 1
  misc_feature 1..467: note = strain WHCC105213 hypothetical protein1
  source 1..467: mol_type = genomic DNA
gttttgccagaatgccaactgatcggaagagaaaatggcaaagtacccctttgggtggcacctcaggtgcaatggctggtcaccggcctttgtgcatacgtgccaacagggttgtgggggcggatgcgggttgtctctggcctgtcatcactgatcccactccaaccgatgggtccaattcttttgggcactactccttcctctggctttgtctggccgcgcccttctgggtgcaaacggagtttggtttgaatcgggttcctgtgtgtcgtacacacccactgagtcagacggcaccgcgccgtactgatatatcttgagggccgataggggttggcctgtcctccaggatggcttcctctgagtcattattggtgaggcaagtagtttctgctgtgcgtgcttcagtgctgcctgcatatacccatctcattcaattctgatgttgaggataatgcctaatctgg

SEQ ID NO: 1958 - DNA, 468 bp, Plasmopara viticola lesion associated narnavirus 25
  misc_feature 1..468: note = isolate1
  source 1..468: mol_type = genomic DNA
gatgtcttgtatcaccggacggtagaactaccttccagtgcttgtggtgctagcgtgactgaaatcacggtcaccaagtatctcgagcgcaagtcgattgggaacgaacctcccctctctgtcaagcttctccgcccaccacgtctccaccgaagtgagaggcgtgtgtttggaaaactggcggacagaaggaggggggagtttcaacttcccaggtttcatggtctttggtttgcacggacgatattttcctcccgttgcccagtagcctttgtgcgctcctgtggagacgtacttgcctactgcgcgattggagacaaacgtaagtccaggtggtggagcttcactaacgagggcaggacccccgatgcgaagtcgcacctccacctccttacgcatgccttcgaaccgccgcgggtcggcgggcgcgaagaaaatatcgatacgtgcacagtactttgttgggtc

SEQ ID NO: 1959 - DNA, 469 bp, Sclerotinia sclerotiorum hypovirus 2
  misc_feature 1..469: note = strain SsHv2.HBstr-470,1
  source 1..469: mol_type = genomic DNA
ttttggggatggtgctcttaggtttgatctttgtagatcctaactaggaggaaacattgccctgtttcgtgatgatttctatgttcaatcactgaagcttctcttcaccaaaaaggagagagcttcgagagcttagctgtttcagctatttgaaccccgaaggattcatgtctaagacatttggtttctattcagaaactattcattctttcatccgaagatgtaaaactacttcgtagtaacgagacggtcctgaaccctgacatgtggaacggcgacgacaggcattctgtggagtagtgtcctagaagaatgatcccctgttgttacctgtcagactggccccggcacaccgtgatgcccggtgaactggtccgtgagacccagatcggaatactccaggctcttttgcacgatatgcttgtcatttttcgtggattaccctggtgctcgttcccaatccgaaagt

SEQ ID NO: 1960 - DNA, 469 bp, unidentified
  source 1..469: mol_type = unassigned DNA; note = Mutant Zaire ebolavirus isolate Ebola1 sequence
cggacacacaaaaagaaagaagaatttttaggatcttttgtgtgcgaataactatgaggaagattaataattttcctctcattgaaatttatatcggaatttaaattgaaattgttactgtaatcacacctggtttgtttcagagccacatcacaaagatagagaacaacctaggtctccgaagggagcaagggcatcagtgtgctcagttgaaaatcccttgtcaacacctaggtcttatcacatcacaagttccacctcagactctgcagggtgatccaacaaccttaatagaaacattattgttaaaggacagcattagttcacagtcaaacaagcaagattgagaattaaccttggttttgaacttgaacacttaggggattgaagattcaacaaccctaaagcttggggtaaaacattggaaatagttaaaagacaaattgctcggaatcacaaaattccgagt

SEQ ID NO: 1961 - DNA, 469 bp, Ginkgo biloba picorna-like virus
  misc_feature 1..469: note = strain pt112-pil-2-NY genomic1
  source 1..469: mol_type = genomic DNA
gttttattcttctgtgttgtgagacgtgaatacgagcaacgggtgctatgtaggagtacatagcataccaccgtaagtagatagcgaaatgacaatttcttataacatagtgacaatttgatgtatcacacagtatttagaacacactaatattgtggtttactgttctctcagtagtccgtgtatgtgttaagtataaggtggagataagaaacaatagcattccgttgaatgacaaaggcatgtggccactattgtgttcttacttatatatgatttaatggattaatggataacttgagtgttgtactttggtattacgctcaattggtctcggaagactcgtttttgagctccacgtgagaacgtgactggtcagccgccagcacgatatcgccattaaaaatggtagagagctctattggttacagacaaaatttctgaggtttctgctccgttgatagcagat

SEQ ID NO: 1962 - DNA, 469 bp, Hubei permutotetra-like virus 1
  misc_feature 1..469: note = strain WZFSL84790 RdRp and1
  source 1..469: mol_type = genomic DNA
gttcctctcctctctacctgacccggaccacgaggcggctaagctgttgttgggccgaggagtaaagagcttggacgtgaaggatcaaagtattgatctttcatgtctaaacgtgtataaagagtcatgcccaatcagtactctacaatacgaaaaggctcaaatacatccagaggccacgaaccaaaaagacggaaaagtaaccgtacgacgtaactttggtagagtaggcgcacaggacgctttgttgtcctctgcagcgctagtaaaatacccattagaaacgttggaagaactgcgcgacgcaaccgtatatacgtcaggaactccctctggtttttcaaatcgaatcaaggagcttacaacacggacgtgcaagtcggaaggaaaacccgcctggatagccaaaaacttatctaagttgctaccaacaacagaacttcctgattggcatgatgttgaggggttg

SEQ ID NO: 1963 - DNA, 470 bp, Wuhan nido-like virus 1
  misc_feature 1..470: note = strain SCM49454 1ab, hypothetical protein,1
  source 1..470: mol_type = genomic DNA
atacttttagacgttatctaattattctgacatttcaggatagcttacgtacagaacaattagataacgtctaaaagtattggctattaacgccctattatatacacaaatttaataacggaactgaaattgaaacaacccgtatagcaagagagatttttaaaaatttagatttcaagcacttaggtgcattctttttgctatatagaccataccgataaaacacacccaaccccggggatttccccttttttgcaaagtatttatagctaaactaaagcagaggttcagatatctacttgaatctttgtagcagtggttatatttgcttattttttgccttcgggccattctaaactaagttttatcgaagttcctaacttggaggtgtcacttaggaagaatcaacaactaaaaaaggtcacatacacacattggaagattcaaagcttaatatctacttagccaag

SEQ ID NO: 1964 - DNA, 471 bp, Beihai picorna-like virus 115
  misc_feature 1..471: note = strain BHHK131520 hypothetical1
  source 1..471: mol_type = genomic DNA
gtggggagctaccactccccaccgcttgtttacctgctagtacattttatgacggtctaaccgccattctttgtatccctcttactgatcatttgagggctctattgtacccaacagacaagaccgagtagcaagattaaacttttatttctataactatatttcccattacttagtattaaggatttttgggtatttatgtagaaatgcctagtcacgacatgacttaaaataaatagttaggactcgacatcctatactatgtcaccccttttcggtcccgccgtaagaggcttaggcccctgatggggattctgtgtaattgcgaattacagatgggtttaaaacgtagattggagaacactctccatgtagacggccccattagtttttcgtgcctgaatgtgagtcggcgccaccacagacccctgatactgccgtgacaagccctgcagggattcctcatataac

SEQ ID NO: 1965 - DNA, 471 bp, Beihai picorna-like virus 28
  misc_feature 1..471: note = strain BHZY60695 hypothetical protein2
  source 1..471: mol_type = genomic DNA
cttatggcatcgtgctgaaatcacggtaaacttactccgttttgggaagaacgttaagctttttgatcttggaccgatgttaaaggtatcccgtcccggaaagacgttaaacttgctaagtcagttgtcctctgattagtgcccacgggcaataggacttgtatataaaagtgattatagcacagagttgattatttttcgttttgttccactctgtagtaccctatgtatataaataataaaacctacgtgtagtataccgtatgacttgaaagtatttgcacgttaaacgtagtataagtcaagaaatgtatatataatgatactgatgatggacagttaaaaccatcacttttacatattttcttttccgattcggctgaaactggtgaccaacctgttactgccaacgcggaaacagaacaagttttaacccagattggaggagatgccccacaagaaaatgagggc

SEQ ID NO: 1966 - DNA, 471 bp, Changjiang picorna-like virus 8
  misc_feature 1..471: note = strain CJLX30776 hypothetical2
  source 1..471: mol_type = genomic DNA
gactggacttgctggggaaatacctagtgcaacccagcattttaccatcgctagccactactcaggactatccagagaggcactagacgcgtggttgttgagtttgacccacgcagtaatttaagactcgctaaaattttagaatccatagtagaagagaaagtttgtgcagagattgaaggtctttccgtgaatgcacccgatgaaacaacgggtgttactagttttgcttcggaagccggggtgtgtgccgatatccctatagaccctgttgtctcattcgccaaaggcgatgagtcttaccaggatctaaaggaatattttaggcgcccccggcttattttcaccggcacttgtgctaacactgtttccgttttggtaaactccaacgttagtcagatttcactttttcaggattggtttccgaatggtatagaacgactatcaggagttcaaggggttcgcttcgat

SEQ ID NO: 1967 - DNA, 472 bp, Bat badicivirus 1
  misc_feature 1..472: note = clone Bat/CAM/BadV-P11/2013 structural2
  source 1..472: mol_type = genomic DNA
tcatgaactcattaattcacttaatcacaaaacttgttgaacaattagaacttcgtggttgggtttgaggtgtttaaacatggatcatgtagtaccttatctacaaatcccagttgttggtctaatccttttaaagtaatggcccggaaacaatgtagggagtagtgaggatctgtgagtaagacgtgctctggcaagccgcgggtctccaattctggactttcggaccccagaaaaggaagtcgatggcccccatcacagtgagcagtaatacatgtgaagtggacaagttccattgaaaatcattcactcattggtttgtggcaagttgtgtggcaacgaggatcaagttgtttggcaacggcaagctgtgcggcagcgtggggaatggcaagctgtgtggcagcgtggggtaaggcaagctatgcggtagcgtgcaagggcgcgaaagctctgaggagcgattctgaac

SEQ ID NO: 1968 - DNA, 472 bp, Hepacivirus C
  misc_feature 1..472: note = strain SL7 polyprotein (POLY) gene, complete cds.1
  source 1..472: mol_type = genomic DNA
gctagtgatctcgcgggggcacgcccaaatttctgggtattgagcgggttgttccaagaaaggacccggtcaccccagcgattccggtgtactcaccggttccgcagaccactatggctctcccgggaggggggggtcctggaggctgcacgacactccaccatgaatcactcccctgtgaggaacttctgtcttcacgcggaaagcgtctagccatggcgttagtacgagtgtcgtgcagcctccaggaccccccctcccgggagagccatagtggtctgcggaaccggtgagtacaccggaatcgctggggtgaccgggtcctttcttggaacaacccgctcaatacccagaaatttgggcgtgcccccgcgagatcactagccgagtagtgttgggtcgcgaaaggccttgtggtactgcctgatagggtgcttgcgagtgccccgggaggtctcgtagaccgtgcatc

SEQ ID NO: 1969 - DNA, 473 bp, Marmot picobirnavirus
  misc_feature 1..473: note = clone c207250_g1_i1_libraryC_2509 segment I1
  source 1..473: mol_type = genomic DNA
atcaattaattctttaatttcattcaatttccaaactaaagttctgatctagttctcaaagtaaagaaatggacaagtacgtccttggagaacatcgattggaacaaattacaaacaagtctcaatatgcacgtctgaggagatcgatgtaggacggaaaagcatagtttgagcaaataacatccagaaaggaggtagatttgacacagaatcaaatcaactaccaaagaacgctggaagataggcgttcacatcttgcatccgagaaagaaactaatcgtgcaaatctagcgcgcgaaagagaggaaaaccgctctaatctggctcgggaatatgagactaacaggtctaatgttgcaagagaagttgaggcacaccgctctaacgtatcacaagagcatcttattgcagctagagatcaagagacgcgaaggtcgaatttagctagagagattgaaaccaatcgctcaaac

SEQ ID NO: 1970 - DNA, 473 bp, Perina nuda virus
  misc_feature 1..473: note = complete genome.1
  source 1..473: mol_type = genomic DNA
ttttaaatatcgggtacagggttttaaccctgtacccggtattcagaccttagcttttgagctattgtaagaaggtagcctagcttttaagcaatggcggtattagatcttgcttttgagctctatctagtacgtgtttacaattaattcgattagttaagattttaattagttttagtaaccagtgcttcaatcttctattgtggcactggcttggatctcccttacacatgtgattacatgatagacttattagtagtagatacatctaaattctacaacgacctagtaagtattagttatgtgaaatagaatgtggaggattttaaattgtgaataggcctttatattcggagtaggtagtattgcgtatactattaatcccacaatacgtggtctccgtcttagtatttttaatttgcgccccaatggaaatggctcttcggacttgagtacagaggggcaacccataa

SEQ ID NO: 1971 - DNA, 473 bp, Wenling brown-lined puffer picornavirus
  misc_feature 1..473: note = strain XTXMC521401
  source 1..473: mol_type = genomic DNA
ggggacagttaacatagctaatgctagttgacatgtccctaaacccttttcaacgtctgacccacgatacgggtcacctctttatgtttgttttgttttacgtttgtttgtttgtttggtggaacgtaaccacccgtaactataactagaatgtaggctacttaaattaggtttgttttacggatagttctcgtagacctcgagctacgtctcgtgcataaacatgggtaaccatggcacttggcggttagtggtttttacttggctttcacgaactcaaattgaaataagtcagtgacatttgaccttgtaggcgtgaggcgatgtgcaccgcgatatcaggtaaccttctttaggtctgagatgttgtcccagccacaatctttgcgagctggtcgagggctttcccgaggtactgcacttaacccaaaactttctaaatcaaactcaaactattgcagacaaaattaata

SEQ ID NO: 1972 - DNA, 474 bp, Aphis glycines virus 1
  misc_feature 1..474: note = isolate North Dakota, complete genome.2
  source 1..474: mol_type = genomic DNA
gaatttcattttataggaacattttcacctcatagcaacactcccattgttatgttgtacccctcccctttcataattgccttcctagtttatcttgtgcagtttttatcccagaagattgcattgacctgctgtgtaacaggtgttgcatggtaatgactactaggtgtccatattcacggctcgagggccacagggtgaaaatccctacattctagtgtgaagcgaaagataagctggaaattgagagaaagctattcaaggatagtgtcgtgcagctcttaggagtaaaggtgagtaacgtaatatgccttatgagctctcgacttctcaacacatttctttgcccaggtagtggatcacaacgtgaatggtcccataattaggggtattgtaggtaaaggtgcttcgacatatgtataaatgatcgaatagcgataaccggccgtgactacagggaccccctttacaaaa

SEQ ID NO: 1973 - DNA, 474 bp, unidentified
  source 1..474: mol_type = unassigned DNA; note = Chicken calicivirus ChCV-052, complete genome.1 sequence
gtgggaaccctttcctcaaactccggacacggactactctccgtgtttccctcatcaaagagggcctcagctggcgcaagtcggctggggccccaagaatcacctgggtggatctctatggcgactggggtcgctttgactgtgatcccaccccactctttgctcgtgaagggtgcatcctcactgaacaccctcgggcagagatgcaagggtggaagtcgctcctgccccctggcaacatgcaggtgcccgatcccaagctcagctctgacttcctctcctgggtggtgcaacactccaaggttgatgaacaaacctggagggacctcaaggcaacctggtctctcgaggatctccggcgcatctccacagactacctcatgctcccggaacctgagaagaacactgatgcctatgatggctggctaatggtcggcgagatgttgaccttagccggtctcattggctgggagg

SEQ ID NO: 1974 - DNA, 474 bp, Riboviria sp.
  misc_feature 1..474: note = isolate sto073pic1 genomic sequence.1
  source 1..474: mol_type = genomic DNA
tcttgctcgatgtatacaaaattatgatgtaaataaaacgttgagtattgctattgtagaaagccgtgtagatttttatctttatatcctaggaccacggaaagcagccctttattgtccaaggaaacatcattgctgtacattggttaagtagccgtgtgcttaagaaacttacttactgaacaaaattttaatgctaatcctgatgttttatccgttacgacccctgattcaaatgatactataacccttcgcgatgatggcacaagagtttccgaacgctttaccgcttgtgaaggggatttgccttcttccctgtacgattgtatcggtgaaaagagtgaccactctatctccgatttcttgagcagatatgtgattatacaacaagggacgtggtccagcacgtcggtgcgcggagacgttttgtctaatcttgttttccccaagaatttgtttaatactggccaatat

SEQ ID NO: 1975 - DNA, 474 bp, Rhizoctonia solani fusarivirus 3
  misc_feature 1..474: note = isolate BR19 RNA-dependent RNA1
  source 1..474: mol_type = genomic DNA
agagcagccgtttggctgcctggtaccacatcataggggatcgccctagtggtgccccagttttctcccttagaccagcctatcttacggctggttgtccttattaaggatgggtttggttttcttccaaatttatagtcgcctggtgcgacttcatcttttgccccctgggccagctgatgagctggggccgaaactgctggcagtcctggcgttggaatttgtattccgactcccccctgtattgagaacacaggtggtaaattgaatctcacggtgccattgagttggtaaccagaaagcttccgtatctcgtctgagaggaaacaccggttgaaacagcttcggcgcgtttgcttgtgcgtacaacttggagggttagttgcgtttttggtgctcagtcccgtcaaatcttattcctttaaactgtttgaacgtagcaaagaccttgcagtcagtagtaacgacactgac

SEQ ID NO: 1976 - DNA, 475 bp, Morchella importuna endornavirus 2
  misc_feature 1..475: note = strain MiEv2SCYDJ1-A1, complete1
  source 1..475: mol_type = genomic DNA
gtcgtcaacaccaacacctaccaactcacaccaaccaaccaaactacataccaccattgattacaaatctttgtccgagaacagcccctcggacaaagattaccaaaacaacccccataaattgggggccaagggctgcgactcgctagaagtcgtaaattcatctagcacaataactgaatggattcattccaagcggaacgacaaatccattcaaagatacaaatcacgcggatttacgacatgggatgctgttcacagtacgccgttcggaatatccgttgagaaagaaactgagttagctgagaaatttctcaatgaattagcaacacgcagctcagaattgaaacaatgttacaacgaacaagtggtgtgggaagaagatgaaaaacctgaaccagaaggtccggaatttgaagacctgcagccgctgaccgttggagccgccacacactgctggttgaacataccattc

SEQ ID NO: 1977 - DNA, 475 bp, RNA virus hoopoe/BBanka01/2015/HUN
  misc_feature 1..475: note = complete genome.1
  source 1..475: mol_type = genomic DNA
aagataataaacgattaattataaataatagtacgaataaacgtaaaatgagtcatttaatatatagcgatttcattaaactaagagatgaacttcaacaatacttcacggaggcaatttcgttaccggccattcattacttcaaaccaaatcaaccagtcaccttatcagttaacatcataccatctggggaagttaatgacgaccttattagcgaactcagggccaagattcaacaacgtatcgccaagaaatccggtattaaaccgacgcttggggagacgtacccgttatatttatccatcaacagggagacgattttaaaaattcaagtgcatatgaaatatgcttataaggattttgaagcgattattgacgagatagattttgaactagtagaggcaattaaaacattgaaagacaccaaaattgatactttaactaagaaaagcgttatcgataaacttttaagaaa

SEQ ID NO: 1978 - DNA, 476 bp, Plasmopara viticola lesion associated dicistro-like virus 1
  misc_feature 1..476: note = isolate3
  source 1..476: mol_type = genomic DNA
acatcgtgtaataaggcactagatgccccaaagcacaaaattgggtaacccgaactgaagcttgtctcaacaccaatcaatcgcagaaattggcagtggacggcccatggcgcccgaggttggactcttattgttccggctatgttataacctctgttcgcaagttatagcgtagtgctatccttggagaaatcctaaccagtgcctttggaaagcacaccaaaacaaaccttgacctggacatgtcattaaactgtccaaaacccaaagtcccttcaggacaacaatccatcgccagaatgacgaaaactcacggtcgagttcgaaccacgagtcgagtactcaaacttagatggatttctttgcgtaacgagcttcgaaactcgcgtgtaaagttgctacgatagtgcgaccctcttaggagaaggcagagcttaaccctaagttgtatcttgctcgcgttacgacaccaatct

SEQ ID NO: 1979 - DNA, 477 bp, Rice Tombus-like virus 2
  misc_feature 1..477: note = isolate FYBPH-10, complete genome.1
  source 1..477: mol_type = genomic DNA
attttccctaccaggacataggaaggtgttactgagtcctggccggcctgtgatggccaacggctgaaaggccgtgcctgtagtcgagtagggaggtttgcggtagcagcatcctggacaaagttaggtgtacacccaccttgccaatggatgtcaggacaacgcattgctccccccggcccgtctgcgcagaaccatggtcaatggcgcttatggcctgcaatggtaaccaggttgaattccctggctgtgcttaggagtgtgacgggtgtccgcgtcgtgatttatagggcgggcttaattgggataccgagggtaggcgccatagtctgggtaaccaggctcggttctgctaacggctgcaggtgtgcgcggcgagccaggggacactcctaggccccctcgccagctctgcccgagcttaagggcattataccttgtctggggtttaacagggggtggtggccttcaccattc

SEQ ID NO: 1980 - DNA, 477 bp, Wenzhou tombus-like virus 9
  misc_feature 1..477: note = strain WZSLuoI85212 hypothetical1
  source 1..477: mol_type = genomic DNA
atttcacccaggattcgcacatcctaaccatactcgtcgcattgttcgcgcacaacacctagggggaggtttagaccccacgcactcactctgttggagagtataatccagcaccacacactacatgtgccatataggaagacgtttgcgctgtacgcagtgttgcgcaactgagctagtgctcccacctccatgattacgggcgattgattgaatgcgcccttacaattagttagaacgcttggaggtgagagtgggaggggtatttaccccagggagcagagccgagtgcccgcttaagacggtgagagccgttcagaaagtttggctctgtgggcgatcgcgtatgcaggattaaggtatccgcatatgttaaactagcacctttcaaataataataataataaacaaaacaaaaatagagcaccattcacaaacaacaaacgcaatgtgcggcgccaacgggcgcccgttgcg

SEQ ID NO: 1981 - DNA, 478 bp, Nora virus
  misc_feature 1..478: note = isolate Umea 2007, complete genome.1
  source 1..478: mol_type = genomic DNA
gcaaaaaggcccctgggggggggttaatgagtactggaaaaagaagcgcgagataccacttcgctgattatgctgattctggtattaaggattagtagagtatcggaagtgccgaagggaataatgctggtccgttgtaaacaggatacttatgaaacctcttaacagaaactttgagcaaacaacaaataaacgaacaaaaagagttatatattgaacttgaaaaatcaatatcttttatttagattgatttatattagtctttataatcgtagggaataattctcatctaatgatatcgatgtaaaatgtatcattctagctattcaattatattaattgagcttagcatctgattaaattactattgtaaaataatatttaatccccatctttgcaagatggaaactcttaataagtcaggagtataatggatttaaaccctcacaccgaatcatgagtataaacagattcaaat

SEQ ID NO: 1982 - DNA, 478 bp, Orycavirus sp.
  misc_feature 1..478: note = strain GUNCC_DN53589-3 polyprotein gene, complete1
  source 1..478: mol_type = genomic DNA
ggggttaagaccccagcatattttcaccccacagcccttggggttagcctacaccttcatcaagatgatggtttaggtttgggcatggaatttgacttcgaccttgcatgtctgaccacgaatgtcatttcttcgttctggctgtagacgagactcggtattttgtattaaggactggcagggcccaagtattggcctaggagctctacatggctaccaggatattcaggccgataggatgtcccagcatctgtgtaggactgtttattacgccaatgtacctctgactctaagcactagagggagggggctgctacaggaaaaggacggcattgcctatccgattcacgtcatgagatttctctgacctctggcctgtagtggctactccgggatgggaaacccggactggcctctcactgcctgatagggtgtcggcggacacagtgcttagttttatagtccgttgtaatgggac

SEQ ID NO: 1983 - DNA, 479 bp, Beihai picorna-like virus 6
  misc_feature 1..479: note = strain BHNXC41284 hypothetical protein1
  source 1..479: mol_type = genomic DNA
gcaaggtttatagccttgcagtctctgtttgaatagttgatagttatatgtctatgtgtttagtgttgtacgttcaattatttgaacgtgccgctctcgatacatatgtcattataggtattgattgttcaatttaaactcgtttttcgtacttttgtcgtaaaaaagttcactttttcagtctactatcaagactttaaaaggatagttggagttttcgcacgtctccgtaatttacacttcgtgtagtgcaatctccggtactttggtaatcagccggattataaatttttggatttactgagctaacagtctcctcatactgtacgtcgtgcccatagatggtacgcaaattgtaggtattcctactcatggggtttaatggtagtactgatctggtaccccggctattatagcctaaacaactcagtttttgccaggacgctgttatttataacagtagtcctggcgtatatatt

SEQ ID NO: 1984 - DNA, 480 bp, Partitiviridae sp.
  misc_feature 1..480: note = isolate H1_Bulk_29_scaffold_1403 hypothetical1
  source 1..480: mol_type = genomic DNA
ttgctcgcattggtgctcgcaccaagttaatggttgattggatgatcggttcttgggaaaactacttacgaccgaagacgtggatggacgcactcgaacaagaacagcaggagaagtgggcagctgcgaagcgcaggtacgaccgaatgattgaccatgagaatcagaggttggcaaaggcgcgggctgaatacgatgccattgttaacgatgtttctctgaagcaggccacggctcgagaagaacttcgagacgttctgagaggatttgggttgcaagatgcaccattactttcagtcccgtctgaagatcatggccatgaaaggctcagagaggaactcagctttctggggataaattttcgtcccccagatagccagttccactaatcgtgttcaaggaacaatacgcactctcgctagacgagcacgccggttaagaatgaaagaagcagcgacacagagacatcctatagagaaa

SEQ ID NO: 1985 - DNA, 480 bp, unidentified
  source 1..480: mol_type = unassigned DNA; note = Mutant Zaire ebolavirusisolate Ebola8 sequence
ctaaggtagaatacttcatattgagctaactcatatatgctgactcaatagttatcttgacatctctgctttcataatcagatatataagcacaataaataaatactcatatttcttgataatttgtttaaccacagataaatcctcactgtaagccagcttccaagttgacacccttacaaaaaccaggactcagaatccctcaaacaagagattccaagacaacatcatagaattgctttattatatgaataagcattttatcaccagaaatcctatatactaaatggttaattgtaactgaacccgcaggtcacatgtgttaggtttcacagattctatatattactaactctatactcgtaattaacattagataagtagattaagaaaaaagcctgaggaagattaagaaaaactgcttattgggtctttccgtgttttagatgaagcagttgaaattcttcctcttgatattaa

SEQ ID NO: 1986 - DNA, 481 bp, Magnaporthe oryzae botourmiavirus 5
  misc_feature 1..481: note = complete genome.1
  source 1..481: mol_type = genomic DNA
gggggtacacaggttttggcctggttcccggggattgtgctccacctgcgctttctccgagatttagtgctccttcggctggagagtggcaccgtaacgcgcagtggcgacgggccgtggttgctgggcatcacccagtgtaaaagggatgtaggggcattgcccgtaatccggtgaggaaggtaccggtcccaaaggggggaggtaaaacgctaatcaggcgtgttctgcgactgtgcctcgcgcgcggcagttcagacccggggactaactgtcccgggcgcaaaccccggcgggttgggtggacatggttgtcacctttcccttagatctttgcagtcgtaaaagaccgggccaagggggccctgaagtctataaaggtgggcgtcaatgcccaagcttcttgtcaacacacaagcgcgaattgaaacccctccctgggtcggagtaaaaggacccgcctttaaaagtgaatgataaa

SEQ ID NO: 1987 - DNA, 481 bp, Wenzhou picorna-like virus 10
  misc_feature 1..481: note = strain WZSLuoI86114 hypothetical2
  source 1..481: mol_type = genomic DNA
ggggacaacccagtctttactgatcacggtagacgttaaataaagagatcccggtgttgtccaatgctggaggtgttaagccaaaatcaaaatggactgctaagtaagatatacgcacagcgattaggttctgcattacctattcaatgtggtcaggctgcttagtggacttgtacatacccctttttaggggagggtttggtcacccaacaaaatagcactgttatgttgtcgattgatgtgccgcacataatatttattaaattacattactaatctttatactatttgtgagccagaatcagctcaaaatgattcacacatatcgtgcgatcctcgcacaattcatactgtcgcgtctttcgatgaagatgatgaagtcttgcaacttcgtgctcgggtcagggagctacgacaaaaacttgaccgaaagtaccgccatgttaagcagctcactaaacgaattgagcagctagaaggt

SEQ ID NO: 1988 - DNA, 482 bp, Marr virus
  misc_feature 1..482: note = isolate Antarctic64 RNA-dependent RNA polymerase and1R
  source 1..482: mol_type = genomic DNA
tttattaatactttcagaggaaactcttatgacacagaagaatctggtccttatcgagtctaatggctcgacccaactttatgggcaccctgaaaccctcgcgaagaccgtaaaggttaagcgctcattgtctactaaggcaacgagtacgggcgtaaaggtaacgaataaccgtgttgaagtcgttatcaacgcggatgtccctgtcaccgtctgtggcgactcgtgcgccggcggctccgaggttctgtctgtacgtttgtcaacaagtggtacaccgaaaaatagtgcagagcttgatgcaatgcttgatacgttaaaaagtatcattgacaaagctaaggcttcgcgcttaacttccggctacccaatgacccaagacttagtctgggttgatgtagacgaagcgtaacagacaaccgttaataggagagcaaccagtgaaaacatggaagctagaacgccgagcacgtgatgtgcta

SEQ ID NO: 1989 - DNA, 483 bp, Sclerotinia sclerotiorum deltaflexivirus 1
  misc_feature 1..483: note = isolate AX19 polyprotein1
  source 1..483: mol_type = genomic DNA
ttttgtatttatggtgtttgttggttgctttgctttgtttttaactcacattcttttgcactttatctctctaatcttgtttctgctccgccacactctcggcttaaattgagtggtctcgctgtaccataccagcgatatttatctatctgaaacgacttcaggtcgcaaacttgtcatcacagctaatgccatccgaggctggtccacctgtaatgggtgcatatggtgtacttggtcgtgtaagctacgataacccaagtgctgatcgtcccgatcgaggaacgggtgcaaaataggtgttcacttcatctccaccccaatctcgaggtaaccagatcttctcccaaactggtgcgttacgcatgattgccgaatcctctgcgtacgtgtctgggtttgacccccaggctctgtacagactgtacgggcgaagggcactacattccctagtgtcttaaagaaacagtcggcccccgagta

SEQ ID NO: 1990 - DNA, 483 bp, Heterosigma akashiwo RNA virus SOG263
  misc_feature 1..483: note = complete genome.1
  source 1..483: mol_type = genomic DNA
tgatagaaagttctgcagtattctgcagaactttttaataccctttgtagagggatatctactttaattgctggtgtgcgccagctcgcttttcgatgtgattcataattaactatacacttgagcttaaaaccaattgttatgcgtaggtagcgttctttagcgtctactgtagtgtaattaatttgtttgctctagtggtgtctttgccttcaaagtactacagagtaagttcatttgcatagttgtgttgtgatcatgttgactagcttgtttgcgtgctccattaataacatcagtcccagctggcggggcaataagtaccagcctggttgttgcaagccgtgccgaaagaagcggtatcacgacccgtgtccctccatgtagtcgttaaaaacaagtgaggtaaggagttgtccatcttcgagaaaaattaataaaatggacttttgggtctttggcccccccccgcgttaggcacct

SEQ ID NO: 1991 - DNA, 483 bp, Beihai barnacle viurs 1
  misc_feature 1..483: note = strain BHGZ polyprotein gene, complete cds.1
  source 1..483: mol_type = genomic DNA
ttgttgatgctgtagcccagtggtctccgcgggtgtggttaattgcggcataaagactttcttgcagcaggttttgttgttggttgttgagtatggcgcgtgctaggggagttggttgagagttgttctttgcttgtgttccttagtgtgtgccttgtgttgtgtacacggtcaggcgagtagcctttgctgtgtgtacagcttgtttgtgcctttcgcccaacgtggtggcgggaggtatttgtgtttaatcgtcgttgagcagtaggctctcacggcgaaacgtagcatattgtgtgttatatttgtcgtgttcggcgaggaggttttctcggcttgagcacgatatactgtgttgattaaatttaagtgtagttccttgcgctctgttgggtaagctatccctacagagcgcgagatcatattgattgaagcaaaacgtgtatagtgtatattgtaacttgttagttgtaaaaggacaaa

SEQ ID NO: 1992 - DNA, 483 bp, Yado-kari virus 2
  misc_feature 1..483: note = isolate E97-14 replicase gene, complete cds.1
  source 1..483: mol_type = genomic DNA
tgggggtagccatccctagtgtaatttcttacggggatgcatccttgccctttcaggaaagtaggatgtatctttcaaaggaaagataagctaaatgtgcatggcacaaggttagatggaaggaaatgtccatcggcataagctcagattgatttactgtcaaatagagaaatgattcgcgtcgcttggggcccagtttacactgggcgcatcggccccatatatcatggggtgcgctacgccgtagcaagcattgagaagtccccttaagcaagggagcctttgccttatcgactgtagataaggacggtgatcaatataccgagtcacgacaaagaaagtgacacgtcaacgcttaaaagtcgcgatggatatcaccactatactagtggtgtgaaccgaaatcgcgcaaatcgacaattcatatttcgataggattaattgtccaatcggcgttccgattcacgtgagaatccgttaatc

SEQ ID NO: 1993 - DNA, 484 bp, Wenling picorna-like virus 8
  misc_feature 1..484: note = strain WLJQ103995 hypothetical protein1
  source 1..484: mol_type = genomic DNA
cctagccgggctttacccggtttggtcgtcttttgcttatgtggtatattctccattttcgaatggacgatatatcgcataggttttctattctcttaaaaactaactatatctgttatatatttgtattgtttataaggtggtgggtttagagttttaattgtaagtaggatactctacttccccacttttgttttgtactatgtttaaggtagcacctaatgtgctattcttagtccaccgaagttttagtgaaagcaactgctttagattattttgccctgggtcttacccacttgcatttacgccgtgaggtattgtgcttgatgttggacagggatctaaataagtgacctattttgttcttggtctttgctaacgttgttagtagctattaattaggtggtactgcgcgtaagctagaacttacgacaagtgacctgggtatgtcatttaaactactcattcaaaatttacaatacat

SEQ ID NO: 1994 - DNA, 485 bp, Hubei mosquito virus 1
  misc_feature 1..485: note = strain mosHB236488 hypothetical protein1
  source 1..485: mol_type = genomic DNA
tacaaaaatccttaaaagtcagagaacttttaaaacccccggttagcacaaactagccacaaatagtctgagtactaccaaacgcacgtattgtccgagcacaattacgtaaaccaacgctacaatcgcacgtattgtctgagtacaattacgcaaaccaacgctacgaacaataaagcccataattttggatttatttccacaatttacgctatttagacttatcgctgccctccactatagtggttgtatcatctctctcggacaactgaatacttccaaggtatagcgtcgcagtcagagcacagcgcctaaatcttggtataaacgaacgtacgcctacagaagcaacctatgagttacacttatactgctctcagctcgagcattaccgaacgagaaaacatcaacgatatcgacgacacaactgttgacccttcagcctcgttcctagtgcccgtcagcgaacaagtgtataggccaac

SEQ ID NO: 1995 - DNA, 485 bp, Hubei noda-like virus 4
  misc_feature 1..485: note = strain WHBL72570 hypothetical protein 1 and2
  source 1..485: mol_type = genomic DNA
gcgctgcgcctgattagtccggaatgacgtaaaactaccaaactaccccttgcttgaggctaacaaagcgcgtgtcccaagggacctaaccgggggtgcgtcctataggacgataaacaggacgcccagattccagggctatccggttttcggcggtgcacccagcatcgccggcgacagtgcgtctagcgctgtcgtctggtccgcaatgacgttaaactaccacgccggcgcaccacgcgccgtcttcctgtccgcaacgacgttaaactatttagggggggttggtacggcgagctgggtcccgtccccgccaccgcccccctgcagccctcggggcgttgcagcagcatgaccgcggtcagctgccacgctcccgggggcgattgagtcagcctccaccgccccgcggggcggggtgttaagctggttcggtgtttctgcggccttactgctcgatctccaacactattcggtccgtgagg

SEQ ID NO: 1996 - DNA, 486 bp, Galbut virus
  misc_feature 1..486: note = strain MELplus21664 segment 2 orf1 gene, complete cds.1
  source 1..486: mol_type = genomic DNA
cttattcattctgcatcatggcgtttataaataataatggtaatgctaaccagcgtggaatacccgcacaacagcaacaaagacctcaacagaggcgtccccgtcagagggattacgatcggatgttgtcctacaatcaagacagagctggtccgtcttgggcacaacaatcccaaccggtttttgagtatgagcgtgcaatggaacgcctcaaccggcaacagcaaccccgtccagtacagaagagcacgggcagtagacagcagaagaagcctgccgacagaggcccagagccgaaaccgacaacagtcgagcaggggcagcgagatgatccgatgtacgaaggtccatgtacatcaacaaccgccagtaccacattgtttggccacaatctggactacagcggatacattgccctagtccgtgagttctacatcaataccacggcactaaatccgcgtcttacacgcggagttacccttctgc

SEQ ID NO: 1997 - DNA, 486 bp, Picobirnavirus sp.
  misc_feature 1..486: note = hypothetical protein and capsid protein genes,1
  source 1..486: mol_type = genomic DNA
aataatataggaggaagtgcgaatgaaaaagacatgcatttctaaggtgaaacgatttctcatctatctattggcgtacttgttgagcacgctttgtagagaagcaatgtgtattcacattgtgaagaatcgtcagtgttattccgtgactgtaactaacggaaaattaaataaggaggtcaagtgatatgaccaaagtacagagcgctggagagcgcaagagctatgtgatgactatcggagagtatattggtaaggctcaagggtggctcaacacgctgcagatgatgcacgcatacaacatgaatattgatgcgaaatcatcgaatatcaaaaccggtactgaacaaggtcgaccttatgttgtggctacttatagttacactatgattaagggtcctacttctgttaaccgggtggtaacttggatctgggatgatgatcatcctgatggtgagttagcttactcatgcggaggtgattaat

SEQ ID NO: 1998 - DNA, 486 bp, Acinopterus angulatus reovirus
  misc_feature 1..486: note = strain Fresno1 RNA-directed RNA1
  source 1..486: mol_type = genomic DNA
agtttttgcttccgaagtcatatcacacttaggcggggttaggtctgaaggaagatatagcgaataaaatatatagtgtaaattaatttaatagaatattagcattcaaatttcaatggagcagacggagtggtggaacagttactaaatgatagtagaggaacggcatggtcacagtagagtttagtgaggaggataccagtaatataaacaaacaagtctgagtaatatagttaaccagccgaaattaagacgacgtgaggagattctactgagacaagagctggagggtggaccacgtttgaagaatcatagaaagatgatttggagattaggtcgaaattgatataagtgaattaaacaatacgcttagagagccaaagatattagtagtaccatgttaccatataataagactagctactaaagagggcgggtttagtgtgatcgattctttcctaaagctatcatgtctaaattttctga

SEQ ID NO: 1999 - DNA, 487 bp, Myrmica scabrinodis virus 1
  misc_feature 1..487: note = isolate Cambridge-Msc, complete genome.1
  source 1..487: mol_type = genomic DNA
acgctgctaaatctttagctagtggtgcaggcaccgctgctaatgtagttaaaggcgttgaagcaacagcttcagcaaccccttggggtgcaattgctttagtcaactcaatgttgggtgatgcaactgctgctggaattgatgctggaaatcgttctacaattaacaaagacttccaagcaaactcgatgcaacctggatcagcttcacaatatcaagctggattaataaaggacacacaacaaattcatgcgaataatgagttagctggcgcacgaattggaggtgtttttggaccattaggagcttattttggctcacttttggctaatgcacttcaagataatgcacccagagatctctatgattcactcaagactggctattcattcgatggaaaattcaatccccaagatacaggatcagttaattcaggtacaacagcaaatttatctggagaaactaatatgcaagataatttaataac

SEQ ID NO: 2000 - DNA, 488 bp, Nanhai ghost shark hepacivirus 2
  misc_feature 1..488: note = strain NHYJG60710 polyprotein1
  source 1..488: mol_type = genomic DNA
gaaaggaaacgtatgacaagtttgggctggaggtcccttacccgtaccaatccccgcatgctctggattttgaggcttcgagcctgccacagagcctctgcccgtgggtggcgccgccatttatgtcttctaaatctcacggcctttctttctgttaagtgtgtctggctaagaaccatttcgacccccggggcggcaagcttttcgccctgaccctgggccactcgggacacacgttctctgctgcgcgatggccgtcgcatgcgtgcgaaccatcagaattgcaagtgtgtgggaacggtttgactgtaaccagtactcttgggacaaccagcggtaacgctggcccttgggcaggcttcggcagctggtgtgaaccaatcctaggtacctgccttgcatgatcgtaaatagctgtatgtaagatcgcgccgcaggcaggagttggcggactccttaaacaccgtcaaccccaaaaaactatatat

SEQ ID NO: 2001 - DNA, 488 bp, Iflaviridae sp.
  misc_feature 1..488: note = isolate muf159ifl2 genomic sequence.1
  source 1..488: mol_type = genomic DNA
agctggattttaacgatgagaagcttttaaattgttcatggtgatacccccctccccagtgtgattgtccatatttgtttgattgatttacgatgacgaaaattgagtaccctgtaatgattaattctttgttttatgaatataatatgacctcttatgctgactagtgtgagtgccgctagttggtggagtatgatgttatacaattgtatattaaatttagctctgagtaaaatggttgaaccccatgttgaaatgacgctatctgatatacgaatgtatgagccagaatgttgacaacacctaataatgcacaattgcaacaacttcggttggagcctcaaactgcgattggtcatgtaatttactagctttcaaactatcgacctagacaagtcttagggagtttgaaagaataggaaaccaattcgtgaatgtttgtgtacccgtgtcggagcggattattaggacggcggacgctttaaaag

SEQ ID NO: 2002 - DNA, 488 bp, Beihai hermit crab virus 1
  misc_feature 1..488: note = strain BHJJX25619 hypothetical protein 12
  source 1..488: mol_type = genomic DNA
gcagcgaaatacaaattcctgtcgcaaaagagtgttatgaggagtcacgaggtcaaaactcccgttttgtaagtttagtgaacactttgagttcattagcggtggatgccgcgaaacattttgtacattttatattcactccaccgagtttgtatttgtatagaaaattgtatcctagttctcaggagctgaatgcagatgtacaaggtgggggcgatcaaattgccccacagattgattcaaatccggccctcacgtttgtcgatcagaacgcaggtgcagaagatggggtcgacacttatgttgaccctctgcgttccaatgctgaggagactgcccccttctcggaatggaggaagagacctgttctcttggcaacggtcccttggcagactgggacagatttggacaccgttttcaacccatgggtggaatatttttccaaccagtacatcaaagaacgctttggaaggtttcatatagcctcc

SEQ ID NO: 2003 - DNA, 488 bp, Beihai picorna-like virus 90
  misc_feature 1..488: note = strain BHWZXX14572 hypothetical2
  source 1..488: mol_type = genomic DNA
ctgccccgtccaggcataaaacggacaccacctccctgtgtgatcttactcagtggccaataacttggtcctggaacatcactgagcatgctacagggggtagacacctaagggatggtgcggagcagccctccggaatcccatcaggacctagcagtgacgaccttgagttgagtcgtgaacaattccaatgtgaattgtgctgcgaaatacccagacttagcattcaagaaccagaattatatacaggacagactaatacgacaaccgcttcgctacctgaaatagcgacagcggcgacacaacagttgtctaccaccttggtagagaacgcaccaccacacaatgaacaacgccagattgaaccccgcgcatatacaagtacgaatgcctttaaggtagatcggccagaattactggaaacattgtccagggaggtgacagttgtcaccggcacctgggatagtagccacgtacaaatagccgac

SEQ ID NO: 2004 - DNA, 489 bp, Picornavirales sp.
  misc_feature 1..489: note = isolate zftwig05rna2nc genomic sequence.1
  source 1..489: mol_type = genomic DNA
aaataaaatgtttaaatacaaattgtttttcgattcgattcgatttgttttgggttttggtttttgggtcaagaccgtaaaacggttcaagagaattcgtaaaacagatcgccgctagtcaaagctagttcgtacactagatcactgtcaataaattcacttttagtcgtcaatggtcaggatacttccgctttaagggcgcgtttgtatgattgcctttatatttcttttgataacacgacgtgctcatcccaccttgttagtatcccactaacctggacaaatctcgtgttttgaaaaatatattaatttatttgcgtaaattactatatttagtacttcttatacttaaattccttggagttaaattgcttattataacaatagcattttgctttttacttggatttattagtaaaagaacttacttaaccctaaccctagtttttggtgtgtacaatttatttgaaacataccaagaattcaaaa

SEQ ID NO: 2005 - DNA, 489 bp, Hubei picorna-like virus 24
  misc_feature 1..489: note = strain WGML142000 hypothetical protein1
  source 1..489: mol_type = genomic DNA
cgtatggagaacatacgcaattattgccgtctaacgggggtgacgtaacaagaccccggatgagtccaccacgtgtggcattttcagccgaatagattcattttatgacgacagattaatggaaatgttttagtgtttaagtaaaagggtttggaaccttagagtaacctcgatagtatatttatatactcccagaacctagccatggggatgggccgttgaggcaatgttctaagaccagagattttaaagcttgacaagcgctttacctgagattcctcttttgagtttgaatatattaaagatagtctaaaaacatttatcagttaattatgttagagtagctgaagacatgtatttcgtgctctaacctctgaaatgttaaatgtttgtccaatggttcggtgatcattggaatattagcgaagttaaccttcatctttaataatcctgtgtcggagcagtggtaaagtaatcggactattaagc

SEQ ID NO: 2006 - DNA, 489 bp, Hubei tombus-like virus 1
  misc_feature 1..489: note = strain WHWN54407 hypothetical protein 1,2
  source 1..489: mol_type = genomic DNA
gtagttgggggtggctctgatggtgtgtcaggtaccacccccgccccatccggaggtggctccgacggtgctgtgggtagcaatcccacccctacgccgaccaggacgcgttaccacgcggcctcggctacaggtgtacccgcaccctacgacttcttaggattaggcgcggtttaccaggtcacttccgatttggtataccagaggtttgacgatgtatggaagctcgccaattacactgacaagaccgtttacttccagctcaaggttgtgtaccacaatcttgcgttcgatacgtccgttaggtatggaaaccaggattcctattcttaccataccgacgtggcgtttgacaacaatggcggtaggctcgtcactgttacaggaaagctgcaacctgctgaggcctggcgttcgagcatctacattaagtggaagttcggagtcacccccccagacatttactggaccctgaagacagacatatac

SEQ ID NO: 2007 - DNA, 490 bp, Beihai picorna-like virus 123
  misc_feature 1..490: note = strain BHCL81476 hypothetical protein1
  source 1..490: mol_type = genomic DNA
tattttaaacactaatttaagtaccttgttttattttataaaacttgcgacttaaaaatgtgtcttctttccttatcgtttttctttatgtttgtattgttagtataaaagtgagtaagtgattcatttcatgcttttcttttattcttttaaacgatattatacattcaataataagtgagtaagtactgccagtgcgctggaatgtggtagccccacttttggaaagctctaaatcttatgttgattgtattatatttgttttcggggttaataatgttccctttctaatattattattagtctgtaacactaacgtacaatgacgtgatattcgtcccagagggaaactggttaaaagcgtgcgcgctacggcgtgggttgatatgcaaccaaagacatatcgttcagccctcagcgaacatagtctgagggaagcttgtcagtgctttaaactgacaaattttattttactgctagagaaatcgac

SEQ ID NO: 2008 - DNA, 490 bp, Mayfield virus 1
  misc_feature 1..490: note = putative non-structral polyprotein gene, complete1
  source 1..490: mol_type = genomic DNA
gtacaggcgcattcgagagaagtgttattcgcagttgtatgttccgagtacctgaatcacagattcacagaaaggtcattaactgtcataatagtgcgtaatcgaaatttactgtcaaggggaacgagagtgtaaaggtttacaacggttcgcccgaagtacttggtttttgtgcgctttacagtgagagaagcagtatttacgacgagtaacggagtaacaggagtgagaattcatcgaaaggtgcacttcacgattaaatacagtgtaattgttgtgtcacagcaacgagacgagcagtatttgtgaatttgtgtcgagtaattggatcagggacccattgaaacggcttgttgtgttaaaatacagtgtaattgctgttattacctattacaatataattaattaggataagcgaaatcgtgcattagcacatcgattatagaattaggttaattttgttagcgattgttagcgttatacccgcaaa

SEQ ID NO: 2009 - DNA, 490 bp, Sanxia atyid shrimp virus 3
  misc_feature 1..490: note = strain SXXX37589 hypothetical protein 11
  source 1..490: mol_type = genomic DNA
cgtagaggtgttgcctctgcgtttatttttgccaccctggctgggtgcttgtcaggccgctatagacatttcatgtttgatgcatgtgtggacgtggtatctgcctaaggaaaagtcttttcattgacggttttattacttgacttactattttagagttttttgactgtgtggggagtgttattttttcgttggcagtatttcgttaaactggccgttattcttttaggtgttggagacgctcttagttaatatgctgctttctttttagttatcattgatctggattgatctgagattatattgaaagcactatgttgtctgtgaaatttgcgttagccaacactagggggatatcaagtccctagcttcttgtgagtatgtggatatctcgcagaaccagttgaaagcactggatgaaatccgcaattgctatgcaattttcatatccgctcgccgacggcggtatataaatgtcggtcatggaaac

SEQ ID NO: 2010 - DNA, 490 bp, Beihai tombus-like virus 11
  misc_feature 1..490: note = strain BHHK128439 hypothetical protein1
  source 1..490: mol_type = genomic DNA
atcagtccattcgtcaagctgatgacttgatccatcaacaatggtggagcactaatgtcaagcaacagcccgagggattatatgtaaatgatggctggtatgttgagaaatgcaccatgcccacgacatattatccgactgatatatatcatcctcactactacctgtataacagattaatagatctgcaggagtttgtgttcggtaaaaccgaaataaaatacatccccgagctttattcacaattgaagttaagatcgttaaacctgccaagagatgatttgcatcataatcaattaaggtccgcggcagttcagattcttaaccagaagaacatcaatcccacaagggttcatgatgctctgatgggttcaattaccagagccatgatacctgatgatgatgagttatcaagtatcagaattcgcaaatccggtcctgttaaggccaggcagagcgaactttcgggggaaggagatccaagcacccg

SEQ ID NO: 2011 - DNA, 491 bp, Alternaria alternata hypovirus 1
  misc_feature 1..491: note = strain YL-3C polyprotein gene,1
  source 1..491: mol_type = genomic DNA
gcctgtgggttcccgactcaggccgccctttcgggcgtaatcggggtgtagttactgcgctttcagcagtcaactttgtcaagatgatgtatctttgactgttggcgttctttaaactacggttgtgtctaacgacacgttctcttaattgagagtcacgctatgcgtgagcccaccaagtggggttgctgggtttccagcggttgtcgctcgcgacagtttcatagggttcacgtcgcccttgctaaacgacgaatttggttttgcttcctggttatactgtgccagccttggtggcacttaaacacttgaatgcgcacaccttgaatcgtttcgccgtcttcgccggtgtcaggatttagggccactgttctatcaagagggataagccgcgcctgtctgtgggtagttggggatgaatagacgtccgtggtgcaacgtgcacggctcccatttcaacaactacttggacgaatcagagcgtaaggtaa

SEQ ID NO: 2012 - DNA, 491 bp, Hubei tombus-like virus 34
  misc_feature 1..491: note = strain WHBL73047 hypothetical protein 1,1
  source 1..491: mol_type = genomic DNA
gtttcggtacgccgaccgtgctcgctcagtgcgagcacaacgcgctaaacgcgctgtacaaacgccatctttctgccccacctaacctttgcacccgccccttccactcgtgtttcctcgactacattcaaactaaacttgttcctcagtttcattttgtccggcaatcctgtgaaggcgcatggaagaagaagaagacccaatctaagcttgactcgatcgaccggtccgttgtttatgaccggttcgaattccaaagagcgaagtcctttgtcaagcgcgagattagtgtcaaggttccgaagaaagcccgtttgatacagggcaatttcaatgaaacgacggcctaccacgatcctgatactttcaaggccatctcccatctttttgaagacgtgcgcttcgaagctgaaggcgtttcgttcgtattacggtacacatctgggtgtactaacgccgacatcagccgactgttctccgacgaggttgcg

SEQ ID NO: 2013 - DNA, 492 bp, Marburg marburgvirus
  misc_feature 1..492: note = isolate Marburg5
  source 1..492: mol_type = genomic DNA
ttattgttcgaagattgacaatttgatcactttcagttttcaatttcaacccttatcgcgagatttggacacgatcttactaacttcaataactgaccccaaattcaagtttactaaaggctaagatgaaaataatcactagtttgttgtaaattactcgatcaaaatgttcttaagctatcttcaacttaatgatgcaactctgtttcatctttcttttgatttcaatgtcacagctatatccaagtgtctaattaacaacttgtacctctaaggaaaaccatgaagaacattaagaaaaaggatgttctgattcttcaactgaacttgtatatcctttattgatacccttgagagacaactgttgacgctagatcacggatcaagcatatttcaatcaaacatcctaaattttcaatcgtacacataataaccattttggtagcattgctttgcagtataggataggtggtcgtgaaaagacttccaagc

SEQ ID NO: 2014 - DNA, 494 bp, Human parainfluenza virus 4b
  misc_feature 1..494: note = strain HPIV4b/Seattle/USA/SC0496/2019,3
  source 1..494: mol_type = genomic DNA
tcatacaaatcaatcactgatatagagttaaggaacattttatatccttccccattggatcaccattaccatcctgatatataaaaccacactacactatgcaccgtccaatatctagccgaccataagatcacaaccacattacaccaattcaatcaaggacatccctgcaaacatcaaacaatcaaaccacgactgcaacagacacagcaccacctgatcaagccagaccctcaccatgcacccaagtcacccgacacaaccgcaaactctcgactccactattcaaaacacatcctcgaacagaccacccaaaaacaccgaacaatcaatctcctggccacaacgatcattgtaaattttaagaaaaaatctaacacacaactagagccaaatacagggggggaaaaacgcatccgccgccacacgcacagatccagaactcaaggcaaccaagacccgccagattccgctccatcttcaaagaaatcaac

SEQ ID NO: 2015 - DNA, 494 bp, Human rubulavirus 4
  misc_feature 1..494: note = strain t146a296_HPIV4, complete genome.2
  source 1..494: mol_type = genomic DNA
tcatataaatcaactattgataccaggctgagcagcatcccacatccttccccactgtactgctagcatcattcagatccatagaaccacaccacaccatgcaacaactgacattcagccaatcactaaaacacaaccacaacacaccaattcaaccaaggacatcctcataaacacaaaatgatcaaaacatgattgcagtagatacaacatcaccccatcaaatcaaaaccccatcgtatactcaattcacccgacgcaactacaaatctccgaatccgcccccagaaccacatcctcgaacagaccgcctcaaaccaccaaacaatcaatttcgcaattgcaacaatcattgtagattttaagaaaaaaacaagaacacaataaataccaaacgcagggggggaaaaacacatccaccgtcaagcacataactctaaactctgaggtgaccaatacccgtcgaaatccgctccaccaccagagaatccaac

SEQ ID NO: 2016 - DNA, 495 bp, Cryphonectria hypovirus 1
  misc_feature 1..495: note = complete genome
  source 1..495: mol_type = genomic DNA
gcctatgggtggtctacataggtgagcatgcgttgctcgatatagaccgccattattggtaacacgcttgaagtgttctcatccggagaaagtgatttgctttcttccatgaggctccctggagggattgtccaataatggttgataattttggttgctgcacaaccggggctttgcccggggatttcatcccgttcaaggtgaggcccttgtagtaacctctccccgctgcgtgagcgaatacataagttcacccagtactgacagtgtcagcgccgcacgtgcgtgaaacgtgtgactcgcagactgaagcgacctatggtgaaaacggatgtaccatctagctgtggagtagtgaccctagaagctaatccgatggttccaccagtcgttgtttgccggcaaacgccacaaacggtttcgtgctttgcgtgaagaagcacggtctcttaagagttcattggtacggttgaccccgaacgaggtccgaacata

SEQ ID NO: 2017 - DNA, 495 bp, Gervais tombus-like virus
  misc_feature 1..495: note = strain GUNCC_DN54311-2 hypothetical1
  source 1..495: mol_type = genomic DNA
ggcctattgctagcgtagagttctcctagataacgttttaaatttcttatggcaaaaggaggagttttaaagcagcttaaaccgttggtccaatccctggccgggagttccaggacaatgaaacgaaaccgcagacgtggtggccgtcgcggtggggtgctgaccaccaagggttcgcgtccgcgaacagttaataatccctcgtggggaaggtcgttgccggccgcttacgcttcccacgtgaggccaaggttcaatatttcaagccgtacggcaactacggctgttgtttcagggtgtgatctaatatatcccattccagcaacgctcaatcctgatagtgagaccatattttcaatatttccagctaatcccgcttactggtccggtactcgtatcgcccagttcgcgcccgcttaccaaaattataggccgctggccttcactgttagttacattcctcaagtagcagtgactcaagcggggacagttttc

SEQ ID NO: 2018 - DNA, 495 bp, Picornavirales Q_sR_OV_042
  misc_feature 1..495: note = putative non-structural protein1
  source 1..495: mol_type = genomic DNA
cgggcaaatccctgcgcaatcaattgaccccatgctggctgtaaaccttagtgtatccgtggctgtccccacggagaataagtatgtgaaaccatggccgtagattgattgttcaaaccttttgaaccgcgtaatatttaacctttcgagaactctattaaaatctatacatcagatgcaagcgttgattgatgtatactttttgtagaactatcgcattgtaagctctttccctctcttcctttcaagctggtagcccagtaggacgcgatctccttttaagaaacacacgacggattcgaccccgctcgttggcgcacccctttaggctagtagtattggaacttcattctctttgaaggtaggcaccacgactagaactcgtggcagatagtagactcttttcaattaatttctgattaggcatgagcaaagtagctttgaataactcctcatgactggattgtacgcagatttcatccactgcactcagaa

SEQ ID NO: 2019 - DNA, 495 bp, Ribbon seal picornavirus
  misc_feature 1..495: note = isolate RsPV/WVL17251-06/USA/2005,1
  source 1..495: mol_type = genomic DNA
cgggagagttggcctcacgctgtttagcgtgagagccggctctcctgccccttcccctgagccggggatcttggctcattcccttcttttctatcctccctcattggactttacggatgacccggcataaacttgacaaccgatgttggatttcccttgtggctgtgatggaggacataccctcgggtgtagttgtgtgcgtgtcgctctgcgacttgagcttcaaagtggtgctgaaatattgcaagcgtcgttgctcaattaacggagtgatacaatcctatgaacccaagtgcattcatgcgaaagccccggaggggtgagtagcatggactcgaatcagaagagctagagctcgcttggtacggcacgtagcattgctttgcctaaagaccaagggggtatggctataggtgggggcctatagcttgtctagtgctggttgacagactcgtgctacgcgtctggttcgagtataagtagctgcaactcact

SEQ ID NO: 2020 - DNA, 496 bp, Xincheng Mosquito Virus
  misc_feature 1..496: note = strain XC1-6 ORF1 (ORF1), ORF2 (ORF2),2
  source 1..496: mol_type = genomic DNA
ggtaagcgacatccgagtttataaaaaccctctggttatattacaaaacaaattcattggcatctaattagtaaccgaaactatgagcaacactgtgaatagaattgtatgttggaggtgcagaacactcatcagtgtaaaagcagctgaagatgaaccattccagccttacattcgttgtaatttctgcaacagcaagaactggattgttccttctgggaattaagagtttataagtagtgttgttttcttttcttttgctagctaaatcagtatgtatttctttacatatgtatatattttctattataccttattaaatgtttctgattgagagtatcaatatttaaattctacatcgatagtgagaaacttaatttagaaaaaacctcgtggtcaaagttacacgcaacctagaaaatataactaagaaagaaagagagaggaaaccaggtacgacacctactcaattggcagaacatcattccacttcgag

SEQ ID NO: 2021 - DNA, 496 bp, Picornavirales sp.
  misc_feature 1..496: note = isolate H2_Bulk_34_6 hypothetical protein1R
  source 1..496: mol_type = genomic DNA
agagacaatcggatgagttcttctcctttaagtaagaataggtagggtcttaacccctaggttgcggacaccttaagttccgctgctaggtttcagtgtgatcttgttagtgtatataaaatctatagttctaaaacacttaagcagtgctgctgaaacaacgaggtgggctatttagccttacttccaggaagcctggggagcagccctcccaaattccaggaaactatagtacggatttcgttagcttgagtaggctcgatttcttaaaaatttacttgctacaattaataacaattcgggtggctccgattcaaaagctaacttagctccaaacactgttgtggatggagcaggagaaaggacgatagacggtactaccgctttcgtcaacgattcggaagtagtgcaagcgtctattatagcgcctctctccgtttcaagattgctaactcaatcgagtgcagtcgaaaatatagaggatataaaaagatgg

SEQ ID NO: 2022 - DNA, 496 bp, Shahe picorna-like virus 8
  misc_feature 1..496: note = strain SHWC12398 hypothetical protein 11
  source 1..496: mol_type = genomic DNA
atcgtatatgcgtttatacgcatatatgattagtagacgatgtctctatcgataaagaacttcaagtttagtatcccacgtgagatccttggagcgacaccccttttacaaataataccttttaaacgtattttcaggaccttgcatgacaatgattatcccccgcactgaatacaaccatacgtggattgtataagatgggaaccttgacaaacatttggtacgcgccgaaaggccatcggagacataatctccgcacctgtatgtagaccactacctggctctcaacagcttgagactttgtcttaaatcttcggattggaaacggctctatttgggtgtgctgataacccctcatcggagacgctgaggagggagattatgcctttagtgtacgccaccttgtcttgcgtaatgccttggttggtattgattctgggggccagcccagacggagctaagttgcactagagttatactggctgttcatatcgcc

SEQ ID NO: 2023 - DNA, 498 bp, Hubei picorna-like virus 49
  misc_feature 1..498: note = strain WGML112833 hypothetical protein1
  source 1..498: mol_type = genomic DNA
tgtagtttgacaagctacatattatcttctttttcgtcttagtgtgtgctgcactgccatttgtgacagtgtagttatcacgtggacgttttcttctatgaattgtcttctttttctttcttcttttctcttctttttctttcttttctacattttcttttgaaaatgttctctttttctttctttcttttctctttcttttcttcttttcttcatgacctttgtgtctgaagtttcttcgtaatgtttagtacctttttaaaggaagtactttactcatgttgatctccctatgacgttcaaactcgcgagagttgtcttgggctgtacgcattttccttcgggagggttttgtatgtactttttaagtgggaataaccgcttatgtggttacttctttctatgaagtagagctttcgttgtttttctctttaaataacgcagtttttgaaagtttttctgtgataaaattttcatttctttttccttttcttcatt

SEQ ID NO: 2024 - DNA, 499 bp, Periconia macrospinosa ambiguivirus 1
  misc_feature 1..499: note = strain PmAv1DSE2036, complete1
  source 1..499: mol_type = genomic DNA
cttgcaggggttgataccctatggatggacttgatggttcctggtcggtgctgccgtcccaagtccctcgggaactacgccgtaaaagtgttagtcgggccccttgccttgttataacttggggacatagcttggtgctgattgctatgccttaaattgcaccgctttctctagcacaacctgcctggcagtcaactggcaggttgtgctctcctaggcgtttgccacgctggaggttaatgcgtgacctgtgctcaaccggtgccccgccggtcttccgcttaggctaagagcaggtctcgccgcggctgctaaccgcgggttgtgttacaaccagggggggtaaactccagccctaagtgggtccggttctccggtgaatcgctggtggtggtgtcttagcacctcattgccatccgcagcccagtttgtgggtcttcccttggtgaatgggaaaccctcctccccaaattttggttttgtttactggtgatcaacg

SEQ ID NO: 2025 - DNA, 500 bp, Narnavirus sp.
  misc_feature 1..500: note = isolate H4_Bulk_Litter_23_scaffold_4 hypothetical1R
  source 1..500: mol_type = genomic DNA
aaaatcatgaacttaaaatgcagctcaacgataccaacattcagcttcgaaagcttcaaactcaattcattgaattccaaacctcacttaaagaacagcacaaagcaatgatggcaagtatcaagcaacactctgatgcgatgaaacgtctcaaagattatgaagatctccatgaagttgatatcgaatcacttccttccgcaacttcatctcaactccgtacccgccaacgagttgaccaattcatcaataccctcccatcaggaacccagtctcctcatcctgctcccattcgtaaatccaaaattgttgatgaaccactctcattcaagtaatcgacaattcttgataagctgccccttactgtttcattgaattggtttctctatttataaaaactaggagaataatatctttatactacataacgatcaaattcttaagaactatttatcaaccacaaaaaccaactaccaacaaacaaacaaacaaccatcatc

SEQ ID NO: 2026 - DNA, 500 bp, Peach associated luteovirus
  misc_feature 1..500: note = isolate PaLV RP19, complete genome.3
  source 1..500: mol_type = genomic DNA
aacactgagacactgtccggatataagctcgggagactcgtcacctccgtcgtatcacttgttgttagtaactacaaatagcacctaaaaatcaaaaaaacagagtgtttgtttgcttttctgctcactttcttttagaaaatccagatcccactaccacaagtgggtgaaaaatatgggtagggtcggacttagccagtcctgtcggtgaagacactggaggaataccaggtggcgtcttctagggataccgattccggattcggagcctgcttctgggtggacactgcctcggacacaaccgagtgaacaaatggagtcactaaccacgatgaaatgagtgggagggtgaatcgacctcaattacgtcgttaaactggttggagttcctaactactcggaagttggggagaaagtcatctcaaaatgatcgttcaaagtcatcgagaaactttggcggctagggcttgcaattatggacttggcttttgcctagaaac

SEQ ID NO: 2027 - DNA, 501 bp, Soybean yellow common mosaic virus
  misc_feature 1..501: note = strain spider132820 hypothetical1
  source 1..501: mol_type = genomic DNA
ctggatctttgtacctttgtgccacctaagctggtattggtttatctcacaacgcatgtccgacacagtgattgtaaacttttcgctgatccgaactcggtgcgtggaacgctttggcgtgaattccctcccagttggaagacatttcattggttcagaggagattcctacaggcatcggtttcgttgagcggtcttttcaggtcacagcctttgggaactattcagttcctgagagaagccgagtcaggttgatagactgcccagtatcgtgcgaggggacttttaagttcgatccggtacctttgtggctatctgttatctgtcgagtttgccaatctgaggctaaccttatcatcaaccaggagttggtgcctgggtatagtgaaaacagcaagttcgtgttttgcgaccccgaagggagacctttacggattagaacacgaagaggcgtccagcccagcagattttaccaccaggaagaaaagaccatttgtcagtc

SEQ ID NO: 2028 - DNA, 502 bp, Bremia lactucae associated dsRNA virus 1
  misc_feature 1..502: note = isolate DML-A_DN43224 ORF21
  source 1..502: mol_type = genomic DNA
aacgaggtaagactaagagatcgtccgtagggagggtcctaagtcccctctttttgtctggaaaaattcccgatccagttctaacagagggaaataacgaagatttagttctttgtttaagtggtttttcaattccatttttaaaaattgaaatgtaaggcttggacttaaagtaggtatattgatttttgataggcggtcaatataatgaaataagttgattaaagtcgcaccccgaaaaatctagggggcgcccttttactactgtactaccgactacgggacgtgccgtccgaaatcttaagacttagcgccttaatcatttattgattggggaatcgcggcgctaaccagaaatggaggtgaaccacttaaggtgaggcgacagactgcaacggtagggcttacgacattgtgtagcttgaaagagtgaatttggatcgagccgggtattaggggacagtcggagggatttttaaagcgaaagcttccttggcgcgtt

SEQ ID NO: 2029 - DNA, 502 bp, Neurospora crassa fusarivirus 1
  misc_feature 1..502: note = NcFV1-JW222 RNA, complete genome.1
  source 1..502: mol_type = genomic DNA
actggcacgtctacttgggtagcaagggagtttgtattcaatcccacccgatgagggttccttgcgtgcgatagcatgggaagtgggcaacactgatggagggaataagtgttgtctgtaaacaagactgcgacgggcataaagtaacctaaggtcggctggctatggtgattatgctaacaggaagggcaatgcctgggctgtggacatgcaatcagaaatggttgttatgtgcccgagaggacggatgcggcagtcggtcacccaaatgatgacgttaaactgggcttatggtgcaaaccgtgtcacagaggtatgagcacaggattggggacctggttagcaaaatgtgacaccgtatccccctgtggcgccgatcaagtcttaggacacaacaaaagaaacctaaaacttgctggcaccacgaatagtgttgtctagggcacaacacactacaagcgaaacacaacatagtactcaagagtgcacacacaaaacaagg

SEQ ID NO: 2030 - DNA, 502 bp, Oyster mushroom spherical virus
  misc_feature 1..502: note = complete genome.3
  source 1..502: mol_type = genomic DNA
tcgggaagcccgttattacctttttacctgaattttgcggctggttgcttacttcccatggtatcattaggcacccctaccttttgtatgcgaagtatcttttccataaagaaaatggcaccttggccaatgttctaatttcatattacatggaattccaacattcgctaactcttggtgacgctctttgggaatcacttccgtatgatcttttgccctaccaaggccagcttcaacttctttttaatcaagctcgttctcgcgtgccttcctttctgattcgtgagaataaacttggcgatgctcctgctgccaagctttccgctcgttatgatctctttcgtcttccagctgattttatgcgcatggactggcgccttcttccttctagtattagacgatcacttctcttggctaggggtctgtaatgcctggcagcgttgtcatttcttctaatggaccccaattcttcatccaagatcatcgctcaacttctcgctga

SEQ ID NO: 2031 - DNA, 503 bp, Jogalong virus
  misc_feature 1..503: note = isolate P1-10 polyprotein gene, complete cds.1
  source 1..503: mol_type = genomic DNA
ttgttcgcgtaaatcccgactaggcagaaaagtgaaggagtctgcagcgtgtaacgaccaagcccggacgaccccgttgaaacaggtgtatggtcatcgcgagacccggcggttacatgggtcgaatgtcaaggtgagttgacattctaaaaataaactcagttccaaaattggtagaggtttaggcagaataggttacacaacactgtgctggaacgtcgcctctaatgcccgagttcttagggacagtagacgtaagtcggcgagttgacaaaccagtggcactctttgctgtgttgtaaccctatttctggctccctcgttccgatggcggaagcctttttttaggcagccatgcagcacaccaggcggcgtccctcacacaggcggcaagagcaaaaatccttcgggtgagctcggtgtgcacttttatttaacagcgactatgagcagtttccttttgcagcacattgtgctgtgttgttcttggtggacttccaatc

SEQ ID NO: 2032 - DNA, 504 bp, Plasmopara viticola lesion associated ourmia-like virus 20
  misc_feature 1..504: note = isolate1
  source 1..504: mol_type = genomic DNA
gagattagacgtttggcgaggttgtctcgactcagctttgttgagtgtaggagacttctcgcccttactgaaataagaaagtggaaagaaacaaaaaaagagaaacattggcaacgttggacttccctcacgtttgtgaggggtacttgtcccccgcttgcgggcatcgttacaccgatggaaactagtaagtagagcagtggagtaggcccagaaatagtcttggcccgtgtggtccgacttagggtcgctaccttttagcggcgaaaatgctaggaaatattttttcttgcccaagtgcgtagaatcgcgtgcttggggaggtggtcgtacttttgtattgccgggttaaccctccgggggacaaactaccaaggaaagagcctgaggtaaagaaggacgtaggcgtgtgtaggcacccgaacctttgtttcgatgagacaaaaaaaaagtgtcgtcctctacaggacaacttaaattgtgaatcgctcgattcgctttttt

SEQ ID NO: 2033 - DNA, 505 bp, Rhizoctonia fumigata mycovirus
  misc_feature 1..505: note = isolate C-314 hypothetical protein1
  source 1..505: mol_type = genomic DNA
ctcgtccaaatcgcaaccgacgctgcttccgctgccgcccgcctcgctgatgagaacctcgctgctgtcgctgcacgcgacgaggctatagccaagacgcgcgagtacaaagcggaatcggctcgtaaatacccgggagcaccttcaacgtgagaaagatcttgagactaagcatgtggctgacaaggccattcttcaggctgagatcactgctctcaccgctgagcgtgatcacttcgagctggagaatgcaggtaatgaagcacttgccgctggcctcaaagcccgcatccttgacgccgtacgtgacctcgaatctgcacgagctgaagtatccaagcttaaggcagattcggctccattgctcgcccgccttgaccgtgcacacatcttgctcggcaagtactccactggctatggattcgctcgcccgtttgaagaggtcgtccacgctgaacttgaccgctccgacgacgagttgagtgctgagcgcaatgaagggtat

SEQ ID NO: 2034 - DNA, 505 bp, Rice Picorna-like virus 2
  misc_feature 1..505: note = isolate FYBPH-9, complete genome.1
  source 1..505: mol_type = genomic DNA
gttagccacccacgttgttttttccaccagtcacttgactgtgtgttcagttagtatgtgattacactgtatggtatttctagttgcgactagaagcagtccattttcacatgctagccggaatgcattttcgagcctggtgttttactcttcttttggctaaagaaagaaaaccagttaggtgtgtttcagcaaccactatcatagtctgacttacatcgctactattttcagtggccttcgtaattttacgggccgcgctattctttgagtaggaacgtacgcctccgttagaaggctgagctcaaggggaacagggcatagccccggcatttttgtgccgctggattgtgaccccttgtgtgtaggttgacttaggatggtcgaattcctgacacgtatatcaaaacgtggccacctatcagatagtgatacgttaggtgtgggctgtgagcgcctgtttatcactttgccggcgggctaacgctcttcttgtcgcctgggc

SEQ ID NO: 2035 - DNA, 506 bp, Epicoccum nigrum mitovirus 1
  misc_feature 1..506: note = isolate CREA-VE-34SY2, complete1
  source 1..506: mol_type = genomic DNA
ctcacgaaacctgcacccgggaaaaatccctttcgcagacgtgaatgatgataggatagttgttctagggaacggtagagtaagtttaatttcgaacctactccacttagtacggcttacccagctagtagcgctcagaaaactgtgaaaacaggactatggccactttagtttggaagttaatggcgataaagtatctactcccccgaaagggaagaagagacttttagccctccatactcactttatgtggaaattagcagcgaaaagtcagctatgggttaacccagatgctgctctctaagctaaatccaactctcagatgtagaccgtcttaacgatatcctttacaggacccattaatctggctttgatcaggttaaagtgatggtttccagaagatacagagttcgatacggggacagtgagacactgaccgagtaccaaatgctctagcacctctgaagtttaccaggagttcaaagcctggctacctaatacttaaa

SEQ ID NO: 2036 - DNA, 506 bp, Avian metaavulavirus 21
  misc_feature 1..506: note = isolate APMV/dove/Taiwan/AHRI33/2009,2
  source 1..506: mol_type = genomic DNA
taatcacctatgccagttggttctagcttaagccaattattcactaatcactgctaatcatccatcatatgaagtgatcaactaagagagcgcccattaatcacatgtaatataaggagaaaatcctcaacggacaaacgaatcgtttaagggcttgaaccacaatcagatatcaagctacagtatgtcaaatcctatatatacattgtccatattgctacgtgagtccacactctattagctgccagaattcttactcctataataataccaagtcattataaatctgcctgtcaagatgatcgctcagataccacttaggttaactgtcaagttatcaaagtctataacaagcctgtctggatctgatacaaaaagagcacagattgtgatcttaatcccatcccttgacaacataaatctgattaactatgcatattcaagagaaattaagaaaaaacgggggggaatttatacgaattgcggtcacaaaagtataaccgagc

SEQ ID NO: 2037 - DNA, 507 bp, Agaricus bisporus virus 15
  misc_feature 1..507: note = isolate AbV15-003, partial sequence.1
  source 1..507: mol_type = genomic DNA
ggttaccctgcggaagggtggtaaaagactacgggtcggcagactaagcatctgtaccgtacgacgccttcgtaccgtgttcgaaaagagggtggaactggatcttaatctctgagagaatccatgtcctcttagtagtaggtgcggaatatgccaagctctcctgacgtggagcagcaggagtggttaccctgttagggataagggatctgtgcgacccccccggcataatcgtttagagctagccaccgtgctacggaatgacgcaaagccattcatctctctatccgaagaaaaccacaaggttctcatttttatgaggcaacgacgtacctgagttcagtcctaggacaatctaatccacgtttggtgcagataagactgactcgaaactaagttgaacccactcgccgagctcttcaatgggcggcctaaattgatccagcctaggatcattttagtagtttaggcactacctccatcaacggtcgttttgccaagacctta

SEQ ID NO: 2038 - DNA, 507 bp, Hubei odonate virus 11
  misc_feature 1..507: note = strain QTM161788 RNA-dependent RNA1
  source 1..507: mol_type = genomic DNA
catccataacatgttatatattctttaattatcatatatactcattagcattattacttgattgtatataaccatgtttttgtaactacataactctaaacctaaccaccattgtagctggtattgattcttgtattaaaagttcattaatttgatgtgtgtcttttattgttcacgctgttatgcaagactctgacaacgaggtaatggtctaaatgtgtacaaacttgatatatactgttcctcgtgtatctaaataattaaactaattcattatttccatttatgttgtattctctttagagtgtcaagtcattcaagtcaagcggtagcgggaagagatcaaagtcctctaaaactgtaaaatcagggaaaaagcagaagcaagagggaactccccaaagggttaccagatcaaacaaatttgcggaaagtgcaagtgttctaagtacacttgaaacgttatctatcgcagaacctcctgtatctgccgcgcaacctcaaata

SEQ ID NO: 2039 - DNA, 507 bp, Trichosanthes kirilowii picorna-like virus
  misc_feature 1..507: note = strain pt111-pic-51
  source 1..507: mol_type = genomic DNA
ttttctctcatggaatagatgtgtagctctgagtagtggcatcgaaacccttgccgtaagttacatgataatttgaggctgtggctgataatagtgcagacctcttttaagtgtggactcgcaagacgatttcatgggcttatgcttaagagtagctcctgtagtagtgctctgactagccattgatgaaaccgatcaattattggggttgtgtactttacccacttaaggtacctgtggtaaggattagatggtggatcactaccggtcacgcctggcgagtaccaggtgctcattggagcataagaaagttgataggctctgtgaagcttgaaatcaaacccactgtgtagtgtagacaatatgtgttgattttgattatgatcagacatttaatctgtgaccgttgatacttcctacccactctaacggccttatgaactatatatagggttcgcaatcattcataaggttttatatattggattggctaccctacgatgcaac

SEQ ID NO: 2040 - DNA, 508 bp, Mytgal virus 2
  misc_feature 1..508: note = replicative protein gene, partial cds; and1
  source 1..508: mol_type = genomic DNA
aggagcatcgagcttgagcgagctcgttaaatatacgctcacgggtggttccgtgcacggattctctgaattgtgcttcagacccttttgaagttccgatctttgtatttagtggctgtttgtatattatgcgttcttcaattgttatagccatatgttgtgctagtgctagatgttaggtcaaatttagcactttatcttatgaccagcaagtttaacagatttagaaacgactgctgacgttcaaattcagcagacttttgcttttgatgatagtgagaagcaatttattactaccgttagagacggtgaggacccaactcatgattggggttcgtactctgatgttgatttggccagatggcttgagaggcctattttagcatcgactcatatttgggaggtcggacaaccctttcctcagatttatttcaatccttggtcagcgtttcttgacagccctagtgtggctcaaaaactatcaaatttttatttgctccgttgcaag

SEQ ID NO: 2041 - DNA, 508 bp, Drosophila immigrans Nora virus
  misc_feature 1..508: note = complete genome.1
  source 1..508: mol_type = genomic DNA
ctaggcacctgggcgggggttaatgagcactggaaataagaaacgcgagacaacgctttgctgattacgtataagtggagtatcggggagtaaaatcctgctgattacggttatatggagtatcggaagtggcaattgctataaactgggtccggagtaaacaggctgtttattaattttacgttcaaacctattgcaacaattccttacaacaacaaaaagttaaataggaaacttgaaaaattcctatcttaataaagtatattttgttttgttatcactacccgttttaattaataggctctgtaacattcataatagaaatatttcgtaatgataattctcatcaaaagatatcgatgtaaaatgtatctgtagctattcaattatattaattgagcttagcaatcgttaaattattataatttaaataataatttaatctcaatctagcagattgaaaaacacaaaagcataagtgtataaatatgcaaacgatggaagaaga

SEQ ID NO: 2042 - DNA, 508 bp, Hubei picorna-like virus 21
  misc_feature 1..508: note = strain WHBL73090 hypothetical protein 12
  source 1..508: mol_type = genomic DNA
agctatatacgcacaagttcttttaaatgatttaaacgctcaatttggactagtggacaggatgctctatgcaacaagttgttactactcaggactttaaaaccagagaagagtgtttacacatgtagcttttgaacgggcgcatgtgaataaaagttcagcttctaatcaatctaacaatgtcataccagagagggatgctctggaagtatgtgacaatattacatcccttgctattgacggcgtagagaccacaggcgttactacgttcgctcaagaggcttgtgagcaagttgacgttttgggaaagttctatgttcctactagcgtagccactttgcagccggagttgcaggaccttaaagaatattttcgtcgtcctcgcgttattgcccagggtccttttacgcttaacacgcgtaataatccagttcagttgaatttttcagattctaatttcgagacgttctttccaggtgcacgtacgcgacttttaggggtttatggc

SEQ ID NO: 2043 - DNA, 508 bp, Wenzhou picorna-like virus 26
  misc_feature 1..508: note = strain WZSLuoII93478 hypothetical1
  source 1..508: mol_type = genomic DNA
tgtgtatgctacaacatacacactcagtttaacggatctatccgttaaatagtttgcccacttctagtggtcgcttttcaccaggacttgatcctgtcgctttttaaacaacaaaccaatactgttttataatgacgatttgatattgtgttttagttagacctgcgtggttcattagtactgccttgcgaggaactggaaaatgaattactagtcggaccttttattaaccgctgcatgcaagttatagatcctaacacacaatatgcgagaaggaccaatctttggattatgacactgattagactgctggaacgcgtttcaggctctccgaaagatatagtacggagctagtgaaacaagtctttgtggagcgaaattatctctcactgggattggcactctcagaagcgtgagttcctttcacataagacgtatatctgggaagaaaagagcatcgataattggctctgagtttattaccagacgaaacactttttctgctatc

SEQ ID NO: 2044 - DNA, 508 bp, Beihai picorna-like virus 70
  misc_feature 1..508: note = strain BHBei76899 hypothetical protein1
  source 1..508: mol_type = genomic DNA
tccgatctgcaacaacatacacactcagtttgacggacctatccgataaatagcttacccacttattagtggtcgctcttttaccaggacttgatcctgtcgcaagtacaaaatattattacctacgtcttacgatgatgatttggtattgtgttttagttagacctatatgatttgttagtactgccttgcgaggagctggaacgcttatcattagtcggaccttttattaaccgctgcaagcaagttatagatcctattgcacaatatgcgagaatgaccaatgactttggaatatgacgctgataagattgctatggccccgttctaggcccccgaaaagttacagtacggggctaatggaacaagtctttgtggagtgaaattacctctctctgaaattagcgacttcagctgcgtgagttctcttcacattgtacgtatatctaggaataagggctttataggccctgacgtagtactagacgaaaaactttacattgctacc

SEQ ID NO: 2045 - DNA, 509 bp, Aspergillus foetidus slow virus 2
  misc_feature 1..509: note = RdRp, gene for RNA dependent RNA1
  source 1..509: mol_type = genomic DNA
gggatttttgaccgcccagatgagttttcatcgaaagtttgtcacacatgtttgatgggacacaatccatccccttatagttgactatgtactacagtcgtaattctataagagtcttgcctgctagtgggttcacactagttccgttgtagagtttctgggatcttcggattaaaaccccatacccctcgtaagtcaaaatagtttagtctcagccaagaaagaagctagatatactattagaccactgcgtgcggcactgaaactttgcagacaagatagtctgttttaaatcgacttattagagtcagagacgcctccgttttggcctctatgggtgatgtgccctgacacctccgtctagtcaacgagagtacaatcgcatcaattttcttacacataacttgcctgtttctgggctgccctctctcacgggccgaatatcatgtattcgaagtcttgtgtttgccgggtcaccaaaaccggctaggatttaactccgaaaagtt

SEQ ID NO: 2046 - DNA, 510 bp, Barns Ness breadcrumb sponge narna-like virus 6
  misc_feature 1..510: note = isolate L14,1
  source 1..510: mol_type = genomic DNA
ttgaggaagagtggaagggtgaaccgaaagtttttacaaggttcaccccgtccttcttcttcctgcccgtggtcgtcagtcttggcagctggagtcacaacaaatgttgactccagtctggactggccacgctgcaccaatggtcgggacaggaagcacaattgtgctaccgtcttcgatgagctgtgcggcagcctcacccgtgatggcacgggagagggcaaattcaaccttcagaagctgagggctgctggcatccgtcttcaagacgttccagcctcccttagcaaggttgcatttgctctgactgcgcagaagaaatgtgtatgtcagcatgagtacgactcactcacagactcgctttactttttgcgggctctatgtgagaatcttcttgatgctgattcaatatttcttcgtgctaagacatccgatttcgacattttcttatccacactcttgaagttgaacaacgtggaaagagtcgcagccattaagtattggactgcg

SEQ ID NO: 2047 - DNA, 510 bp, Teucrium fruticans picorna-like virus
  misc_feature 1..510: note = strain pt181-pic-9 genomic1
  source 1..510: mol_type = genomic DNA
tagcgcagacgcaaacatagagtgtgcaagtttattacttgcacactctatgtttgcgtctgcgctattcgaatctttgtaagagacccttattctggtttggaaacgcctgggcgtctgcatagatgtgcagtcccttttatggagcactcttatttattgcagcttaattctatgattaaatgccatcaagtctaactatggcattttacaactacccgtctttattgataggctcttggttatagaattaattaggcctcttttgatgaaagaataaatcatccgctatttataggaagcgaagaattttctatttatagttgtagtgtcattcctatttaggatacggttggacacataaataactaatcttcttcccagcactttggtctataccatctaccccttagtgttgtgtaaaattatggtggtcaaaataacatcaacaataaagaatctgatggttcccagtctacctctccatcacagattcacaatcccgataaa

SEQ ID NO: 2048 - DNA, 511 bp, Plasmopara viticola lesion associated dsRNA virus 1
  misc_feature 1..511: note = isolate1
  source 1..511: mol_type = genomic DNA
aatacgttgataatagatactttctatgaaagtctccctcttttgcattagccctttcgtaactgatcggtctaaggcctgttcaaggctcattgagatctaaggataaaaattcttagaaatattaaagattatcgggggaagattgcgaggacaagtgcctaggaaacacttgaaacaatccttgcaataagaaacctacaaagctgtctataggtatgtgctcagactatagactaaagtataacactgctccctgagacggggggtgtgtccatatgggtaactgtatgtgatgctaacgaagccctatgcggattgcttgaagcagaagcgatatgatggatggtgcaaacgtgccgaaagcaaaattatttagttttgttattaggtgtaacgatcgcgtgtatactgaagagaagctctagccggtacgatctccttggacactaatgcctttaaataagttaggtgggggcgagcccctttggtactgaggccgcatgtaatc

SEQ ID NO: 2049 - DNA, 511 bp, Beihai rhabdo-like virus 5
  misc_feature 1..511: note = strain BHJP63888 putative nucleoprotein,2
  source 1..511: mol_type = genomic DNA
aggcccagccttgcggcagggggtgctggcaccgcgggtattgctcttgctcattgttgaaaccctgccccaacccgctatcaaactgagtctcgtgaacttacctaggcaagcgagtaattccactatataattgtttagaaaatgtatatgtctctcacaagcttattgatgattgtattagagagacagttaggattgattatgtgaaattgagagcctgagatggcatatgagtcatctatatttggaaatgtattatattatcgcggttcttataactagtaggctgtagtgtactgtaaaatgtatgtttgtaggtctgtagcgaattgaagtgaatcaaattatgatctaaaaagccacttaccttattaatactggcatgaccacgtagaatgtagaacacatcatgtatatccataatgtatattagtacttaccttctgttgcttagaaaaaatcgacaaacacaacaacgtctcttaaccagactcacaggtgtcacatt

SEQ ID NO: 2050 - DNA, 511 bp, Harbor seal picornavirus
  misc_feature 1..511: note = isolate HsPV/WVL19023-02/USA/2008,1
  source 1..511: mol_type = genomic DNA
cggggtggttggaactcacctgtacggtgagtgtctagctgccctgccccttcccctgagccggggttctttggctcgtccctgatctttttctatctcccctacttgtttgattctccccgactacggagctttttggcataaacttgttatcgatgttggattgtccgttaactgacttgatgggggacatagccccgggtgacctatgtcttgaagcgtttcctcacatggattcaaagtggtgctgaaatattgcaagcgtcgtttccatgtgtgtagacgtgaataggcatagttagcccaactgcaatcacctgaaagcccctgaggggttattaaggtggactcacaactgaagagctggagtgggcgctttacggtacatagcattgctctacctataggaagtgtctacatggctaagggtgggggcccttagcttgtccagtgctgggtgacagcctcgtgccgcgcgtcagtttgtgagtataagcggctgtaaaccgcc

SEQ ID NO: 2051 - DNA, 511 bp, Beihai picorna-like virus 119
  misc_feature 1..511: note = strain BHJP60437 hypothetical protein2
  source 1..511: mol_type = genomic DNA
agaatgatgagcgcggaaaaataaaaatattgacatatccaacgtgtacgcagtaccattcgaaaactcgactctaaagttagaagacataccacgaccacgaccacgattttgccactattttcttttacaagcagcgtaatctagctttgcatttttattactattattgcttcaaattaagccattagaaagtaaatatttagaattattgtatctcaactctatacatggaaggagctggaattgttcaatactatcaggaaaccaaaattcattccatctctccagcccaggccacaagtctacaaaacgcgctagagggtttgacaagtaacagatcaattagggttagggtcaattctgacctcgacaaatacattactaatttcttaggaactcccagtccgggagtaaatcagtcaactgtgtcaaaggttaacgccagagcaagagcagaacttgctttgaactacgacccagttaggtggatcagctcctacgaggcgct

SEQ ID NO: 2052 - DNA, 512 bp, Marburg marburgvirus
  misc_feature 1..512: note = isolate Marburg6
  source 1..512: mol_type = genomic DNA
gtggcttaaactagcatgagtatttccaggtcaaccacataataatgttggaggcacagtacattatagttgattatcctgtataataaaggatatacttaccctgatttatatttactggtataaaatagtagcatcatcttatcaactagttgtcatacaataggctgttcctataatctgatggtgaaagtataagcttgtagagttaccatgagtcacaactgttgtatattgtccaaaatatatcttgtgcaagtagtgtgtgcttgaatatgctgatgtaatacacactaataatgattgattaagaaaaatcaatgatggatattaaatgtccatcaagcaggtgtcgtaaaatattaggggtttcaaatgctgccagacttactaaattttacataggattatataattctcttcgatatacgttatatctttagcaaagtaatgaaaacagctttatcatgttagacgccaattattcatcttaagtgaatcctttcttcaat

SEQ ID NO: 2053 - DNA, 512 bp, Flen picorna-like virus
  misc_feature 1..512: note = strain SW9, partial genome.1
  source 1..512: mol_type = genomic DNA
tttttttgttgctcgaccgcctaaacgaaggcaaagtgctcgaccctattgcggttgagtatattgactcagtgctagagcgccactttttgcgctacttgaaccgtctcaaccttacgaggtatgagaaactcgtgtggtccggatcatatccgtcctgcacgatcgagtacttgttcctcaaggctcgagcgaaattctatcatgacaatgatagagtctcgttctacgaggactgtcttcgccgattggaatcggctaacgtctactccgtcctgcatgacgaagaatgctctcatgagcccaccgttgacgtcattgagacgtgtgccgcgcacaatgttgtgcgtgttaaacgagtccgtcccgctatttgggatgatttcactcgtttagtggaagaacatcccgttcgagctcctgctcctattcgggatgctacgttgctgcgccgtctgcgtagtatcattagtggtctggtcgcccaccgcactaatgatgtttatgagggc

SEQ ID NO: 2054 - DNA, 512 bp, Guangdong spotted longbarbel catfish picornavirus
  misc_feature 1..512: note = strain1
  source 1..512: mol_type = genomic DNA
gggggttgtgaccttcccttggttctctttggacgtaagctatacgatacatgcgctctttgttgtctggttttgtcacttttgttttgtgttatgtttccttctttctgggtgttctagcaccacccaagtcttagcgggttttccgattctatattaagacagatgctagctggctccgtattcaatccatctgagcctgtgtaaagttcttttgatttcttgggcttgcttacaccttgccaaaggtttgttttgagtggcggtggtttggccacgtggtgacacgtgcccccggacgtactatcgctatagtgcggaatctcattaaccaggaatagattgaatgttaagcaggaggtgatgttttgatgcgtagttgggcagctctttggacactagggaggtaccccttatgggatctgactctagggctatgaccatgatgctgcaaaaatttgtttccctttttaaaaacacacgaacacaacttaatgaaataacgatttgaa

SEQ ID NO: 2055 - DNA, 512 bp, Hubei toti-like virus 9
  misc_feature 1..512: note = strain QTM27092 hypothetical protein gene,1
  source 1..512: mol_type = genomic DNA
gcaaataagaaacctacggcctacataaatattaatgcatatctacaacataatagacatcgcacagttgcgcttaagttccaggtctttgcgcgtgtggctaggggtcataatatgataggcattgagacagtccaccaacctatgtttgatatggaacgattccctatggtgaagtttggaacggtggttgagtatatttgggatagacatgttatacgagcagcggtgatagacaaaaatgattttgtcaatgagaacgacttcaatactatgcggcattgtgctatacaaagaagtcagtgggcaggaatttgtttgcccaataggtattatgctgtaaacatgaattttgatatgttgcctattttcgcagaactagatgcacatcgtactcgtgaagtacctaaaaatgacgcagcacaaccaccagctccagctgttgcagtggcagataatgctgaaacagcagaaatagaacagaaagcggaaaactaatttgggctaatgtc

SEQ ID NO: 2056 - DNA, 513 bp, Serbia mononega-like virus 1
  misc_feature 1..513: note = complete genome.2
  source 1..513: mol_type = genomic DNA
tatgttcaatatatataatagcgcaagtgcctctctcttttaagaaaacccgccagtcatacatcaccagtgaatgctgataattgcaaggatgaataattccatagtagttttcagcattgtcctcattgtaggtttactcactggaggggtctttatcatgggtcggattacatccgcaggactccagttgtcttacacccctggctcactcttttattttgtattccctaatttttcgactatggccatagaggcttcattagtttacaaagtccttatatttttcgtatcaatattgatcctctctctcctgtcgatcatctatctgatgcacaaggagataatatctacgataagatgggctagtgaaacatatagagagtcaaggatgtttttgcaagcagcagcaaggtcagggcagtcaaggggaccactgcctgatttaatgagaccctaagtgtatggctcagtaatcttttatttacaaaaacccgctagtcaaccatcata

SEQ ID NO: 2057 - DNA, 513 bp, Tetranychus urticae-associated picorna-like virus 1
  misc_feature 1..513: note = isolate PK13,1
  source 1..513: mol_type = genomic DNA
tttaaataagagtgtgcaagtaatacacttgcacactctaagttttcacatgagatgaccgattgtttggaattatatttcactcaattggaaacactcttgtgtgtctgcttagatgtgcagtcccttttatgaacacctcttatttaaagtattcatttgttagaatttatacatgcgccatcaagtctaaccatggcgtttgttacaactacccgtttgttaaataggctcttggttttaacatttgaatgacccctttgttgaaaggataaatcaacctctttcgtcttgaagcgtggagtttcaagtgaatgtagtagtgtcattcctattcaggatacggttggacacgtaaataactaatcctccacccagctctttgaactataccatctaccactaagggctgtgtaaattcatggtggtcaaaatgataatgaaaataataataatcatgattcgaatggttcccagtctacctctccaagttcgattcataaccccgataaa

SEQ ID NO: 2058 - DNA, 513 bp, Beihai picorna-like virus 18
  misc_feature 1..513: note = strain BHSC157282 hypothetical protein1
  source 1..513: mol_type = genomic DNA
cgcaagacgcatgttcagtattgtttttgtatttgtattgtaggtctaagtccttggactttgagttataattttataatgcaaaatctttttacgggtgagtaaacacctcctttttggtaaaaaatcaatcatatttaatgatttaatttagtcaccttttaggcgatactgcatattgttccagcaggatagtattactattgatagtaatagttctactattgtcgaaatgaccgtatgtatagtacacatcactataagaaccggtaacctttatggtaagggaacacaggaataccgtttggtacccatattccacgcattgaagacaacctcattatctgatgatatgcgtgtaggagtttttctttcctccttgtttataaaaacctcactgagtcagttccacatctgttaaaaatgtgggcacaactaaagaccgagttgtgtagttaggccttttattttatttttattggaagcaatagagcttcccagacaaattttaag

SEQ ID NO: 2059 - DNA, 513 bp, Wenzhou narna-like virus 7
  misc_feature 1..513: note = strain WZFSL82100 RNA-dependent RNA1
  source 1..513: mol_type = genomic DNA
gggaataaatattccttacacaggccttaagccttctagtttatattgtactagatctattccggtatagtatagactttaggtatgatagcgaaacccgtgagggtacgtttaatatcatagaggtctatcttcagatactacgccacgtatttggaggctcataagttcttagggcttacaaccctacggtctttggcatacattgtaaaattacaacataagcttagatcgcagttaccagcgatatctcttcggagaaaaggtaacagaactgtggtgaacgatgttaacaacgtagttaacaacgatgtcctttataaagagttcgtaagatcctttggtaagatcttacgactttataaagattggaagtttgtccaaaaatttgctcgtcggattgaaaagaattacttctctacaaccgattacaaattgaattttggacagatcccaagcgaccgagccattaagcgtgtgaagaacacgctgtgttggtgcttttcatatatt

SEQ ID NO: 2060 - DNA, 514 bp, Fusarium graminearum hypovirus 1
  misc_feature 1..514: note = strain FgHv1HN10, complete genome.1
  source 1..514: mol_type = genomic DNA
cacagcctgttaaatccttcaggtggccccgtggggtctaaaggagtggatcgtcctacactttcagtaggcttcaaattagacgtgttactgtctattgaaggtgggtaatttaccgatccggggctatgcccgcgagctttgctcgagacaattgtcgtgcgttccgtgcgtgaggtttcctcgtgctttagagcgtgactttgtcatgttataatagtcaagttgtgttacgcatattaatattaacacaagatgagtcccattctagcagtcatgggaagcgcatttcaaaagaatgctgtctaggctggaatggaagaggccagttggggtcttgacttgggctgtacccaagaactaaccaggattgatagggtcaggagtagggtgtgttctaaccaacatcatctcctatctagtcaccttgaattgagtgggtaaaggtgacgaataaattccactctccaaaacaaatagtttgaaggagttacctgccgtctcccaaaaaggc

SEQ ID NO: 2061 - DNA, 514 bp, Botrytis cinerea fusarivirus 1-S2
  misc_feature 1..514: note = complete genome.1
  source 1..514: mol_type = genomic DNA
tttggtgtgacaaatcaaccctgaaatagggttgacgactcgacacgacaacagtttcttctaagttgtcatgatttagtaagtctaaaactgttccacaccgaatttcaaagaaattttgaaaaacgatacggaaagttcttgaattggacaaggcttttcctgtcataaggcaagattgtgcttgtgtgcgctctgaccgaaccggtgggcaaggactggagcataggaaggaccatttagtatgggcttagtcgggcacaagtgaaccgtggggtccaaaagactgcttaccggcttgtgcttagggcttagtcctgaaatttgcgtagtaccccagcttctgttcttacctacttaaagggaaatagacgtggacactagactacatggaaagacatgttgacacagaatgaatagtattctacaaccaacaaaactcaacatttatgaagacaccagacaaacctgaacaagtaattatccgacacccatttagtaattttagtgaaag

SEQ ID NO: 2062 - DNA, 515 bp, Lentinus edodes dsRNA virus
  misc_feature 1..515: note = RNA-dependent RNA polymerase gene,1
  source 1..515: mol_type = genomic DNA
ctaaggcaaagtccaggcacaaaaagcaaaagccgagagctcatcaactgaacaatagatgcttggattccctttttgaacatgaatgtatattgtgcactgatcagatccttgttgggccaaaccaaattgtgattgaccaggataatcacctattccgtcgacctattccatcgacctattcgttttgctcattgttcattctgatcgaggctcccgcgtaccgcgttgtttgtatcggtgtacgcgtccgtgacaatgacggtcaagcaaagcgggccttctataaatggtacttgagcgtactttttccctctttgaaacccacgaacgtgactgagacgacgagcaaacggtgcacttacctctagtcgctccagtgcatttgtgctttcactagacgttcctcttcttcctacgcgctatcttacgggcttcttcgcaatggatcacttccaggctcatgcgccctgcgttgggagctcttccgataacatccagcaagccgatgtgga

SEQ ID NO: 2063 - DNA, 516 bp, Wenzhou picorna-like virus 2
  misc_feature 1..516: note = strain beimix73672 hypothetical1
  source 1..516: mol_type = genomic DNA
gtgtgcatagctatttacttagctatgcacactacattggtatttgtcagtttaatgctgacacattatgcaactacacagtcgcctttatgatatttatcgtttatcagggctactacatagtcgccttataaacttcaatgtttatcatattgtatgtttaattactgatacttttaccggcttaaaagagccgccgacatttatttgtccgaaatcttttttcttttttggtacgcctgttgaggcatttaataccaaaaccattttcaaagagaggtacgacagttctctgctgtcttactctataaaagcctaccccaaagagtagaacttgagggatgatatgagttttgcgctacttgactgcgcttattattaaagcgtcaagccacaacctacctgtcagttaattttcatgaaattattcggcagggaaccgtagagtcgcgggtgccacgacttgaaaggacttgtccttagcatgcaccgtacaccgatgaaccttacgaggtg

SEQ ID NO: 2064 - DNA, 516 bp, Hubei tombus-like virus 1
  misc_feature 1..516: note = strain SCM51273 hypothetical protein 1,1
  source 1..516: mol_type = genomic DNA
gggtactagacccgatgacggaatttcgctcatgccggccctggccggggggggcagacttcggcgcacgtagacttcggtcgcggactggtgatatgcgcaagagatattctagttaagtcctagtggcaatattgtcccgggtgctgccctgattatagcagccgagtaacctgctcgatcgttaagagaaatataaggaccggaccgcaagtaggggtcatgcataccgtcgttggatatgcatcagcccccacgtaggctcgacggcgcaccacgctttaaaatggtctcctagctggagtgtacgctagtggcagcttgtgtaggcttgttgtcgcgaccacataccctggtccttggtacaccgatggacccctggccgaggttaatggcggccccgcagggcagttaaatatatgcaggtaagctccagccttgagtgggccggtctgacatacgtgagtccgttcgtgcaccagcgttaggtgtacactacccccctacaattacatc

SEQ ID NO: 2065 - DNA, 517 bp, Mayfield virus 2
  misc_feature 1..517: note = putative non-structral polyprotein gene, complete1
  source 1..517: mol_type = genomic DNA
gtacaggcgcatctgagagaagtgttattcgcagttttacgtactgattacctggatcacagattcacggaaaggtcgttgctgtcataatagtgcataatcagagtttattgcaaggggaacgagagtgtaaaggtttacaacggttcgcccgaggtgctttagttttgtgtgatacacgctgagagaagctacatcagtgacgagttacggagtaactggacgagtattcattgaaacggctatatcacggtaaaatacggtgtaattgttgtgtccattgtggaccatcgagaaaagcggtatttgtgataggtcacggagtaaccggatcggtgtccaccgaaacggctgcgttgcgtagtatatagtgtaatcgtgtgttagtgtttattgtttatcattattattttgacaatattcattcattatttagataagcgttatcgtgcattagtatatcgattttagaattattttatattttataggcgattacgagcgttaagcccgcaaa

SEQ ID NO: 2066 - DNA, 519 bp, Yili teratoscincus roborowskii picornavirus 2
  misc_feature 1..519: note = strain LPWC2102151
  source 1..519: mol_type = genomic DNA
ggtcggggagatgtgttcatgatcggttaacaccatcatggatcatctctccccgacctctttttgacccagctatgggttaaatagtacttttcttttctcttttgctttcttttgtgttttgtttgttttgcaacatataacaagcattttatcagtattagtgtctgcaactgtataacaagcaaggtggagcaatcatgcgagtatatctcaattgaattgtgacacacaagtgtgcactatgtggaataaatgccattttggccaaacctggttagccagaccagtagtaggacaatttggcacccttagtgggcgcgacctagatgctagggatgagcaaacctatttcccctgagtacaggggctctccttcacctctacattttggacctctttttgagtatcctcgatagaaggtgaagtgacggtgtaccggatggttaattgatctcattgctgggtgacagcccgctaggaccaggcagcatctttgtatggacctgtacatgtaac

SEQ ID NO: 2067 - DNA, 520 bp, Wuhan insect virus 14
  misc_feature 1..520: note = strain WHZM10168 polyprotein gene, complete1
  source 1..520: mol_type = genomic DNA
gttgaaatccttacaggtgaacccgtctgggtcctaaggagtgagttaccacgctttcagtggtttgcatttgcggtagtgatgtgctactcgctgcaagcggttatttcttttaactcgtgcccttctcgtgggcgtggaagttatcttccgtgatcttttggatcgtggtttcgtttgaaaccgtagctacttttgtgtagctgtgacctacttcaggttgttaatttgtggttcgcctaccacgtagtgctacggcactgtacattctttactccgaagagtttaaactactatgcgtgttggtactcgtgatgacactgatggccgtgaccgtgtgtcaattagaggcttggtctatatctgttgtaaggaagtacctacgaacagattctgtctcggaagacctttattataaatttaagaccttcaaaaccataggcttaaaccatcgacccaaagacgctttcgaatgtgtaccacttcaagtcaatctttggtagggaggttataaatccac

SEQ ID NO: 2068 - DNA, 520 bp, Lasius neglectus virus 1
  misc_feature 1..520: note = isolate Cambridge-Lne, complete genome.1
  source 1..520: mol_type = genomic DNA
atcctgctgctggaattcaggcagctacagcttctacagctgaggctggtgctgttgcaaataaagcggctgatataacaactggagttgtacaaacagcagagggagtggcaggagctactcctgttggaatgatagcgttgattaactcaatgcttggggatgcaactgcagctggtattaatgcttcaaaccaaaatgcaatttcaaaaaattatatacagaattctatggcaaagggatctcaatctggttttcaggctggacttattaaagaatctgagttagctcatgcatctgtaactaatgcaggagctaaaataggaggcatagcaggcccattaggtgcttggtttggctctttgatagctaatgcaattcaagattcaactcctaaggatgattataataatttcaaaacaggatattcctttgatggcaaagttaatccgcaagatactggtttggttggctcaggaactactgctgacctctctggtgaaactaacatgacaacatt

SEQ ID NO: 2069 - DNA, 520 bp, Wenzhou picorna-like virus 22
  misc_feature 1..520: note = strain WZFSL83961 hypothetical1
  source 1..520: mol_type = genomic DNA
atcccgctctttagtgttagtacttgttacacactaaatcctattatctaaggtcaatgtgaacatgtttatatgaatgtgtttgtgttgcaaagtgtttgtcttaatatgatgaacattttgtgattattattgattattagttagttattgttagtttatataaacaaacattaggtttgttagttagtgttagctttgttttgagctgctcatggggctcacattcgtctaatgccgctatttaagtttgaggtacgttgatcgtcacctgtcaaccgctgcctattattacttctacacatgcgagaatagcgtttcccgagtagtgttgacgtatgtttgtttgtatactaacgatgttttttattttgttttctagtcctggtgtgtacaggaattcatcgcaactgtatctttgttaagggtacagcaatatatattatagtcaacttccgtaagaaaaccaacttcagcacatcccaattgtgctgtcgtaattttggaggaacactctaac

SEQ ID NO: 2070 - DNA, 520 bp, Wenzhou sobemo-like virus 3
  misc_feature 1..520: note = 17CxIT-T2-F3 genes for hypothetical1
  source 1..520: mol_type = genomic DNA
actggaatgacgaagttagctactcccgagaatccatgtcttatccagaccatggcccggtagagcggcctgctgacgttatacgtcagcaagggacagctcccgtgtcaacgtcacctacagcacaggccactcctatggccccagcgacatccgcgcccgcagcgccagcttcgccaaccccttcccagccggagggaaacgcgagcagggcctctgcaggtgcggaggcccgtggcaacgccagtctgcaaggaaatgcacagagcggaaacgcttcagtaagccccgcgtcagcaattcctttggaacagcaggcgacagctaccaatggcccgacatcgatgcctgctccgcgaagcgtagcttccgtctccacgtcgaccgatttttcgcggcgcaagcaaaccgcaaagctggtccgattggaacccggagcatcgaccgcgttgagaagagatgccgtagctggaagtgctcagtaacccgctacaaagattttgaagaaaactttgaaatc

SEQ ID NO: 2071 - DNA, 521 bp, Ruddy turnstone calicivirus A
  misc_feature 1..521: note = isolate MW19 genomic sequence.1
  source 1..521: mol_type = genomic DNA
catagctgttatgctatgtcaaatcgaacctttaacatctagttctcactatctcgccttgggatatggcttcggccctctatctcacggttaggtagttctgactgattttttgtttacgactttcttggcttttgtctttaaaaaccatgtgtaactgtaagtgcccttatcgacaggacgcgccccacgtggaattggggaaatctggatcatgggattccgcctgcagtacggaaaagtaccgagtacttagtatgttctgtagtgccccatgtgaagggaccgcctgagctagagctacgggcttggaaggtaaggtaggacgcctttttggctatcctacgatcgtccggcgccgattgcgtggcctcgtgcccctctccggttccgccccgatgatgcaggatttccgctaggggtttgtgacgcctccaggtacgtgaggatgggaagcctcaccaatgcgtagtgctgggtgacagcctgccggctggcgcagttcagtgtggtatagccag

SEQ ID NO: 2072 - DNA, 522 bp, Marmot picobirnavirus
  misc_feature 1..522: note = clone c207479_g1_i1_libraryC_2529 segment I1
  source 1..522: mol_type = genomic DNA
atttattaatttatcaacacagaaaggaggaatctattgtggtttgtaaaatcattaattcaaaaccacatagtcactcagtaatcgccaaatcacagtggatgctgtgtactttagcggttgagtgcagaaaggaggtatatcttgacagatatacaaattaagtactggggtctcaaagaaaccggtcgtcacaatctcgctggagaaagacaagcggctaatgaactgaaagagactcacagacacaatgtcactggtgagaaagaaaccaaacgacataatcaaacctttgagggtgagacaaagagacataatgttgctggcgaaagagaaacgcataggcatagtgtcgtgctcgaaggtattgagaaaggtaaactcaaagaggttactcgacataacgtagcttctgagagaattgattctggtaaattgtccgaatccaaaagacataataaggttaccgaatcaatccagcagcaagatgcaaatacaaggcttcaagttgcttatacccaa

SEQ ID NO: 2073 - DNA, 522 bp, Swine hepatitis E virus
  misc_feature 1..522: note = strain HB-S3, complete genome.1
  source 1..522: mol_type = genomic DNA
gcccggcactctattgtggaacaccgtttggaacatggctgtcatagcacactgttatgagttccgcgacctcagagtcgcagcatttaaaggggatgattccgttgtgctctgtagcgattatcggcagagccgcgacgctgctgccttgattgctggttgtgggttgaagcttaaagtggattttagacctattgggttgtatgctggtgtggttgtggccccgggcctcgggactctgcctgatgttgttaggtttgctggccggctctcggagaagaactgggggccaggcccggagagggcggagcagctccggctggccgtttgtgattttctgcgaaagttaacgaatgtggctcaggtttgtgtggatgttgtttcgcaggtttacggtgttagccccggtttggtacataacctgatcgggatgcttcagaccattgctgatggcaaggcacactttaccgagacaatcaaaccggttcttgaccttactagctccattatatatcgggtgga

SEQ ID NO: 2074 - DNA, 522 bp, Blattodean phenui-related virus OKIAV267
  misc_feature 1..522: note = segment S cRNA sequence.1
  source 1..522: mol_type = genomic DNA
gccttctcatttatataagaactcttcagtgatcaaaagatgtcagcatctgtgtgatatagcagttggactggaatcatttgctggttcagcaaaggagacgaatccagtttttaaagattaccatggtctttttcacataaataaattacctgctatcaacagcctggcatctcatgttccagagagtatcgaccttgctttcaaactaaaacggaggaaatttattatagagaaacttcatttgccaccagaacttcaagagacaacacaaagagagcaagatgatatgccttctgctagagcagttagttgtggtgttggtggtgggacaagaaatctggatttttaatattcttgagttgtctggtctggcattggttgtactgggtgccatactgctaactgatgtccccagagtgctgttgtcccgacttttaggctccaatcacacatagacggagaccacatttgaaaaataattactaatctcgtgtgaaattgtaattagcaatcatcaag

SEQ ID NO: 2075 - DNA, 522 bp, Wenling picorna-like virus 9
  misc_feature 1..522: note = strain WLJQ104209 hypothetical protein1
  source 1..522: mol_type = genomic DNA
ggggaacactttcccccatgctctattttaacctcatatacgactttgtatttattaaaggatttggatcgcaacggtcctcttcttttcttactacaaaactcgtatatgttgtatcatcaatcttatcttttcattacaactttacttatcactttatcacaaatttatttgaatgttaacttctcgaaggtatggcaaacaagaatgtgtgagtgtggtttcacgaataaagggtattaggtgcaagaatagcttaaagtatatgcttttaaaacggcctctatacacctagtatactggagtatttaagtatcaaagggatatctatgattataggaaatcgatatcaactggtgctgcttacttactttacgtaatagacttggtaactctattataggtaaaactcacggaacgctggatttcttaatggattcgagaacggacacatgatagtatttaacatcgatatgagacatgaattacctcatatcatcataattttcacttgaacaaacc

SEQ ID NO: 2076 - DNA, 524 bp, Wenzhou picorna-like virus 28
  misc_feature 1..524: note = strain WZRBX42853 hypothetical1
  source 1..524: mol_type = genomic DNA
atacaactgaaagcagttaaccccgattgaacgtcttgtccacgatacgtgacctgtgaccgagagaattctactactttgttttcgcattccgtcgctattattttcctatttaaagtaagaggttgcctagagcatttaccaggactctgttaaatagatgagattttgtgtgttgtctaacaaaacactcagggccaagtattccctctaaaatactaaaccgtcttaagtagtgagctatctttgattgtattgttgattatcaaccaacttccgcctttgattttagcccgcaatctgaaaggttatcagttataaaacctccgcgatcgacgactcaagacttgttcctctgttggtactcgattcgccgcccctattgcgagaattagaagagatagtcccaagctaatctactttgaagaatcattgtgatctccacctgtacttgataactaccagtgtattttgctttgattgccatagttgtttatcgattaaagtcctttaggtactcaacc

SEQ ID NO: 2077 - DNA, 525 bp, Changjiang picorna-like virus 13
  misc_feature 1..525: note = strain CJLX40994 hypothetical1
  source 1..525: mol_type = genomic DNA
agcgtgcttaacagcacgttgaaagtaaattgttcgaccagagcatgcgtaaaactgatgcctcttttgaggaccacaatctggcgaagagtcatattgaagtacctctaatcagtgggaggagcccaatagcgattctttttagataattgaaaatggactttttatctcgcttcttcgcgcgagtaataaacacgaagaaaccaaaattataaaatttttaaaaatagggtcgcaggcttgttacctgcaaacacattatttagaccccccaaaaatagaagctccgtagtttgtccgaattgcggctcacttggtcattaagaagattccctgaaactccgccaaaagcgattgtaacgtaaaggaattatttcgagaaaccgagttgaggtgtgagataacgatattctatgccttccttcttttcccaacaagaagataaacatgttgaggaccttctgaagtggttatcttcagtgacagggtgaaagcacccaatccaaatttaacattttcttaatc

SEQ ID NO: 2078 - DNA, 526 bp, Bole Tick Virus 3
  misc_feature 1..526: note = strain 15-CYL glycoprotein and nucleoprotein1
  source 1..526: mol_type = genomic DNA
cgttagagatgagttagacggggttcttcagaaggattcagagaaatttgcgtatgatactctgactcatgtgctccacatagtgcatagattagcaaccatcgaaggattccttcttattgtaacacttgttcaaaaaggtgaagtaagcgttacagccaaacactgtaatgacggctataggagcttcatccatagcatagctcagcgagttgatctgagagccaacatggcagaacatcctcagggtgcctttgagtacaagggagagaccatacatcctttcaagcattggaaagtagggatgagatggggtgtccaagcaatgactatttcacgtcgcttgtgaggatactgatgtatatatgtaaatatatttagcattagctctgtaatcatcttatcttatatccatgtagtcaatattttatgcatatctcgttcatattcactcactgtattaaaaatggagacaggattcaattgatcgatttttgagcagatacactcttcctcagagatcatc

SEQ ID NO: 2079 - DNA, 526 bp, Beihai razor shell virus 2
  misc_feature 1..526: note = strain BHBei76898 hypothetical protein 12
  source 1..526: mol_type = genomic DNA
gggcgtgacctacgtcctggtcttcattgaccgcaccaaaaggatctatatattgatctttcacgaatatgacggtaattgtgaagtgctatatatagtaaagttattagcgccatgtgtaggcgtgaacgcgaccgtcaataacacttcagcgtgcttgagcaggcatgctgtcgtacatagattgctcgccgctatcaataacaataataacaatgacaatacgcttgttggaaatcgttctgccttagaaactgaacagaataccacatttgtagaagacgcacctcttaccattacaccaaatgttgtagtgacagattccacttttaatgacggcgctgttgacaacgtggctttgggcgactggttctccagacccgtacatgttgccacatatgtttggaatgagggtgcactcttggatgaagttctattgccttggtatgagttttttaacattttaaccatcaggaataagctttttggatattcacgtttgaggtgcaaccttcatgctaagttc

SEQ ID NO: 2080 - DNA, 526 bp, Hubei tombus-like virus 18
  misc_feature 1..526: note = strain QTM27278 hypothetical protein 1,1
  source 1..526: mol_type = genomic DNA
cggaaatgcaattgatcaggactgccgagtatataccaacgcaatatcggttggataggtttaatgagtttttcaggactggggacagcagctccagcgcggctactggccccaagaactcactaaacaaagtgaatgttgtgcgcaagtgcctctcaaaacgttggatagtaggcataggattattagccatggcaagcctggtcattttgcgaaaaccgcagttaccgttacatatcccaacattatcgcgtatcatgtaaatactcatagtagttgttattgtaatgaattagttagtatatataatagacatttagttgataggagttatattaaatatgataagttagctataagtaagggctttgggttagttgataagttttatagcaatgttaaggtacataaacttagttataatgatatcataggggaatatactggtagtaaacgtaggttttataagcaagcattatataagttaattaatgagggttttcagcgtaagtttagctatgtgact

SEQ ID NO: 2081 - DNA, 527 bp, Trichoderma atroviride mycovirus
  misc_feature 1..527: note = complete genome.1
  source 1..527: mol_type = genomic DNA
tttggaactcagctaatacactggtggctgagctgaggttccaccatctaattaaactactcaaatataccttcactaggaataataaattatatatatccctcgtggacgtgattaacgaagtagcaggccacacctttaaattgagctatttagatgataaacagaacttaaataaaccgaagtttttctttgattacgatactgttgcgcgtaaacacaactttaataatgaacctactgaaataaatggcgcaatattacgctggatcttcctacatcccactcctccaagtgtatatgactacttaccaaattttaatgaagatatcagattagaggattccattcaagttcttccagcacgatcataccttaatctagcaagtgtgccgtatgttccaccagaacgtttaggtgacactgactctaaaaatgagtatatagaacttgaccctcacactgtgggcatagccgttaagaaacagaattcagtactcatagaagaatggaatttttatcataat

SEQ ID NO: 2082 - DNA, 528 bp, Venezuelan equine encephalitis virus
  misc_feature 1..528: note = strain 69Z1 structural1
  source 1..528: mol_type = genomic DNA
gatcgcaagcagagtgttgagagaacggctaaccggatcaccatgtgcagcattcattggagatgacaatatcgtgaaaggagtcaaatcggacaaattaatggcagacaggtgcgccacttggttgaatatggaagtcaagattatagatgctgtggtgggcgagaaagcgccctatttctgtggagggtttattttgtgtgactccgtgaccggcacagcgtgccgtgtggcagaccccctaaaaaggctgtttaagcttggcaaacctctggcagcagacgatgaacatgatgatgacaggagaagggcattgcatgaagagtcaacacgctggaaccgagtgggtattctttcagagctgtgcaaggcagtagaatcaaggtatgaaaccgtaggaacttccatcatagttatggccatgactactctagctagcagtgttaaatcattcagctacctgagaggggcccctataactctctacggctaacctgaatggactacgacatagtctagtccgccaag

SEQ ID NO: 2083 - DNA, 528 bp, Yongsan picorna-like virus 1
  misc_feature 1..528: note = strain 16-0061/ROK/2016 putative1
  source 1..528: mol_type = genomic DNA
ccagtaggtctctaatccgatccaatattaccgcgcacaaagtcgaaaacagccttataacaagactccaagcacttcttcttcgagggtccaacttgttttatatgaaacaattgtacctttccgacgcgccaggtcgaattcggttattcaggaaactactacaccaccgtcaccgtgttcaagcgagtcggaaaggtacaattgtttcatataaaacaagttggaccctcgaagaagaagtgcttggagtcttgttataaggctgttttcgactttgtgcgcggtaatattggatcagattggaagacgcaaggactggactccaataagagcagtgatttgaatgctgatgtcgaggataatgtgcaagaggtttcgaaggaagagaatgttatcattgagggagcagaagtgagtactgttgcaagtgttccccgatcccaattgcgtgaccttgtggctttgtcaacaacagagaaagtttacacatttgctgattcttcttcatctgtagttggaagatgg

SEQ ID NO: 2084 - DNA, 529 bp, unidentified
  source 1..529: mol_type = unassigned DNA; note = Bat dicibavirus clone Bat/CAM/DicV-P2/2013 non-structural1 sequence
acgcatccctccatgcggggtcgatctgcatgtaaaaccaaatccggctatgtttgtatggttacgcacgccaatagaaaagtttgttcatttatcttttctggtttgacgcttcttacataagactgttgtatggcaatccttatttagggatgggtagtcgcccgcaacaaatgatcataaattgtaagattgagggatcttgcgatatattatttatccccttgctcaaattacaaatgtaacgctcaccgagggagcgcataaatctcgggaccaaacagtgttgtataacgattatgcaaataattgggagtacggcgtcgacgcagcgcaagacccaacgtactcattgacggatctcaatgatgcatcacttgaacattttttctcacgcccagttaagatagcttcttataactgggctacagggactgctttatttcagtccgttaacccgtggactacgttttttaataatcctcgggttataaatcgcatttctaattttaaccttattaggtgtaaa

SEQ ID NO: 2085 - DNA, 530 bp, Robinvale bee virus 6
  misc_feature 1..530: note = isolate VN1-8 structural polyprotein and1
  source 1..530: mol_type = genomic DNA
ataaggtaagttaattataccttgtactttattgattatttgtatactatctccattttaaattattgatatgttgtgtgtgaacccatattgatatttaaataataaggatagatatactataattgatactgtatgtaagatttaacgtttaaaattatacttatcttttaaaacacccaaaacttgtatgaaacgcaagtcaatcattcaattagcaaactacccgtatttaatataggctctttgttgattgagtaattgttgttcaaatgaacacctatttaagggttgattaatttcttaatgtgcgtggtggcacctttaaatagtagatttccgtctttctctattcagagtacttttggacgttaactaatgctccatccagtcttgaatgtatgataattaaactcaagattgtgtaaatttatcttatcgcaagtacatcaaataaaatttatgaagaaccagcaaaactcgacgataatttcgcccctgatcttagtaatgtaacaaatactaatttt

SEQ ID NO: 2086 - DNA, 530 bp, Picoa juniperi megatotivirus 1
  misc_feature 1..530: note = isolate ANK_VIR-88, complete genome.1
  source 1..530: mol_type = genomic DNA
acaaaaccgtcattccaaagaggaagacaacctcactaaaaaattacaagttttttagtttgttcgagaaacataccggcgaaagaaagttgggaaagtttctacttgaacagacggaaaacacatataataataaacgtaaattaccagatgcgattgactgtttcaaaactattcaagagatattacaatctgttgatcagcgaagaatcggtattaatccaactcaactggaatattacaaatcaaccttaagacaaaaattgaacggctcattgaaccgaccatttatcgtagcccatagtggtttcggtaagacgacgctagctaaggaaaaatggattttggatatagatgattacatcccaaaagaagtatttactgtgcaaaactcgtcaacttcggcgcctgagttgattcttcaaaacgaatatatttttaactacatatgtgcatcatctggtgtaggtaaatctcacgttacaaagtttcacaatcaaactaatgtctttatcgatatcgatgaagtc

SEQ ID NO: 2087 - DNA, 530 bp, Hubei picorna-like virus 73
  misc_feature 1..530: note = strain WGML140238 hypothetical protein1
  source 1..530: mol_type = genomic DNA
tgatatcatggcagtggctgcggcagcaatgtttggaggtaatgtgttgcaaggtttaatgaactggggtatgcagaaagatgttaatgcacaacaatttggatataatacacaactcattaatcaacaaattaaaggtcaaatggcagtgaatgcagttaattatcaaaatttagctaattatcaacaaacaatggcgagatcatctggtgctccagcttatatgtttggaggaatgtctagtgggatgactcccaatattgggggttatcatgtaatgaatacaggtggtggtgcaaattttatgactggtaattttgcgtggacaatgcctgttggaggtatttctggttatacaggacaaggacgagcaccatcaactgcagatgttggtacccaaatgggtggtatgacggcgtcaactggaacaaatccaatagaacaccaagattaaaattagtctacctatggttcctaattcgataatagatggcagcaaataaacaagaaatcccaaaaagttatttatc

SEQ ID NO: 2088 - DNA, 531 bp, Sour cherry green ring mottle virus
  misc_feature 1..531: note = complete genome.1
  source 1..531: mol_type = genomic DNA
atgagccttaggcctccaacggattttggcaagccattactgtttgcggctgccggcgtctctttggccctgctcattgcagcttacaaaagtcactacttaccacccgtaggcgacaacattcattctctaccacatggtggtcactactcagatgggactaaaagcataagctacaacggtttgaattgccaacagaatcacagccagaacctcttatcaagcaccagcaagttgatcccgcttaccttagttttcgttgtgagctttttgatttatgtctccagtaaatttggcaataggtctcctagcattcagcattactgcattcatcatcgctagtttcaattcaagtcctagtaatagttgcatggttttgattactggcgagagagcgttagtcaccggttgtgaaataacaccagacttgtctgatcttgtcaaacagttgaagcctcattcacatagcttaggtttttagcactaatactgatttgtatttgtgtgtgattagactacaattcattttaa

SEQ ID NO: 2089 - DNA, 532 bp, Carnation necrotic fleck virus
  misc_feature 1..532: note = Dc genomic RNA, complete genome.1
  source 1..532: mol_type = genomic DNA
aacgttgcaatcaagtattgtataccccgattcttctttcgtgtttgcagatggtagctcactttcacccagtcaaatgcgcgcttctccttctcaaagcgctgaaagagagtttgcttaccttctacacagcgaaacgctttttaaatggtgcgcaacctgcgggccttcaatgcggtctgctctcagtgaaattaaccaactcggcaaatacagagaggatgcgaatatcgaagtcgatcttaaaactgtcgggtgtaagtatacaatcgatcgaattagagatttccttaagaatagcaacgactcctcgaacgacgcggttgaacacagctggagtttatctaactcttgcggtgaattagttgatcccagtgacatttcgcgttttaagaagctggttttcggaacgtcatcgtctgttgacaacgatgaattcactgctgtaacccatattcgggattatctagcttactgtttatctttagtcgataggtttaatttaccctcgcttaagggtgagaaagaacta

SEQ ID NO: 2090 - DNA, 533 bp, Le Blanc nodavirus
  misc_feature 1..533: note = strain JU1498 RNA-dependent RNA polymerase gene,1
  source 1..533: mol_type = genomic DNA
tgtaaagcgccacggcttcgccgtttagctttccccttttggttagagcgatgtctatagcttgttcccttggttgcgggtaacgtagtgatggcaaagttggccaactgggattactggcgtacgatgtaacagctggatcgtactgggctctgggatcgaccgtctctcttgaggatgctgcacgcttcgcgcgttagggctagagagagcagctcgtctagtattgtgcaatggtcttgccttgctagctaaaaccaacccgaatttgatagtacgtgaacgcccgcccattcatagcgacaatgataaactttcaagccctaatcactcttcttcttcgttttgtttccttggtttttgatttggcattcttagtgcttcgttatagttttaaggctcttatagcccttattaggcttggttggctccttttgcgcctaccccttcaagtttgtctggccgtagctcttttggctttggccgcagtgatctcattagcaaccgcccagcataataccagctggactgac

SEQ ID NO: 2091 - DNA, 533 bp, Drosophila unispina virus 1
  misc_feature 1..533: note = ORF1, ORF2, ORF3, glycoprotein (G), and2
  source 1..533: mol_type = genomic DNA
ccttaaaaacaagtataaaatatcagcctattaattacctatataaaaattataactaaaacattatattatcagcaatattaaccccaagaattaataatcttaaatcgtaaacatataatcttaataaaacccgttgagtctagtcacatatctgtaataatacccaaaattaaatactatattaagaaaagagaatgtatgagactaaaatcatgtgtccctattgtggaatgatgatcaatgttaggataagtactaaaactgatagtaatttttcaaaaacattagtcaattgtaggttttgtaaagaagaagtaaatatagaattagtcacaactgggaccatagacagtaaagagccagttggttcaaacaaaacagacaggtaagaatcactcctacattatggtataaaagatgctactagaattccatccattttcttataaaatctttaatcaataaaattataatcaagttaatactaaatctttgagtcttgtcacttacgaatagaaaaacccgttaag

SEQ ID NO: 2092 - DNA, 534 bp, Cymbidium mosaic virus
  misc_feature 1..534: note = gene for coat protein.1
  source 1..534: mol_type = genomic DNA
ctaaggccactcagcaccttcatcgctctcacccgcgccaagggcaacctcaccatcttcgatttcaatgccaggtttagttccaccgcctgaccactccaagtcactcttcgtccttgctattggtataactgtggtctccgcactatttgtgctgaagtcccacacgtttccaattgcaggagacaatattcaccgcttcccctccggcggccaatataaagacggtaccaagcagataaatactgtccacctactcatgctaggtacccgaaataccctgactacaatgcttgccgccactgccgccatcgtcatcctctctgcctatatatttcctaccatcctggcaataatattcgccgtatttgcccttgttgcaatacatatcaccacccctgagcccttctgtaccatacacatagacggggcgtctattactatcactaactgccccgatcctgcagctatattaaataaagtagctataggcccctggcgagggttaagttaccacaataacttgaaataatc

SEQ ID NO: 2093 - DNA, 537 bp, Lasius niger virus 1
  misc_feature 1..537: note = isolate Cambridge-Lni, complete genome.1
  source 1..537: mol_type = genomic DNA
tagatgatgatcaaaaagcacttgatgattatgatgcatcaaaatctgacccatcgtttaattatggacctggtgaagaatctgctgcaatcgatactgatattcctattgaaacaggcattgccgagggagctgagatcgcttccgctggaaccccttggggtttggcagcccttataaaccaacaagtaggacaatcagttaattcagctataacaactggacaagaaaatatttcatctcaagattatatgtccaatatcaatcaacatggagtaaatgttggcttgaatgcttcccttattcaaaatcaacaacagcaaacaattaaagctggctccgctggaggaggaattggatctatattcggaccccttggcgctcttataggacatgccgttgctggaacagtacaagcgaatcctgatttattcaatactgctgcttcttcaagtggatggattaatcccactgatacaacagctgcaaattctgcttctgctgctgccccaactggtgactctacaatgcaagaca

SEQ ID NO: 2094 - DNA, 538 bp, Penicillium aurantiogriseum foetidus-like virus
  misc_feature 1..538: note = 115 kDa protein1
  source 1..538: mol_type = genomic DNA
gggattttaaccgcccgttgtattcttacacaaaagtttgttacgcatgtcttgaactgacacaatagttcccctaaaagctatcacgctcccttgtgatgtaactcttttagagtcttgcctactagttggtacaaactagttccattttaacaccaaacacatcaatggattaaacccgtgttccctccccgacagatctacaactcttagcttacagccaataaagaagcttaagtcacgttgttaactcgtcctggagctttcgtgttattgacaattccccctccccctcttttggactgattgtctaaaccccccgacttatatagacagagacgcctctatggcctctatgggtaatgtgccctgtcaacttcctgttagtcactgaagtacaatcgcattcacacacacaaactaccgcttgctcgttttacgggttgccctcattcacgggccgaatatcatgtattcgcaaagtagtgtttgctgggtcaccaaaaccggctagagtcctactactcgataaataagt

SEQ ID NO: 2095 - DNA, 538 bp, Partitiviridae sp.
  misc_feature 1..538: note = isolate H1_Bulk_30_scaffold_1057 RNA-dependent1R
  source 1..538: mol_type = genomic DNA
catcccttttggggcaaaaggtttgacaggggattggtcaccctacaaacttctggataggaccaccctacttgcgacggtagcccgccttacccgcaagtggagagcagtgagggcggatgtttgggctagaaccccttgcgataacgagtactcgatggtacggtcacagagcaaactgtactggcaaagtcgggtcaaggagtcgctgcgacacccagacattaggttaagagtcagttctatggatgcaggggaggcattcaagctggcgcacaaacatttgcaacgcagattgcgagtaactgaagaggcggtcaaggagaagaacttacctccgctgcatcttcagcacttgcgcgctctcattgtcgcgttaaaggattggcactattctccggatagggtgtcgattcttgcgacatgtgagttggcgcgaggctcctccccccctgaaaggcctccccgcattgaacagcggtgggtgggaggggttccaaggccattcgcaataaaggaggagataccaccctcgaag

SEQ ID NO: 2096 - DNA, 538 bp, Solenopsis invicta virus 9
  misc_feature 1..538: note = isolate Formosa, complete genome.2
  source 1..538: mol_type = genomic DNA
ggcaaacgtgtgatccctgcattaactcaacaaatatctgatgtaaataaagagtttttgtaacgctgcgtttgtaactacctgggctatttagtcttacctcccaggatgggtagtggcagccccacaatatccagggaaccatcagtatatactacatggttaagtggcctgtagtacgaataattcacttgctacaaaacaagaaaataattcaatagctcaagctgaggtagcgcctcaggaaggacagaatgctcaggagcaacaggaaataacatcatttaatgatgatcttgctgttattcctgagggagtacccggagagacaccagtcccgtcttttcggcatgatcaattcacggacttttcagaccattctattatttcgtttttagagaggtctcagcttcagtcgtcgtttcagtgggaattcgcgcaatcgggcggtgcttcggggttgaattcgattggttacgatctgttgaaaacgaacgactcgccagggttgttagtaccttcacagatattcaagccc

SEQ ID NO: 2097 - DNA, 538 bp, Wenling bighead beaked sandfish picornavirus
  misc_feature 1..538: note = strain XQTMC456881
  source 1..538: mol_type = genomic DNA
gattgcgatcctttcactgagcactatttacagctggtttgctgggaagaaaacccgcttacgagagcgttatttcggaaccttgatgcaacaagttaaatgcaatttttattactaagttaatttggaatgttgtttatttaaacttttgttcttttagtttgttagtttatactcctatttactttagttttaacctaccattagtttattatgtttatttagttttgtttactttgaagtttcttacctggtgcattggagcgaagtagcttttgtgaaaagtccgatgttcctgaactccattgggaacctatgcggcctctgacgggtgtctttggcggaaacatggataactggtgggaatctctacacatagaggacaagcaccaacttcagacgctttgtattacaaagccgggctgtaccctgattttggtgtatggatacccatggggatggggtctgttttgtctactgcctgatagggtttttgcaaacaaatgtgtaagattataagatttgctgtagttatttt

SEQ ID NO: 2098 - DNA, 538 bp, Beihai picorna-like virus 93
  misc_feature 1..538: note = strain BHBJDX18546 hypothetical2
  source 1..538: mol_type = genomic DNA
acctctgaactccctctgaagtttgtgctaaacaaccttgatatggtaccgctagaggttttcggacctttggcggcaatttcgctctgtgatgtcacttgacaagcaaggaatctgtcagcaacaatgacagtgtaaaattccccaagaactggcgacgatcctgaggcaaagcctataagacctcgtggtgaccctccagtgtcatgaatttcactttgcgaaaatcactgcacttactaaagaggtatgtgacatttcctctttcctttctctccttcctttcctggtacacattggttacgcaacgggcataactactcctcagacaactactgtccgtatcgctttgtgtactttggcttgctatttagcgtgcgtgtgccttgggcagccccctaaacacgtgtcagaggaccgctccagcctagttgggttactacggcagccacgcttgcgtggtggagtgtaaaactaacctgctcctacttcttcttctccttcttcctctacttctcctcctccttctactaactct

SEQ ID NO: 2099 - DNA, 538 bp, Wenzhou sobemo-like virus 3
  misc_feature 1..538: note = strain mosZJ35256 hypothetical protein1
  source 1..538: mol_type = genomic DNA
attactcccgagaatccatggcttatccagaccatggcccggttgagcggcctgccgatgtaattcggcagcaagaaaacgctcccgcgccaccaacacccccagcaccagcaacttcggttgctccagctcaaaccacgccagcagttcctggcccttcagcccctcccactgtggccgcagatgtgacaactccctgtgtagaacagccggagggaaacgcgaacagggcctctgcaggtgtggaggcccgtggcaacgtcagccagcaaggaagtgcactgaacgtaagcgtttcagtaaaccccgtgtccaaaactcttttggaacagccggcgacagctaccaatggccagacatcgacgcctgctccgcgaagcgtagcttccgtctccacgtcgaccgatttttcgcggcgcaagcaaaccgcaaagctggtccgattggaacccggagcatcgaccgcgttgagaagagatgcagtagctggaagtgcacagtaacccgctttaaggattttgaagaaaatttcgaaatt

SEQ ID NO: 2100 - DNA, 539 bp, Ustilago maydis virus
  misc_feature 1..539: note = UmVH1 cap-pol fusion protein gene, complete1
  source 1..539: mol_type = genomic DNA
gaaaaactatccccgctggtcggtgggccgatacccaatcggtctatggagggaattcaaatagggctctggtagtccgctcgccatcgccttcggtctttccgttatggaaggtttgcttacggtccacgtaggttctccgaccttgcgaggaaagattgcgctgctttgcagttcccttaactggggcgggttaggacgtcggtagggtgcctgtggccctgcggcaggcggatctagcacgtaacgtatcccttgccagggagagcgtgccgaattgctatgggttggtgtaggtcctcggttgtgtacggctcctcgtccacctacatcacacatgagaaactgatgacgacacaggcgtgtctaggactcatgcgtaactgctccgatgggatattaggtgtaacgactgcctgtaaagttaaagagttagcaactcgggctgaccagtctgccctttgcgtggggtgtggcatacgctaggacgtggacaaaaacaacaaactaacaacaacaacaccaagccaaaaagaaag

SEQ ID NO: 2101 - DNA, 539 bp, Picornavirales sp.
  misc_feature 1..539: note = isolate H2_Rhizo_33_scaffold_45 RNA-dependent1
  source 1..539: mol_type = genomic DNA
ctaggaaggcctttttgtaattattcgtagttgcgattattaaatatatagctatatctcttgattgagaaatagtattctgtacttttgtatttcatttgattatgattaatttatacaaatagtagctatatacttgacaatcgtctcttgtagtttaattttaaattcctagaacaccttaacccttacaaaacacacatatcattaattttaacatttaacatatacgcgcatatcttaaaaatttaaaaataacttagtgggaactacttaaatatataaggttaatgttatatagatcgaagatttatacaaatcacgaaacctcgcaagggttgcttctattttagcattaacaaactgtattttcttaaagtaccttttgtatcaaaaacaaaaccgaccacacttaaacatgacctctgaacaataagtttcagaagcgatcggaaatgatctatcacatacgtagttgtgatagcagtttgggtgatctgacttcacccacccccccctaaaaactttttacaaatatg

SEQ ID NO: 2102 - DNA, 540 bp, Beihai picorna-like virus 105
  misc_feature 1..540: note = strain BHHK79817 hypothetical protein2
  source 1..540: mol_type = genomic DNA
tcgcattgttgtggatatttggtgtctctatggtttgttcactactattaacgtgtcttttaggttattattttataagactagttaggaggacatacagttatgcatgcagaaaaatccaaaaacatgatagtagtgtagatgccttagagttagtgactgtatatcgatctactgttgactctcttcctatgcctgtacctttatcctgaccctcagtaccgcaagcaactcgaacaatctaaccaactgtgtggggtgcgaggttaaagtatggtaacatactctctcactatgaagccagggggagatttagtagagccaccgcccgccactagtgcggaacctgtccgtaggttgggaacctggagatcagcgtgccgaggtccataacctctcccagtgtatttctgtgtgaggcattggcaaagttatgggtagccttgctggttctgcctggggagctggaagtcttcgagcccagggggtatcgtcaccgcccaatcttgtgacgtctttttcaaacatttgtattctatc

SEQ ID NO: 2103 - DNA, 542 bp, Wenzhou picorna-like virus 2
  misc_feature 1..542: note = strain beimix73672 hypothetical2
  source 1..542: mol_type = genomic DNA
gcatttgcatcactttgacctggcgaggtcagtaaatatacgctttttacccccggtgcagggttacattgtaccaccttatcgcagttgattacggcagagtcgaaatgatttgcttgttttattttcaattctgacgctctgcgatttgcatattattgtacataaacatgcgtctgtggagtgctgagtcgcacccatagtactattatagacttgctacaacattaaatcaaaattttacggtagaaaccgccaattcatctttgaaggaacagaatgtgtcttttaatgaccaatctgcgggctatgttcattcccttaattctgttattgattctacgagaaccaatgtggatgcatatgatgtggaattggggaattttttcgaacgtccattaaaaatagcttcgtatgagtggtcaacaaccattactttctttcaagattttaacccgtggtcattgtatttagagaatcctcgtgtagcgaatcgcatttccaattataagttgcttaaaggcaaacttcacgttaagttt

SEQ ID NO: 2104 - DNA, 544 bp, Riboviria sp.
  misc_feature 1..544: note = isolate ybw202shi01 genomic sequence.1
  source 1..544: mol_type = genomic DNA
cttaaataagtataacgtaaaagccactacagttgatgacttgattcaggatatgactagacaagcatgtaaggcttttacgttatacttatttaagtgattgatggttgctggttgctgtgctgtaggggtcaacacctccaaagtaagatgagagaaatcaggcattctatgcccgttctcactgtatcttccttggaactgtttatcagtaactctcacacgcacaagacgcgaaaatagatctcacggaaatgaatcctttggtatatataacgaatttgctaattctactggtgttgatgatcaagttaaatcattaaactcaattatttcatcagatccatacagttttgaatctgcatttgttaaagaacaaccgtgtaaattgcgagttgtatcattgacttcaaaccagaaagattactcaaatttgttgaaaaccttaccggaagccaccttgtgtgctctattttcgcgtcttgtgcgtgtgagagttactgataaacagttccaaggaagatacagtgagaacgggcataga

SEQ ID NO: 2105 - DNA, 545 bp, Yongsan picorna-like virus 3
  misc_feature 1..545: note = strain YPLV3/16-0052/ROK/20161
  source 1..545: mol_type = genomic DNA
tgtcaattcatttttgttgaataatcccacgtctttcggacaggtcagaccgaccttttctaatagttcaattctattaaatggaaattacaataaggctcatgattttatgaatgcgaatgccctaaacacgcttcagtatcctaatgtaccaccgcctccttatgttaaggattcaccctctctgctttcctctgcagaaaaagcaggtggattaggggagatgtcaacaatgggtataggaatgggcgtaggagcgatggactcagcactcaatgattacactaatatgaaaattgagaatcaagtgaggacgggaacagggcctgacggtcatgcgtttgatgccgtacagcatgcacaaaatcaagtggcgtcaaataatgctcattcagcattcagatcttcagcattgatgctaggatcagctctaggtccagaaggattaataggagctggagttctttcagcagcagattatgctctgcaagctgtaacacaaccctcagagaataccaccaatagcactagtggcgatttggtaa

SEQ ID NO: 2106 - DNA, 545 bp, Shahe picorna-like virus 4
  misc_feature 1..545: note = strain SHWC13603 hypothetical protein1
  source 1..545: mol_type = genomic DNA
cgtgcatataatgtcttctacgacattatatgcacttattaggaaatctttgtacgcttaccgcctacgtgattttcgaacacgtaacgttaggatttgcttagcatttacctggagtactgtaattagttttgacactatgcatgctgtttctacccccgtcttggttactacaccaagcagccggccttttagggcggttaccgttattatacgggctcttttgagtatgaaatttttgaagatttttaatggatgaaaaatcagctggcgggcatgccccgctaggacaagacgctctagctattgagcgcctggctatgaatgccggaatgaggtacattgtttgtaccaagaggttttttagatgttgtttgttagcgataattatgctttcgaaatcagacatcctgacggtgcgaagccgtacgatacaacctcaaggggtgcgtgtcggtgtccattgtattgaacatggacatacttgtttccgggaaacaagtgtcgaggactatctcccctcgagctagcttgctagtaatgtg

SEQ ID NO: 2107 - DNA, 545 bp, Cylindrotheca closterium
  misc_feature 1..545: note = RNA virus 03, complete genome.1
  source 1..545: mol_type = genomic DNA
aggttaaagactccctgggggtataccccagggagtctgaagatatttgagcctcgatcggctcagatttagtgtgttaaacacttttataaggttatcaatttaccaagtatgagtgttatacactctgcattggtattaattggaccttttaatcttttcaacaacctaagtatcgactgtgctaaactagcagtcaaactatatgttattataaagacccataatgtctataaacttagaattataaacaattattgtgttgggactttgttggtcccattgtaaaattatttcatttgacggaggtataataagcctaccagtgctccgtctacagctttaaactttgacgcgtattttatctaattctgcgcaagattgagtcaacgtacttttatttgtattaaatttgtaaaaatgctttgatcgaatcgatcttcgtgcagcatttgtgtaaaagcacgcgccgttaaaactctacgagtcattttggaactcttgactatatgcaaggcaagctgaggtcataaaattccaataca

SEQ ID NO: 2108 - DNA, 546 bp, Bipolaris maydis botybirnavirus 1
  misc_feature 1..546: note = strain JZ11 segment 1, complete1
  source 1..546: mol_type = genomic DNA
gcaataaaaggcgaagccgggaggcttctattttattgcccagtttttcatctggtcaaaatgaagtcggctatctagctagcggagagtggaactggtcctcttcgtacgaaaccaaaccgagcccccacccggtgaggtaatccagtggcaatgcgtgggggagacctcggcctcggccgagtgattgtgcagaacgggtggtgatgtcagcaatgctcaccgtacatgtccgtgctagggagaatgtcctgtatccagcaggaagatatcccgcgtgtaacgactgcaagcactttgtctcctacgtagaacagtctatcacctagcggcgctgatcggccgatacagtaggtggtgtgtaggcttgccagcccaacccccgccacagacatagcttccaaacaattacacacacacaatatagcagagtgagctaatccagcagctatattaacacactacagtagatcaacttttgaatactgttatcgatcaaacacaagaatccatataccaatctcacaaattacaaaacacaaaaaa

SEQ ID NO: 2109 - DNA, 546 bp, Beihai conger picornavirus
  misc_feature 1..546: note = strain BHFishC188617 polyprotein gene,1
  source 1..546: mol_type = genomic DNA
gggacaaccccacagctggtacaaccattgtgggttggtctccaccctttttcaaccgtggcaacttcggttaaagttgcaaatcccccctctccctattccacctcccttactttcactccccatatatggtcccagattttattctacctctttatatttttatttagtacagtggtggtgaattactcccagcataaactttgctggatcagtgttcatcaagcatactaattactaatgtactgagctatactattatctggcatctcacctggataaccggtgtgaccatatttcctaggttgcctccctatgtattttgtagcacctgtgcatctgcacgttggggcgacaaattgtaggtttcctggcacgggtaagaattgtggaaagctagtatgcagttaatgcaagggcgcgtttttcgctaccccgacactgctaaagtttttgggaggggtcccttaaacatttctagtattgagtgatagctttgcggcaggtcaccacaaccttactataaataaacctgttgaatctcac

SEQ ID NO: 2110 - DNA, 546 bp, Changjiang picorna-like virus 12
  misc_feature 1..546: note = strain CJLX29956 hypothetical1
  source 1..546: mol_type = genomic DNA
aaggggtcttaaccccctggttcttttgataaaatagcaataatgcacaattatagttgttgcaagattgttgagaaaaacattttattcaattcagtcttaattggcggataggttggcatcccgtcatgcatttaaatgcagatatgctttccacattttaaagtgtggaaccgatactgtgctcttgaaaaatggtgtagagccgcgcttacatttgcaggtgtagcgtgaaggaacacggaccaccatccttagcgttttaacgctgaggcgaccgcggccctgaattaatcagtgtgggctagattatgccactgtacaacacatttacaaataaatacaataaaaagaaaatttgaggtccaattagaggacactaaaaaatatttgtttatttaatttaaataaaccaacccccacttaaacctttgtgggaagggaagcttctgcttgagttgagatacctttctcatttaaaaaaggcgcttttattttggacatttttgcgacacaaaaagaaatccattttatgaaaacacatca

SEQ ID NO: 2111 - DNA, 547 bp, Wenling lepidotrigla picornavirus
  misc_feature 1..547: note = strain YXMC111438 polyprotein1
  source 1..547: mol_type = genomic DNA
ccttcgtgggcaacgatcagcacacattgtgtctgatcttggcctacggagtttacctttttgacgtttgatagtacgacaactattcattgtatttgttactttgttcaccttacctattgtttcattccctgtatatgaatatgaatttatcttaaacggttattccatttgtttcaaaggaggatggaggctatcgagcttgcatggaattgcaagcagtactttagtcaagccacttggaacgaatggtttttattgtttaatatttatttatatgttagtatacactcctagagttctacattgtttgtatgaagaatgggggaaagctacttgttagttagtaccacagtctttttaagcaattccagtagactggtatttttgaggaaaggtggtatggactgaattaatgggcgcattttttgccaacccggagagtcctaaagttatttgggggggcccttataacatttccactattgagtgatagctttgcggcaggtcacctcaaatctactataaataacctgttgattttcac

SEQ ID NO: 2112 - DNA, 548 bp, Picornavirales sp.
  misc_feature 1..548: note = isolate H2_Rhizo_Litter_8_scaffold_2011
  source 1..548: mol_type = genomic DNA
gtttttagattttataaaaaatttcgaaacccgcgacgtttttgacgagatatgtgatttaagacacttactaaagggtttaaagttacaagatttaattttaaaaaaaaacttaaaaaacgtcgtttaaggtcacgaaaaccatctcgtttaaaaattttaaaacaatcacaaaaataaaacaaaattaataaaacaatctcaaaaacaatataaaatatcactcttgtagagtgtaaaaatgtaagtcggtactttaccgaattgtggatatcaatcttatccaaggtgtatttaaacacgtggcttttgggttttgtcgccctagttgtcgtccgtgcgttccaccttattcaaaccgagtaacaagttagttcttgtaagggctagttaatacctcctccaaaagagtttgtagtaacttgctagtacctgcttgagccgtatcgtgtaaaaggcttgtttgaatgtattcaccaatcgtaagatttatttctgattggtagataaaccccagaccgtttccaatttaatattaacccaatatg

SEQ ID NO: 2113 - DNA, 549 bp, Avian metaavulavirus 21
  misc_feature 1..549: note = isolate APMV/dove/Taiwan/AHRI33/2009,3
  source 1..549: mol_type = genomic DNA
ggataggtgatccacctggaattaagctggttgattaagaatgtctgatacaacagagatcaaattagttaatctaaatgtgctagggagatagtgcaccaaagctataaagttgcgtattttatcgactcgcacttaattaacctgaaaccaggaatctatctttaagctatgaaattatgtgtcaaaaaaactaatatcaaattaaggagtatatccccatacacaacaagcattaataataatcatcactaagtatatagaaatcgggatcaacaatttgatcttcgtgagacttaactatacacaagattaatattaattcatgagttgactactcagtgttgattaactcttttggtcaaatttaggtgaagaatcaatataagacagtaggaactagattacaaaaaaatgggggagaacgtttgacagggcgcgtaatcagacatagcttgtctgtgtaagttttaagagatacgcggtcgctcaggagtacaagagtcaaagtagaaacagtttaaaggacaggacacggaaagcagaaca

SEQ ID NO: 2114 - DNA, 549 bp, Astroviridae sp.
  misc_feature 1..549: note = isolate ytb090ast01, complete genome.1
  source 1..549: mol_type = genomic DNA
ttttgcattctgcaaacttcatcctcggggtcagggtttcccggcaccactcctccacccattgagtgtgtccttttggtgataacgccgccatttggttctcacactgtaggaggaggtctgtcatattgacaccgtgtgctgataggattgttcgagttttcccatagcacatgtgttgaatttcagtgtaagtaagttccctggttgatggtttaaagatgtcaaagtagcatccctcaatctgcgccgtgcagtcagtctcaagagcacgcgtttctccagctaggaacccaagcaagagaaagagaagtagcatgcaggcaaaggtccaggtccttgatgatgcgcgcacagccactgacacggcatttttgctatcgatgatggcatttctaaggagttttacctcctgctgatggtgccgtatcactctgtctttttcctgcagctctttctccctttccttcaagagctcacgcaaccgcatgttttcctctgtcttctgggatgattgtgcagcaaagagccttatcctaagctggttgg

SEQ ID NO: 2115 - DNA, 551 bp, Feline morbillivirus
  misc_feature 1..551: note = strain 761U, complete genome.2
  source 1..551: mol_type = genomic DNA
actataacaataataaacagctactaaatagtattatgtatttaagtgtacactgataattgcgaataaaatacaccagattaataacagtatagagttaagatctaattgatatgtgggttggtactcgatcatttattagctctactgattatctatatcttgaatcaccaaatgtaagagcatcaacaggtaataagttttggattgctagattgacacttaattctcagaactagaatacccagattgtcaaacctataaccttgttagattcattaaagttagattcttgtaatgttgatcaattatcacttgagcaattataaaaaactaaggacctaatgtaataggaacccaaactccatccagtgagctctaaatcgccatgcttgaatattaatttatctagggcctgtctaactcagaacaaagatcacaactagagtctaaaggagtgggtcaagtctgaacaattatcaagagccgagattcaaaactgattcctccttaaactcagaaccctaacaatatatcatccactcaacatc

SEQ ID NO: 2116 - DNA, 551 bp, Eel picornavirus
  misc_feature 1..551: note = Eel/31945 RNA, complete genome.1
  source 1..551: mol_type = genomic DNA
cccctggggactggcgcttacgcgttagtttccaggatggtcttttcaacccagctatgggttaaatagcaacttttttatttttccagtttcactggactgtgtattggacactacacagtataataaaaggtgagtctttctcaccactttcgtgtctagcggttcaactcatttaggcatgtttgtcaatgtatcaatattagttgaagtgaagatttggaatcacaccacaaccccagtggtgcccaccataactctgcctcggatttcctccatagtaatatggaccttggtagttacacggtgttgtttatacatgagtcttcatggatcttttattgccgattgccgaacccctctatgaccactgttccgttaaggttttgtaagtctgctcccatgtaaaagccttggtcgtgcttaaatgccttcccgggtgagaggaaaggcctacttagctcacgcggtaggaacacctgtcatgctccgacacagggacttatattgccgaaacccattttccattttaaaccaactactctctcact

SEQ ID NO: 2117 - DNA, 551 bp, Beihai levi-like virus 29
  misc_feature 1..551: note = strain BHZY57867 hypothetical protein1
  source 1..551: mol_type = genomic DNA
ccctgaccgggggcaagaacgcaagttcacctctggaaacacccttacaaaggggtcgtcagtgtttggcgctcttctgtgcggccaggggtccaattaacagctatttactgttagacacatttcagtgtcggcatgtggatggcattcgcgatcgcacttagcctaaggaggttacacctgtgcgtatttcacacaagtataatcaacctctttggttggagtgtcggtccgataaaaacggcccgctcgagtacgctcagttacctattattggcgacggcgcagtacctgatagacttctgccgtacaaggttgcgaaaccttatactcgtgcagatgtccgtctggatcacttagttcccgcacctattcccgctggagttagcttaattgagcttcctacagcagaacaggttgtaagttctttgttatcgagtcggcccacgttggcatcgtcagtatttcaacctttcgttgatacagctggaatccagaactcagcattacaaaatgctattgagtatggaaatatcttgttactcgtctct

SEQ ID NO: 2118 - DNA, 553 bp, Wuhan arthropod virus 2
  misc_feature 1..553: note = strain WHSF0 hypothetical protein 1 and1
  source 1..553: mol_type = genomic DNA
tacggttttaaaaccgtacgcaatatttgccatctagctcctgatgtaaaattgagcattaatcaagtttagctctctactataaattgagtaattgttcgtgatgaaatattcatgggcgactctagctctctagtataaattgagcaatcttttatttagtgcttattgttttattgaagacgactgatggcatacggaattgtacttttaattaagggttagtatcctaatagtaaccatgataccgaataaagtaggtccaaagcaaagtgaaatttgtggaggccgtcatggcaatgctattagaactgaggatttaatgcttgacaagcgcaatatctgagcagatagtgtaaaaaatagcaacaatagttaaattattttacgatatgttatgaatatgttagacatgtattatgattcataacctctattcttaatttaactatatccaagtctcggtggatattggattctgttcgcagttaaccgtatttttacattgcccgagtcggagcggtgatattgtatccggactacttaatacaaa

SEQ ID NO: 2119 - DNA, 555 bp, Miniopterus picornavirus 1
  misc_feature 1..555: note = strain Henan-Ms56-1 polyprotein gene,1
  source 1..555: mol_type = genomic DNA
cgccttttaggctgtttttccacggctgaaggtgaaagaagtcgttacccgcctgcctacttcgggccgggctagtaacatggatactaccctaagtgtgtgatccgggtgaggttccccccctccccagaaacttgtgatgagggtcaccatcccgcatacggcgacgtatgggtgtccctgcgctggcacaaggcctgctcctgaaagggacaggcgcgcttaggatgttgaagtgtgaagacccggactgagctaggtatggagtcctccgccccctgaatgcggctaaccctaaccccggatctgtcgcaggcaatccagcctgaaggcagtcgtaacgcgtaagtctgggatgggaccgactactttggggtagcgtgtttcctttttattttattatggcgtgtatggtgacaacaatagggcattgttgttatcatacgttcagcgccttcctagctcttctacagtggttgataaccgctgtttcactgatccccagtggaatttcttggatttttctcggcttatttttaggaggatttgcttaca

SEQ ID NO: 2120 - DNA, 556 bp, Shahe narna-like virus 3
  misc_feature 1..556: note = strain SHWC01c3372 RNA-dependent RNA1
  source 1..556: mol_type = genomic DNA
gtcagcaattccctctaatagggccgaaaccttattagactacttagtggaacagtacaactcttgcaagttgctgtaaagctgagttctcctgattttcaatcaacagaaaagagcctcattggaacgacatacaaagcgtaatcgttcgaatcaatgtcctattttcgacaggagacgtgtaagtgataacacgtgccagtcacgaccatccggtaacgacagagagctattacaaacgaaatgtattacaaatagtataattaaatctattgatacattcttagcactccatcatcttcacatagatgacgtaaattttaattcatactctaaaaaaattaacgagtatgttgatgataacggtataaaaccgttaatagacagttttaaatatttctgtttttacaggttcaataagtttattggggatcttgatacataccccaagcctgataattatttagacctccaccctaataggcatttggagaaatatctaaacagaaaactgtcaagtaaaacacctaggaactataaatttttagtgtcatta

SEQ ID NO: 2121 - DNA, 557 bp, Tacheng Tick Virus 4
  misc_feature 1..557: note = strain TCRP-1, complete genome.1
  source 1..557: mol_type = genomic DNA
gtaaccaacatcatgagaggcaccccacctacccatgcggcatcattctctcattggcaccctaatctgctcgcttagcattttgtgtacctcgccattctaaaccatactcattggggcttcattggtttaaaaccatgccgacacaaaaattccatttttgaggtctggactctctcccctcctcaccccaagagactatctgactaccgcatcatgtccagccgtctccccccgggtcggtatcgtcggcagacgccaggggttggccgcggtagacgcccggatgcttcgtcggatagcacggagtttttaggggccgggggtgacatagagcaactacgcattgcggtacaaagcctgtcggaacaattgcagagtatagaagcccgcctcgtcacggtggagaccaaactggtgcatctttacgacgttgccgtgttcccacagcggcgcaccaggccggatgtggggaatcagttaccaatgggcatgtagccgacacaaaaaacctccaattggtttaaaacatcaggatctgtcctgatgtttagacc

SEQ ID NO: 2122 - DNA, 557 bp, Hepacivirus J
  misc_feature 1..557: note = isolate Hepacivirus/RMU10-3382/GER/2010 polyprotein1
  source 1..557: mol_type = genomic DNA
gccgctcccgaaagggagtccggcgcgtcatcccactccgaggagtggggtggcgtccccgtgtgccggggaaccatgaagcctaagggcatccacattttagaatgaacttgaagcttcgtttcgctggccggaaagtcctgggttcccatggccagggttccgcaggtgggtaaatcccggtggggttccatccaggatatacggcaggcgggcgtagtccggcggttcggacgacgtgtgggtcgcctacggtggattgttcacaggatgggcactccggtgtgaataggccccgtcagggtgcgctgacgttaaactcaggccttgcctggtgttcggggaggattgcagggccacgccgcctctaagggccgtatggcacagtacttcttcgggcgggttgtcaaggccctccaacgcgacaccagtgcctcggcaggcatggggccacccagctcggcgtcccgcacacagacggcgtaggggaaaatcagcaatgtgaccccgggtggcattttccttctctctacttccatgcatgatcaaccgcaatc

SEQ ID NO: 2123 - DNA, 558 bp, Beihai picorna-like virus 55
  misc_feature 1..558: note = strain BHBei68636 hypothetical protein1
  source 1..558: mol_type = genomic DNA
tgggtgatgagcccggtgaagatattatattgctttttagttttattaggtagttcagttagtttttctaactgttcttaacttttactctaataagtagtatctatcttcattagcaattcatgaagtgatgtttaactcctaccacctttggtgttagagggggattcttactatcctctttaattagtaagtttgtttgggttcaagccccaactgtgaaattagcttgtagtacaatatattgaggcgtgtgactgaagaatcacacaactcgggaagtgaatacttccctctgataggagtagcagcctaccagagtattgcttatatagtttgcacgacttgaaatttccttttcctgatcgttcccgaaacgattcattaactatgagggacgtggtcctagagggactaccgtatggtaagacgatagaacgttaatctaaaaccttcccacgttaagaccaatgaggtattgttcctataccgtgacattgagtctttgacgtgtaataaaagtagttattttctaaagaggaaccgtggagacacatt

SEQ ID NO: 2124 - DNA, 559 bp, Plasmopara viticola lesion associated narnavirus 39
  misc_feature 1..559: note = isolate1
  source 1..559: mol_type = genomic DNA
gcctcaaaagacgaaatcgcacgacaaccctagggttgacgtgtggtggaacgcttgcgaggcggtacacgggagtcggggtgccatccgtcctaagggacgtggggccacccgacaggtactccctcgcaacacgcggcagcgtgttgcgttcctaaagttatcccccccctctgctgcccacgccaagttgttaaacttggtgtgggaggccctcctcggtgtcgcggccgcctaccgccctttgcctacctgggggagtcgtttcggtaacaagcgttgcttggaacttcaacggctcgccctgtggttagtaagggcggcagacggtcaagggatcggagcgacgatcgcgtggctaaaaggcgcggccagtggcgcccgcaacacttgtgttacaggcgcggccttgctgccttccacgcgatttctcgtcaggaagttgctgatcggcgatactcgcaatgagtcgctggaccagctgtccttcctttcccgatcccttccggaaggggactctgttgttgagtccaggacacttgtcgctcaccgcgacaat

SEQ ID NO: 2125 - DNA, 559 bp, Totiviridae sp.
  misc_feature 1..559: note = isolate ltt164upi1 genomic sequence.1
  source 1..559: mol_type = genomic DNA
tattcatcaaatatatcaatcgaatccaatactttatgttcggttacaggcggtgaaacttgtaaaccttgataaaatacagaaccagattgtatattacaccacttccgttttggtggtaaaggaggtggagttggaatatacatcttaccaagattatgtttagacattttagctggttgggcagaaatgaatgtatatgtcggagcatagcagcggaccactatacacaaacatcgtatattgaggtttttctctagtttatcgttgatatgagagctcttgcgtcatacgtggcgtctgggtagctcgtactcatgttaaattaggaatcgttcaccaaaaccaaccctctttttaaacccttggaaattttatctgattctaagtaaggaacttagttaccaatgatcttagctgataataaattttccacaagcatttagtttagtgcaatcgcttatctgggatagcaacccgttagcactcaacttccaattctcctatttctggtttaaagccagcatgatccctaagcgggagatgattgtagaaatag

SEQ ID NO: 2126 - DNA, 562 bp, Sclerotinia sclerotiorum umbra-like virus 3
  misc_feature 1..562: note = isolate BCS17_DN251
  source 1..562: mol_type = genomic DNA
ggggaatctggctcgccaccagcctcaagctcttcccacaaacttaaataaaatttaaatttaaactaggcttaaactgaaacttaaacttagacttacacttaaatttaaattttcacggtgagactcacactacctcacgtaaaacaaagttgtggcgatgtgcgtgtacagtgcacgcctagttaaatcactgggggacgtacgagctgcttgtagacacccggcagcgaaataagggtgtagcgcagctggcgcaacgatttgttaaggatctgacactggaaagacagactctcatctaattcttatccgtatgctgtgctcaccctggcgggggtttgacgcgtttgcttagagcaacatgtggacgggttttcgtggacccaggcgccgtgggcgcaagcaaggtaagcttctgccttaagagggcccccccgcccggggggtgatttagtacacacggtgtgtcttcacaaccgcggcgtgtggcacgtccagttttcaggccagggtacttttccttgatagatggaaaaaccctccactcccagcacacacg

SEQ ID NO: 2127 - DNA, 562 bp, Yancheng osbecks grenadier anchovy picornavirus
  misc_feature 1..562: note = strain XFXMC154601
  source 1..562: mol_type = genomic DNA
ccttagggtctggaatgcgtcctttctgggcacttccacaatcctaaggtaattttcaacgccagcgatggagcgatatccaaagaacctttatgttttagttcgtcttgtatgtttataaaatataaaattgggattagcaacccacaaaaacatttttgttattctcaccacatgagagggtggttaaacctcttcgtaacctatcttgcttgattggctacttgggctagatttaggacaacctctttagcaagcctaaattactcctcgtacttgcacctggtaacaggcgtacctggaggttacggtggcgctaacttggacttctcgttaattcgtgcaagtttaaatgatgcctattttgaatacaagaaagtatgatagtaacttagggcgtgaagttccgcttaacataaggcagtataagtactaagataaggtgtaagacctaccttaataactgttgtcttttctcatggtctttccgtgggagcccttgctaggggtaaagttaagtattctcaaataatttttcattcaaactctttctctctgtttt

SEQ ID NO: 2128 - DNA, 562 bp, Beihai weivirus-like virus 17
  misc_feature 1..562: note = strain BHZC37426 RNA-dependent RNA1
  source 1..562: mol_type = genomic DNA
cgcgtaataccttgtttcacccccggccgctgccgggattttaataagcgtgtttaagcacctacgtcccaccttcgggtgtaaattacctgcgatctgcgacacaggggcgcagggtcgtgcactagtcgatcggtttgggcgggccggtcgtcgacgacggagtgctgccggtgcacgataagatggtccaggttgcaatgatccacgcgcctggtaggggacgcgggggggggttttctttatatcgactccacacgacccccccttggccgggactgtccctaactccacccttatgcctgagtagccggggctagtccggtgaacagcctgggaacgctgggaagcgatacggtgagggcgctaccgctacccgtctgcagcggtttctgttgtgtgggcgacagagtaaagtggtagtttgcgcatgtgagggtcccgaagcggagcggcctgcgagtgcagggtttagccttacctgcatgaatgtgggcttagctccgtggatgttccgtttggctcgcacggccaggtggataatagaccgcaaggtcttggc

SEQ ID NO: 2129 - DNA, 563 bp, Picornavirales sp.
  misc_feature 1..563: note = isolate dwb062shi1 genomic sequence.1
  source 1..563: mol_type = genomic DNA
tggcgagcaattgattaactcgcccgcactatcacgcggattgtaagttcaaacggattgactattatgcggacctctagttcaaactttttgaagcggactattggttcaaacagatattatttcacgcggatttacagttcaaacggataagtgtgcttagatcaccttgacagctggaaagacagcaaacaacaacctttacattacttgatgcttattcagtaatggcgatgagaaatctcgtaatgactttatagagtaaagggcggaaacgtgttttactactaggagaatacatgcgagtaggttacattaggagttgattgataacgagtcctttgatggcactagtttatttcgtgcaaacccttaggataacacatggtaacatgtgcctttgggcagagctgattagactggtgaataccacaaagtgaattgtgcgtcgagccttttattgtaatatcggttactagcgttaacgaatgctagagtttgttgtataacactgcattgcggctaaagtaagtgtgagtgtttgactttagagtagtttcaag

SEQ ID NO: 2130 - DNA, 563 bp, Wenling jack mackerels picornavirus
  misc_feature 1..563: note = strain LXMC375591 polyprotein1
  source 1..563: mol_type = genomic DNA
gcacggggtttatagccccgtgcattgatttcgacggcaagttattgtcgatagagtattacatacgttggatattaccattccttctaaggaggtctggtgttgtctttcatatgttttatgtcaaatagcaaaattttccaattaccttttacccacattttatgtttgtcttttacggttctctccgtaacacataattgtctaagtgtgtgtaaaccttttatcaggaaatagagaacttttgattgcctactttatattaatatttagcgaaatatttgcagttaggaatagttcgtcaattagtactgctccccgtaaggtgaactttttggcatgcaagtgtgagcagcaccttgtccttaactgtatttatagtagttatctaaattgatgtttggtaaggttgtcttaaggagatctgattataaggcgattggttgacgttacaactaacccccctttttctcatagcacaatttacaggagtatcacgtgcgctaccttttacctattgttcgttgtttttcatattgccgcgaggtgcaagacttcctaat

SEQ ID NO: 2131 - DNA, 563 bp, Beihai picorna-like virus 24
  misc_feature 1..563: note = strain BHZY60459 hypothetical protein2
  source 1..563: mol_type = genomic DNA
tttcttctttttggactggaagaaattttgtgtacatatttataagtcctttttgactgccgatgtctataaaagcctggcgctagctgcatctagttgttacctaagtaggaatgtgcctttatatattagtgatttagtgaatttcatatatatttatcgttttgcatatgttttcataccctgtatatatttgtatttataaaaccttactctcattgcgtcattgcttcacgcgcaatttggagtctaaacatagctgataagcaggtaaaacattttcaattattacggacagattattgccatgtcttaaacaggcaattagtgggggagagcctcgaaccacccacattgagaggacacctaccgttcatgttcatcagacaagggacggttccttggaacttgatatagggagacatcctattgatttttccaaatcagacatagacgctatttcgcaaacaggaccagtagatagattggtaggattgaccgggaagtacacaccaacctgggcagtgcaaaaacctcctgatgttgtagttgatgtcagttac

SEQ ID NO: 2132 - DNA, 565 bp, Rudphi virus 5
  misc_feature 1..565: note = replicative protein and structural protein genes,1
  source 1..565: mol_type = genomic DNA
actgcgtacgggaattccccgtacgcagtgtttgcaagtagtttggcatcaaatatgcccttatgtagcagagaaccttctctcacgaactacgtgttcgtgttatttagctcactccctatgtttgtctatcttcaaaaccatattctaagtatgtgaattactaactcacaccccctttatgtatttttaatggaaaagcaaaacgacggttatctagcatgttgctagacactccgtggcctattgtctctcgagactctaggcaacaacagctatgaggtcgccccctcttagctaaccttatttttattaggatggtaagtcctttgtttatgtaccttttaaacatcaatttaccgattactgattcgtccttgacgatcactctcacgagtgtcagaattatacattcagaactaagctctaatcaagagcaaaattcaactatacaggcttttagttgtcttattttataagcgatcagtgaaatatcttttcaggttttagtatggcctttagttaatacgtttcacacgttaagaactataaaacattaccaacc

SEQ ID NO: 2133 - DNA, 565 bp, Plasmopara viticola
  misc_feature 1..565: note = lesion associated mycoophiovirus 5,isolate1R
  source 1..565: mol_type = genomic DNA
caaaaaacttgactaaatatcgctaatcctaaaaatgactcgagtgattgaatttactattgagtttcatgaggatgacattggagatatcagactactctcttactactttccagatgaaactgactctccaatcacactgactccagagatgattataaaatcagttgaagacaaataccctaacatttgcatcgaacaaacactgagatatgaactaatgcagtcaggtgatctcgtagatgcgagagcagacgatgaatttgaattccacgaagatcatgtgatctttaaaggtgaggaattcagttctattatgttgtatctatatgtctctattgatgaagaacaggaatatgttgactatgaaagacgcttgaataccatttgaatccttattgacaactttatgttttatttttatttatgttctagcagtatgagcatcatttgaaaaaatttgattaaacattttgattaaaaaaacctatttgatctaagaaataaagatttaagtttcccaaactttgaacacaaagcattttacaaccccaattcttcaatc

SEQ ID NO: 2134 - DNA, 566 bp, Beihai picorna-like virus 20
  misc_feature 1..566: note = strain BHJJX25607 hypothetical protein2
  source 1..566: mol_type = genomic DNA
tcctcataaaactagaaacccagttatgattctgggtgctacggcgtagcaaaaatcatgtgtatatatggataccaagtattatatgtttttgtatgtttgtgcttattgtgcttaggctttatacatatcggcattccacaaaaggaatacacctttttaggtgaggtttcgccagccaatgtaaaatataccactcatggcactgagcaatgctttgagattgtaaaatatcgcttactattaataatttgtataataaaaatgtgagagtaaatggatgtgaaattacctatgagcagccaaccattctcgagattttatcagatcttaaaaagtttggaataaatcccaaccgatttgataagttgtggcgtaaaaaccgcaaacatttaggtaaacgggtcgaatcttttgatggtgtaaccattccttcacaaaggattgtttatactaccgatatttctaccttagagccgcatagtgggactgaagcaacagtttcaacagcggacgctgaaacaaagactgccaacttgcaattcgttgatgatgttagtccacat

SEQ ID NO: 2135 - DNA, 567 bp, Plasmopara viticola
  misc_feature 1..567: note = lesion associated ambiguivirus 1,isolate1
  source 1..567: mol_type = genomic DNA
gtttgggttcgtcagttggaggctgttttgggctcggcccctggcatagtcggggctttcgttaaagggcggtggacaccagacctcccctctagcgatcgctccgtcggtgctaaccttgccctcagccatccgacaggtggtgcaaagatccttggtgggggatctgtccgtggcggcactgcaggacaaccgcgtagggaaacctacattgttgtggagctatctgatggctccagggaaactgttttccctgaactgctgggtcgtttggcatcttattctcttctcagagagagaaacgccgatcttgtttctgcccttcgccttcgggcgcaggagtggtgcaagaatgctgggctttcgagcacagtgtcttggtgggctgtttgttcagccatcaagttggcgtggcccgtgtcggagttggaaacctcggtttccgacgtcgtaggggtcgggatgtcaaccacttcttttcctggtctggcttaggccagatcctttgaccttaaggggctttgctttggtgaatgtcccggccctcttcttgagggttccaccctg

SEQ ID NO: 2136 - DNA, 571 bp, Picornavirales Q_sR_OV_022
  misc_feature 1..571: note = putative polyprotein (Q_sR_OV_022_gene1)1
  source 1..571: mol_type = genomic DNA
gcgaggataccctcaccggtatcttcgcagactctaaacaatctatacagcgtgtgtatacacgtttgtttgatatgattgttcatttgatttaataatgttttattgcctcagagtgaaatctgaggtttggaagcttacatgcttttaaaatattcattgccaccatggtttacgcaccataggtggtttgtttcattgaatagttgttgatttctcgtataaaaacacacaccctccaaagttggaggtctggtttctaagtgcataagcttggaagttaattgtgtggattgtggccgagaagctgctattgatcttgtttaagatggctcgatcgtaattgtaaaatcatctctctatgtaaatagtgaaaattgccaaaacgcacgtaaaacacattgtcgtgttagtcgtggtctacagagtattgtaggaaagataggtttgctcagcctttaaatgagatgatggtgtaaacaccccctgtctgacacagaggaagaaatgtcaaccgtttagtgtagttcgagcacttattatcgaatcggtaggtccaccgtaaggacat

SEQ ID NO: 2137 - DNA, 571 bp, Clownfish picornavirus
  misc_feature 1..571: note = isolate CFPV-2015, complete genome.1
  source 1..571: mol_type = genomic DNA
tagtgacccaggggggggacttgcgagtccacctctgaggaatctatttaacgccctggactagcgtatagtccatgctgtcgttttgcacaaaaacgtttaaatgtttgtttgttattacatttgcacacatgtaactccaacacaccctatcctaagtacattacctcgtggtattatgatactggcagaaacagaagttgttggagtgaccttttagacaacagtttagaaagtggcgggagtatcgaacccaagcgctagattgttgtatattagctcaattcattcaattatgtgactgtacatgacaaataccattagaaatcttatcaccaccactggttagcaacccagatgtctttggcattgcacggtctgctataaggtggaaccatggggtaagcttcgcaagactaagatactaagtccaagagtaagggttaagaatttcttccctgtggcagtaccactcaaggatgaatggtcataaggaggggtcctatgactgaggtattataggtgatgaaccagcgcgcatggctgtcttctagcgaagtaaaataaatat

SEQ ID NO: 2138 - DNA, 572 bp, Hubei odonate virus 2
  misc_feature 1..572: note = strain QTM74832 hypothetical protein gene,1
  source 1..572: mol_type = genomic DNA
gtgcgcagggtttttatccctgcgcacagctttactgatcatggtgattttcttgaggcatatatcggcacctatgtagtcactgaacttttgtgttaagagagtggctttatcacaatgagtttatctgcatatttgtcgttattatgtcttccttttgcaccaagatcatttctagtgtgaatgaattatgtatgaatgtgaacaaaaatatagataacctaccggttctttcaatttcgtattctttatacattacatacttgtacctttgctactattttgagccttcggaaagctctttgagtgggtagtagtatatgttaccttaatgctaatatgtacgggacgatgtatgtccttacagtgcttgattagatgatagtgatgatagatatcactgcgtgattcgttggtagagcaatactgtattgcatatgatcccctaggcggatgagcattatgtcgtagtatgatagatctttattttcttttgaagttttatacgtttaagggttttacgttaaaacctcagagttcattgcttatattttatattgttcattataaac

SEQ ID NO: 2139 - DNA, 573 bp, Hubei picorna-like virus 78
  misc_feature 1..573: note = strain WHSF6879 hypothetical protein 11
  source 1..573: mol_type = genomic DNA
ctgtaaggttactcccttacaggttctttgataatatattacagctgatttgatatcttacttgtgaacattcagatctgttttaaaacacttttctgaaatgcttagcttgtattttattattttcagtgtaactatcatctttatctggtgatgttgctctcaaattttgttaaatttgttagttcagcatgctttttatcgtatggtttttacagtaatatatttgatgagaaaccttttggaaaaaacgtttactttaatgtaaacagtttaattcatattcatttattaatattttcattttcttgtactttgtacattcattttcatattgtcccttggatttaaaggacttcttaattgagaaacagctctctgcggagagtgtaaataacttatctggggtagtaacccgttaacagtttcaatacattttgaatatccttaaagtcttcccttcccgtatttaagctataagactcggcgagttccgacgatggcaattttgttttatcttttcttacggagtatgattatttgctttttaatgatagtagtaacttcggttca

SEQ ID NO: 2140 - DNA, 573 bp, Cucumber mosaic virus RNA3
  misc_feature 1..573: note = strain fly60335 protein 3 and coat1
  source 1..573: mol_type = genomic DNA
gtgtgtgtgtgtgtgtgcgtgtgttagtcagagttctttgggggccacaagttctcggtcacgacagccgaccggccttctattggcaggccggcggtcagggacgtagcatatcaggggcatcatctcccgctcgctcgccccagaggtcaacccgcctgacggcggaatcggctcaacggggcgatcgggacgattagggtaggtagctctgcttccgctggactcgcgtgccgcagaaggcgaagagggggcaaacaacgacctatgcaccgaccatatccgaccaattcacatcccgggtacgcgactccgggaactcggtccacaaaatagaatttcacgctcgtccctagcgactttctgaaaaccgaaagtcttccgctgggatcgtgcgggggcgtgtaagtggggcggtgcgtgttcttaagttggtgttaacagctgcgccgcgactatatgtaggtgtgtgtgcgtgtgtgtgtgtgtcgcgtcgtgtcgagtcgtgttgtccgcacatttgagtcgtgctgtccgcaccttttcttttcagtgtgttagaatacccgaggc

SEQ ID NO: 2141 - DNA, 574 bp, Wenzhou picorna-like virus 7
  misc_feature 1..574: note = strain shrimp14504 hypothetical1
  source 1..574: mol_type = genomic DNA
gattaagttactttaaatggatttatcaaccattgtatttttagtatctttcctccttgttgggaggtaaaatttgtggacttgatttagttagtatttagaaagttttcgtccaacttttgtttgatatactgtgccgtcatattcttggcacaattaagggttgacaccccggtaattgctcatgaattgataattctgagcaactttgtttgatctcttatgtaagagttatttactccatagaagagtttcatgttggtgatacgtatgattgtggacccgtctcgtagggttattttaaacacatgattttaacccagtttgttccggctgggagtacaaaacaagacttctgagggtggcaccgatgaagagtcttgagccataattgaaataaatctatgtgaggctttgtttggattgtttagtaatctgtacgcgacgtttaaggtattcaaaaaccttggcttcggccgtaagacgtgcatgatcgctttacatgaatttcattgttaatttcgcattagagtgatgctttgttgttgagcacgcacttttattctttatcgct

SEQ ID NO: 2142 - DNA, 575 bp, Ginkgo biloba picorna-like virus
  misc_feature 1..575: note = strain pt112-upi-3 genomic1
  source 1..575: mol_type = genomic DNA
cccagcctgggcacctttttaggtttatggttagcgtttccctttaacgcgaattctagtataaggttcgctggctttgccgcaccttatattctctctttcctcttattatcccatctagttttcaatcttttcttcaactagtcactctttctaatttttcccttctattttgggggcagagtaagtctgttacctgagtggatagaggtacacctctcgagtccaaaccttttctttttgatagtttgatcgcttcggtgggcacatagtgatgagaagtaagcggtcacaggaggatacaagtctagtttccatggtagttgagaagttttgagatcgttgtgatacgtgccctacagctgggtaggatgtccgagtggacaccatctcgtggtgacttcaatacattgcttctggaggacttggcttatggtgttggctaacaccggaaaatagcatatttgttgggtagaaacttgactagtgttagggtggtggtaacgaacaaaccctttgccagtactatatgtccgtgcataaataccgatttttgcccccaaaaccgctttttc

SEQ ID NO: 2143 - DNA, 575 bp, Diaporthe ambigua RNA virus 1
  misc_feature 1..575: note = complete genome.1
  source 1..575: mol_type = genomic DNA
gggaaatttgtgagattatcgccctaaaggataactctcatgcgggtccgagtcccgcctgggaacgatatgtcacgtcaaatggtggtagggaaaccgttgaaccaccagaccaccctggtccggcttgtaggctgcgtgggctgacggaacagcagttggcgaggagctgcgctatgtaataacgggtggcccgttcctagtcatcgtcgaggggcaaataatcgctcccacttcggtgtcctcgatgtgaaaacaaactcggttttctcgcgggttggttacctgctccagtgagtcgattaaatggggattagtgctgtagggccccagccacaggttcggcactggtgtaacaaccgtcacccaggccagggtgtatgttttggccaaagacacctctagttccctgccattccggggaaggcggttttccgctaggtggagaaccaggctattctgtttgcagattggtgcgtgttagcctggactgtgggtgtcagtcaactcacctgtgagagatggtcatagatgcctcagtttaatcttagccttgaccgggtcagcgctccctt

SEQ ID NO: 2144 - DNA, 578 bp, Agaricus bisporus virus 9
  misc_feature 1..578: note = isolate AbV9-003, partial sequence.1
  source 1..578: mol_type = genomic DNA
tatcttcctcccccccgcccggcatggcttaaaagttccagaatgcaacaatgaaggttacgttatgagtaaacggtcttggtggtccactttactgtgggtcaccctgcactgtctctaagcttgcactgctgtgccaatcatgagcgtttgttagttaagctgcatccacttcactgtggatgaagaagtcgttctccgtcttcactttcagcatatcggagcctcagtgcgttctgacattaatttgttggacccctgttgagtgatatggaatgacccggcagtaatgtcgttaggtagggccccggtgcgcttcgctgcgtgcacccctactgtatgcaacctgtgatccattacaccattggcccattaggctaggttgctgtccgagccgatcgtcctaattagacgagcatcgtgagcacataactcactacgtcgctgtgttacgttggtccccaccctccgtagactcacccacagcccgtgaaggaatacaaggtgtccttctgtgtagagactgcacgctcggcggtctagttgccacactaggctgaaaggaacagtccacccac

SEQ ID NO: 2145 - DNA, 578 bp, Trichosanthes kirilowii picorna-like virus
  misc_feature 1..578: note = strain pt111-pil-1-NW1
  source 1..578: mol_type = genomic DNA
ataactccttaaagagaacaatacttataggcaataacaacaatgcaacaatggaagttaacacaggaggattagaggttattacagtctctaactcaaatataacgatcatacctaaagaattttcattaacatttacatcttacaatgcccagcaaacgttgtcactattcccatttcaaccattaccactaaataatttacccgaatatttaacttttgacagaaaatataaaactaccactccttttactttaacgtttccaactgaaatgtctcaggttgtgatggatatatttgggttagttataccagcaaattcccttagtggattaacaattaattatgtcattcaagattcagatgcttttgtgtttcaaccccagatttacccgaatcttatagttaaatctaagtcaaattcagtgaaccgctcagacgttatttctccaagcactcgtctggtttatcccaatggtttcaatggggatataattttatccttcgaaaccttgcgaggcacgccacttttatctgattctcccttggtatttattgttagtttgagttaaggaggc

SEQ ID NO: 2146 - DNA, 578 bp, Beihai paphia shell virus 2
  misc_feature 1..578: note = strain BWBFG38484 hypothetical protein1
  source 1..578: mol_type = genomic DNA
cctcgtacggacgttaaccgtccgtacgagatatagtctagttggcagcttaaacccgctgcccaggttctacctgtattttaggtactgttctggtttgctctggaatgggatcgcatcgtacatggaagaaccatgacgatgtcccactgtagagtgtaccacactgttactgctacgattgacagctatataaaagtttttaatggagggggagttaacctctgtaaaaaatcataaacccttataaagtgtttttcatactgattcaaaggcttgcacttgataaagcctcaagatctaaccccataatcaatgggattactgtgcatacggaagtaccggagccagttcttatgatggtattcgcttatatgccgaaaataaagcccccgtcctaacaaaacaaggtgggcaccctacacgggtggacaccgagccgtagagtcacgggaagtgtagatttgaaagagcttgctcttagtctgcttctatacgcttgacagagatttgagttttgcacttgtgtatatagcgtctcatttgtcttgttaaaacgtgtctcgatttgttgtcga

SEQ ID NO: 2147 - DNA, 579 bp, Shahe picorna-like virus 8
  misc_feature 1..579: note = strain SHWC12398 hypothetical protein 12
  source 1..579: mol_type = genomic DNA
actcacccttttacaataaaatttctactagtaaaagtaaaaggatgcttaaccgttaaatgctatcacactaaccgcgtgctctatttagagttatatcctaggatgcgcgaagagcaaacctcttaatatccaaggaactagtagtcgagtaaatgcactaagttatgctttactttaaataaataacttgcgaatcaacaaaataataataatgaaataaataatgtagcaccccctagttttaatgacgcaccagatgcatctttgcttcctaccgaacagatatcttcacttgtaacgcacgatgatggaggaactcctcatgaatattattcttctaaacctattcacgaactatcacaaattgaacaagcgactggtaacgagtttactaaatctttggataatttcctttctacacccattagggtagcagctggtacttggactactacacagacggcaaatactgacctgcaaaccttaaattttccggatgtcttgcttaacaaaacattgattgcaaacaaattagatggttttgctttcttgcatgctcgtgttaagtttcaggtg

SEQ ID NO: 2148 - DNA, 580 bp, unidentified
  source 1..580: mol_type = unassigned DNA; note = Mutant Zaire ebolavirus isolate Ebola5 sequence
ttgcaataattgactcagatccagttttatagaatcttctcagggatagtgataacatctatttagtaatccgtccattagaggagacacttttaattgatcaatatactaaaggtgctttacaccattgtcttttttctctcctaaatgtagaacttaacaaaagactcataatatacttgtttttaaaggattgattgatgaaagatcataactaataacattacaaataatcctactataatcaatacggtgattcaaatgttaatctttctcattgcacatactttttgcccttatcctcaaattgcctgcatgcttacatctgaggatagccagtgtgacttggattggaaatgtggagaaaaaatcgggacccatttctaggttgttcacaatccaagtacagacattgcccttctaattaagaaaaaatcggcgatgaagattaagccgacagtgagcgtaatcttcatctctcttagattatttgttttccagagtaggggtcgtcaggtccttttcaatcgtgtaaccaaaataaactccactagaaggatattgtggggctagcaacaca

SEQ ID NO: 2149 - DNA, 582 bp, Lothians earthworm picorna-like virus 1
  misc_feature 1..582: note = isolate Q48, partial1
  source 1..582: mol_type = genomic DNA
gcatgatacattttaaaattcccattttgggacgttgattattgcgtgatataatcattttcctttggacgttgactgttgcgtgattcagtcgtctttttcctcttgtgttattttctctatttaataaatccaaaaacaaatagagtttagtttccattttatattatttcgggcatcgttttggtcaagcgatgtagatcatatgtatgatcatttgttagcttatgtttaggaaagcattacgaatattcttaagatacaggagttttgcttgcggcgtggtacccgtaagacctcacaccagaaaattagttattttaatttgttgtctcactgccttgacccgttgcgattagaaagtaccaggattggtgccatgtgcttccgttatatcctgcgaaatcgataatgtcgactgcggctggatgggctttgtttcagggcaacattgagaaataccaaaaatatgtttatgtgtgagtggctcccgaggtcggggatattcactgtgatgggcttctgaacataagagtactaacatgtgtgagtacttgtgatgtgaccacctttttaaacatt

SEQ ID NO: 2150 - DNA, 583 bp, Populus tomentosa Cucumovirus
  misc_feature 1..583: note = segment RNA3,isolate pt120-lat-16,1
  source 1..583: mol_type = genomic DNA
tttggtgtctttccaaccgacgtatgattgtcctatggaaagacaccaaagcgggaagatcatggttatgtaacgaaacgcattgcccatctataggagacaactccttgtcgcctagatcagctaagtaaattctcaaagacccttcagcatcagtggaaactgttcgagtaacagcacataatacctgggggacgctcatatatccttttgagcacaattcaccaacatcatatccagacttaaagaaggaagcaatacgaccgtgggtcatctcgggaacgaggggccggactgaaatagcattatcagcacgcatccaatgatgccggcctaggtcacactcagtagccattttcttaatggcttcagggctaaataatatcttttgaagatcgtcagacgtagccgctgaggactgttgagttaaagtcctactggtaccttggaaagccatgcctcggtaatcttaccactgtgtgtgtgcgtgtgtgtgtgtcgagtcgtgttgtccgcacatttgagtcgtgctgtccgcacatatattttatctttctttttcagtgtgttagattcccgaggc

SEQ ID NO: 2151 - DNA, 583 bp, Beihai paphia shell virus 3
  misc_feature 1..583: note = strain BWBFG40853 hypothetical protein1
  source 1..583: mol_type = genomic DNA
tttatagatatttatatctatatctttttcacgttggaaggttttaacattctttgaatggtttttctttcaacacccatctatcattcattttattaactcattattcttttaatcatttcttcgttttttcagatttactcttgtcttcggagtaatgactatcaacctcttataatgagtgtttatattatttgatgaatttattgaatcactacattaatttgtggtagttggtgaccctgggtttgaacgtaccctcggaaaaatcctgtttcaatatttacatcatttaatatgaatgttctcgagctgaactcaatgtagctcatcctaaataaatctttgagagtttgcgcgactaaagtgccaagatgtggaattcatccatgagtaaacatgtaaaaacgtgcgccacttaataatatcttccgtgatccaatggtggtggggtgtcccgactcgaagaggtgaccgcgcacttgagaccgttgcgacatacgatctcccctgttgctttgggttaaaagcatgtccttctctccaattacgttttatggttacaacttttgctatatagata

SEQ ID NO: 2152 - DNA, 585 bp, Hydrocotyle vulgaris tombusvirus
  misc_feature 1..585: note = strain pt175-tom-27, complete1
  source 1..585: mol_type = genomic DNA
caacggggctgatttcttgccctttcgggcggtttgtttgccctttcgggcggcttgcttttcagcaggctgggtacctttccgcacctgtgagtaactagctttcgctggttgcatggcggtaatactctctattaccgccatgcaaccagcgaaagctagttactcacaggtgctgaaaggtacccagcctgctgaaaagcaagccgcccgaaagggcaaacaaaccgcccgaaagggcaagaaatcagccccgttggaagtggctttgggtaagttgttgcccggagtgcatttggggtggttgggtaaggttgtggctgagttggccaagcctagccctgggtctgcggaggcctcgcaacctccgttgttcagagcgctcactgctgctctgaaggtgattggcggccaggacatcgatgctgccaatgcgtacaggaacagctctgccgtgaaagagtacgtgggaaaggtctttccccgtccgggaaacgccaagcagagcgaggggccggcaacgaacgtggctccgttgaacagcaagcagcgtcgggcgctcaagcgtgccgacaaacaggccgc

SEQ ID NO: 2153 - DNA, 585 bp, Hubei polero-like virus 2
  misc_feature 1..585: note = strain QTM26674 hypothetical protein 1,1
  source 1..585: mol_type = genomic DNA
gtagacggcgaaccgtcaccccaacccccccctcctccgccaccaagtccggaaccagaaccagaacccaaaccagccccacctccaacgaggttttggggatatgagggtaaaccaacctcccgagtttcaacagctcgcaatgatcagttcatagatgtcaaacctttgacatttataaaactgtacaaatgggagaatgaacattggagtaatgaaaattttactgccaattatctacaaaatgatcgcgagaaagcaaccccctatttcctaatccccgcagataagggggaattcacagtctatatagagaccgatggggaatacaaagtccgtgcaatcacagatcctaacaagggtaaatgggcaggctttgtagctttcaacgcagatcaagacggctggttcgcacgtgagtattcaggagtcaagatttcaaactatcaagctacacgtagctttgtcgttggacatcctgatgctgaggtcaataactgccacttccaaggttctcgagcagtagaaagtgattactactgctcctttgacctctccgtggccgaggatggtgcttattgggct

SEQ ID NO: 2154 - DNA, 585 bp, Hubei levi-like virus 9
  misc_feature 1..585: note = strain WGML141493 hypothetical protein1
  source 1..585: mol_type = genomic DNA
cctcccctttcctccatgccaccgattctggcccctcacagggcggtctttcggtggaagtgacatggaagaaaggcgggggagggggggtcacgcccgctgacatggtgtcagcgggctatgccggcgaaccggaagggctacctgcccttgtgaggtgaatccgtggagagaataagagaacgcgttactggtggctttacaaccgagaagaccatcaagatctcgaatggcactgccacccgagtaaactatgctggcgtcaaggtaacgaagaccatccaggacacgctgactcctaacttcacggccttgctaaaatgcggacaattccttccgctaaatccagtacgaatcaccactgctactgaaacccgagtttcttcgggtgacggttgcaagatctggcccaattacaacccgggctacatctattttgatggtgatgttggtggtacgagcttctttacgagcgcgtattgccctccttggcccacgattggtgacaacgacggtttgattaacgccgctgtcgtcgcagcccgcagtaatgcggtgtctgatacgtgggatgtgttgacgttt

SEQ ID NO: 2155 - DNA, 587 bp, Mossman virus
  misc_feature 1..587: note = complete genome.2
  source 1..587: mol_type = genomic DNA
gatcaagtcagccatcggtgggagtgttagagctcttccaatattcagttcatcactaggtaacctataagctcattagtaccagaatgtgatatgtttccgatacggggtgtcacactatgatacacaacagcgatagtacagattagtagttatatgcaggtctctaatacttaatggtacgacatctcaatcagacaaatcattaagcaccagccacgatcagtgtctcactctatagctacaacaatgagtcttcctatacagaccttccaagcactgtatatcacacttataatgggtaagggctagtttcagtcagatagtatatattgtttgggttaataatctaacaacaaaaaacttagggcaaaagaccctttaatcctggatctctgtacagtgccagacagaccaatccatagctccccactcacagtctcctcactagcaatcaccggaggattcgttgtggtaagtcatatagagctatatttatactttcaccaaattctatattcactgtcagcatccgctggatcttgtcttacaatctgttgcagggaactctatatctggattaaatc

SEQ ID NO: 2156 - DNA, 588 bp, Beihai sipunculid worm virus 6
  misc_feature 1..588: note = strain BHNXC41400 polyprotein gene,1
  source 1..588: mol_type = genomic DNA
gtgcgctcgcaaaatgcgagcgcacacctgcaggtttatgatgttgttcttacgtcttatgacaacctgcggtggttagaaccaccttgactcgaactgagtcgaattaaattttaacgactgaaggatagacggttccccgcccgtcgactcctaatcggtgatccttaattttgatcgtgtttgacgatcttgatatggcccgtttgacgtgcctgaggtagttttcttagtcagaaagccttagggattacacgttagacggaattgatagattttatttcacgagatttgttttggtgaaacgttgacctcggcctgagcctactagatgatatgaaatctcgcactttccagtaccagcggaaatccgccgtactcagtgttagtgcagtgattgatttgatttaagttttatcagtttgtcgacgaataaaggagttaggtcccaaccttacaatagggatacctaaagaattcagacccgtgtaatgcgggccctcttcggaggtgtttgggctagtaccccactgataccacagtgttagttttactcctacgactgatttaaagtcatctgctcgacaa

SEQ ID NO: 2157 - DNA, 588 bp, Victoria bee virus 1
  misc_feature 1..588: note = isolate VN2-2 polyprotein gene, complete cds.1
  source 1..588: mol_type = genomic DNA
ctatggccacccagccatagtattgcggattagcgtcccattaagattttaatttagctattcacaaccttttgttctttctttgattgacttaagccgctgtgtctcacccttttttgtaacctatttatttttctccggattaatatttagccgctacatcccaccccctccacctcgattgcccatttacgacggtttttctgttacttcattgtaactgctctctctctctcggaatttcggtgatctctcgtactagcatagattacgagaacgatgccaatttgttgacttcgctcttcttttgctttgacgaatacatataagtcacgtacttttaaatgtccctttagacatgtttattaaagggaaagtgcgtatcaggatatgtatcaggtaccctgaaagtcataaggttagactttcacattagggatacgattacggcccagaatcattggattctctgggttatacgtaatacacacgcttattacaagcttctcttcttagatgttaatcattcaggcgaatggaacgcgcgtctcacgaccgtaagtactaatagccaatcacgaatttgaa

SEQ ID NO: 2158 - DNA, 589 bp, Chaetoceros socialis
  misc_feature 1..589: note = f. radians RNA virus genes for non-structural2
  source 1..589: mol_type = genomic DNA
ggactcttccatcacccatttatatgtttgtattttacatatttatatattaagtgtttatttcttttgctgagaaatatgtacagaccactaatgtctataaactataagagtgtgcagtctcatacttgttcccacgggaaattgacgtgtatatattagtgatttagcgtatttaatatttatttgtcgttctgcatatttttacgtaccctgtatattacattttcatagaactttcagtctgtctagcccatgacttcactgctagatttgactataaacatagtgataagtcggttctacatttacacaattacaagccgctggcaattgctttacaaatattgccaaccgtgtgggaaaatctccagaaaatacacacttgaaaggagatgagctacctcaggtttattcacatcccagagatgatccattggaattagatatttcacctatccagggactacagcgccaggttacgatcggtaatctctcatctgaatctttagagatatctgaggaaattcagtcggagaaagtggaaatacaaccacttgatgatcgtgagagagaaattacagaatta

SEQ ID NO: 2159 - DNA, 590 bp, Elephantopus scaber closterovirus
  misc_feature 1..590: note = strain pt171-clo-1, complete1
  source 1..590: mol_type = genomic DNA
gctgcgtacagcgaaagtcaaggacttgaagctagctccgagttttgactttcgctgtacgcagcgattacataatttcgcgcatctggcgcgcctttaataccgttggagtcctgcacttcttcggcactgatacaaccactacggtggttaaggagttttcggctgctgggccgatcgtccctttacggaaatcctgttttccgttctctgttcgcgctgctgttcgcgcgattaaagctgccggacgtcctattgacgctccgcgctccggatgcctctgtggcctccctgttatcgacacatctggtgtcgtgcgtccccgctctgttgcgggcgtttggaggtatgctctgtgtaaacctccccttactgctgccgccaagaggtccatccgcaaggcgaagaaagattctgcattctttctcagccgggcttcttctctcttctctcgggaagtcccctgcggcacgcgtcacagacttcgcaagcgtgttgcgaaactagctgaccccactgtgcgtgaaagtccccaagacaagactaaacttaaggggcgccgacatggcaaaaactctgacctcccgtat

SEQ ID NO: 2160 - DNA, 592 bp, Wenling triplecross lizardfish picornavirus
  misc_feature 1..592: note = strain XYHYC1852461
  source 1..592: mol_type = genomic DNA
ttgggaaatccccaatgcttctttcaacaccgcctgactatgcggtggcgcttcggctcaaacaactagtcacttccccctcttaactactacccaagacttctaactacccttacctacttatttgtctaaatttcaaacttttattctcacgcgtcttataaacatcttttctatttgttatggtatgttttgtgatttgtgtggtgtatttcatttaatgggatctagtggaccgtgccccggttgggtatccgctccctttaaatgtttgcaagcactcttgacattataacctatcatttagtttacttgtttgtatgatcgtatttctgaatcgtaacatttatgcaattctttctcgccgagacttgtctaggagataaagttcctgcatatttagtgttacggttgtataatggagacttagatagcttcacactgaggacgctttttcgctatccttttgacctgattcaggccagtgtggagttaatgattgtatggatgggccctacaatttgtctaagacttggtgatagcctcgcggccgctcgccatttatacaactgaatagcggttgaaactctct

SEQ ID NO: 2161 - DNA, 596 bp, Wenling crustacean virus 2
  misc_feature 1..596: note = strain WLJQ102135 hypothetical protein 11
  source 1..596: mol_type = genomic DNA
gcggaagaaaaaccgcacacatatactaagcataaatcgaaggagatttaaagtgaagcatttatttaatatcgtaacaatgaatgtgaaggagccctttttatgttaatgtacaaacaaattgacaaccccccgtctacgcagacattaaatgctgtcttttatatattgagattaaaataatattttgtgattatagaaaacacatcaatttcttactccagagatagtaggagtctaaaactaatacaaaaccgaaatacactattcgaagtaagttctcgagggtagtgttatttcaaacgggacgcacaagagctaactagttaaagacactcttgcccacaaattgaagttccgaacgctgtaagaccgcaggacccttttatattatgaatactactattacgaatgtagtcgttagaatatttatttatataaataccaatcttcaatttctttatcgtatgatagtgacattttgtcatttagaagattactttatatatatatatattactttcaacgtcattttaacgtgtgatcttatataatgtcccatgcatttaatgcggctattagttcgctcataaaat

SEQ ID NO: 2162 - DNA, 597 bp, Odonatan anphe-related virus OKIAV59
  misc_feature 1..597: note = cRNA sequence.1
  source 1..597: mol_type = genomic DNA
ttgcatgtccagtaaccacacatatatcacgtcaatctcgatgtggtcattgtctcagaaaaacagaagggggtccttaattggcaattgtttgttcatacttgaatctcctgtaaaaaaaaccttcgagtgcctttatacttaattaagactagtaattatattttatacacataattttttatgttatacaccatgcatatacacatagctgtatctcttatcacattttaagaaaaaccgaacaaaagatggatcgagccggaaacacaccacaaaacccacatggagccatcagggatagtggatggatcactgtaaatggtcaactaccacctaatgacctagaacctcctgaaaggaagggcggaattacatctcaaccggtatacggctattgtaggcggtgtgattccgttgtccaggtcaaaccttctcccttttccagtcattatcgaaatggtcgagtaattgactctaagaagtcatcagtctgtgttactccctattatctaaccccatgagagaataaaggcacctacttgactcccactgtgagaagttgagccaaacgatttagaaaaacccgagtccaag

SEQ ID NO: 2163 - DNA, 597 bp, Rhinolophus picornavirus
  misc_feature 1..597: note = strain Henan-Rf265 polyprotein gene,1
  source 1..597: mol_type = genomic DNA
cggaacgttgtatgctcagggcgtaggcaccacccacgggtggtgcctacacgtgtggactaaaccacacactcttttcagcacttagtgctgctatctctttttgtaacttagaagtttgtacacaatgcgttagggccacacatccagtgtggtatcgcaaagcacttctgtttccccggtgctagtaggagggtggctgctccacggccacttgccgaacccatcgttacccgactcattacttcgcaaagcctagtaacccagttgaagcaagcccggcgtgttccggtcaggaaaaaccccccctggccagaaacatgtgatgagggtgggctatccccactggtgacagtgagccctccctgcgttggcacatggcccgatctgggcgtggttcttgtggatgctgccgaagagccccgtgagctagtgtttataccgccggcctcgtgaatgcggctaaccctaaccccggagcagaggctactgaagccacagtagtcgctgtcgtaacgagtaattctgggatgggaccgactactttcgagtgtccgtgtttcctttattcttttattgttgtttatggtgacaaac

SEQ ID NO: 2164 - DNA, 597 bp, Wenling crustacean virus 3
  misc_feature 1..597: note = strain WLJQ142924 hypothetical protein 11
  source 1..597: mol_type = genomic DNA
tttgaacccacgctgtctataagtctagtgtaaccgtggctgtccccacgctgaatagcatgtgaaaccgtggccgtagaatgattgtacacttctaaagaactgtgcaatatttaacctttttcccttacgattttattctatatatcagaagcaagcgttgattgatatatactatacttttgtacaatggaaaattgtattagtttttaagattttagttataagcttctatcttctcctatatgctagttgactagtaggatgcgatctcctcttgaagaaacacacagcggattcgaccccgtctgttggcgcatttcaggtgattattttggaactccgttatcttcggaggtaggcaccatggctagaacccatggcggcttgtagtctcttataacttttgatccctcgataggcatgagcaaagtagcttagaataactcctcatgactggattgttagcgcatttcatccagcgcacttggaagatgattttatgagatatacgcgagccgtagaaggtcagtccctgaaataagggtggcattaccggaaacgctatcaccaattgaaagccgcaacccatataac

SEQ ID NO: 2165 - DNA, 598 bp, Aedes aegypti anphevirus
  misc_feature 1..598: note = strain 1a, complete genome.2
  source 1..598: mol_type = genomic DNA
tcgtctgtaggaactgtgtcttagtaagattaatcataatagtataacggtattaatctaatccttttgggtgagttataaccatcacctatctgcctaaacgtatctagtgcgatctatgtgtaagttagcctttagaagctttataataataataataggcatcggaagcaagtgtggtatcattataaaaacccgccagttacaaatcatgcctgtttcaatagcttgtgcacattgccactatcccattgacatccagtcagttggtgctcccagtgatattgggataaactgcaagatgtgtggaaaaacatcatacgtaatcaatgccccattttaacatgggtaggtagaaccgccacaccaggtttatatttatcttttgctcaagcacaatgcaacctagcaaatgcattaatatatctatatattttgaagattatacatattgtgcagctacattatcatcactgtgaggcttcttttctttatttatatttggctaatttattcaatgtataggttctcttgcttataaaaaacccgccagttacagatcacttgtcgtgtatttggaacattgaaaatcgaaaat

SEQ ID NO: 2166 - DNA, 600 bp, Scott virus
  misc_feature 1..600: note = isolate Antarctic6 polyprotein gene, complete cds.1
  source 1..600: mol_type = genomic DNA
gcgggttaccccgcatggcgttttgaacgtgtcaaccacgatacggttgctgtaggggcaccagctgtgtcccacctcttgctagcggagctcgttagccggtgccggtacgttaagtcggcaacataggagttagttttatttcttctttactatattctttgttttccaggttgtctgcataccgagagctgctaccggtgcgcccgccggggttaactgcatggctagcatgcagctgtggccgccaaaagtgcagatgtagtgactatcgttgcggtctttgatttcagggggcattgtacgcatcctgtatcgaacgggtcagttggggtaggctacgggtgaaaccccagtggtatcctaataatatttattaggaccagaggcacgctaacgcagcggataatggtgagtttcaagggacaaaaaccattcaacgctggggctcgggtgtcactcctgattcgcgaatacatggtgtgtacaatgtgataactcttgtcattgaagaccccatcgtaagctacaccctatgcgtttagggctactcaggggcatgttaggttttaaagcccatatgtttgttagtatgccagg

SEQ ID NO: 2167 - DNA, 600 bp, Hubei narna-like virus 22
  misc_feature 1..600: note = strain SZmix20730 RNA-dependent RNA1
  source 1..600: mol_type = genomic DNA
ctagactggtcatgtattttgtgatcatgctacgcgaatggcgagactgtcaattaggacagcctcggtgtagatactgatagtatctccgggtctcttatatttcagtaatgaaaggaggagaatactttggaaacaaattttgcgttaagcttaactactctaaccaaagtaacaaccgcagtctgtaaagcactacgatcattaggtttgtcaaagagaaaagaacacgcaatcgaggatatattgataaaacaattgtcctcctcggggcctgagtatgttttaaaacgcttatccgaattaacggactggcgaaagaaacatctcgagggagagctaagttacgctcccgcatggcacaagaagagtacgttaaaggatggaacaactaaaccatctgataggctgggaagccaagtctggaaattatcagacaaagctttcttttgtgtagttggttgcttgaggaaaagtatagagttaaatataccaaccgaaaagcagctttctaaatggttagagggggtaaggtgcgaaatcacatcaatacccagcaagactataacgctatccccaccagttgaaacaattgactgg

SEQ ID NO: 2168 - DNA, 602 bp, Kummerowia striata picorna-like virus
  misc_feature 1..602: note = strain pt119-pic-7 genomic1
  source 1..602: mol_type = genomic DNA
gccagttcagggctgtaatcctgggaaatggaccgaatccatcagtgatgtagacctgttttgtacggaaaagcattcaggttagatcaccgtttgttgggatacgttaatcctcacacccccccccattccatttgtatttaatgtttagccgggtggtgtccggtatataaattaccaatgtttaacggatttgtttgtgtaccttcggtctgaaatcctaatgctggataatccttggcgtctgtgtttcacggtcttggaccctctttaggtgaatatgattgcaacctgtcggccctcttcggagcgtttagacatatcatattcttgggtcgctagcgcttgctctaaaccctcttagttgaaaattagagcacgtacgaactttagtggtcagggtgtacgttaaccacctataaaggtcatgtttatccacatcgaccctcaaggctaaccctttgagttaaaatcggatatcacttcgtcaaaattcgtcttcggtttctgcctccgcgtcttcggtttcggttagcgtatcttcggcttcgattcatgctttggaaaagcgtgttgagaaattgtctcttattgtgactaag

SEQ ID NO: 2169 - DNA, 602 bp, Wenzhou picorna-like virus 12
  misc_feature 1..602: note = strain WZFSL74240 hypothetical2
  source 1..602: mol_type = genomic DNA
agtgtcgcaacgaaagcaatgccccctacctctttgatcgtccttcatggtgggaaccgtgttggaatgcattgagggtggagagaaaacttctttaggttagtatcgatatccaattttgtgcgtggaaagcttgagctggctgaccacattttgcacttacttagcttgcgaaccaaaagaataatctagcgttcaatctgcttaagattgacagagagaggtggtatcctctccaagctgacactgagcttgtggataaagacagtggggaaggcgtaaaggttcaacaggaaactgtccggtttcatgacaatcaaaaatcttattcatacaagattccgactgcacctgataccattgctgaggattctgctattgacgcagcatctctcggtgagtttttgagccgtcccgttaagattggaacagtcacctggagtgaatctagtgcggctggtttagcaacatccatatacccttggtctgcattcttcaatgatgcacgcatcaaatataagcttaataattgggctttcattcgatgcaatttaaagatcaaggtgttggttaatgcttccccattttattatggagcagca

SEQ ID NO: 2170 - DNA, 602 bp, Wuhan insect virus 30
  misc_feature 1..602: note = strain WHZM9934 hypothetical protein gene,1
  source 1..602: mol_type = genomic DNA
caaaaatccaagttatacatcaagccaagagacaagtgcaattataaataattaacccaattacctacagacaatccaaatatatcggaaaatgaatccaactttaacaggtggcacaggcgaagcaagaaatggtcaatgggataagagaagaaaacaagcctggctaaatgatgcgctattgctgctcgacttgaaacttgggtttactatcaggacacgatcagactcacagctacagatgctagtatcaacatttgcaagcaacgagaagttgaaagagtattggcttaccttgggtgatacaactcatttggtacagccggccggtagttcagcctcatcgtacggtactgcgtttgagtgctcatactcgggaatgtttcgagaaaagtacttagagtgggtgttccaagacaaacaaatagttgacgaaatattagaagcaataggccagccaaagctgtcaatagtgtagacccctgaggagcttagcgaaacggcaatgccgtagggtcgcccccatttgaaaaaagaagtaactacaaataacaatagctccaacaaataacacaaatacaaacaaacaaacaacgccaaaa

SEQ ID NO: 2171 - DNA, 603 bp, Halhan virus 1
  misc_feature 1..603: note = replicative protein and structural protein genes,1
  source 1..603: mol_type = genomic DNA
gggcaataccctgcgcaatcatttgaactcacgctgtctgtaaatcttagtgtaaccgtggctgtccccacgctgaataagtatgtgaaaccgtgaccgtagaatgattgttcttctttttgaactgtgtaatatttaaccttatatctaatattttattgatctatttatcagaagcaagcgttgattgatatatacttcaatatttttgtacgatatactgtattaattttaattttctttctcctactatatgttagttgcctaataggatgcgatctcctcttgaagaaaaacacagcggattcgaccccgactgttggcgctcttcaggtgactattttggaacttcaattatttgaaggtaggcactgtggctagaacccacagcggtaagtagattcttaattttatctaattatgttaggcatgagcaaagtagctttgaataactcctcatgactagactgtattgtgcatttcgtctagcacacataatgaaataactttaatttaatcgcttaccgtagaaggtcaaccccattttatgggtggtattaccggaaaacgctatcaccaattgaaagccgaacccaatataac

SEQ ID NO: 2172 - DNA, 603 bp, Perrin Park virus
  misc_feature 1..603: note = strain PPKV 205644 hypothetical protein gene,1
  source 1..603: mol_type = genomic DNA
atatacagtagtcgactaagacatccgaatgcagtatccttaatgaaaagaataaaacacccagattgtacactgtacacttattagagttattacttttaaaataccacgcgtacatacgtgctattttaaaagtaataactctaataagtgtacagtgtacaatctgggtgttttattcttttcattaaggatactgcattcggatgtcttagtcgactactgtatatggcgtgcacttctgctgcctaaggaattattgcgaaacccccccttctcacaaacacacaaactcacaaatactctcgaactcatcacaactcgagttcagtttttatataaagctggtgtctgagaaacagctagtcgcgagctagtgtactatatgtcatgtctatgtagtacagtttcaacacgtatctttgccttatatgaattccccacacaaaaatttccttctgagtacgcctcccggtttcataccttactgaaacacgcgaggacaaacggccgtggcctctcagtcgtagctatcaaaactttatagccgaacaccgctatggcaaccccatggttattaggcaattctgaaaatcttaaact

SEQ ID NO: 2173 - DNA, 603 bp, Sclerotinia sclerotiorum
  misc_feature 1..603: note = negative-stranded RNA virus 9,isolate W45,1
  source 1..603: mol_type = genomic DNA
tatagaaacagtactactcgtgagctactagacagctgaatctcacttggactgattacattcgtacatgctaatcacacttgtcctctggcaatgcatccatgtgtagttgtcacgcaaccggatcacattcgtacacattgtgccgaacatgcatttggcatttatacagtagaagacctaattgaagacattgatctgtacaatcatgaattggctcaggcacaagatacaggcgaatggcgacacttcaatgaaatatggagcaataagataaacgaaaagaatttggatcacattaatatccttttagtgcccagtattggtttaggagagctcattcaatcaaggagcatcatggcattggttcttaatgacagttccttcagtttgtctctcagaggaatgtcgatgcaggataaacctttacagattgagttcagagaccagagcatgatgtttgaaggatatgtgaaacagttcgaaataattagttcgctttcatcctttataatgacttatatgtgaaattaaaggcacaatacaccgttgaactacacataaaaaaaaccgtttaaagcttagttctcttttaacactaca

SEQ ID NO: 2174 - DNA, 605 bp, Hubei picorna-like virus 20
  misc_feature 1..605: note = strain WGML146806 hypothetical protein1
  source 1..605: mol_type = genomic DNA
ctttcaaccccgggttcttttacaggtcttactaaccttgtctaacagtaatgttgacaaaattagtggtttttaagtgcgaagagctaggtttttccaaaaaaccgtacacttccgtgctcgtaagttcagcacgcctaatggaggcaattcttacatccatgagctagcaactccaactgctttaggttttagaatagattgttcgaattactgcatcaggaccatctgtcctttcataaaaccacttgttgattacaatccgctgtcagttaatattttgcactatatgtgctaactctgaccaggtgagtaattagtaagaaccatcctccatcaaagtcacaactggccacgtttgaatacgctgtctgctttgaggtttggattcaattgacacattgcgcggcattgatgttgattgtctgctgagctagcttagtgacactggggtcaaactgcttgtgctatcgtgtgataacgcgttacggcgtctgcactggtatgacgatgtccagtgactcgagttaggggaagtgcctaacgttctatcgtcacttaccttaaactttccgtttcttacggacccacagctggtaacacat

SEQ ID NO: 2175 - DNA, 605 bp, Wenzhou picorna-like virus 39
  misc_feature 1..605: note = strain WZFSL83776 hypothetical1
  source 1..605: mol_type = genomic DNA
gcccgagaagggcttattatgacgtgaaatgaacgtatgagttgttaaagctccatgtttaaaatgggggctctatattgttattttatgtttaaatataagatctgattggaactcttttcggtaaataaaaggagtgtgttcactagtaatgtttggttcggtttttgttattaagagatggagttaaaacatatacagcttcaaaagaatgaagaataccaacaaacgtataagttttatgtcccatacttatagtattgtgtataaacattattcgtgacacggctagattatcatacgttatcacgttgcagcgcgtgtgcagttttgaaaggataatcattaatagcgtttgttttttggctgtagctcttttatagagttagaggtttataatacaatagaatcttaagtgattcccataatgtccttggttgtattttaaacctcgaatacgtgaatgcaaatactcgatacctaatagagttagctatgctacccgttgttgtatgagatggtatcaaatccaacggagttagagaagttgggagatagacctggcttatggttagtttcacgtattttaggttgtctaaaacgaa

SEQ ID NO: 2176 - DNA, 605 bp, Hubei reo-like virus 10
  misc_feature 1..605: note = strain QTM136127 Minor structural protein1
  source 1..605: mol_type = genomic DNA
acccaattatattacctgatattgatgatatacattacaaatacgcttttttaagtagtttcagaaataatgtttttttacattatcatattactactaatattaatagttttagttattatattaatccgcttagcaaatcattgactaagggtatcagtagatattatacggtccctttgaatgggaacacattttttgattcgtatgttattgatgatgttgtattttcacttgaaattaaatcagatggcgttatattagttgatgatcaacaagtattttcccttaataatggagttaataattacactacttgtacagtaagatttaaaactgtcccaaagaaagattctaacaatttactaatagttactatttatttagtcgaatatgaaaaaatatttagtaaggacccattaaagaatgatgaatactcctttaatagaactattaatagagtttatactaggtcatttggtgtgtccgattttaataaggtttttgttgatcctaagaagtcgataaatgtttttttatcgctggatacatttaatgacatagtgcatgactctttatattctattttcattgctcgatctgaa

SEQ ID NO: 2177 - DNA, 606 bp, Mint vein banding-associated virus
  misc_feature 1..606: note = isolate NCGR MEN 454, partial1
  source 1..606: mol_type = genomic DNA
cgtaatctgatagcctgagcgattcagaattcctccaaaccctgcctttgcagtcttcgttcctttcgtttaagttcactttcaatcctgtactttttcattttttactgcatcccatcccatcgttcatcaattcacaacccgcagaattcatcttctgcatttctcttcttttcattcttgtttttcgttcacttccattttctttgtgtctcaccaccacatcgacttttggctttgttttctctttgttcgttccatacttctcaacccgcagaactcgtcttctgcattttcgttttcttcgttttctcattttcgttcaaaaacacaaaaagattttgctttcttttcctcttttgtctctcacgagacccttgttgtcgttcacgcccagttgttttcacttgtttctctgttttccaaaacttttgttctctttctttcttcgttccattcactccggtttttcttcagttttgtttctctcctttgcaccactccatccttcgaacgttccattcctctttgttttttgttcttcatttccacttcttttcattctttttgtttccccttcgttccttcccacactcccatcgcggt

SEQ ID NO: 2178 - DNA, 606 bp, Chajerado virus
  misc_feature 1..606: note = strain Cx 1773-7 genomic sequence.1
  source 1..606: mol_type = genomic DNA
cgtagatatgttcatgtttgttttgttttgtaatttagttcaaagggctatacctacccctgattagtaacaaaatataaaactcggtacagaccggggcaaactaatatagttatttaataatctgtttgaccttatcttatgttcaatgccgtgttcgcttgcgtttttcattcccaggaaaatgttccccataagttttcagattattgtttaattattgtttgtgtataaacaattattttataaggcaaggcgttaattgatttaatgtttataagtatacggatttttattagcacgaattaattccatggtgaccaccgactagtaatcgagtactttgagtacaaggccaaaagccctctgtataacatgtgaagtgtgttagaaatgataataaaatgaagttgaaagtaaccgcttaatgattttgaacgtgacaagcttctatgcttaaaatcatctcatatttattatgtaattcaatagatgtgtatctctacctattggatgtattcctctaaggaatagatgatctaagaaccggtcctttggtggtttcatacgtcatgaaatcaccattcctttttaaaattttcaatc

SEQ ID NO: 2179 - DNA, 606 bp, Macaca fascicularis picornavirus
  misc_feature 1..606: note = isolate KS018/MFS01, complete1
  source 1..606: mol_type = genomic DNA
ggaggatactttgtttagctttgcaattcttaaactgttttccatttcactggtcgtttgacgcttgtagggcgacaggtgttcctagctcttgcttttctaaactatcgaattttgttttccactcgttcatatgtctatgtatgaatgaacggggtgagtcctcgttggccctcgctggagtgtaaattcccagtctttctggaactagaattacacaagactccaggagtgttctgaagattttcatatttaaataaaatcttttgggattgtccttgatggttgtagcgatgtctagtgtgtgtgcggattcccatgctggcaacagcatcctcacaggccaaaagcccagggttaacagcccccgctagatgcatggtaccccccatgcccattttggatatgaaattaaggtttgtttacttaggaatttcataaggaagcttctgaggctatgaaggatgcccaggaggtacccgctatatgtggatctgacctggggaccccttgcgtagctttactgcgtagtgtgggtttaaaaagcgtctagtagccttgttttcgggggaccgaaaacttccacattattttgagactggcatc

SEQ ID NO: 2180 - DNA, 606 bp, Wenzhou picorna-like virus 13
  misc_feature 1..606: note = strain WZSBei69459 hypothetical1
  source 1..606: mol_type = genomic DNA
gccggggctctttgagccccggttatcgtttgagtagtctgatagaatatgtctatctgcaggtcttgtcattgtgcgagaaatgcacgatgatgatgttcttgtagtgttgcgaagtcttgccagtgtgcgagatcgcacgttggtgatgttctttgcttgatatttttattagtatgaacagcttggtgttacactgagctatatgctcggtgtcgccaccccaaactgcctttctactactcgagcggttacgcagccgttttctgcaggtttttagtcaatttatcctgcgcgtaaaaattaaatacactttcaacccagttgacgctttttaaggattttgcgtgataaatcatccccgcttctgcggatgaaaagacggacatcgtagatcaagactgtaagtccgtgggctgcatttcacttttgtgaatgtagctgttacagtcagttagggtggatatttagatgttttatgcattgtagatattcaccacatcgatcacccggatgcaacagcgtgacggtgcgtacatgtagaaatagcgtgtatgtgctgaatgttactatttccctcattttttgagagctcatttgtcatgt

SEQ ID NO: 2181 - DNA, 606 bp, Wenzhou levi-like virus 7
  misc_feature 1..606: note = strain WZFSL85855 hypothetical protein2
  source 1..606: mol_type = genomic DNA
ttttagctaacttatcctctaacattattgtgttagatttatttataccttaggaggtacaaattggattatttgacagaatacccgattgataaatctttatccattatcagtcatatctcttcagtctgctctcagttaggtggacctctctcacaagaattgaatactcttgttcaagaggggaactattctgctctaatcaactttaaatttgattatcagaagccctatacacaaaacgactttatttacgcccgtcaaattcaagctcttgtttcaaaacaggagtttattgacttaggcgtagatcgagaagttgaagcgtataaaaccttttctgaggctgaggaattatgttcgcgtactaatgaacgattccgtggtagtctatctgacgtttcgtcagagtgtcactccgtgctttacggggcgacacgaaaaatagctaccatactcggagacgttcctgagtacagtgaattaaatttctcttttggacctggagctacaaccaacgttaaacgagcgcggtctaaccctagggttaaacttgaagctcctctaacttgtagtttcgaatttgttccccatgtcgcgaaattc

SEQ ID NO: 2182 - DNA, 606 bp, Changjiang tombus-like virus 11
  misc_feature 1..606: note = strain CJLX30677 hypothetical1
  source 1..606: mol_type = genomic DNA
tggtgccgcgcggtgcttaatggtgttgaggcgcaagtaaaactgcaccacaggaacattaaggttacgtcccgtgtcggattagtgaagttgaggagaggtttcggttattttcgtgatgttgtgcaagacaacatttttttttataataatacagtcagcgtggtattgcgggctttgactgagcggttgtattacgttaagggtgtggatgggtttgtcccatgccctcgacccattgtaccattctccaggttgaaatggattcgcgaccgagtgcggagaggattagcagctgtgccgcctgtgtggacatatgaacaatttgtcaattcatacacaggtagcaagcacagacgttacacctctgccgtttccaatctagccgctagaggcttgagaagaagtgacggttacttgacaacattcatcaaagccgaactatacaatggcacaaccaaggctgacccttgcccaaggttgattcagccccgcagccctgagttcaatgttgaactaggacgatacttacgtccacttgagaaacttgtctacaaatccatcgaccatttgtttggccaccatgttgtacttaaatgtgacaac

SEQ ID NO: 2183 - DNA, 607 bp, Astroviridae sp.
  misc_feature 1..607: note = isolate rob180ast1nc genomic sequence.1
  source 1..607: mol_type = genomic DNA
tgtgttgcaaaatcccacaaatcctcatatgttttctcaatttcaacaggatcactataatggaatttctcaaacatcttcgtataagctcgagacgtccaagttgtggatgcatagtcgtgttgttcataaggtgttattatccctagtaatggatctctcactttttttcaactatcaaggatggagtgaaaactcaaaccactatgcaaatggttgtcacacaggctcggaaaataaggaaaaagaaaccctttacatgtgctttttgtaataagacttttacaaactggcatgaccgccagaaatgtaagaaaagccaagagaaaaatgcagctgaaaagaaaaaagatgagccaaaaaacgagaagaaggggcagtagaaacatcgagctgccccgtttcggttttctcgtggtatgactatcttgaaaaaccctttggaaagatttgcctacctgaagaacaaacattgcttggctatatagcagttgacaaactagtggagagaactaaaaaagtgagagatccattactagggataataacaccttatgaacaacacgactatgcatccacaacttggacgtctcgagcttatacgaag

SEQ ID NO: 2184 - DNA, 607 bp, Linepithema humile picorna-like virus 1
  misc_feature 1..607: note = putative RdRp and putative2
  source 1..607: mol_type = genomic DNA
cgtgttagtgtgatcttgctcttaatcggataaaaagagagaataataagatatagagtagtgctactaacataagggtcttagttatttagctttaccacacaaggtggaccgtggcagccccacaatatctagtgtagctctctaggatgggaacattaggtcgtgttctatccgaaattacccatggcctgcgtctaaaagtaataaaacaactaatggcaataataataccgctgtcattgatataaatagtaatacaggtattaatgagaaagagagcattggtcagagtaattttacagctcctcaagcacaaaattatgaagaagctccacaaatttctcaaacagttgaggagcaagtgcaaatcgtaacatttgatgatgataatgcagtagtccaggaacatataccatatgaaatagaagttccacgttttggaaatcaacaacacacggatcttttgacacattcagttgtgacgtttttaggaagaccgcggcttatttcatcatttccttggttggccgaatattctcggtccacgaatatactaaagttttcgaatcacggattgctcgtaccatcgaatattttatctccg

SEQ ID NO: 2185 - DNA, 607 bp, Fusariviridae sp.
  misc_feature 1..607: note = isolate H1_Bulk_Litter_4_scaffold_181
  source 1..607: mol_type = genomic DNA
gtcaagatgcagcactatggttgtgtctacacttgtttgtgacttgaagtcgtcggactgtccactctgctccttgagacatggtggctttagcctttatgtcttaagtggtcgagttgacgggccctcgccctcaattctcattttatttatttgtttaatttatttggccacatagcccttgtgctttgtggagattatgatggtgcgctggttccgcactgacagggagttttgttttcctgtcagttcggggcctgtgaaccatctaatctcctcaacgctcatggtgactatgtgcgggagtcaactgatgccgagtatattattgaggttggcatggtgtttgccattccaacaccaataatgtggtcgggcccagatggtttcccacctggtcctcatcctgcgtcgccaaggttgtaggagtggctttgccgcccctgagatcttgtcgacgccggttgtggagccggtttgccactgttccccaaaattccttttcttgtctcattgtcaaatgcaagctgcccgaatattagctgagcggatgaagttcaaaggggaagcacccttacctatgccaccacgcgccccttggctgaaa

SEQ ID NO: 2186 - DNA, 607 bp, Sanxia tombus-like virus 3
  misc_feature 1..607: note = strain SXXX37381 hypothetical protein 11
  source 1..607: mol_type = genomic DNA
cgccaattcttacgtcagtgtgttactgtttaacatcaccatggcttttagcactgaagtccaatggtgtttaatcggcatcgggttatgtcgtaccggtaagtatgtttatgattactttaacaggtttaaattacgggccaaggccatcaccactgctgctaattcacaggtcaatgctgtcatgcaagtgatgaacggcgacatctatgaccatatggaaattacagatgtcaccgaagatttgtctgaacaagttcttgattcatccgacaattctgttgtgaacaagcgtaggcgtgttagacaacgtgccccttttagagcttatttggtaaaaattggcaaagcaaaattcggtctgctcaaacgaactgaggccaatcgcatggttgtccgtaagtttctgtatgataattgcatagcacatggcgtgcttgcaagacacattacagataatattgacttcgccactgagatggtatttatacctacagagtccgagttgaccaatatggctatcaaatctactaccgttaatgttgagagtaacattgttgcccgcttgctgggcaccaatgatgctttcaattgatggggcccaagc

SEQ ID NO: 2187 - DNA, 608 bp, Apple chlorotic leaf spot virus
  misc_feature 1..608: note = VIC10 RNA, complete genome.1
  source 1..608: mol_type = genomic DNA
ggtggaattactcaaacattttggatgggatgacaaggtgttgcaaagttacatcagaatgaaatgcacattgggttgcagactagggggtttcgccatcatgagattcaccggagaattctcaacatttttgttcaatacacttgcaaatatggtgtttacgttctgtagatatgaggttccagatggcaccccaatctgttttgcaggagatgacatgtgcgccctgaggaatttgaaagaaatcaatactcatgaattcattctgagtaaactgagcctcaaggcaaaagtcaatagaacaaaagtgccaatgttttgcggctggaggttgtgttgtgacggcctcatcaaggaaccttgtttgatatacgagaggttgcaagttgcaattgagaatgggagactgatggatgtgatagactcatattttctggaattttcattcgcctacaaattaggtgagaggctctattcacatcttgaaattgaacagctgaattatcatcaagttttaacaaggttctttataaggaacaagcatttgctaagaggtgattcaaggcacaacatctcggaactcgagtggctttcagacgaggatggcg

SEQ ID NO: 2188 - DNA, 609 bp, Wenzhou bivalvia virus 2
  misc_feature 1..609: note = strain beimix75763 RNA-dependent RNA1
  source 1..609: mol_type = genomic DNA
ctttttctggccgcgcttttaccgtggtcggcataccacgtaggtctgatgatcaccgctaatcatttgacgcaaaaggccaagggggggggtgactattgcccggacgcacttgtgtaaacaaggtaagagggggaaggcatacatcaatgtccttcttcactcttgctatcgctgcaaggtagatttgtccgaaaacctcacggacgaggtatagactccaaacctcccgcccccgatcgtgtatcacatgtcgtgacacgttactcgtagttcttaggtctttgttagtaccaacaagtccatcccgcacccccctctggaacggctttgggagggtggcgcgtgcggcccgggcgctcctagcaaagggtgccagctgggttcaatcaacggttgtgtgttgcaccacgatcttataggattcgactcacccatagaactacaagtaaacatcacgcgtgcaatgacggctatcgcctgaaacaacgaaagggggcaaaactctttagaacatctgttctcatctagcggcagggagagggaattagctggcagtaaacctcgacctgaaatttttaatgcagccagggcgccgtttttactcta

SEQ ID NO: 2189 - DNA, 611 bp, Erysiphe necator associated ourmia-like virus 11
  misc_feature 1..611: note = isolate1
  source 1..611: mol_type = genomic DNA
tggaagcccctttgctttcatccgtcgctaaccatttccggtctccaccaccctcccttccacgcggttacgtcacatttgcacgtaagatcgttcgacgcctgttccctcacgggtgggacgccggatcttacgagtcttgtgtgctcggaaccgatccttctttgtcagcatgtttggagaatcgccgcagtgcgggcggacttcacggctatgtttccaaccctcgggttgagaatcaactcggacgttttcgtcacgatgacttcctcacgacgtgcttagacggggcaacccgtcctttgagcgtcgcttcgggtctgactgtcgtccagagtgccggtaagcctcgcccgctgagcaaattctcggcggacgcgatacacttgagaccgcttcataaggcgatctatgatagactgtcgcgcgagaaatggctctgccgtggtgattttacaactgacgttctacagcgcgctggtttttcctttgttgaaggcgaagtcttgacttcgggggattataagagtgccaccgacaatctctctatcgaggttgccgaggctattcttgacgaattgctcaagtccacggtctctgtgccggggtcg

SEQ ID NO: 2190 - DNA, 611 bp, Wuhan insect virus 11
  misc_feature 1..611: note = strain CJLX30623 hypothetical protein 1 and1
  source 1..611: mol_type = genomic DNA
gtgaggtttatacctcacacacaattttgacccatctatgggtaaaatagacgtccagagttttttagcatgcattctttgagagacgttaagcacatgaaagagcatgaagttgtcgatgtacagagaattcattctccaaggcagggcacatcttagtatataaaacaaaacgattccgattatttacgacgaaaccatttaagtattaatcctgacccgattttgatatacgacaaacagctgaataactgttaaaactattcaaatccaacggaccagtaatcttaaattacctgtgacagccgaagtttagtaggttcccaatatagccgtgaaacgcttgagggccgttacagctctaatttaagacctacgtttttaaagcttggtaagcgctttacttgagcaacatatacaaaactagtaccaaatcttagtggaatttaagtatgatatttgaatgttagacatgtattatgtcaaatatcctctacatttctacataaaggtcatgcaatgctcagtggttattgcattatggtcgcagttaacttgcagttttgtattgcctgtgtcggagcagtagtaaagtaaacagacgatttcac

SEQ ID NO: 2191 - DNA, 613 bp, Marmot picobirnavirus
  misc_feature 1..613: note = clone c214910_g1_i1_libraryA_2588 segment I1
  source 1..613: mol_type = genomic DNA
tcaaagatcaaacttggctcaggagcaattgacggcttcaagagatcaggtggctaaggacctaggttatggtaccttagctgaaagtacacggcataacaaagcacaggagcagcataatgttaacgtccttggtgagcaacaaagacacaattatgcccaagagagctataatgtagcagtgttaggtgagcagacccgacacaacatagctaacgaagagctcacacgcttggctaatgaagagattgcacgaagcaatcgtgcacgagagagcgaaactaatcgacataatcttcaaaccgaagatgtggctaggcagcagttagttctatctcaagattcattggctgaaactgtgcgatccaatctcgcacgcgaaagtgaaacgcatcgatcaaacgttgaacgggagagagaaacgtttagatcgaatcgcgctagagaggaagaaacttctcgatctaatcgcgcaaaagaggatgagactcgaaggtcgaatctagtccgggagatcgagactgaaaggtcaaatcgggcgagtgaaggtattcgtcaacaacaggtgaatttaggctatgcgcagttaggtgagcagcgccaatatcaccaa

SEQ ID NO: 2192 - DNA, 613 bp, Beihai picorna-like virus 74
  misc_feature 1..613: note = strain BHHK130969 hypothetical protein1
  source 1..613: mol_type = genomic DNA
gtgtgtttgttcaacacacatgttcatttttacccagttgctatgttgcaatacctaacttaatcagaggttatgttttagaaactcatgatattagaggttatgcttgaagaactcggtaagttgatatgttttagacactcagaaggatgaactcttgctggtcgtttattactcgttagtcattacgtctggtaccttcttgctcgtgagaccgatattgatggtcttctattactcgtgagaccaattttgttagctattgttaactcgtgaggcatgggatttattttaaccataaaacttatactaatatgagatggttttagccctatggaaatgcttagtacccttaggtgtgggaacacttttccaaagtcggaaaaacttcaaccgctgtgttgtacatgttgattgattttacatctcaccgctatgaaaaaggacattgctttattcatatgataaggacgatatggagccggtttagctacgtcgagactttggtcgtagacgcgtagtatgccaagcccattggtcaaactattaaggctctctggattagcaacccagtagtagatttagttttggtctgggcgtattccctgaagat

SEQ ID NO: 2193 - DNA, 614 bp, Serbia picorna-like virus 1
  misc_feature 1..614: note = isolate 71282 RNA-dependent RNA1
  source 1..614: mol_type = genomic DNA
gtagtacgttaaacgtacgaccaccgatgagactgaaatgacactagttgagattatttcaatatcctagtgttataaagtcaatatttgttggttgatcgtttcgtcaatcgatggcgctgacagccggaaagacggcaataataaaaaccaagatttagtttttaagttttgatttgattgcaaaagctatcttgaatagacaatcaaaatattaagtattgcaaaagcttcttaaagaagacaatatttaattagttagtaaccaaacctcatcgtgcccctaagggttaaccggttacgtaaaagcgtagaggtattaaggtcactgcggagacctaaaatccgcaattttatgttttgtaatgttttaattatagacttagatgtaactataagagtttataaatacttgtttcaagatttatagacaagatctgatcctatggattttagataaccttcatgttagtggatagtgtgtgtacctatctaaacgcataaggctcttatttcatatttaaagtaggactatgtattacggcgcatctaacggtaacgttagtcaagaccggagaatctcggaatgaattttagtaattcccaaatttata

SEQ ID NO: 2194 - DNA, 615 bp, Wenzhou gastropodes virus 1
  misc_feature 1..615: note = strain WZSLuoI86017 hypothetical1
  source 1..615: mol_type = genomic DNA
ctcgcacacgcgtttgcgtgtgcgaggatttcatttagtagttgtctctattttggagacacaattggtggacaggggtccgcccctgttacaccgtttgtcggagcaatggggtacgccccattgttccgtgctattgacgatttactttcttaactaggtatcgaaagtgttaaaccagctttcaccaaactttctacggagattgtaagattaaatctgacctgctagacgtatcataaaatccaatgtttactagtattgcttaaagctgtccgatcatgaggaagtacctactttcggatgtggtatttatgaggcccgtcacttggcctagtatgaaagaagtgaccaccaaaccagtccgcgaactatgttcgtttatagttatgatgtgtaccttttctaaggcgcgactatttagtctcacattttataaattggtgacaatttacataattatattcgtttagtgtgcggagagccgtagacctatggtgtatgttgatttgaaagagcttgctcttagtcagtacattgaaagccctagtggtgtagtaaaacataggtcgctttgtgaacgagaaaccccaacttttggggctttcagttcgc

SEQ ID NO: 2195 - DNA, 616 bp, Picornavirales sp.
  misc_feature 1..616: note = isolate H3_Bulk_Litter_17_scaffold_25321R
  source 1..616: mol_type = genomic DNA
tgcgtatgtaacccatgcgcatgttttcatatagatatctttaaaacaatttgtagagaccctgcatattcttctttagaatcaggtatgagaccctgagtatttgctgttaagttttatttcgacgactattccgagaaatagggactctgtagccctggtattttgttctataactgtctggtttgtaatgaccttataaacatttcagttgttcataacatttgctataatttcagtataatatttctgtatgattataattttgcaaaaccccttttgttaatcacattttattcaaagcttcttaaatgaagttgcattagcattttatgcttttgctgtcagtctgatttattgttatatttacttattaatggtggcgagaattccactcgtcttgaaaacctttattttatatagaggtctgttttgttcacgctttaggtttcctatcgagcgactatgtgatgaaaaatgtggtagaaccaagtgtttcatcttatgcatacacctcaatgataggttgttaaaatctatatcacgctcgtgtcgtgaatgttgggtactctgatttaattgcagtaactttcctaaccgagttgtcatatcaacc

SEQ ID NO: 2196 - DNA, 616 bp, Hubei odonate virus 7
  misc_feature 1..616: note = strain QTM27298 hypothetical protein 1,1
  source 1..616: mol_type = genomic DNA
atatgcatgggcttcccatgtatatcaattttatagtccgatccttattttaggtggcgagtatcctgctacatattttggcgagtacccttagcactggcgagtaccctatatctagtagacgattacccatttatttctgggttgggtgacccccttaattttaaataaccatcttatatcatattcattatttcaaatgttatattatatatgcttcctcatttattattaagtttgcttgatttaacaagtttgaactcgttatgaaacattgtctaagataactggattcggattctgggccagttatggagaaacggacgattgactgagagtaatggtgagactttttataattattcagtaacaactgtggttagtttgcggacgcccgaccgttctgtaccaattttattaagtctaaatgggcccttttgcaccttttggtccttaaggtctacagccattgcttgtagttacggacattcagacctccctgtttgatagcatctttctaatatttccagaagtatttgatttcatccccataataattttaagattgtgttttaaagtttttgaaaggttttcacaaaatctttcctctctggca

SEQ ID NO: 2197 - DNA, 618 bp, Permutotetraviridae sp.
  misc_feature 1..618: note = BGV/MQ/34/Bogor/2017 gene for ORF2, ORF11
  source 1..618: mol_type = genomic DNA
aagccctttgtgcttcgtccctttgatcctttctatcttcctcttctacgacgacaaactgctcacccaactcgctaatactttctctgctaatgccgcgttcaagtggcttgggactttcatctctgcacataagaaacaaatagctgggctcatatttcttgtcccggccacttttctgtcgtgcgatcccaaatgggcaaccgtagtatctgctgtggtttcctatctggtatcagaggtgttccccgcccctgggaagtatttcgagtacggcttccttggaggttcactcattctattgtgcaccgcaaggaagccgatccagttcgtcgtcgctacggtggttgcgctgctaaccattggtcttgggttgtggggctcggaggtatttgcctctttgccctccacctcacgccagggctagcaatcagcgacatccctctctgcgaccccagaaactgcaaagtctcctgtactaccaccggccacccgctcccttggtgtgacacaggtcccactgtctactgctactcagagggcaaggagtgcaagcaatgttgccccttagctctcccaccgtgtacgccatggccgtcgtgcttcttcacgactacc

SEQ ID NO: 2198 - DNA, 619 bp, Biomphalaria virus 3
  misc_feature 1..619: note = complete genome.1
  source 1..619: mol_type = genomic DNA
cgatgtatcggtaaatgtagtttaaccctctgtttctcgagagagacaggttggtgttctatgttctgctgcattgagaattgggctcccgttgtattgttgtacaaattgttgatatgtgttactcgtaaattttcagttaagttagcgttagaatttatgtgtctaccattataaacgtttgtatgtgatgtgttctaatttgatgtttatccctggtgttgaccgtgccaggcgatctgtaatatctgatgaagaagtggtgtagcttgacctacttgccctaaacttgggttttttattttaattttggaatacagctatttccctcctagttggattaagacagatggtgctgcttgacaatcagcatcaatcggtttggacgtttgtccagtcaagttgagtgtttagtacttgttactttgattttggaaattttagtgcctcatagctgtgagacaacactattagtccttgtcagagcgataaaggcttttcatgagacgtaagttgagcaattatgattgggtagcgctggaaatccgcgtagctcgtccttgttgaccatccatggtggtggatcagattgcttggctgacaaataaccacagatatt

SEQ ID NO: 2199 - DNA, 621 bp, Nephila clavipes virus 2
  misc_feature 1..621: note = isolate SC, complete genome.1
  source 1..621: mol_type = genomic DNA
acacattcaatttgaaactcatattcattcactactgctccttggagcagtttgtgtttaatataaaacccaatttatatgttattatatgtttgttttgttttgtctgactgtattagcactattaacgtgccagtcgaaaagaaaataaaaatagaaaaatataaatactttataaactgttatgatgtcatttgcgaatgagattgaataagtacagaaagaatgttgagattgaaaccccgtttgagtccccaaagatgcatgctatattatctcatactctttgcatttttatgaatttcaatttatattgcaaaaagaaactaacatttcaaagttattcgagattgatgttctataagaacttatatccttcgaaaatttgttagtttaatataacgtacctaaagtaatgaaatatttaataccacccctcctttgagtagcttaacctctcaaagatcccgctgtggatttgtattaaatatgtaatgaaatgtgggaattgtactttattaaataacgaatgattagagcttgcccgattgaatttaggcttgttcaaattgatcgcttgaacaaagtattagatcactttttatggatttagtatgaata

SEQ ID NO: 2200 - DNA, 621 bp, Picornavirales sp.
  misc_feature 1..621: note = isolate H4_Bulk_47_scaffold_9 RNA-dependent RNA1
  source 1..621: mol_type = genomic DNA
actagagacctttaacttattttttgcatcagtacttgtgtataaccttactaataccgtcattaaaactcaaagtagatttaatgaagctgttattggatgtatatttctactgattgaacagactttgtttgttccgtgcatggtctcaaaattaaaataaaataaaacaaaataaaacattataaaattgaaaatacaaaatattaccactttaaagatcactagaatgttttgaacatttctataccaccttatatttattatagagggctctatctacgagcacctagcgtttacagaagacgtaacttttgctttagcactttaaccttgtgaatggaatattggcggagggacctatgaggaagtacctactaacctcctttgttatcaaattttctgagtcgatttatttcgatgtttcatagttgtggcgcactcccactaaatttagatactcaaaacccaatatgtggcattcctacgttgttagagagttccgcgcaggcggctatcgcgtttatttaatagataaggtttattaatgtaagtagccattcttacatgaaatactaatcaccttctattatctaaaaccctgttgtttagctatatatt

SEQ ID NO: 2201 - DNA, 622 bp, Rhizoctonia solani beny-like virus 1
  misc_feature 1..622: note = isolate BR2 polyprotein gene,1
  source 1..622: mol_type = genomic DNA
catccagtgtagcagcctaccatgccaagtatgtaaaagtccattttttgttctctattgctgagaaatttcttaacacgggccaacagtatttgtgtatggtgggtggatctcctttcttcggatcgtaggcgtctggttgagacgccatttaaggttgtgcaaggtgggcgtgtgtcgagacattcacgtaatcatcttctcacagggggtacctaaagcccccatggtcgtagacctttaggtgaccttagaaaaggcacgcgggcgactgattcgttcaaggctgaggagtctttaagtgttcttacaaggacacgaccgggttggaaaagccctctctctacagagagaaaagttgacaaagtccttacgcgataggggcgactttcccaatagggagtcccagtcgtaggctctactgttcagcttcgcctttcccaatagggagtagcagaacacgttcgggtaataagggcccatgttggtcaccaagtgcgaatgagcaacggaaagttttcggcaatcggatgaaagcgtcttaactctgaaaaagggggccacccgtgaggggtaagtgccatgtgcgtggagtttgaacggcgatctggaacccggtaag

SEQ ID NO: 2202 - DNA, 622 bp, Beihai picorna-like virus 4
  misc_feature 1..622: note = strain BHZY60671 hypothetical protein 12
  source 1..622: mol_type = genomic DNA
atcccttttgccttggagaggcgtaaaatctaccagctccggaactattcgtagcataagtttaaaatagttgtgtatatatggatactacatattttataatttacatgtttatatattttatggaagctttgtacatatagacatcctacccttaggataccggtatttactggaggtttcgtcaaccagggaaacattgtcacacacagatacagtgggtactgttctgatgtggtgtttatattaaatattgcctacttcacttaataataataatacaaacagtcttagaactgactcaaatagttctcctgatagcgcttatagtgtctcaaaagcagctcaacaggtttcaacgcaaaatgtacattttgttgatggagacacgccatggtcttacgacatttcatcatcaccggatagcaccacccagctcgcaggatttagcgatgcagaactcggttccttcctcggtcgtcctctcaaaatcagagaatttcagtggactccggaaagcactcgattgtttgaaatttttaatccgtggactgatttttttagtaatacagatgttttagagaaaataaatagatatcgtaatcttagatgtaatcttaga

SEQ ID NO: 2203 - DNA, 623 bp, Picornavirales sp.
  misc_feature 1..623: note = isolate rfb198shi3 genomic sequence.1
  source 1..623: mol_type = genomic DNA
tggccgcaatcgctagtgctattggtgctcttgcaggagctgggattaatcccaactctattatgcaagctggtttgccttttgcccaggcagcccagcaacaaaattatcagcaacaaaatattcaatcttattttaaaggagaacaaggtttacaatcagatgtacaaaatcagtttactaaagctggcttgccttcttttatggcttataccggtggtaattcaggttctaacagtttgccgcgtcaagaattttcattaggcggcatgaataggttcgttggtggaaatgttggcgccaatatgccttccaccatgaatgctatgcaacagtattaccactggggtaacccgtttggaagttcaggtcaatttaatttccaaggagtgaatggttcaaatgtaccacgtaccaatcctataccaagcgatgcaaggcagaataatacaggttctacatttacaacaccagacaatgctaatacaagatattccacgcggggaacaccagctcaaagatcgactgctgaaggaaccactgtccctggagcttttctcaatacctagttaaaacgtcattgagagaaatacgtagttatatcttgcccagaaataactgca

SEQ ID NO: 2204 - DNA, 623 bp, Cladosporium cladosporioides
  misc_feature 1..623: note = negative-stranded RNA virus 1,isolate1R
  source 1..623: mol_type = genomic DNA
aggtttcagtaactattaaccgaccgacgggtctggggattcttaattagtgggatggtataactatcatgatccgtctaattctgaatttctcgtaaaacaaatcttatttctaagacaaatagaaaaaaactcgactgctatagatccaatcattcatcattgtcactcgatggattccaaaaggatctactcagaggaacgatttctcatatccgtgatacgtccaacagatccggaagaagaatatgtagagattgatatattcactgagaataacatggacaatccgattgaaatgacaacaggtgaactccatgacattgtaactgataaggttccatttatgcatatttagtccactgtatttgtactctccacagacagggagaaggtactgatgtctgtcactgatagaaatgtcaagatccatttcctgaatcgatttatcacaatagacaacatgaggtttgatttcaattcaatagtactggctatttctgtagacagagaagaggagagacagagggaaatgaaggagtaagaaggatgatggaatctatatctgtcattagttcttgataaactgctatgttattacttaaagaaaacccgattgcatc

SEQ ID NO: 2205 - DNA, 624 bp, Phomopsis longicolla RNA virus 1
  misc_feature 1..624: note = isolate KY RNA-dependent RNA1
  source 1..624: mol_type = genomic DNA
tgcacgggtttagcccggcccccggatctgacgcgtgcctgcggactgttgaagtaggttgtcgtccttgcaatgtgagtcgattaaagagattatagtgccaaaggaatctcgcgctctcgagcgttcggcacttgcatgttccggtgccgggctgcgggttgacatccgcggtcccgttcccccctaggggtatttaaccggtgggtatgctagtaaggtccggccttcgggttaatgaacgcatattaaaatcttagatgtattcctcgagaggaacgtaagaacccactaggagatgctccaggagtggaccgtagcgggtagtgccgacggcctgggtggtggcggttgtgaaacaccgcggaagtggatgtaggggcgttgcatgtaatgcagggttagaaacctgccccgagtagcggtgtcgctgactgtgcctcgcgcgcgagtgacctccccgtgactgtgtgttcgtgcacggcgggttcttgccctttgggggccgcgaaaggttgtgtggacatggtcgctacctttcctaccacacccaaaactccgggacaacgaagtccctgatgagtataaaagcgaattgaaaatagaccccaaaagaaacagaac

SEQ ID NO: 2206 - DNA, 624 bp, Wenling picorna-like virus 6
  misc_feature 1..624: note = strain WLJQ101512 hypothetical protein1
  source 1..624: mol_type = genomic DNA
aagaagtgagactttaaaacactttatggatcgcaattccattctttggtaaaacttagacaaattgtagcttgcagatttattagaagagtttatagttgtttggcaaatgataatctttatattgcttacaattatttcacctttcgtgccgtattgtactctagttcaaaatcatttgtggtttgctattctatttaatgttatattagttgttttttatgctatagccattgtacatgtggcaaacgttgttatacatgacgtagacgacgattaatatggttgttgttattaatgctccttttactgaagggggtgtttctagggttgggaaattttttgttttagttttcccaaaaaaatttaaatgtaggttatttgttaccgtgtaccacgagactttcagctgtcaagtgggcctatcatgttggtgctattcccaggagaataatccgacgagtcattactaaaaatgctacccattgtcaaaaatggagattcgaggagagaactgctaaggccaagttgcttcaacaagtgcgggttggtatagccaatagtgttaggaaagagaaggagaaattgcgtgatgagaaatttcagtatgagtacgagcctcag

SEQ ID NO: 2207 - DNA, 624 bp, Hubei tombus-like virus 10
  misc_feature 1..624: note = strain WHCC112361 hypothetical protein 11
  source 1..624: mol_type = genomic DNA
ttagcggaccgcattttgtctgcgcaaagtgacctagggtttgaagaatatatagaccgggctgactatatcaacgccgaaatgcttgcggatgcactaggcattgatgccccggattactcgggagaagaagagttaaaggagaagttgcggaagatagaccagaaagtcaaggaaaaggtctgtggtacaaaggagctgcccaggaaagggaaggttcataagcgcaaccgtgcgccgttcatccgttcaatggtaactgaattacggatggaattcccgttcaatgtcactgaagataatgcagctaatcgcctgtccatgcataggcgcgctgttcaattgatgaagaatcagggactgtgctctgcccacattgttcgcgatgtagacttgattgttgagatgatgttcgtaccactgcagagtaacattgaagcacgtgaatgtgctaatacatgggctgtgagaaacgacatcgacaagtataacgccaggatgctctccgcctggtatgagtggttactccccaactggctgttgaatagacagcgggggagtgcccatcgcgccgcttagggaggcccagtgaccgtactcggaagggaagagactggcattaaa

SEQ ID NO: 2208 - DNA, 625 bp, Picornavirales Q_sR_OV_020
  misc_feature 1..625: note = putative non-structural protein1
  source 1..625: mol_type = genomic DNA
gagagatattctctcacgtgcgggtaaacgatatgctagtcgttttaactggattttattcagtttatgattttaactacgtacatgctagcccatggcgtgtgcttttgaagtgataggaacttcaataatgcaacttggaaagttgtatcaatggaaggattttcccaagactgtgtcttggaaccaccctattttgggttggggcttgcgcggcccctttactcttagtggtaagtccttcgaccacctcaacgaagtaggcagtagtaggcgcggctctctgagcctcgtactttatgcttcagcaatgaagcacagttttaaactggtgcgtacctacgtctcacaagagaacttgtgatttgactgagtacttgtcctatagtatggaacattttggaattgatgaaccgatttggaaccgctatagggaacggatttgattcccttggattgctttgcttgaaattgtttctgagtgttgtataacgtttctatgctgtccgtcttgcaggacattaaggtatagaatttatcggttacccgggccggagtttaagtagatttaatgaggttggcaccttatcattatttcttgcaacatttcaggctaagatgatgg

SEQ ID NO: 2209 - DNA, 626 bp, Schizochytrium single-stranded RNA virus
  misc_feature 1..626: note = complete genome.1
  source 1..626: mol_type = genomic DNA
agtaaaaaggtgtgcggggtaatcccccgcacgcctttgtttgtagaatgcacttatacagattccgctcttgccgttaattataccgctcttgccgcaatctgtcaccagatccgccatttccgctataaacgccatttacgcaatctaaacttgttttctctttcactaggttatgctcacctaattactcaaatttgctacaccacccacagcacttgattagtcaccacttgctgcttgtattatatagactcttttgtacacatttaatgtaccatatttatttaccaattatagaagaaaaataaaaatcaaataaccagaaaataaaaatatttatagacccacaatgtctttaaaattggactcaactctatttctttgccgatttagacttgtttgaacctttattccgaactcctcttgtatatacgaggctagtaaggtaaagtgatatgccctggacgcatgtatcgtcctgtttgtgagtaaagtataactctctccctaaaagtttttacgtttgtcagggataagaccgctagtgatgtatgccacggacacagaagtcctatatgcatttaattccactagttcataacgtacccccccatcttaacacc

SEQ ID NO: 2210 - DNA, 627 bp, Aedes aegypti anphevirus
  misc_feature 1..627: note = strain 1a, complete genome.1
  source 1..627: mol_type = genomic DNA
gcctgcccacagaagatggtctacttccatatcagaagatgcagaggagaggtcatcgacaccaaccacccccgcggtgtgtatccatactttcatactgatctaccagcgaaatttcataataaaaaacccgctagttacaaatcatgtctgtcattgctgcattgtgggcatctgggagcgtgaccttctacaggttcttagaccacttgatcaagagccttaacgggggtataatgttcgacccccagccggacggatctctcttcggcccacccagaattcacttgatgagtgtgtcgtcagagggacttgccattctggggacaatcgcattggctgcatgtgttgggtttcttatagataactggcatgagtatgtgactaggcagaggtttcgcgaaagggtaagaagccgattgtctcgggtggattactatacccccaatgagtgagtcatagctcgccccaaaatcctcagtgctcaaattgtgacccactggatatgtatgacacacgatagtgttacatgtgaatgcgctttattttctagctgtgatatttttatgtttttattagtaaaaaacccgccagttacaaatcaataagaggagtaacacaggaacg

SEQ ID NO: 2211 - DNA, 627 bp, Frankliniella occidentalis
  misc_feature 1..627: note = associated mononegavirales virus 31R
  source 1..627: mol_type = genomic DNA
gcgacgcaaagtgtaccttggtgcatagtatagccatttggcgacgggatttcccggaaaatcgaggcatttgcctctggccatttggccctaagtgtttagtgtgtgtaggaaagtttgtcgcttatttccgagcacatgtatgagttgtatataataggtctcgtaactggggcggcccttgttggactagcgtggtttataacgacgcgcgtgcagcattggctcattgtgcgaggactaccggcccacgtcggggatcttgagttacctagcgaatccggcatcggatattcgctgagttctttcgatctcgactcggttgatgattaggttgtaagccttttggcgtcttagttttcggcctttcggcgtttagttgtaagtctgacccgtttgggcctttagttataagttgcctcttttggcttattgtaagtttccctttcgggttagttttaagccttttcaggtcttaggttctaggtccattggattttctattgtagctttttagcttttgttttgtgcccccttttggggccgacccacgtttggcgtggcttatctttatgtttgcttaattgtaggttgcgccgacttaagtcggcgcgttgtagatttaag

SEQ ID NO: 2212 - DNA, 628 bp, Beihai weivirus-like virus 12
  misc_feature 1..628: note = strain BWBFG40815 RNA-dependent RNA1
  source 1..628: mol_type = genomic DNA
tctccttctcgtgcatgtcaccttggcactggaattcattttgggggcgtcggcattttgccggcgagtagggagcgccactcacgccggtattcgccgggggggacgtgaggctgcgatagtcggcagcgcattttgctggtgtaaaatagggaggccagtccctgctccccgaattaccttcctgtcgtacgttcccgcgtgcggctatgagccaatttgcggcgtggttcctcccacgtgaaggtgaaggccaggggtgcggtagccgccggtatgcatgtatgtagcgatgattcgatcgtcgcgggtagtgccacccctcccgactgctcctatctggattaaaggttgaagttgtgcgatgatgcccaaactcgcacgatggaacctagggcagcgggcatggctacggttcggagcgcgtgtacggtccggggtcagccgtccctcggaaccccatcgcgtttcaggttagacggttagggtgggatttttcccagggcttttgtattagttattgcgcgcttggtgtttttccgagaatgacactcacatcaagttgtcccccttgcgcactgtttttggagcgaactgttttgcagttattagtggattttcgcccact

SEQ ID NO: 2213 - DNA, 629 bp, Ryegrass mottle virus
  misc_feature 1..629: note = strain GUNCC_DN53883-16 hypothetical protein,1
  source 1..629: mol_type = genomic DNA
attaaattaactctattgaacccgttatccggtgatataggatatctgtgaactaacatcacaataatcagttagcccctcgatttatgccttcagtggttatcgaggtctgctcatacgacgaggagacaggagattgtgaacttgagagtgcggcgaagatattcaccagtaacttcgacgggacttacgtcctatacactcacagttccgggccgaaatacgccggatcaactgtcacactcgtctgccctcactgcggggtgagtgaacaagcgacgttcccgaccagaggcctttcaggcaactggggtcaccacgggccgcacgacttacgacttgattgtaaggcgcggcactggcacggagcgtgcgaggtcattcccctctctgagcaagagtcgcgtgtagcgtctgacggggttttcgaaccaggtctaacgcacatcactacgacccgagggcagtcttggactagacatctttagtccctcccagttctcgctgggagtcccgcagcctggctacgggaaatatcggtggggttgatcaaacctacacctcttcgagaaaagcgctcttcgagtactccctcggcagactattctgttgcgtctcccatagtgaag

SEQ ID NO: 2214 - DNA, 629 bp, Beihai picorna-like virus 1
  misc_feature 1..629: note = strain BHZC36988 hypothetical protein 11
  source 1..629: mol_type = genomic DNA
ctccacacgggtttttgcccgtgtggagatcatcaagcttttatcagtagtaatttgcagttactcgagtcctctgtttggactctatttaggaatgttaatttaaactcaattcagtcgtcgatgtctctattgggtttattccctttagagttatacaattgtcttgagttttaaaaattgcatcactatttagagtctcgcattttgcgcatgactcggataattttactttattaccgattttagtttgtgatctgacccagttttctatctattcagtgtttttgctaaccatgcaataatatgtcgcactgtctacgccataaagcaagactatttataggtgcaaatttaactttgagaattctaggctttgaacttcttattagttgtccgataatttgttatcgccccggaccgggcgatttccttctcatttatgagagaaacttttcaatgtgctgagtactgatcacgtggaagcacactaatatgtccacatgaactatagtcataatcaatgaccctaaaagtccttgtccggaaaacacgcacaaggcattatccgcaggttttgtcgcgaatccaaaataggccggattgtagacctatcgaatcgcgataac

SEQ ID NO: 2215 - DNA, 630 bp, Isahaya Culex iflavirus
  misc_feature 1..630: note = 17CxNGK-Cps gene for RNA-dependent RNA1
  source 1..630: mol_type = genomic DNA
ataggtcctaacagtgtagatctgcttatttcaagtttttctagttttctgttggatagaatagtaatatattattttaatccatttagttcacggggctatacctaccccctattagtaacaaaatcatttaaaatactcggtacagaccggggtccaatttaatattcttaattatgcaattcgaccttatgataagttcaagaagcttctcttggttcctaataatccccctaggaatttccccttatcttttttgtataattttgattaactttggatgtataaaaattattattaaggcaaggcagatagtataattctgaaatgttacatgatttagattgccatttgaagcccctagataaatagttctgggtatgagttcgaggaaacaacaacgatgccgattttggaactacaatttactttatgtttcaaagtagggttttactagtctgtgacagcttttgcttaatacacgttagcctatgtgctaaaacttcgatgacatgtttatccatggacttcggacatatatctttaagatatgcgtgtactctgaaacgtcagatggtagtagcatgacgaagatagcaacctaccaattttcctttattttctttcact

SEQ ID NO: 2216 - DNA, 631 bp, Wenzhou picorna-like virus 52
  misc_feature 1..631: note = strain beimix75583 hypothetical2
  source 1..631: mol_type = genomic DNA
tgtctcatccccgaccaccatgtcgttaaactggtcgcggcgcgcgtgagtgtcgtagccccacggggaagccaaaatcacactcatcgtagtggttacatacgaatacatgtttttgcttgtttatcatgattcggaatgcttgcgatgagaatggggagtattgaaactcgagtgctatttagttaccgcagagtcccactgcaattaaaatacgcgataggagtgttctaggaggcaagagcattaccggtataaattaaatcgtctcactaaattttctaatgaaatagagtctgctgaagactttaaaatcagcgggtatgtaccacaagctggcgagcctggtactactatagcccaaggcaatgggcaaaagttggaggccattacaggcttctccgaccagttggctggttggacgacttctatcacgggaggtcgtgacgctacgtataatttagctaacaataatgattccgacttgggagatttcctcggtcgaccagtcaaggtgttagagacacaatggtcgataggacaacctctttttgagcgttttaatccttggtatttgttcttgcacaataccagagtgaaagagaagacttccaactttgaattattgagg

SEQ ID NO: 2217 - DNA, 632 bp, Culex Bunya-like virus
  misc_feature 1..632: note = strain CBunVL/Fresno, complete genome.1
  source 1..632: mol_type = genomic DNA
agtagctgtttattgagtaagagtttgtagaggatggatgattaagagtgtgagtgagaggtgtagttgtgcgggtggtaaggttgagagtggtggtgtagaggaaaggtggaggtggagaccaaagtgatggggtatattcactgtgtacactttgctcaggttctgaaaacgtaaacctggataagaagagaaagaagtactgcatttgtgacaaggccttcttagaggagcacacctgcaattgctcagctggagtagtcaaggaggagttcctgagacccacctttaagcattggcatttgagtgagcctctaaataagtacagactatcttgcataaacgaggagctattgaagaagagctcatccaaagggccagtggttgaccctgactacagagtatcctctttgtcttttagactaggttggccactatcaccattcagtaagagctcacttccagtgcctcgttctggttctctcacaacaccagagaaacccaaggctgttaaaggcgccataaaggctgagccgaaatctgagccaaatccatctactagcagacccagtagagtagctcctcacacacaatcagaagggactgctaggaaggagctgtttaaatcagac

SEQ ID NO: 2218 - DNA, 632 bp, Haldis virus
  misc_feature 1..632: note = isolate AbWando19, complete genome.1
  source 1..632: mol_type = genomic DNA
ttccgatctcgattttatatcgcatacactcaacaattacccctttatttggattatcttctgccttgctttcgagcaggtgcattagacttattccttataattcttccacaaaatttttcttacctccttttggagggatctttttgcgcgaattatatattggcaatgtataatttttaattgactaatcgtcttacccctttttgtttgcataaacttgctgtatctgttgtactgcaagctattgcatatgatggatttttgtgctgtatactgtaagctattgcacttatggttccagcgagtggtttgtataacatttccttaaccacgcgtaagccaacaaaataattagtcctattttgttaactttttatcaattgactattgatattttgatgagttggcactcattattattatcttttgccaaacccctcaatatttaccctagaacgtcatcttaggaggagtttttattttctaacggttctttttagacgcttgattataattataaccttcggtacagttcttagagtttttagtatgttttgtccaacaaaacatgcagcctgtattaggtttacaaatactagggaaacgccccgaaagagcgatttgtggta

SEQ ID NO: 2219 - DNA, 632 bp, Beihai picorna-like virus 78
  misc_feature 1..632: note = strain BHBei73249 hypothetical protein1
  source 1..632: mol_type = genomic DNA
gcgaaatcgtctatggttaccaattatccttaaattggcgcaggcggcgttatcgtctttagtggaaactactatagtgtcaccaattgcttgtttacattcgacgtactatttgagagtgtgagtttcctttggtcgtagggtacttttgtaccgaaagcagatgtgttttcctgctgtttaaggtttttatgatgagtcctccgagaggggttttgtcggcacccagtcgacatcctttattctggatgacaccatacacggtacaggaaagtgcttgcaccagtaggttgttccaagagcgtggatcacggatactgagtttattttaaaacctagtgtgaagcgtggcggaagacccttcctactgtaggcgcatgtcgtggctagaacccgcaattgcgcttagcaacaagatagtgatgcccttgagtgatggcaacgttgttagtgtgttatgttatgacgaccgctttctttggcattttgccaacgggacggcccagcagagacacgattagttgtggcatcctatgtagtttggatgatctatcttgttgtgaataacccggtgattgcacaccacctgggtttgatttcccgactggccggtgtgtttgtcgttcggttta

SEQ ID NO: 2220 - DNA, 635 bp, Thrips tabaci associated narna-like virus 1
  misc_feature 1..635: note = isolate ThassRNAV161
  source 1..635: mol_type = genomic DNA
aggaacccctacggggtcacataagagggctactgtgcacccagctaggcttaaagcccgctgtcgcagacgtcttcctatcaaggaagaagtctgagatcgaacgaatagaacaggagatccatggagtcttcgactccttactcttgttcgactggaaatcgtttaacgatgaacataactacaagatctatagatctgtggttgtgtctatcatcaagttaggttgtaccaaccttgacttggtgacaacgtattggaagcagtttacaaactggctcttcatacgtgtgtcccggtctattactcttgaagagcctagccgggataaacaaaacttcttcttcactttaagtgatattcgaagaattcgatcctatctggatagggattatcccatttccaaacgaggatggtcacggatagcccacctgatctctacgagacagctggtggccgggtccgtacggatagagcgacaatctgtcgatcgattccgagaggtgactacgtcaccctttattgccgaccccgatttccttaaggagatcggggacgtcgcttacgtcatcgggagacgcctcaggcgttctcacggcgactttccttcggatgccggacacatatctttaagt

SEQ ID NO: 2221 - DNA, 635 bp, Verticillium dahliae chrysovirus 1
  misc_feature 1..635: note = segment 3, complete sequence.1
  source 1..635: mol_type = genomic DNA
tgataaaaatttaaaaatctctcagcctctaatacgacactgacatggacgagttgagagagcgggccaatctgatatgctcatgggagcatgtcatactcgatagagcgataggatatatcgtattgccaccgggccatgggaagagccacttacataacaggataccaggcctagtagaggcagacatggtattcgattgtagaggagacgatgagctgaaacgactgcgcggcaaagcgcgggagaccggggagtggtctacttacgatgaagaatggagtaatagactgtcggttcgtctaactaatcatcgttgggttgtaatggtaccatctcgcgagatagggaacaggataggcggtgtgtgtttgggggtggcccaactccacgacaagcagtggtcagctaacgtctcaagtcgtgggaagacgtctcgtgactatgaatacagcaggcaggttggtgtagatgtattgaggttcaagtgcaataaagacttagcagaatggttactcacagtggctaacatatggttagatgtgtgagcggcctgaggagtaccccccagggggacgaaacgctggtcgtagccgcgggcgcaagctaaccaacacatactaataagagacaac

SEQ ID NO: 2222 - DNA, 635 bp, Changjiang picorna-like virus 7
  misc_feature 1..635: note = strain CJLX30780 hypothetical1
  source 1..635: mol_type = genomic DNA
ccgagtgaggacggtgttcccacaaaattataaaaaccccaatgttagagaccagattctttacgcgacgtactattttagcgtcagattctttattatttctatttttagggttttatattggcccgattgtagtatgactacaattaaacagtatacgtcaaatataagtcgaaagacaacgaatgctttcattatcattattcaactataagatttacaaaacacacgttgttatgggcgtaacttacgaaggctatttagctgaggtgatccccggattagtagatgttttgtgatgatatattgttgccaccattccagagttttcattaattggtaggagacaagatttaagcaggttgtgacaaccacgaaaggatgaacctatgatatcataatgtttgattagtgggttgcaatgaagaatgcgtaatccaagtcatgtattcgtgtctgttacctccccctgttaaagatgtgacccgtggtcacatttccacttatgtggcgccgtaagctatattggcgtgtagctgaggtgacttgtttagtccccacgtatgattactcagagagtgtgagataaaacttgtttaaaagacaaaatctaaaaatatttctgtataatcaaa

SEQ ID NO: 2223 - DNA, 636 bp, Bundaberg bee virus 1
  misc_feature 1..636: note = isolate QLD-6 nonstructural polyprotein and2
  source 1..636: mol_type = genomic DNA
catgcttaattgctatataatagattgaacattctataacaaaaagtttcattggagttcaccagtgtcgaaaaaccgtaatgcagattcacgttaggagtcagccgtccgtggtccgagacgttaaatccgacaacgaaagcgatgtagtaaatacaaactaggaaatgtaatggctgaataacagtattgacaggcgttataaacaccttatggaaattatgtatttaatgcgtagccgtaggcagcttggatgtgatcggagtgaatgtgcgagtatgtgtgtgttttaacacattcgcttacgctatccaagtaatgaccgtagctatttagctttactgctcaggaccggtcggtggcagccccactaaagtccagaacattaaaataaatcaacaaattcttcaatacaccaatgatggtccaagtcagaattcttcaaccttttataataattccgaatttgatcagcaattcttgctttccgctacagacgggaggcaacatacaataattgattttttggaacgacctttccctctgacaaactttgaatggaatgtttcgagttctcagttttctacgctgtattctgcagaatttcctgatgccgttttagctcagccattgtat

SEQ ID NO: 2224 - DNA, 637 bp, Forsythia suspensa tombusvirus
  misc_feature 1..637: note = strain pt110-tom-8 genomic sequence.1
  source 1..637: mol_type = genomic DNA
gttctggggcgtcgtcgagagccttaagccgtggctgtgttgtgcccgtcaggatagtagtgaagttgtggagaacatccgttccgtcagagcccgcccgggtgaattggcggtggtataccttgactacacgcacgaccctaagcaccatcacgtcaccaaggggttcgaaagtcttgttgtggtggataatgaacaagatggcgcgacaggacgttacccgcccgctcctccgccgcctgctcctgctcctcaacgtgtacaagtatgtccagctcaaagttacttggcgcaactcaagggccgctacggggactataaggacgcgctactacgtagcaagtctaaggtccctcgaagagaccctgtcgcggttgcccgcaagaagaagctagacgtgctagtcagcaggaatgtgtgcctcgcagaggcagtgaaatccaagcagcaccactgtgagagtgctgatgttctcagagagatcgcgagtctcaatgtgggcaataggagcgcgcccaaggtctgggatgcagttgagaccttggtggccacgacggtggccgattgcgctctgggggtcgcttgggaccctccggtaccgacagtgacgagcccttctgggccgccactaaggtcc

SEQ ID NO: 2225 - DNA, 637 bp, Brejeira virus
  misc_feature 1..637: note = strain AR800224 hypothetical protein 1, hypothetical1
  source 1..637: mol_type = genomic DNA
aaaagggggaaaaaaacctaaaatttttgggggtttttttaaaaaacccaatttgttaagcttcaaatgaactgaaaaccggtattacgaccaaagtagtgcacgttggccaattttagaatacagtattttacagtatccaagattatgcttctccctaaagagaagcggacaagactttacggtagtatagtcttgtccgcttctctttagggagaagcataatcttggatactgtaaaatactgtattctaaattggccaacgtgcactactttggtcgtaataccggtttcagttcatctgaagctatactaattgggttgttaaaagcatcccgtaatacttacgagtttcatcgctcgtttaatatttctactctttctgagcagaataccacccctacaactcttaattggagttagtaaacttttcacaccttatcgtgtgaatacattgttttccagttagctgtgaaaactgtctttctgcttcctgttattcaggaagctcttctttgagactagctgtctctcttctattctctcgtaatcgagagaatcctgtctttggtcctcgcaagagaaccactactgtcttgaaggtttcttttgaagccgtcttatcttgatcttcaa

SEQ ID NO: 2226 - DNA, 638 bp, Beihai tombus-like virus 18
  misc_feature 1..638: note = strain BHZY60611 hypothetical protein 11
  source 1..638: mol_type = genomic DNA
cgcacgttttccttgtcattggtaaccaaatggcaagcttggattcgtccttgagcgagttaggttgaatatgcaactgacatgaaccatttcggtgggtgccgtaacgcaaggtgagtggctgaaaagaccacaccggtgttacttaccattgaatgttgggcatttgtagcgagagatgatagatgtgggaagcaggggccctgcttgcagaacaagtggatgcgaactgaactctagcgacagtaagggagtatctgcttgcaatgtgagtgtgcgaaacttgtgaaacacattgcgtaatcaagctggacttgggagtccggtagctttgttgctgccggagaggcgtggggaggccaccaccaagtaaccaacgatgtagcacttgcccggcatgcgccttctctgtccgagtgtaaagacaatacccttctgcggtaccttaacactggagtgatttatgtcatttgctgataatgcttgcaaatcgccttggggtaatgtccgctcttaggctggtgtacatcggtgtaaaccgcagtaggtccctcccgatgcaccagttgttgagcgaactgcgcctgggggtgtttttcaaattagggatgtgcttatgctgccctccttcatgaaat

SEQ ID NO: 2227 - DNA, 639 bp, Wenzhou tombus-like virus 2
  misc_feature 1..639: note = strain WZFSL84050 hypothetical protein1
  source 1..639: mol_type = genomic DNA
tcgacgtatcattttcccagacccgagcgcatgatgttcctctacgctgtgcttgttacctgtttcttggtgtgcatatggagactctgtgtgggcagaggtgccacagtgaatgctaacgcactggagcggtttgatcgtgccaccctcggcgatgagtcgagcgtcgatggtggtcacatgaccagccgccctgggtttgctgcagcaatggcgtgcaaggagaagctaggggagctgcgctacaataacgccaacaggatggtggtcggcgattttgtgcgcaactacctcagagagaactaccccgacatgaggaatgtcgatagggtgaggcacgctgccattggtgtggagttggcattggtgccgacagtcttcgcggtcgatgcagctggcttcgccagtgatgcggctgtgcggggccgtcgcgcaatggcaagtggacccaagtaggggtgccctgtcacatttcctgctcgggatacagctgttgaggttgaagctgtacctgatctcagggagcgggaagagtgtgataggggaggtcgggccaacggccctgatcgaacggtgcgctacctggctggctttgggactggagtcaactacggcgtgcatcgtaactcggctatcaac

SEQ ID NO: 2228 - DNA, 640 bp, Guadeloupe Culex tymo-like virus
  misc_feature 1..640: note = strain 2016-Ab-CQM, complete1
  source 1..640: mol_type = genomic DNA
aggggctgaggcactcaagcactctccacacccaggagggggccgagtcgacgtcatcatcagctgaatcctgcgtggcgggagtgacgttcgatggctgctgtcggggagccgggagcaaatcaggaacgggggcggttggttgctgaaggaaaggaagcaagaagaagggttccagttcgtcgactttcatgacctgcgttctccattcaagatagaagcgcttcgggtgaaggtagttgtagtactgggctacttggcagttttgagtgtagcttcgagtggcgtaccagatggctgcggcgacgccagatccgacgcagaggagggcagcgtagttcttccaatgactacgaggagcaagctgcgggaaatggttcagcacccgagttgggatttgccgcttcatccagtcgataggttcaaatttggactcgcttcggatcacgctcgagctctggccggtaatccatcggggaagcccacgccaatacgcggtgaaggggttgattgagtcgttaatgaagttgtgcgagcgtatacgggctgacgctatcgtgactgccttgtgaattgccacatacgttactcacgttcaccgttatcgtacaaaccgtcatacgctccaaattttgccaac

SEQ ID NO: 2229 - DNA, 640 bp, Apple luteovirus 1
  misc_feature 1..640: note = isolate PA8, complete genome.3
  source 1..640: mol_type = genomic DNA
aaactcgagacccagatggcaatatcctctccctacaccctggcggtttgaatgccatgggccgtgacctacagcagttcgaaagggatgctgtttataagatgtgggtcgagggacaagcagaggatatacggcgaaaacagattgagactgatgccgcctcagcacgttctatttctgagaacgactaccgccagataaaccaggaaatacgagctgccgagctgcctaaccaaccgaactttgtataccgggacgaccctattgtgaagcaaaacagcacgtctgatttcattgctgcacgtagggctgatttcgatgaacaaagtgtatcggatttgaagtctaatgcatcaactcggacaatcactgggaatcttggtggtggcaaactgaagaagaaggcgaacgaccttgatgatgttgaggacaagatcttgaaggcattaccagaaattgattataaaccttcagaaatcctcggcgtcaaggcacggtatcatggaggatgtggcaagtggagagatacctttgattcttccatgaattgccgttgttggatgccaaccctcgagtggcaacaagttgattttcaatacaaggggaaagcatccaagaatgagggaaagtctattatttc

SEQ ID NO: 2230 - DNA, 641 bp, Agaricus bisporus virus 14
  misc_feature 1..641: note = isolate AbV14-003, partial sequence.1
  source 1..641: mol_type = genomic DNA
attatttatcggttattcgtcgtcttggaccctaccagggcacggtgatcgactttggctcgatatagaatgcgcgggcttgatgcctactagtccaaaagactaggaagagcgacattttcttctgtacgatatttctatcgtctgtcttgattgacgcaagacactacgtgtattattagtttcttattctcttcagatttctcgttccctcacgggtaagactgaattacagggcgcgaccctggagaatcaattatccttccggagcttccgcccccactgctcctctcccctcctatttgtccgtttaatcgaaatggtccgcgtctacgtcagccagcgagcgttataaatgcaggccgcccccccatcactcttacacacaaagacaattacatcatatgctaaactccattgactagagctctggatgtgactcgcacttgcctcgtgattaaagatcgaaatagcaaccggtgaaatagtctagtacttaatgactcgtccgagaagggcgacgagagcctactagctatgggttatcctatattccgtgagtttcgacggcctgaccctaggctttgcagtatctgttgcgagctaccctcattctttggtaactcaagcaatcaaatcgc

SEQ ID NO: 2231 - DNA, 641 bp, Beihai picorna-like virus 56
  misc_feature 1..641: note = strain BWBFG40791 hypothetical protein1
  source 1..641: mol_type = genomic DNA
cctggcgaggtgatttttcttccttcattgttgcgcgtaaactctgcgcgtattcgatgaagggtcttttttgtgtagctttaagttttcccgctcaatcgggttgattatatgcatgttcctttggaggtcctgtaatatagactgcggattgtggctgagccgtcatttagatcgttccctactttctttatgccttgctggtagaagccagtattgaaaatattacggcgcttattgtattaatttaacctagcgaattgctttgttacacactagctggcatgcatgcctaaatgcaaactcttaatgttcgtgcgtaaccatagcgcacctgcccatgctcagatagtgtggtagctcctggctagatccaggaacagttgtagtatagaacctgctggcacacagattgtgccaaccaagtcaacaggtaggcatacctaaatgcaaacccgtgtagaaactttttggcataaagattgtgccaaccaagtaaacaggcctggctgacccaggactatgcgttaaaggtgttttcggttccgtggtcctgagtggcctacacgacgggcgcatagtagtcccctagggacgtgggtgcacactatggtgtgcatcaagacaataagccgaacccc

SEQ ID NO: 2232 - DNA, 642 bp, Circulifer tenellus virus 1
  misc_feature 1..642: note = complete genome.1
  source 1..642: mol_type = genomic DNA
gtcatccaccgaccggtgggtgtttggcttgcggggaaactcactgctatgcaggaatggaccaaccaaacacacaagacaaacacccactggcaccccgttggtgctcagtcggtgtatggccatcccccaactccatgcaaaattaagggcttgggggatgctaattagtatagcacacaacgcaagatgtcttgccacatgcgtcccacccgggggaggagttccactgcctacccctcagggtttatgaggacgtgcccaaaattcggatgcttggtacatcagccagatgtattgggcatgccggtgctaagtccaagccacgggcgaatgcgacctggaagcttggtaaatgccgagagactgcaacgggctagggggtgccatttggcactgcgttgagcaacctgaatgtggtgaggtacagtccaacagctaagcgagctgagatgatcacatctattgcgtttgcttctaggtgtgctcctgcgttttcatccctattaagggctgtgttctcctccgtcttcaaactgttccgcattcacttgattcagattttagtgatagcgctttatttgactcatttgtgtgcgtttcaatctgttttcaagacggaccgatcgcgtgaatctgggc

SEQ ID NO: 2233 - DNA, 642 bp, Hubei picorna-like virus 69
  misc_feature 1..642: note = strain WGML147773 hypothetical protein1
  source 1..642: mol_type = genomic DNA
gttttacctcactaaattaatagtttcaaacacgcaatacccaatctactagttatggcagcagcagcagcagctcttttaggtggctcctccattggagcagcctcacaattaggatctacagcaattagtgccaatgcacagcgtgaaatttctgctaatcaaattgaacaacaaaaatgggaaatgatgagaagagaaggagcatttacatcgcaagggctcccctctttcttagcttaccaaggtggcaatgcatatgtacctagaaccgttagccatttaggaggtacgaattatggtatatcggggttcaatggaaacaatctgccgtattcaccttcactcaccaggcagatgtatggcttttacaacgatcctttgcgatcaaggaccgaggcacctgccggtcccgttggtgatccgcagtttcctggacaaaccgacagaatgggattaggagctggaaggtatagtgcagttccaccaccaactcacatcggaactcaaacagaacgaacccatttccctagtagaacgtttgtaaacagtaaccgactttaatagatacctgactcattgagcttcatctatcgcaatacccaagtgattgcgaaatttggaattcgtgaatcattcaaa

SEQ ID NO: 2234 - DNA, 644 bp, Citrus leprosis virus C2
  misc_feature 1..644: note = isolate L147V1 segment RNA2, complete1
  source 1..644: mol_type = genomic DNA
tttcatacatgagattggtatttgctcatatggattttgaattttatctttggttttatggatatgacgactcttaatcttcatcggcagttacagctgcgcctcggcccggactgtatttggtggtacctggaatgcccacacctttgaagacagaatactctatttcatatgtcgcaatgatatttattcatattttgtgtatcgctcagccgattttggtttgagcatttacacacacttagtttgagattatctgtacgtttatcacaatgttgattgacgttttagattctctcacgtatagtacgtgggctataatcggttaaaattttaaccgtattatttcctaacatattcgagatgacttgatctcccgtccttctcagtattgctataccgtttaacggtgttgagataaactggcgtcggtcgattctcagttttaccatcttgtttggtaactcttgtatatatgtaaataggtaagggttcttgcgtgccaagagtcttctgtattaatgtagtggactgctgcttcgatagagttgcagcagtacttgcattgatatgtaaatacacagagatacatatcaatgatccactccttattatggagacaaatcaaggtatgagttcacaca

SEQ ID NO: 2235 - DNA, 644 bp, Raspberry mottle virus
  misc_feature 1..644: note = isolate HCRL Glen Clova, complete genome.2
  source 1..644: mol_type = genomic DNA
gtcgttttcttaagtggggtagttacgtcttaactagtagtttccagcccaacacgcccgttcctctcggtgctttgttgtcgcctccatgcatcagcgagaccctatcgtcacttcgtcgatgttagtttcttgtcctcgatgctctagcttctacgcaaaatttttcgctctccgttagtttcagcgatcgatcgtctcattcttcatctctctccccttttgtttctgacggtctcttctttcaagcttccgagctcggtggttctttagttaccctttcgttgtcaaggtctctctctggtctgctcctttctcttcgcgcgtcgtccccctcagcctcaggtatacgcactcgcctcctagattctattgttgtgtcgagtttgtcccctgctatacacttttcgttgaagttacctaactcccgcggtgagtcactgtcgtctactgtgactttgggcgctcgggtactctttcttccgaagggtgtttataactccttcgcgatcggcacgtccttttcggtcgtttcttcgttgtcgcgtgtttttcaaaaacgaccagagtcgcgtttcgcttaccgtttctcctcccctgacgtgtctctgtcagaccagtttaggttttgtctaccgctaatc

SEQ ID NO: 2236 - DNA, 644 bp, Hubei picorna-like virus 45
  misc_feature 1..644: note = strain spider133521 hypothetical1
  source 1..644: mol_type = genomic DNA
ggtagaaacccggttcccttttggtggttgtgacatgccaccagctcaagtgaaagaactccgagatctggtatatttccatttatgcgaatatttggttatgtacggattgattcttttgcacttgagttcaaacgtccatttgttcttccaaaaacaaatgtttatgttttagtgtcgtcttgtatgtatgtgtgtatgtttgagagtatgaatgttatgagttgaaaaagttacaaacacaagtcgtgttgttgttgttgaagttgttgttgttgttgaagattgttgactttgtgtatacaactttttgctcactgtatgtatttttgaactgactgtacggacgtcgatgttatgattaattctaagcgtacctaaagtagtgaactttaagatatatcttaatagctgatgagatgcctatgaaatcttggtaggatgattaagttcgatctatcgagttagtaagtggcggtcagtgatttagcgtagctctgtatcttattgtaagcgaaatgtgggaaagcatgctttgcatacttagttttatgattaacggagacagactttggacctgacctccagcccttgcgcagccgctggttgtattttgcgcacccccctgactaattgctttcaaa

SEQ ID NO: 2237 - DNA, 644 bp, Beihai weivirus-like virus 13
  misc_feature 1..644: note = strain BHZY60103 RNA-dependent RNA1
  source 1..644: mol_type = genomic DNA
ccgaccattgcggtcgggtgtacagggggtgcgcggcgttcgggggcttcggctaccttccgcgcgtgttttagggggcacatggttgggacgaccatgtgagtagtgtgcggtgctcacgcgaacccaggcgttctggccgtgaggtggtcctacgtgaccacgcagttttggggcttgtgtagcttgttcatttgccattttggcgctgtcgggacggttcacgtcccgactgactcccgtagggtcactaaagccccgtgccactgtaaaatagggaggccggtccctgcacaccgaattaccttcctcatcccacttcccaggtggggtgtacgagccaattagcgggtgcgtgccagcgcactgaaggtgaaggccaggcggatgctgttacccgcagctatgcaccgctcacctgccgtcctatccggatgaaggcgacctccagcatgattgcccagtagtgctgttggaacccgaggcggcagtgtggatgactacggccctcagatccccggtttggccgctggggtgcggcgtgaatcaagtaacggtgggtgtgccgtcttgtagcgtcctgaggtgggtacacaccaatgggtgggtcgtgactggggtccgacctagggcaatttctgcgc

SEQ ID NO: 2238 - DNA, 645 bp, Darwin bee virus 6
  misc_feature 1..645: note = isolate NT-8 nonstructural polyprotein and1
  source 1..645: mol_type = genomic DNA
cctagggatacagagattttggacaattatttatattacagcttatatttggactaacagctggttttgttacttggtaatacatttaacatctaaatccaactgttaggaccagatagagtgaggctttatacacgccatttgtgcagggcctcatgggactgtacaatctaagagaatgtataaatgccttagtcgtatttatgattgttcatcaaaaacttttgataaattttatatctattttaaaatttatttaatgcatttaaatatgaactaggagtaaagttctatagtgaatagcttatctggggtagcaacccgtataactatagaagtaatatgcctggttcctctatttctgactgtgtaggaatttttatggagaacgtccaactaacagtggcgcttatcctaagtttcgttagtaaacttgcctaaagcttttcgatcggtaagactcgcctagttgcgacgacagatcacaatgttttaaatttaagggagatagtcctcttatctagtgattcagtattactgtgattattactatatctattaagcgtaacgaccttagtacgtatagtaataagagttctaaatgatgaagatttgaagaaatatcccgtagtcgtattgttaaat

SEQ ID NO: 2239 - DNA, 645 bp, Beihai picorna-like virus 76
  misc_feature 1..645: note = strain HOU156700 hypothetical protein1
  source 1..645: mol_type = genomic DNA
ataaaattccgtacaacgattagtcgccgattaggtgctttgtgaggtattcacccaggcctagtttcgtgcgcgtgctaggttgctttggctataaaagttggagtagtataagcagcaaactcctatatttaaccctcattgaggggtacttgcaatggctgattgccttttatggagggtgcttgtaatggcctattgtgcgtgcactataggttcctaagggtataaaagtattacttgtatgttccattaaaaggttcagttcctcagggtataaaagtattgcctgtatgtctcatgagggagtgcgacaccccccttttaagtttcagtttaacttttaatttgatgatttaggttctggtgtctgaggtattacaggttgcgcgcctggacagcacatgttagtcatgtattatggtgtttaccaacacgtatctttgttcctaatgattcttttaggtcaagataaggaattgtgtgccccttatctgataagctgaacaccttgggatacggtcctggcgtttagttacagagacacatagccccgtggggttccctcgtatcaaatcgtataagtggcgaaatgaaagcttagtttctttgaaactagcaagtaagaatagccaaccctaagaa

SEQ ID NO: 2240 - DNA, 648 bp, Yam asymptomatic virus 1
  misc_feature 1..648: note = isolate VU567Da, complete genome.1
  source 1..648: mol_type = genomic DNA
atataaaaactaaaaaatttttaagaaaaaccaaaaacagagtgtttgtttgacttttcctttatttgtagtgagtcagttgtaatttcgctgtttccactatcttatttttatcgtgtttttccagtgtgtagttaaagtcaagtcgttgatttggtgatagtgtgtcgattgcgcaccttgtaccggatttcccgaattgacttattagagtcagtaggtttgtatcggtctcgtttgtttttctttgtaactgttcctgtctgcttctgtaatttttaatttcgggtttatacgcatttgtgtattcgtgtggtttgttcagtttccagttgtaacctgtattactatttgggtttgtcttattaccgtctacgttgttgtttggaagttcccggaaaccactttcttcccaatcaacacacgtcagttgttgttcattctccctgtttgtttcgctattcctgtcagtagtgcatccactgtcatcctcgaacactttagttttacagtttcccatttttacttcctaacactcttagtctttccgttcgtttaattcctttttgtgtttcaaaccgtctgtggttttaattttcctgagatataactttttgacgcagtaatctttctcttacaatcttcgaa

SEQ ID NO: 2241 - DNA, 648 bp, Picornavirales sp.
  misc_feature 1..648: note = isolate D-16-0054, complete genome.1
  source 1..648: mol_type = genomic DNA
aatcatcactcatcaaacgttaagtcccctgtttatacttctcgttatcattactaaattagaaactcatctttgcggtgatatataattgtcgtggttgtcgattatatattgtcgtgctgtaggatatttgtcttgattgttgagatattccaatcaagcgaccttctatctaagttgtcgagcatatgaatcgcatagtttattcttaattgataccgacttaccctcgccttcatgtctaaataagctatgtctcatatgtgacggattacagcactgttaacgttttgagacgatatataaggagacctaaaggggtcctcctggttttaaattgagtacatattgtaccgtaccaggcaaaggcctttaggagatctatatattgtttcgaaatgttgataagtaaatggtttctcaccccctccccgaaccttaacgtgattgcactcatacataagaatctcatgtcctatttgaatcatcaggattagactcttttgcatgtttaatgaactcggcgcttaaccacgtcgtttaatgaattagaacaacccaatattgtaggaaaaactttcggtgatataaagaaccgatgacaggtgtcaaagacactgaccgacggaaagacgtcacaacaaacta

SEQ ID NO: 2242 - DNA, 649 bp, Wuhan spider virus 2
  misc_feature 1..649: note = strain spider133995 hypothetical protein gene,1
  source 1..649: mol_type = genomic DNA
gcggggttttccccgcatcgtcttttcaaccttatcgaatatctgtgccattgtgtcatggctatttgatattgtatgcttcttttgtgctcgttcggcaatgacctttccgcacgatcactttggcagctttcttttcaccttccggtttctttttgttttatgttagtttgttttgtgctgttttgctgtatgcgttctctacctatgtaacgccagctaaatgtttactataaaaatacttttcataagttagttttaaatgcattccggtttcggttttagaagtctttttgttgctatcttaattatgtatgctcctagtgaaggattcgctctgctagtttaaacttagtatgacatatttaattattttagtggcatttagcaactccattaatgaacgtttgtaattaggtgagatacgtaggtctcctgtaatgtcctttgcgtaagttgcttggttagtcccttgcttcttagacacttcgtgtggtggacctcttgcactgactgttgaggttgctcataaattacgaattagtaaggttggttttaggactttttatcagctttttggcccctttattataaaagctgtaggtaatggcctcatccatacgcctaacattgtttaatcaatgtgaaa

SEQ ID NO: 2243 - DNA, 650 bp, Robinvale bee virus 2
  misc_feature 1..650: note = isolate VN1-57 nonstructural polyprotein1
  source 1..650: mol_type = genomic DNA
tacaaggcctatacagaccacctagatcagcggaacttaaagagaacgtataattatcaattattcaaacgctgatctaaatcaacttttaaacaattaaccctgacacgtccatcattgtaaaatataattcatattcacctttgcatgagcagttacgagtacgaagaaacgaagaagtttatagagcgagtttatgagaagtttaaaacgcacttgcgtcatcatccgttgtgcacttctcagttaccatcaattcgacagtgcctgacttgctcagagtacttcaccgcctatttggactatttggtacatattttgtcatctttaccaatatccagacgagaatacaagatccttcgtctcgtcgaaagcctacaattggaaattgcagatattgtagaggctggcggacttgctcctttcatgtttgtattttcttccccttctgttactcgtattgttggcgaagaccttcatgaagtttggtagatcacaatcattcattaatatatcattattcattgtatttaacctcattctcctgtatttatcaattagatatcgcaacgaacgtcgaaagaagctaaaacagaaggctgaggacattcttgaatcttcgcgcttgaatttgtttaaagacgatcacg

SEQ ID NO: 2244 - DNA, 650 bp, Wenzhou shrimp virus 10
  misc_feature 1..650: note = strain WZRBX43419 RNA-dependent RNA1
  source 1..650: mol_type = genomic DNA
ccgatctcgcctctcggcttggactaacctggttatcactaaccagtaccgtgtacaagtgactccacatgtggagactcctgtcttcacccgttaagtggcctttaactacacgctttgacttgttctacgaacgaatcaggcctgtagttggggttgccatcctggagtagcattcttccttgtcttagcctgttcttgaacagaattagactaggaaggcattgctcccagatggcttcctcccgttcgctggagttctcattagaccccagcagacggataagcccacctaatagtggtcattcaccattgcattgtgcgtaagtgaatggttgtcagaagtgacgtgatcgtgtcctctctcgaaattgttcttgttcaagagagagctcatgctgtgactttacaaccaccggtgtcctatttaggacaggtaccggggggtgcagcccaccccaaaaccttaacaggataggactagtgcgattgggtaaccgcattatcctttaccaacggtaagggagtccgaaatacaactacctgctaacacgaaaacaaccccaggtattagggtcgttcccgtgtcgaggcgccgtactacttgtcctagcgaccgcaaggtcaatggaaagtcggacttgaaggct

SEQ ID NO: 2245 - DNA, 652 bp, Chinese softshell turtle picornavirus 2
  misc_feature 1..652: note = strain WHJYGF758571
  source 1..652: mol_type = genomic DNA
cctgggttgatacccagtggtcatttggacgctttggtaaggaggcgtaattatccttcccatgtggaacctagtgcttaggttcttttatatgttctttgtttgtcctgtatactttctatcgggcaatcttgtagcctaacacaatatgtgttttgggttgcctaagataatttcaattttaaccagtccctatcttggggttgtgcctttctttctttcttatatcttcttaagctgacttacttgctaatccgactcctcgtcaacgggagggtaaagcagtatcactagggtattgtgatgtaggagaaaaagtaagtaggaattatacatgtaacgaaagtaatttggtactttaaactctcttaatcccaaagtgtggtattggtcatgttggagtaggctacgggtgaaactccttcacatttagtaatgtgttcacacgctaacgctacggtagaagacagactaggtcttattctcaacgtagggggacgggtgtatgttcatgactagccacatattaaggttttgaggggctgaattatataagtatgtgtattaattcttggtactagtccctggggactagcccttttctaggttgatattagttttccccaattttaaaacatatgagatttacgac

SEQ ID NO: 2246 - DNA, 652 bp, Sanxia sobemo-like virus 1
  misc_feature 1..652: note = strain SXSSP20269 hypothetical protein1
  source 1..652: mol_type = genomic DNA
gggccacgtcggaaaaaggtaacaaacgctacgaagccatgtacgtcaatggtcaaaatgacgatcatggtgtagtgattaaaggcataagaggaagaatagtttatgctgaagaacaagaagactggatggacatctcaccaactccaaagaagaaggtgagatcgtttaccggagaatctctttcttcgaagaccacaactctcaccccgcagttcgaagaccaacctccttttttagaggaacgccaggcccagcaaaagctgagcctggaaacgctgactacagccactgccgaactcagtcagaaggacaagcagatccttctgaacgctctgatgatgaagactcagagctcggggccgagacagaatgctactgtcttggatacagcacaggaagaacctgcaccgagccaatctggctcgacgttccagccaccgagaacccaggaccgggttacgaggaaggcctctacgcgttaccacgcgtggactcctgcgcagaaaagaagagtttctgtacgcacgtccagatcaacgccaaatcgcacttaaatcacatcccccctactcaacacgaacaacaatatgtcgaagaaaacatcttaagacatctccgctcaatagctggtgtttactgctattccacc

SEQ ID NO: 2247 - DNA, 653 bp, Picornavirales sp.
  misc_feature 1..653: note = isolate wiw119pic1 genomic sequence.1
  source 1..653: mol_type = genomic DNA
gatccacgaaattcaggattgtgctttggtcaggcaattctgaaggagagatctctgtatcctggtatgggatctcgttgacctgatgaggacggatataaagtgtttgcacctgtcacgtagtggggtcattgcagctattctattattgctctggctgccgcaaatgacctaggctcgtgtatgtgtttatgcattcacactctgagaatcaagacgtgctctgtaaccatcacaaattctcaccgtactatctcgacttgtcttgaatggacatgaaatggaacggaatggacatgaataagaaattcaattttggatatgcacgactggcgactgcgttgtactgtctttcctcttatagggctgacacagacgttgctttaaagcgtgaagaagtagtttccaattttgtcttaggaaaataatctcgagcgattcgcatcctgttagggaataggattgatgctccttttagttcttgtatactgatgactcttgtgaatggaatgattcagtaacgttagcatccgcttagccacgggtatcgattaaaactggctcccacactagtaacaaggccccatccatgttcaagagcatgtagttggatcgcctggtgtcagcgaacagtattcagtttttctgaatcg

SEQ ID NO: 2248 - DNA, 654 bp, Human respiratory syncytial virus B
  misc_feature 1..654: note = isolate HRSV/B/Bern/2019,1
  source 1..654: mol_type = genomic DNA
actcaattatcaacattgaatgacaggttcacatatatcctcaactgcacactatatctaaacatcataaacatctacactacacacttcatcacacaaaccaatcccactcaaaatctaaaatcacttccagccattgtctgccagacctagagtgcgaataggtaaataaaacaagaatatggggtaaatagatatcagttagagttcaaccaatctcaacaaccatctataccgccaatccaatacatacattgcaaatcttaaaatgggaaacacatccatcacaatagaattcacaagcaaattttggccctattttacactaatacatatgatcttaactctaatctctttactaattataatcactattatgattgcaatactaaataagctaagtgaacataaaatattctgcaacaaaactcttgaacaaggacagatgtatcaaatcgacacatagtgttctcccattatgctgtatcaaatcacaatcctgtgtatataaataaacaaatccaatcttctcacagagtcatggcatcacaaaaccatgccaaccatcatggtagcatagagtagttattaaaaattaacataatgatgaattattagtatgggatcaaaaacaacattggggcaaatgcaaca

SEQ ID NO: 2249 - DNA, 654 bp, Menangle virus
  misc_feature 1..654: note = complete genome.2
  source 1..654: mol_type = genomic DNA
caatcttgactggaaagtggataaaattctctctcagcagtctgttattacccaaatcaaacacgagcaacatgcaatcaaagcaggaatagccactttggaaggtcttatcaccaccatcaagatcatggaccctggagtaggtgatggcgccactgcggccaaatcaaagagattatttaaagaagcccctgtggttgtgagtggaccggtcattggagacaaccccattgttgatgctgacaccattcaactggacgagttggcccgcccatctcttcccaaaacaaaatctcagaagtccagcgctgcctcaccagcggccctatccggctataagatgacattattggctcttatcaaggaatgcattcccaatcaggcaaaacgccaaaagtttgaaatgcaagttggcggaatccgaaatgagcaagatttcaagaatctccgccgagagataatccgcagtgctgcccaataatcattttgtacgctactacatcctgccaattcagcacaatttgattaatcaccgcaattaattagcaactattaatctcttcttatgccaggctttgcttatctgcgactcttctttgagctttaagaaaaaataagtgagcccgaaccagttaagaagggcacactccgacc

SEQ ID NO: 2250 - DNA, 654 bp, Israel acute paralysis virus
  misc_feature 1..654: note = of bees from USA, complete genome.1
  source 1..654: mol_type = genomic DNA
taaaattgtacgtagggacttttatgtccctacgtacaatttacgcagaaattagcgatataatttcaaaattgttttgtggcgcctgagcagcctttttaatggtaggagcgtcgatcccccgtatggagtggagaatataaggctcagctaggatgacacgcctgtacactgtcgacattagttaagttacaattacacgtcttttgccgaagaaaccattttagtcaattgattatgatttttgtataatgataaacagtgatgaactgtataactcatcgataacaaaacggattacgaacctatttgtaactatcttgatcgaagtctagtagatccccaatatagccctgaaaagcttgagggacgagatagctctataaatagacgtgaggctttaaatcctgataagtacattacctgagaattcctccttttggagtttgaatttatataagttagtaccaatagttaatatcatttaagtatgttattattgctgaagacatgtatttcggataataacctctacattgatatataaattatatgcaagtctcggtggatattgcattatggtcgcagttaacctgtagcttatatattcctgtgtcggagcagtggtaatggagccggataatttcgccaaaa

SEQ ID NO: 2251 - DNA, 654 bp, Wenzhou picorna-like virus 4
  misc_feature 1..654: note = strain WZSLuoI86003 hypothetical1
  source 1..654: mol_type = genomic DNA
gtacgtctttagacgtacagtcagacttcttgtttagttgtgttcagttcatgttcaggtttactttatgagaagtgacctacatgtatttgacgcagttaaatgcgatatgacgatattttcgggtgaagaaaacacctcccattttgttgggtaaaaaattacattcttgtttttatggcctattggcactgtagcaggttcgagccctgcaaggccagtagatgaagaccaaaaagagtcattttgtataggactctgaatttatttacggtgaagttagatagaacgcttgcttctgaaacttatagagtacgaacatttgcgccagttatggcactcctttggagaactggtttatattgatgtgtgagacttgaggactcgatcaatatagcaaatatcacgtacataatattggaaaagatgagcaaggccagtaatctattctgatccctttgatttatttagggtgtataatttgatgctgacatttggtaacgggatttaatttaatgtactgctagtcccatagcgtgaataacgtttagcatatttattactagtatcttgggtcaacagccctgggtagcgcagtctacggagcgttaaaagtttgttacgaacaaccaattttggtgtagggggagcaca

SEQ ID NO: 2252 - DNA, 657 bp, Beihai rhabdo-like virus 4
  misc_feature 1..657: note = strain BHJP58499 putative nucleoprotein,1
  source 1..657: mol_type = genomic DNA
gaatccctcataactcgataggctccgatttttaaagcgttgtttcctaagaggggtatgacgggtgagttacaaggacatgcctatggggtaacattttttggttttttggtttgtgtttgtatacgcttgcttatacaaaatacaaccaaaaaaacaaaaatgtcaccattagacacgatcttgtgactcactctgtcgtacccccattatcaaacagcgcgttaatgagcttaaaaaaacgaaaacacaactcaggaactttgcaaactcctaatcaccaatattcggttcttatcctaatataggttagacataatggcgaaaaatgtgacttttgttccaccagtgaggtccactgagacagaggatgagactcttgccactctctcagctatgagagatcagtggatcgcccaggacggtcttcccctttggagatctcaagcaggggtaagttagtcttcctagtgccatattatatcgatatgaggtcattaacattgctgaggtactaattcgtctcgtttatcctttcaggtaaaagtggcaagagagaaggggttgctcgcctacaactcgagtgccaagaagtaccagactgcaggagatctaggtcaggccaatgcctcgcagttcgcccaggccgctcacaag

SEQ ID NO: 2253 - DNA, 657 bp, Wenling banjofish picornavirus 1
  misc_feature 1..657: note = strain LXMC34076 polyprotein gene,1
  source 1..657: mol_type = genomic DNA
ctcttccgatcttgggggttcgcccccatgtctcatttcaactagccgtgtgtctagttaacgcaccgcctcaccctggtcgttatcgggtcggttcttgcgaccgttagatcgtgagcgtttctgaggatcagttcgtataagttctccggtgtggcgaccgtaaaatcgtcacgtcccatgcaatagatgacgttaaactcgtttgccagttacataaaggaatgttgttacttttaaattgtctgttacatttaacatcttgccagtatgatgctactgtacactacgggtgtaggaaccttgtagtgtgacgtatcactcatatgtggatgggtgctccagacctttatggaagctctcagttagtagtgatccttgacttcattgagccctggtaacagtggaagtcaagatgtatatgttgctcaacacacttcggtgctacgaagctgtttgtggaagtactggcgaggttcattctgaatcatatgtttgtcacatagtcagggagtgccgtcgcttacgacggaccctttttctttataattacaaatctgtgtctcaagtgttgttggctggttttcttcttctgttttcattgttcatatatatacgtcagagtgaaagactcggtatatacaaaactgatccaga

SEQ ID NO: 2254 - DNA, 658 bp, Beihai picorna-like virus 2
  misc_feature 1..658: note = strain BHNXC40556 hypothetical protein2
  source 1..658: mol_type = genomic DNA
agctgctccgccttgggcaggcgttgtatgcaccccgccttggacagcgtaaaggtccatttctgtccagggatgacgtaaaaagccccgcttgggacagcgaaacagtcctattccggacctatccgggatagcaaatgcatgagttgaaaataggtatgtacaacagattactgcatgtttaattatttatatgtttctttttcacatgttcagcattgtacatataggcacagccctcgcgctgtactggtattcaccagagagttagccactcaacaaaacatattgccacttggagtattaagcgaaacccttgtggtatgaacataaatagcttactgaaacaaacattaataataataattctaacaatccatcagttaatgatgggccttctttttctgtatctcagacgagtaatgagtcatcagcacaaaatgtacattttattgatggagactcgccatggacttatgaggtttcacacagcaccgattcgacatccaagcttacaggattcgatgacgcggacctcggatcattcttatctcgaccagttaagattaaagaatactcttggtcaccaactgttcagttgtttgaaacatttaacccttggactgagttttttaataatgcggatgttaaagataaa

SEQ ID NO: 2255 - DNA, 659 bp, Picornavirales sp.
  misc_feature 1..659: note = isolate H4_Bulk_47_scaffold_38 hypothetical2R
  source 1..659: mol_type = genomic DNA
aggtcttaagtcctggaaggacattaaacttaacccgtcaggaaacttcttttcctgtttttccgtgttttacgttaaaaatatggagtcagtggaacttactcgcctcgaagatgtgatccgtaaatctctttcattctagtataaaatggagattctatcaggctatcattcgtgaaacggttgtgtttttacgcatagatcagtaaggcgccgtgctggcagccccagcaaagactaacgaaactagatatatcctaaagggcctgggtggaccgaatggacgaatataaccacctgctgaaaataatacaaatgcacagggacctgttgcccctattgcaaataataacaactaccctgtggcagttaccgctggtgaggatactcacactgcatctgccacaaccggtttcacaaccgatgctaacatcgcaaatgtagcaccacaagcacctgtaggagttgaccggctttttcttgcatcgagttcggacaattacgaacaggatatcaagaccttcttggccaaaccggttgcaatcaaatctggaaccatatcgacagccgatgttgttggtactcctttgtatgctgctaatttacctcatgatggtctctctgctagtaatatcttcttaaagaaaattgaaggtttt

SEQ ID NO: 2256 - DNA, 660 bp, Picornavirales N_OV_080
  misc_feature 1..660: note = putative non-structural protein1
  source 1..660: mol_type = genomic DNA
gcattagcccgacttatagttggcactttgagcagtgcccgctttcgaaataattgtgaagattcaccctccatcttcgaccccatatctacgcatatggcgttattatgaagcaaataccatgtccctatttctagctcatgtgtattttcacttttattatctcatttgacttattctaacgcacattcttccattttcttagtgtgttatttaattatcaaatacaatacaaccccccctatttctacatggacatttatgtccattttgaccgattttttgggagggacaatttatgcttttatagatttatcatgggatagtggggtacaacccactactttatgttaatcaattctattttaatagtacctaaacctataattctggatacgcgttattatacgcaagttataaagcgtctatccctgtttagaaccatgtttctatccaaatacgatgacatccagaattgcatactcatgaaccccagttttaaattgaatttgacgatcccgtaaatatacttcagaatctgttcgtcctgattttatacttatgtagggtggtttcatgataaaaactataaaagaacgtccataaattgttttcccggaatttattctttttaaattttcctgaccatttttaaaccaa

SEQ ID NO: 2257 - DNA, 660 bp, Beihai picorna-like virus 17
  misc_feature 1..660: note = strain BHZY55665 hypothetical protein1
  source 1..660: mol_type = genomic DNA
cctatacgtcgaaagacgtataggtagcattgtattatttgtgttgattagtttactggttatcacaaactagtatactgctgagacatatttagtaatttttaacgggtgatttatgagaacacctctccaaaaggagtaaaaaatctcattctttcaagctgtattcagctatcaaaaaacgttgtttcttcaattttcttcaaaaactgtttgatgaagttagttagattcactgatctgtgtatttacaaatccggtttaccgggaaatttggtacatttaagaccacaatacgacctaatgaattttaattgtaaagtaggcaaataattataagtcctatttttgatttgaattgtggaattaacgttttagggtgaatgaagtctgatgatatcgtgtagtgataaaagagccctgagaagctcgctaccagtcacagatgtatatatgtcgtgtcggacatagtcgagagacacataaggcactattcggttagttatagttaaagactacgctataattgaggaagatgaccggagtaccagctcatgcgagtaaaggtacgcaatttcaaatacgatcttcccgtatgttgattggcaagttaacatactatatatattttttgctgctacaaacaacaataatattaca

SEQ ID NO: 2258 - DNA, 662 bp, Beihai mantis shrimp virus 3
  misc_feature 1..662: note = strain BHXG26678 hypothetical protein1
  source 1..662: mol_type = genomic DNA
ctgcattaatttgcagcatacatatttgacccagatgagttcggcctgggataacaatagtcgacaaaacttttaacccttttttattttcagggctgaccaccctctttcaaacggttagtgattgtctaataccacttgattattgggcaaagtctttttagcgtctgtttatgatttatttcattgtgctaaaacactttttgactctgtgcattcaggtatatcgtgcattgaactttcatccttgcattgatagaacggatttcatcagattcattgagtatttcttgatacagctcagtatagatttgcttgacgtggatatcagcccacgatactgatgtgattgattagacgtagtctgtcattcgagaatattaatactctttgtttccaggtgtcttcttagtaagcttgtctaactcagatatcttagtgtttgttccaaggaacgaatttgagcctacactcttgctaaccactggagtgtacaaactttgaggactcgacaccttcgaagggcttgtgttttaggccatgggacgtctccgaaccttataattccttgattagttgaatatgtagctcaaggtggattaggcgccacccaactatgatttgaacagttcaaatgagacattaggccgatcatatatact

SEQ ID NO: 2259 - DNA, 663 bp, Solenopsis invicta virus 2
  misc_feature 1..663: note = isolate Mississippi Delta, complete3
  source 1..663: mol_type = genomic DNA
ccttttgatgtttgaattctaattccgttctcgccggagatgagtaccggcttgagtttaattcccaggtagcgcgagccgtgagtcagcccagacaagcgcagtagccctacttggagaggttctccttgagcgaccagaagctggcattgaatcgagccacataatgctgagagtagagggatttgcattctattgtgaaagcaataatttgagagctaagcccatcacattgtgcactcggaatattgtgcagcgcgaaaggttagtaacattaagttggcgaaaggttagcgcagcaatgattggtggtaacgctggatcttattgtggaagcaatggatgaatatgaagttgaaatcaggatcaccacacccccgcagcatagcggtaccgtactgaatgtcacaatccagtgatgatttgaagcctataacgggcggacgtgtttaaatggtgttttatgtggatgttagttcgccggaatgtgcagctccggatatcgagtcgaagattcagtgaccagtggagcaagcaacataggtaactatttcgtatgattttactcacaaaattgcactgggcaggagcttccaaaggaaccttctgcttctcgtaactgcacacaaactagatttcttattttcgaagagcatatttaaa

SEQ ID NO: 2260 - DNA, 663 bp, Picornavirales N_OV_011
  misc_feature 1..663: note = putative non-structural protein1
  source 1..663: mol_type = genomic DNA
ctgcaagtcgtttagacttgtagagggaatgttagttaatagctgtgcacatgtcgtttagactgtgtattttctagtcaccttaattggtgcataataaaaatactgttttttgttattgtctgataggactttaaactatcaaacaaacctttcgtagatagggtcatttctctgaacttagatgagaaatgatatcaaactatttagtgaacgatggtaacgatgttgtgatacttatcacaacattttaatccatgtcgtctcttaattgagacggataactacgaaccgcactgtttaattatagtgtacgtgcactcgcacacttaccaaccattttagtattggttggctatattcttatgaatatattgtaatattgtagtataaattaaactttgagaccaagtgttgatatagttttaattttgtataattggaggccatagcaatgaggccgttgtatgctttgaacaaaatgtaaagcctagggcgaggaacttaatagttcggaccctggtatttggagtagaagatataaaccgccccgttcaaatgggtaaaccaatttttatgctgagcagaaggccgcctagcccgacctgcaagctactattcaattgacctttggaagctgagaagatagtcaatcaagaaaaa

SEQ ID NO: 2261 - DNA, 663 bp, Warroolaba Creek virus 1
  misc_feature 1..663: note = strain WRCV1 205652 hypothetical protein1
  source 1..663: mol_type = genomic DNA
aatctcaatcttctattgagaattggtttttagattcattttacgagggttagtcaatgagattattacgaaggagtcctaattgtgtattctgtagcaggattgtacccatcccgctcatactaataaacggaacacgccttacgggaaatccgtattgaagtacgataaaggctgagcccggccttatcaacgtgagatctgagaagtgaagcacttgcaatgtggatcttcaagagtgattgttatttgcacgccagttcaatccagattacggtgcaaatgattcataaaagtatgagtacagatatctgcgcaaacaccctagtattcctaaccctcccctcttaaagcgtctacgggcgttgcaggtctaattgaaaacagcggtctgctatagagggagaattagacactaactcttttctttctcgcctcggagctttatagcgatgtgggaacgcgaacggtcactctctaactacttgttggttttgagagagacttagtacctagatacctaaggtgagaatgaacattgttatcaaaattataaaaactgccgaagcgctaacaacgtgaggctgttgttttctaaactttcttgacccataaatcgtatttagtcgtcactaatacgtagcaacgtttgcagcgtccctt

SEQ ID NO: 2262 - DNA, 664 bp, Alternaria alternata mitovirus 1
  misc_feature 1..664: note = isolate CREA-VE-3SY3, complete1
  source 1..664: mol_type = genomic DNA
gatctctctcaccgaacctggccccgggcaaatgccctaatccagaggtgaatgtgtaaagtctcaggccaaatggggttggagaaggtatcaaagattagattaataaatgctttaaggcttttagttaaacttcttgcttgattccgtccctggtgtgcaaaagcacactacactcgagaagaataagagctagataaccttagggataaggggatctaactccgaaatacactctccaacacccgtgttctcctcctccttctccggcagctttgcggctgtcgagagggtaaggaacgagataggtgcggattgacacttccagtccagtataaaaactgaacaactgaagtctatctgacacatgtataatgttttctaatttagaaactcatcctaagtggaaattagcggcgaaaagtcagctatggggtaacccagatgctgtttcctaagctaaattcgactctccaatgttgaccttcttaacggacgacctcttaaatgtgaggaccctattaatctgactttgatcggattagaatgaagacaccaaagggtaaagagttggatacggggacagtgagacactgacctagtaccaaacgctctagcacctctggggtttaagggagtttaagcccttttaatagtagtaaaa

SEQ ID NO: 2263 - DNA, 664 bp, Lycopersicon esculentum picorna-like virus
  misc_feature 1..664: note = strain pt077-pic-41
  source 1..664: mol_type = genomic DNA
accaaggcataatcacattggaatacggctctgagtcccttttgaacggttaagaactattcaactgggaaggcacccgctcccttgtggcgatgtccaaggatgacaaaacacaaaacccaactctatgtttttgtatacgtatgaaatcttggtgttgttaaatattagcagccaagtaacgtaagacagaataggttgagaaaaccagaaactaatcagtaggacctccgaaagttagaccttctggcactactctgaacttattaaacgggatctctagcatctaaattttagtcgctgacgtaagcatttgctagtaagatactgtgaacagttcatcccagatctatgacccgattgaaataagaccatcttatgaacgaataacggattatatgatttgacggatagtctcattgacatgcacatagcgagtttaatatgattgaagtagcaaaccctaggggaccgcaatgaatatcatattaaggttgaagcgcactcaacccttgtcacgagatagtaaggacgttttacatagtactatagttttctcaaaactgtgtataggtgcggataacattgaaaccgttcaccgacctcatgggatcgtcctaggaaagcccatgttgtatgataaactaggcctcaatgtagcaca

SEQ ID NO: 2264 - DNA, 665 bp, Wuhan sharpbelly picornavirus 2
  misc_feature 1..665: note = strain DSYC36136 polyprotein gene,1
  source 1..665: mol_type = genomic DNA
tgcgggtaaactcccgcatgtgtgaatgaggcgatgtcccaggaactaactgccgatcctggttttaactacgatccgtatttgttactaatgcgatatccccccattgtttgcctccatgttgttttcaacgcttttggccttgagtgttatcaagtgttttagcgacatagtgggaagctacggctgcgtccccatttttgagtggcgacccagttttagtggccactctgtccctgaactgcgctataatgtgaatttatgttcacaaaaacggactgatgtaactgttaatgactaaggaatagtacctcactgaagtatcaagaccccgttcgagcggtgtacatatatggatggaaaccttgtctgagtcatctcgaatactaatcaatgagggatgtcgagtaagcatatcatgaaccacatagaatagtggggtttcggggttagaggctctctgcagcaatgtatctctaacaccatggccgaaatgagagatagagaccacgatgtttgtgtgtaagtaatgatgtgtggaaagaaaattctgaatgttggtatgatatcagtctaaggggagtggctcacctaagagctacccaaacatttcacagcagacaacataacgtactgagagtagttggaaggttccagaaatcagt

SEQ ID NO: 2265 - DNA, 665 bp, Beihai picorna-like virus 91
  misc_feature 1..665: note = strain BHJJX25930 hypothetical protein1
  source 1..665: mol_type = genomic DNA
cttccgatcttgcgtaagcatgccctaagtatttgtggtggtctttaaaaagacatgattaatatgtaatatctccctttttaaggttttccctaatcagtcaccaccataatgccaaatgcatattacaaatggctttttcaacgttcgtgaaacgaattcacatccactattctagcgaatcaatgctcagctagtctagctcattgtgaatgttagcatcactgcagagcacatgtgatcatttctttgagcagagcggacccagtggcaatctgtctttgccggtttaaaattgtaccttaacaatccgcctatggtaacggcgtacccaggaccgcaaatccattaatgggataacatttcccatgttcttttgatattatgtgaacatgtaaatcttcaacaaaatatcacaatggctctatcaatctttcagcctcgacagttgaaagagggctctctagggatttatgtctatggcccctgtggttaaaacccgcccatccggaagtgtattgggactagcaaaggaagaatttattcaaatacctcctagttcttggatctgaccgggagttgatcccccgggtacactaaaagatgggacaggatctccactaccgcctgcatttaatagactgctttcccgactttgatatact

SEQ ID NO: 2266 - DNA, 665 bp, Changjiang picorna-like virus 9
  misc_feature 1..665: note = strain CJLX26226 hypothetical1
  source 1..665: mol_type = genomic DNA
agtgttagtcacttgcatgaagagtagccgttgacagtatggcgatcatactggcgtattgggctttcacttgggtagcagtacctctgtgcctcgtctgtacgtctccctatctcgggagtctaaaaatagattcggtggttcgacagtttcgaccgagtgctgtgatggcacgctatctgaagtctgcggttgctgttggctgcaacagcgttgggcgcgataagtctaatatgtttgatgaatcacttttctttgttcgtatataaaaaacattaagttgctttttacccctatgtcttaggacagtaaaaattcatacacgcgccgtgtactaaagataggcgtattcatattctttcgttggcattttcgttaaatggccgacattcttcaaaataccaggtaagaaaccgcattgtgagctggaaattgcactgttacatttgaacctttttaggcgagctggattgctcatgtaactgttggaaacacacttcgcaaaaggtggatgatatggtataactggtcactattgaccgcaaggagcattatgtatagtgtgtgctctgtaggcagggaagtgctgctgtgttactatacacaagtcgtcctttggcgtggttgccattggatctgttataccacacacagttttaccactt

SEQ ID NO: 2267 - DNA, 666 bp, Hubei picorna-like virus 18
  misc_feature 1..666: note = strain QTM26408 hypothetical protein 11
  source 1..666: mol_type = genomic DNA
cccggagccctgcgtacctacgcaggactttcttttaacgtcacctcgacgtgactgaggcatttacacaccctcttttgaggagcgccattaatttgacttgtaaatgaacacaaaaccggcccccaaaactcaatgacgacaatctttagaatttaacactacccgcttttaaagtaggctctgttatttctattgaggataccgcaaagtttatctttcaaaacaactcactacggaagataagtgaccacggacttcatacaataataaaaatccgtttaaaatgacgtgcacaagtaattatttagagactcttagtaggatatgccaagatgcgttctcgcatatccatagtattaggacaatctcacttaattaatcaccaatcttttaaacttgataataaaatttgtatgaatgatacattgaccctgcgaaataaccttttaaaatacgatttaataagataataaaaattgaattgggaactcaataataaaattcttatgtcggtgttggcgaaggaaatttcaaatctatgacaacgtgaacggaaatgaaacatcaggtttttcaactacccgcatttatgtaggctcttgaaaccaaaatcaacggttcttcggaaccaaaattttagaattaaggaaaacaaaaaccaca

SEQ ID NO: 2268 - DNA, 667 bp, Solemoviridae sp.
  misc_feature 1..667: note = isolate ybw116shi01 genomic sequence.1
  source 1..667: mol_type = genomic DNA
agacagtatctgtatggtgtcggggtcgccagtagatttccaactgacggtctttcctctttcaaattgacctaacaaccattctggtgatgactccagacgttgcttaaaatgcacgtgaatcaagttctgaacatagttggctgagaaaccaccattgacagcaccgcccatttgatgaatcccaaggagttcattgcctttcatgtacgcagccccactataacctggcagagtcatctatacaggtagtactctgcaaggttatagtggggctgcgtacatgaaaggcaatgaactccttgggattcatcaaagcagccccactataaccttgtagagtactacctgtatagataactctgccaaagctaacagcatcgtgcgaaacatttccaacagttcccttcccatcgggtccaacaatttggcctgttgtccgaatctcatccatatgcccgacgttagaattgctcaatcccaatcgggagaactccgcttcgtccaggacaatggcaaccagatcagcatccaaagggatgcggacttttccagctaacgaaagccagacgcccaacttgctccttgcgcacttaaccaaacaagctttgggattttaattaattcaattgcgagttagaccatttattacttaacattcgtaaca

SEQ ID NO: 2269 - DNA, 667 bp, Western African lungfish picornavirus
  misc_feature 1..667: note = strain FZFYF1205461
  source 1..667: mol_type = genomic DNA
tggtgttctcgctaggactcttggggtgcgaacccccttttcaacaaatattgttgaattgcaagtgatgtaacgtattgcactaattatagtaagtgttataccctccacaaaaatattttgtggagtgttaaggtatggattgtatagggcattagcaattaagtctgtaggccgaaccggcatgcacggtacatttgaatggactggagttatggtttgaacaacttagaagtcactgtgtgtattccttttaggttgcacattggcccattgatgaacgcaatgttagcgtagagtagtcataactattttgttcttgccatgttttcatatcttgaaaaatgtctcttgtttgttggcgtatggtttggtgctatcgtaaagcacaattccccagaagtcgtaagactattccgaaaggatttgggttagccctgggggaggtaggtctccatgactcagacattggatcatggcattgcaaaaacacccatgttgaggtggtgcccaatagatcatgaacaatctctgtttaagaatgcttctacatgggggtctatggcgctgcgaggaatatggtcatgtaacaagtagggttcctcttctacaaatgttgtagttggtgtttagattacaatctttaggaccataccggcagcgttaa

SEQ ID NO: 2270 - DNA, 669 bp, Wenling chelidoperca picornavirus
  misc_feature 1..669: note = strain LXMC188591 polyprotein1
  source 1..669: mol_type = genomic DNA
gatctctgtgggggagttttattctcccccataggtcattttaaagcacccaacatgttatgtgcttaataaacttgcatgcgcgtggtctggcgggtggtttcaccctccggggtgtcatcatcaacgacccggtttctgtttatcgacaaaagcaggggcttggtggatgcctgattcaccacatacatcgaaacatgaagatgtaaaatttatgtcgttggtaaattacgttaaagttacaaccaccaccatcaggcaggattagattatccttctacgctcggtagacaaaaccttgtattcgggacaatctaatttggttatgaagtactgttgtgaaacagtgtgggaactgcttggttaggttaattcgttgtggagaatgcaccgtggcaacacgttttccccagcatgaaaggtagtgcatgccctagaccttagcctctcatagtacctgctgcgtagtggctttatggattaattgaattgctcctggagtctaaggagactggcgtaacttaatacgctaccccccttctttaacaggcacaattgtacaggatactcacgtgcagtcaaagaaaacccccggagagttagaaattttgcgagagacagtttttggtttactttgttgcgacgagtagcttgtaagaggccggcaac

SEQ ID NO: 2271 - DNA, 669 bp, Beihai picorna-like virus 31
  misc_feature 1..669: note = strain BHZC37445 hypothetical protein1
  source 1..669: mol_type = genomic DNA
gtcccaccaggttttcacctggtggactcccctatattgtatgatttcattgcacagtttagcacctgtgccgtgcttttatacgaaaattttattctcctttatatacctttcacagtaattttgtgttctattatgtcaatacctctacgaggttttgcaagaaccctcgtatgttgtgttgtctttgaactcctggtgagtttagaaataacctcatcagattactacctattttatacataaagcatttattctcgttggtagagaactaccattcccgctcgtctgtaacgcgttaagtgcacaccttttggtgtatttgagctgattatattgaaactttatattcagatcgtctgttttaagtatgttactttattgtgcgtaagtcccttcaagaaaacttgcgtagtcgtgtgagactagagaactcagactaacgaactttcgattctgtcataattggaaatgatttatatgaacttgtttacaccgccccggttgtcttaagttagatactatctaggacccatgagtggttaaccccacatagatactagtattaaaatcggccggcgaaagccttgtggatttgcactccactccgagcctccgtccctccttcatcggagagggggttaaaactttttagcttctatttctttt

SEQ ID NO: 2272 - DNA, 670 bp, Saguaro cactus virus
  misc_feature 1..670: note = complete genome.1
  source 1..670: mol_type = genomic DNA
gcggcgatatgaacactgccttaggaaattgcatcttagcctgccttatcaccaagcacatttgccgtgggttagacgcgagacttatcaacaatggtgacgattgtgttctcatatgcgaaactcgtgacgtggggcgtgtcgtggataagttaacgacagcgtggctccactttggttttacatgtatcgcagaggaaccagtctatgaaccagagaagattaggttttgtcagatggcccctgtatatgatggtgagaagtgggtgatggtgcgagatccgaaggtcagcctaagtaaggacgctttttctatggttcgttgggatacagtgaagaatgcacaacaatggtttaaagctgtggggcagtgcggtctatctatagccggaggggtgcctattgtgcaggagttctacaggatgtacgagcgcgcgggaggtcatgtcaaactcccagtgttgaaagaggttagcgctagtgggttgtttcatatgagtttcaattccaaccgggcctattctgagatttccgatgctgccagatttagcttttggaaagccttcgacatcttaccagatgttcaggaggccaccgaagctgaactgcgtcgcacctggattagtctcgattttggcccggctggtgaccttaacaaccctatcctaga

SEQ ID NO: 2273 - DNA, 671 bp, Beihai barnacle virus 9
  misc_feature 1..671: note = strain BHTH10927 putative glycoprotein,1
  source 1..671: mol_type = genomic DNA
ctctgcggtccacttctgtcccacaaggggccgtgcctgcccagcgagtacctcgctctgttcaaactcgggaaaagaagagcattgtgaggttacttcctaagcaactattttcttttaagttagttctccttgctttttgcgtgtttagtgctttgtaggtatgtgtggtcccctatattggattatgtccattcgcgccctgtggcgccttccaggcagggaccctagtagaagtgatgcgtcctctcaggtatctctcttgtcgttagaacgtgtcgttagtgtggagcccggctccattgcccgtctccccgcagctccgcttgaactatacagtgatggtcgaattcgcccgccacaagccagtagcaatgatctctctgctgaggaattagatcggaggctagacctccttgcattagaatcaggatgatcgatcccagattgcccctcctcccgaatacgatatgttagtacggaggagaggactccacggcatttctgccaaacctggggtagcaaacatagggtacaaatacacgtgtcgttctgggtttctgatttaaaaccaccgatgatcgggattccaccgaaatcactgtttattagccgggccagaggtcttctgtgttctgagctcctgcttccggaactgctcgaaagcactg

SEQ ID NO: 2274 - DNA, 672 bp, Apple picorna-like virus 1
  misc_feature 1..672: note = isolate WA1 hypothetical protein, capsid1
  source 1..672: mol_type = genomic DNA
atgtagcaatttgcaggtgcccgagacatggcgtgtatctgtattattgtttttatgtgaaagctcgccttgactaacccgatggctccttttaccgacggtaattatctttaagtaaggccggattagtacgtttcaagttgtggaatataaaaaacttctttaatttataaaagtggatgatgcaaaagttggattaagacaaagaactcttatacccaatgatcgcacgcaaagttagtatttatacgaaaggttagtgcgagtctgaaactcaacaaatgacagaagaaaattattttgtgatggatagcggaaagacggttctggaagaagagagaaaggttaaaagactagagcatgtatttgtttttgtggaaacaaatagatgagctagagaacaggttggtctatttaagcttagggccttacctttctaacgttacccgggagaatctgccaccattgtgctgggtggataacagtagtatctgagagtctaggcaaggaaaataggtattttcccctaaaacccttttccctttatgtaatacccatgtcatgttttaaaagagaagctttccttttgaaacacaagcacacaaatactaaataaatatattacttgtgaatttttatttctttttgatatctttaaatacaacgtttaat

SEQ ID NO: 2275 - DNA, 672 bp, Hubei picorna-like virus 53
  misc_feature 1..672: note = strain GCM3912 hypothetical protein1
  source 1..672: mol_type = genomic DNA
caacgttaatgattccgtttgtatctttgatacataaatcgtttcgatataacgatttgactcagtcaatagacgtattgccttaaccggtttccgcgagtggtacttcgcgatacgtgcctcgtatcacattgctattgatttgcagggtatgaactttagtcaagagctgggattttcctgtgccccgatttcagtcttcacacaccaagacacagcgagtacatacaacgccttggtaggtcttaatagttgcagtagttttagcccatgaatttggctctgattctaccagtacctaaccttcgccatggctaatgtcactggattttcgctatcggggagccgcatcggagcgggccctacctaatatccaattggattgcaaaatgatcacaactaaccaaaaaaaaacaaatcatccaaacaaccaacctcacatccaccatttattcaccacaatctggcaaatacataaagaccaatatcacagattttaaaattgttcatgcaaattgtttttatgataatattaaattcactaatgtacctttgctttcagttcaagattcagaatattatttgtttacaccaactattctagccactaaatttcataatataacaaatggatcagttacagataattttgtcagaaaactcaccacatta

SEQ ID NO: 2276 - DNA, 672 bp, Cylindrotheca closterium RNA virus 02
  misc_feature 1..672: note = complete genome.1
  source 1..672: mol_type = genomic DNA
cgggcattacccgtacatcacttattgaattatttggcattaaatatgcatagaaatcacaccctcgagtggcatctgagcattacgatgctcttatgtcactccgattgtgactctattaattctatttattctaggtttattcacacctccgtctctttcgagcgtgaaagttgaacccttgcctatgtatttgtgaaaatccagaacgaaggtaggtacacattgtagtgtatagtccttgtctaggttctcgttaggcacgagttcaccacctaggaataaaatctactggaatgccaccagtagttacgtagaaagttaaacgtatttattgacgtctattttaagatgttgaactagaacttggattctagtgttaggcgatttaatcgcttttgaaattgatttttcttagtgtatcatagcacagttagttaggttactccaatttcctactaaccccttttataggtaaaagataatgataaagtaattagagaaataacgtatgacacttcatatatatgtttacgtgttcgaccggcgcacatggtaagaccggaatcgagatcgtcaatgtatatgtgcttgtttgaaagcaatatgattaaaatttgacgtagggtatgagaaaacaccccgtccattcaattgtaataaaccacttct

SEQ ID NO: 2277 - DNA, 673 bp, Plasmopara viticola lesion associated botybirna 1
  misc_feature 1..673: note = isolate1
  source 1..673: mol_type = genomic DNA
gcatgcctttgagatgcagttttgatttttgtacttaacaaaatgccatggatatgtatgatagctaatgactatctggaacaagaggcacgctgcccccggctaggggtccgaactgataaggttcttgcgattgatccggcgcaaggatttctcatttgagaaacagtcttgaattaacaagtttaaggacggaagcctcgacatgtccaatgttcacaatgaagctggtcttgtgaattcgccaaaatccagtgctttccctggaatcgtgtaccctctcattagagaggcgattggctggaacgggtgtaggtgtcagcaatgccctacgtgttgtccgtgcaaggaggagagctgcgtatccagcgtagtttgaatccgagtgtaacgactgcgaagcctttgtctgtagggtagtcctgtaaaagggggctatccgtccaggaacagtctgtttccctgtcctcccgtgaggtgttgttcgtgactacagttcaacagtaaaaaacagggcgatgtgtagatcggaaagatatctctaacaaagtattaagcgaaagctaaccgcgccgcctgccgaacgtgctgactagtacccgggcgtaaaactacaactacatatcacaaacctacgacttaactaaaacattccaaaatctacaaaacaaac

SEQ ID NO: 2278 - DNA, 673 bp, Picornavirales sp.
  misc_feature 1..673: note = isolate RtRrs-PicoV/YN2014 polyprotein gene,1
  source 1..673: mol_type = genomic DNA
atatgtgccctcacctgtcaattgggaccaccactttcagtgaccccatgcgaagtgctgagagaaaggaagccttcttacccttcatttgtgaacccactagtctaagccgcttggaatacgatgagtggaaatgttcattctaaatggagtgaaacatgacttaacttttctagtcagacgcatacttgtgtgtctgagcgccactgtcttggcgtaattcttcagagtgtcacgccgtgcttgcggatcttacgtggcacatgacaaggctctcgctggaactgtgagtctgaagcatgtgaagtaacagtgaagagtgcatgatcacacgtatgtgtgggctatgagcctgcggatcaacaactggtaacagttgcctcaggggccgaaagccacggtgttaacagcaccctcatagtttgatctaccccagggtagtgatgttgtgtacctagtaattgccaattttcatgttttggtatcacggcataccggagagttcgcgggtgaaggatgcccagaaggtacccgtaggtaaccttaagagactatggatctgatctggggccctgtctggagtgctatacacacagctcagggttaaaaaacgtctagcccgccaggacccgagggattcgggttttcccttaaaaaaacccgactagagctt

SEQ ID NO: 2279 - DNA, 674 bp, Culex mononega like virus 2
  misc_feature 1..674: note = isolate OTU6 RNA-dependent RNA3
  source 1..674: mol_type = genomic DNA
ttgtaaaagaaaaaggataaccggcactcctgttataaaaacccgatagtaacgctcaactcaaatcgctgaaccaatctcagagaggacaaggagtgagattttcctcaaggagagagcagaggagaaaaggtcaaggggaagaagaaagaaacaaggaacaaagagggtgaaaagagagagaaccagtggtaccaaaaatgacagattacgtcacatgcaccctctgtgggaccaaaatccctgtgattgttgtccccctcggcacactcgaaagagcggttcagtgtaacgtatgcgggcaaaactattcggtctctccaaagtgaactggtgtattgtagaagccaccttagacatgtacatatgtatacacatgtgtatgtgtctatatgcatacacacatctatatatatatatatatttttgatcaatttactcatttatttgtctatcatctttacaatctttcaaacagctcaagaagcatcagcgtatgtccatttggatacgcactacgccgggaagattgcatttttgtattgtgttttacaatgagtgttgcagctactttttggttggagtgttttcctggatcgggggttctttgttattaacacaccatccacctggtacttttcagatttagaaaaacccgatagttaccagtcaaa

SEQ ID NO: 2280 - DNA, 675 bp, Diabrotica virgifera virgifera virus 3
  misc_feature 1..675: note = isolate South Dakota,1
  source 1..675: mol_type = genomic DNA
ccattacggccgggggaaaataagggctatggcgtcatgccatagtttatatacaccacggattacgtgaaccttgttagtaataacgggtgccctttgttagggatgtgttttatgaattattaattatgttataactcttattttcaactacgggattaaaaccccactttaaaactatatagggaaatttagtttaaacctgtataggaaattaaggattgataattttattgaacgagcctactcgttgaatatttatagttagttgtgataactagccttgtatttagacatggataatctccagcccatgttcgacataccttaggaagtttatatgcggcacgtattcaattaaatgaagatgctataagtgcttgattagacattaaaactagaacaagttctctagttgtcgctggtagagcataacttatagtaggtggattttatttgatgacccaagtatttatgaaatttgtcggcctccaagttgatcagctaattatttatattttgcgagtaatagtagttcagactgtgctatccccttgacatgcattttttggttactccagattgtgatattagggctctaatattgcaagactgcccaccaagtaaggaacttatgtaaacttgcttgggaaacacattactcaaaaaattatt

SEQ ID NO: 2281 - DNA, 675 bp, Beihai picorna-like virus 93
  misc_feature 1..675: note = strain BHBJDX18546 hypothetical1
  source 1..675: mol_type = genomic DNA
gtggtttacacaccacgcacggtatatagttaaaagtcctcccaattgcaaccccggcttaacccgctcttttaagagttcgttacagcctcgcttgcatgacagctggttctatattctttatttttctttttgtttaaatgtgtacgtcttttgttagtgacgacgttaaaagtaactaactgagttttattagcgacctcattaaaagtaacttttatagtggatatctatctcttatcccgagtgaagattcgttaaatcactggacttgatttctttcattgtatgaagattcagatgcctatagtacgttcgaggtgtaaaaacctcttcgcggaaataggatatacatctgtttttgattactttgttagattgatagtgacggcttgtatcctactacacgtttgacgtgatatcgtataatcactaggtggcttgacaaccgcccaaatctcttgacctctcatgacgaagcataaacactaaactgacctcaccacagtagaattgtggccagggaactggttagtggtggatagaccttatgtcgaatccgcagtgttatcattgatgttttgagaattgtttaggtcggctagttgagaagctatagccctcccatgttgtcaacacattaggttctcaccttttacctcttttctctccttt

SEQ ID NO: 2282 - DNA, 676 bp, Iflaviridae sp.
  misc_feature 1..676: note = isolate rfb200ifl1 genomic sequence.1
  source 1..676: mol_type = genomic DNA
ccccccacccgttcaaccaccgctaacatgtcggcccagtactacggcgctgtgtcgtcccctgttatgtgctccatcatcaattcggcctcgtactacggcgcgttgtcgtcttacccaagatgaggatattgttgacggaagggagaaaacccccgctgttttgaaaaccccaacttttatgtaaaatgtaatgtgttgtccacgttgtatgtttacgcggtggcatatataacaagaaccgcctgcagactaacactcacttcgtagatttgaggttaaagtttggaactgaacagttgatcattttctggtgtccccccagttggtttaagtactgtaaaaatgtgatatgtagtaagtgccagacctcttaacagttagttcttcggaatgttgattcaggtgacactgatgatcatttgtaggtatggacttggtatgtcgtaggggcctgtcaacgcaggtgcagccgcgcaaccccttgcagcaaaggactagatagtcgcaagattagatgtctgatgaatataccagacacagataatcgcttccaggtaaataactcactgtctcttcggagatataggacggtacctcggatagtcgcgcgccttaaccggtatctaggactcgttcgatcggagaacggcaagggctcccggattattttgca

SEQ ID NO: 2283 - DNA, 677 bp, Hubei odonate virus 10
  misc_feature 1..677: note = strain QTM133243 hypothetical protein 1,3
  source 1..677: mol_type = genomic DNA
ttgatgaagttcaactactctttaaggtcatacaaaatatataatgtatcttatatataacaatatacacattatgatgtctcattaaacaattcgtacaaacagaatttcatgagaagacatgtaattgagtaatcatggttctttgttgtcaatgccaattggtatctgcttagtggccagaatctcgatatatattcatatcactcaacttgccatagtatccaattgattgtggtaacgtggtttgaagccatgtagaatgagaaactcattcttgagagatctctttgatttccattatatcaagtctctaattagttacatcaattcttttgagtctttaatttgttagaatcagttgatccttagcaagatcccatgcttcctacgagaatgagtaacttaacgttcgatatggaggagcaaacaatgaataaaaagacaagacttccacaggattatgcaaacatgagatgtttaccatcaattattttacccattgttagattccagtctttagaattatttttcaaattcttagcaactgaaaagtgatctataatataagtaattaaccaaaatacgatcaatcaatatctacactttatcactgtgtgttacattgttttagggctgtaagattcctaatgaaaagtagcagtttctgatgttgc

SEQ ID NO: 2284 - DNA, 678 bp, Picornavirales sp.
  misc_feature 1..678: note = isolate rfb094shi2 genomic sequence.2
  source 1..678: mol_type = genomic DNA
tcgaccaagttggaggacacgttggaaagtacattgatggaaaaaataatttagaccttcaaaatttaaaggggagaaatttattagaccttcaaaatttaatcggtgatcagaaaaaagatgtcaccggtatggagatagctggaaataaagatttgcagaagaatcaacttgacaaccaggataagtggatcaatgcaggacgtgactcgttcactaaagcaggcctcccggaattttcattctgggatcggggtcgcggtggaccactcaatgtcggttcgacgagaagttcaatcggtggtaacaactttgtgaactcctttggaggcccaaacacaaacttaccgtcaaccggttcctcgccatacgcagacttgaatggattatcccgcccgttctgatcagggttgtcataaactttcttcatcatttcttgcattcttaagcgttttgtcatgagtcgcaggttgctgttactcatggggtactggtttgcgcacaacaaagtgttcttactggaaaagcgtttcattatgcacaaaaaaattagaattcctaaggagcttaactcccgtcattctagctatcgtgtaaactaaattagtttagtagtctttcttaaaaagataaattaaaatttaatttgggttaaacataacatcatacacatggatc

SEQ ID NO: 2285 - DNA, 678 bp, Picornavirales sp.
  misc_feature 1..678: note = isolate RtNn-PicoV/HuB2015-3 polyprotein gene,1
  source 1..678: mol_type = genomic DNA
tgaaccgttacgcaccactcagttggtgtttggtggcaccaatgatggaacaaaaggctacaccacttgggctacggcccgcgccaccttgtggcgcaaagacattagaagaatagcataccgcccactagggccctgcagccagcagggtaacgggcaagcacttctgtctccccggtagaacggtataggctgtacccacggccgaaaactgaactatcgttacccgactccgtacttcgcaaagcttagtaggaaactggaaagttcgagttattgacccggagtgttccccccactccagaaacgcgtgatgagggttgccaccccgaccatggcgacatggtgggcatccctgcgctggcacgcggcctctaagaggataactcgctcctactggtaaccgaagagccccgtgagctacggtttattcctccgcctccctgaatgcggctaatcctaacccatgagcagttgccatagatccatatggtggactgtcgtaacgcgtaagttgtgggcggaaccgactactttgggatggcgtgtttccttgttttctccatttgttgttgtatggtgacaagttatagatctcgatctatagcgtttcttgagagatttccaaacatttattcaagtcgtacaattcttgtgtttaagcagtacagtgtaagg

SEQ ID NO: 2286 - DNA, 681 bp, Barns Ness breadcrumb sponge picorna-like virus 3
  misc_feature 1..681: note = isolate F53,1
  source 1..681: mol_type = genomic DNA
acaataaaatttatgaattactacaattattatatgtttagaataagtgcttttgatggttcgctctagcaaagcgggtcacacgagggaggaacagattttggaatctcgtggcttattttattctcaagtatttatatagatgggatattatcgatgatttttggtgcagccgtaagcagcagagaggtaagaagtttaggcgaacataccattccgaaaggagcacaaaccgcacacaatggtttgtgaacagcaataatggtactttcactcgttttgcattatttgagtgtgctggcagggtcgaatctgtcacaattaggatgtcggcttaatgaaccgagtccctaattgcagatgcattactttagagtgaatagttttcaccgacgatacttaaactgtggtgactccacacccacctaatttctaaataaatatgagacaagtctcttatttgagcatttattttattgttggttgggggggcaaatccaatgatgaatcccaacacttctctcatatttattttccgaattagcaccaaatctctttattgattttatcaggagtatctcggactgcgttctatcgtcgtttgtccgggtgactgtcgtgaaagacgaatatttggagagaactccagtagctgattctgaatttttacaatattgccct

SEQ ID NO: 2287 - DNA, 682 bp, Fusarium poae mycovirus 2
  misc_feature 1..682: note = genomic RNA, complete genome.1
  source 1..682: mol_type = genomic DNA
cacgggggcacacaacgatttaacgttgcatgatgtgatcttatcgtttcatcatgtatatatcgaaggatatataatgtaagttattttatgttatattgcttgagggggtatctcaggcacttgggtatgctttatgccgctatagcgttgtcccttaccgacacctatgttgtttataggtgcagtcagtcatgggaggaaatgcctatgccatcagacttagaacaagtcatttagaatgtcatcgtttcggccaaccacatacgaagtgggtggcggtccattcaggcaactggatgcggctagttacgtgtaactcgataccacaaagctcgcagcaacgaggccaggctttaacaattctagcagtccatgttagaaattgcgaaagataaagcaaggtgacccaagaccaagggtaagcaagggtcgacgtttacgttcgacgaccgcacaatctggggagtaagtgattgtatggccctgttcttgcagccagcaggaatatccatgtgtggcattgatacatgggaagcgtcaaaggactgtctagccatgccacagacaagtacatttgggtacttctagttaatcaagaaagcgattagtttcgcgaccaaaggtagaccgcctagatctagcctaaatgccgatgcacaagcggaggtaatctagcact

SEQ ID NO: 2288 - DNA, 682 bp, Forsythia suspensa picorna-like virus
  misc_feature 1..682: note = strain pt110-par-3-NW genomic1
  source 1..682: mol_type = genomic DNA
acatattttcgcccggtgcagtgtcatagcaccagctggatttacttctgcaagtggacgcatttgcagccatatctccagccgtacctgagcttcctaatttctgcacgacccgtgtgattaggccacttacgtacaacccctcacccttctatttctttcacagctatttagtattacatccgtggcgttaggcccgcccaacatctaggcctctctatagcgtgtgagatctatttagaatttggttgagttattgtccctcaaccaccatccgtttgctactcacttgaccttgacagagcattctgttagtgcatagtagtcgattccatccagtaccccttgatcccgggtatctggcccgtagactgattgacttcagcttattgcgaagcctacccaccatagtaggagatagtagcgagaactgtcgatggtcagagcctgctaaagattattatgtacagtgatcaccaccttctggtattgtctacaccaacgtccattcggtcttaatcgagcctacagaacgcgccacgttctggtgctgaattggataaacaaacgtttagctatggtatagcttgtaattgtgacttcccgacgagggaccacatcgtttgctctggctatggtaaatagctaagccctagtaaggacttccacaggagcctccagc

SEQ ID NO: 2289 - DNA, 682 bp, Hubei odonate virus 4
  misc_feature 1..682: note = strain QTM161803 hypothetical protein gene,1
  source 1..682: mol_type = genomic DNA
tgagggccttcagccctccagccgtattttgataatagcttagtttatataagactaatatatagaacagattaattcgaactatatatatgcaattaaattttgctattatcaaatgtggaagtatttcatctttatataagtctaacgtattttcaacagataaattcgagaatttacgtatgcatttgctttcacatttgtttttgatttcaaagtcattaaacaattatgtttgtttcattatcattttattaatgttaatttatatacttatacatctttcgtttaatttcttcgatttagctagctgacattcattatgaaacgcacataagatatattacgccggatacaggtaatatatagagaatcgtgtgctgcctgagtaaatatgtgtacttaagaatatcttgcgcctccatcgttagcgtgactaacgtatatatttggattgtataaagagcattagatttctttatgttttatgggcctcttttcaccttttggtcattagagtctacagcatatttatgtaggtatggcgttgttggcttcccagcttgacaagaaattatccacataaagacatataagtatttgttttcatttcccatattaatttaagtttatgggttttagctctcctagttttccctaatataactaggagatccgcaaa

SEQ ID NO: 2290 - DNA, 684 bp, Perth bee virus 3
  misc_feature 1..684: note = isolate WA2-20 polyprotein gene, complete cds.1
  source 1..684: mol_type = genomic DNA
tggccatagtattgcgggttagcgtcccattaagattttaatatagctattcacaaccttaatttctttctttgattgaattaagccgctgtgtttccctttccgcacaaccactttgtcttcttttgttgatattgtgccgctgtgcccccttcttttcccctgctctttttatgacggtttagttagtaacaacttgaggaatagggattcaggctccagcccctggaatctatcgcactgttaccttgggagagaccactaccattaatatggtggcagaggtttcggtctcagtgttattcaaatacagttgttattagcggcgttcttttcggatgtctcttggtgatctcttacactagcaaagattgtaggaacgatgcctttggattgagctcttttgcatttacggattcacataagtcacatacctttaaatgtccctctaggcatgttaattagagggaaggtatgtatcagaatgtgtctatggtaccctgtatgtcaatggttagacatacacattagggatacggttatggcccaggaaacgttggtttgcctgggttatacataacacaaacgctcattgcgagcttcccttcttatgatttttctcctttggcgaatggaacgcgcgtcttcggaccgtaagtactaatagccaatcccacaattgaa

SEQ ID NO: 2291 - DNA, 685 bp, Blechomonas juanalfonzi Leishmaniavirus-like RNA virus 1
  misc_feature 1..685: note = strain1
  source 1..685: mol_type = genomic DNA
tcccaagctctccttctctacggcgaaagggcggggtgacatcaatttcggatatcgcccgttgatgacttcacctctaaccctctggaatgcacttaaatggcgtagcctgacggtcccttctagccaaagggtgaaacggaagaaggctacagtttctgtgtctgcattgaagtgaccttgtgatctaacaccctgaatacttgttagttcaattgtcttatttctggctcaataggttcggctaacgcgggttgttcctaagcctatacatagtcgtggctgtcttgtcgatcgtaaacagtgacagcgtgactcatcgtgatcatttaaagtattttattgctggcagtaggttgttgctattaagtctgaattgttccgtttgctgtgctttcaacatttaagcttacccacttattgcttgtggtatttgtagtacgtattgtggattgtcaggtgagtttttggtgcgtgtgccttaacacagtcttagtgcagactacctcactgatcgtaaagtggttggtagtgtcactcgagctagtttagtatcactccttctattagtggttgctgtgtcagtttttgtgttttcataatatttaacttcagactacttcactgatcgtaaagtggtagtagtatccaagcccgttgggatctttaactttaaaccttaaca

SEQ ID NO: 2292 - DNA, 685 bp, Wenzhou picorna-like virus 8
  misc_feature 1..685: note = strain beimix75836 hypothetical1
  source 1..685: mol_type = genomic DNA
cacgggaattcccgtgtgcagtgtaagttagattacttggcagtttttgccctaatagaccatagacgtcatcctgggcatattatgcccattgtgaccactacgtctattagtttttctaacacaaccaatgttttgttctaagtattgatcgtgctaaactagcgatccccattttctttgagttgagttatattattacttgactctttactctattttaagtagggtttttagttagcctgccagctagctatttgtttgtcactattgtgacacttgattcttcagattgaagatgtagaactatacctggtttctgagttcaggcgatttaatgttctaatttattgtgatttgtagtgaatacagcacactaatagaagttccgtcaatcttactattagttctccaatattattatttggagatatcagatcattttagatttttacaaataacgtacgaactctcgttagtgtatgtgtgtgtaggccggtaccgtatggataaatccgaaatcctgatcacatatgcactagcgcttgtagaacgctatatgaagcaatctgaagaatagggttaagcgagaaccccgttcatcaaatttcaagaccaccactcctgtatgaaaagaaagtttattagtatattatatcgtttcaagtggtgaaaaattgacaat

SEQ ID NO: 2293 - DNA, 686 bp, Chinese broad-headed pond turtle picornavirus 2
  misc_feature 1..686: note = strain WHWGGF755341
  source 1..686: mol_type = genomic DNA
cgggattacccgtgcggcgcttttggacgctctagcttggaggcgtaatatccagctatcgtttgccgtgatttacggctattttaattaataaaattcaaaaacattgtgcccttcccccaatacgacctggatcttggtcgtggctttagactcaccatcagtgtatggtagtactttgcgatattatgtcgcaatggcccagattgtttgtcatactattgggccctctcttgtggcccaatcttttctttatgtttgtttcttagggtagtctgtgttaccaagccgagtgctcgcgtgtggcatgattagcactatcactagggtggtgtgagtaggcgaaacatacagagtggttgtcattctcatgtggtaatgttctgcatttcaacccttacaagtattaaggtggtgtatgtgtgtccgtagtaggctacgggtgaaactacggggctaacaatttagtcagcaatgtgaatagtggcggccaattgtgcaaatcaaattgataatcgttgctcaattcaacgcctgggaactacactaaagctgcatacttgccactggaggatttgttaaggggtggttcattatatcacatgaggattataccgccccttctacgggcgcttcagacacgtattagttttcccattataaaacaaatatgatatagaggttat

SEQ ID NO: 2294 - DNA, 687 bp, Hubei picorna-like virus 50
  misc_feature 1..687: note = strain spider113255 hypothetical1
  source 1..687: mol_type = genomic DNA
gttttttattattgtttatatgtaattgtatttgtttatatgtattatgtgtagtgtttcgtggtaacattgttattgttacctgtaaaaatattaaaataacaatataagttggtatacttgttaactgaagttttgtagaatactgggttaatctggatttttgtatgaagcaattgccgagtaagatgtcgtcctatagcttatcaaaatgttcttcggaatagtttagtttcataaccttctgtaattcatatcactgagagaagcttttaaagactttcaaatacatgttacggggaaactttactgggtcgtgccgttgtttaagctagatagatatatcattggaccttacttggactgaacttttgtggattcttcttggtaggttagcaaccggttttattaattactacctttcgtttcgagaaatcctcctttggaccgccaaaggatcgtcgattctatgaactgagtgtacatacgttgagacgtttcgaaatgttctaattaatatgacatctgcattatggaagttttcaagtggttaatcccaagtttccatggttctgccgccgaataactgggggttctcatcccttaagtgatgacgctggaaagacagcggactgatggaaagacatcatttttcagatttaaagcttttatgactagtacaactta

SEQ ID NO: 2295 - DNA, 688 bp, Changjiang picorna-like virus 9
  misc_feature 1..688: note = strain CJLX26226 hypothetical2
  source 1..688: mol_type = genomic DNA
acacaaatacgcacatcactaactcaaatagtgaagcacgggaaagtgtgatgtggacagggtgtcgcctttaaacctagcttttcagctttactactcaggcggagccagagaggtgcttctattgcagtgcgtgggaccgcactgcaatgtaattagtcccgctagttctacagcgaataccgatcagttggatcgagactcagtcactgtttgtgatcaagtggattctcttgccattaataatggacccgagaccactggtgtcaccgagtttgtacaggaggcttgctctcagattgacgtgctaggtgcacatcacgtgcccgcgccgttatctggtcagagccagtttcaggacttgaaggcctatttctcccgaccacgtctcgttactaatggtaacgtcacaagtgtggggaggattgcggccatcaatgtcacgccgggcatcctgttggctacgctttttcccgatggggttaagcggttgacaggtgtgtatggcatccgtttcactttggtgtttacgctgcaggttgcggctacaccattccaccaaggtttgttagcattgaactggcagtatgaggttagttctaacactaacgaagcttatgtgcgcagtgtcaatagtgagactgccaccaatcttccccatgttagacttgacctcagtgtggacacg

SEQ ID NO: 2296 - DNA, 688 bp, Wenzhou channeled applesnail virus 3
  misc_feature 1..688: note = strain BHBei77067 hypothetical1
  source 1..688: mol_type = genomic DNA
gctcttccgatctccctggagaggtgtaattgtatctcttcagagtattttttggtgcgtgttcccgtagggtagtatactgtgaggttgctattcgtaggggcatgttaagaataatatatatattatcatgaggagttgtttaagccgtgtgttatcgggcttctttgaagtagtatattttctttgatttgatatgttacattttgaaagcgatcttttcgaatagtgatgtgcaaatatacagcaacgataatttacacctattttaattcttgtacgaagattttatcttcaattaagatggagtcagttaaacccaacagcctctaaagtttgaggaaaaagaacaaacgttggtgactgtgtcccatataattgtatttgattaatttaggaataatttggattgctagccttgtctgtggtacgttattggttttagcagcggccatgcagttttgaaaacacagatagtctaggcatctattagctgtagaatcttttgattcgagttgtattggcaatttttggttgacagccccctatcgtcctgggtaattgttcaatatgacgtgcaagtgtatgcaaagagccgattctatataagctcagctatgttaccccaagttgtacgcgatggtatcaaatccttgggagtaaaggaacagagagatagacttagttc

SEQ ID NO: 2297 - DNA, 690 bp, Astroviridae sp.
  misc_feature 1..690: note = isolate coa196ast2nc genomic sequence.1
  source 1..690: mol_type = genomic DNA
atcaaggtatacccttgatgaggagggttgatagtgtaccagactatattgaggcttatttgagagcccatgctgctgttgaagtgcgtctgcgtgacgctcttaaggaagtatctcacctgaaaatgcagctgatgattgctgataggaagaaagatcgggctgagaggaaagtagcaaatcttgaaacctggcgcagaataagaaatgctactttcctctcagcccgatctttcttcctatcagcaatcatcagctgcattttcaggtgagatacttccttaagagcgtcacgcagacgcacttcaacagcagcatgggctctcaaataagcctcaatatagtctggtacactatcaaccctcctcatcaagggtataccttgagagacaatcctgacttgaaaaaactcctcacctttcatggcataagccactgtgaggttctggagaaaaaccttgtcagttctcagcaattctttccagacattagtagtgccaatagcactcctccaaagagtaaagagattctgggttgctacgccagatatgacctttgaaaggccagctggtgtggaacgatccatctcctcttacgctttggaggagtgctattggcactactaatgtctggaaagaattgctgagaactgacaaggtttttctccagaacctcacagtggcttatgcc

SEQ ID NO: 2298 - DNA, 691 bp, Dicistroviridae sp.
  misc_feature 1..691: note = isolate sru103dic1 genomic sequence.1
  source 1..691: mol_type = genomic DNA
tagatacacgtcctacttatgtggctactcgtggtgcaggttgtttatcctgcaccacgagtagccacataagtaggacgtgtatctacggcactgacggactaattatgtgttgaggatatcgacggatagatttatgaaataatatatttctgacggcgatattgtcatacgaaatcccccataggcgttatctacggcactggcgaatatggactaaaaatgtttaccaaactgatcacttagagatccccaaccacacataaatacacttataaacgattgataacactataacaatttgtaggcaatattttattagaatttaagcataatgatgttagtaacctcatagtaacctagatatatttgtttgacaaatatcccacagttgagtgaaatcaacaatgggccgtttaggcaatgttatgagaactgaggcgttaaattttgacaaatacaatacctgacaagtcccttttggattgactaaatataagaatagtatcaatagtttttgaatttaaataagttattgtagatgaagacatgtatttcttgcaataacctctgtatttcttaaactatatgcaattactcggtggtacttgcatcttgatcgaagttaacctttattcttatattgctgtgtcggagcagtggtattggcgccggactaattaacataaac

SEQ ID NO: 2299 - DNA, 691 bp, Beihai picorna-like virus 11
  misc_feature 1..691: note = strain BHZY60905 hypothetical protein1
  source 1..691: mol_type = genomic DNA
tccctagggatgtatgaaaattatccttagggcttcaagccaaatcgaattggatgattatcgtcatcctctttgctttgtttaaagctataaaattctacgttaaaacatttgattctcatttttaaacgttttgagtttctacacactttattttactgccgtgcacagtataaaagcatgtttcagaccttagtaatgtggtctgtgtaatttacgacattgcatatcgtttcggatcaagtacgttaaatctctgttatgctaggtaccagagacaatatttgatcctttcttaaatcttaacatacgctagaatgttagatttgagttctaaatacaatagttttcagtgcggaacggaatccccctgaatgttatatcacgtccagaatagataaacccagcagtatggaagagtatcttagacctctgattataacagacagaacaattggtccaccccgagctgtattaacgcaacgtaccgcggctatgattgttacaataccgaatttatattccacgtttaggcattttaccaggatgtcaaggtagctgactgcacctaacttttttcgtggaccctatgttttcgtgaggtagaatctcatttttgacacatattttagactatttatagagatagtagataaacccttgacttagcacccaacgcttgttcctaatt

SEQ ID NO: 2300 - DNA, 692 bp, Picornavirales sp.
  misc_feature 1..692: note = isolate RtNn-PicoV/HuB2015-1 polyprotein gene,1
  source 1..692: mol_type = genomic DNA
tttgaaaggggctgggggatgtatccccatcccccagtgtgtatgccatactgcatagctcgcctatgccctatggattcacaaccctttcatataccctccctacccaaccccgtaaccacatgctttactccgcttggggttttgcggccccatgttgtgacgaaatggctacgcaatcaatgcggctaatggggcctgccgcttttaagtggccccagttagaagtttatgcacacccgcccattaggaggccaccagccaggtggtcagagggcaagcacttctgtttccccggtgaagtttgataagctgtgcccacggctgaagcagacagatccgttacccgcctcactactacgagacggctagtagtgtgtaatatccgaatttcattgatccgggtgttccccccacccagaaacgtgtgatgaggagcggcacccctcctatggcaacatagggcctctcctgcgctggcacacgggctctatgagcatgaaatcaggagaaagtcacacgaagaccttattgtgctagtgttgattcctccgcccccctgaatgcggctaatcccaactccggagcgcccgctggcaaacccgccagaagagcgtcgtaatgcgtaagtctggagcggaaccgactactttgggtgtggcgtgtttcctttatttcctttgtatttgtat

SEQ ID NO: 2301 - DNA, 692 bp, Wenzhou channeled applesnail virus 2
  misc_feature 1..692: note = strain WZFSL85846 hypothetical1
  source 1..692: mol_type = genomic DNA
ggtgtagggcctaaaaaccctacacctaattttatcatcatgtcgttgttatttatggacgcctgttgagagaagtattttatacgatggactcccgttgcgagaagataacccatgattttgtttcagatgtttggtttttagaccatacatttaattattttatgtgttttgtttttaatatgtgaaaagccccttagtattaaattgcaattaacaacataattcggcctttgggcttcttttatataaaataaataaaaatactcgttaccgaacggggtctttaaatagattgacaaactattttaagatgtataaaatcctactaacattgtgtagatacacgtacctattcgagagttgaagcagtgctattagatatgcagataaaagtgagggttgcgagctaataactcgtcctcatggccaaaagcatgcctctatcttttagcaatactgtgtatagtacttcagtataatgtgggcaagtgtattctgtcaaaacggtttaaacatatttgttccgtaacacaacaaatacaatttatgacgttggaaagcgttagtttccgagtttttctggaagcaagtttacttacaatcataaactgctaccattcaaaaatttttatttcatttatggtcacaatttaagattttagaaaagcgttcatatatttacatacaaa

SEQ ID NO: 2302 - DNA, 692 bp, Hubei virga-like virus 7
  misc_feature 1..692: note = strain QTM27262 hypothetical protein1
  source 1..692: mol_type = genomic DNA
aggctggatcaattaattaacaataatggttgctgctatgaaaactgctaacacaactagacgtatcgtacgtcgtactattcccgtcggtaaacctcgcagttcaccgactcgacccacggtacctgtcgttaatagtgttaaaaaacgagcgaccgaaccaattattccagtcacctcacttagttttagttcgttaaattcatatttttcatatgcttcaggtgttttgttaaacaccgaatttttattatattttattgtggctatgtttgctatttttaactatcattcaatgcctgaaaattcctacgttactaaaattgttagtaatatcttttctaaggccagtgcttatgataagtgtacgtataccacgtttattatggcttttataccatttattcctgtcattttaagcgtttctagtaatatgcgtattttatcggctattttatgcttcgcattttataaatttttccctgaaaaaacttattatgaatatttagtttttgctacgtgcatttatttagctgtaaaaacgaagaataaagtatatagatttatttctattatcttattagcatttttgtattttatacaatttgctttaccattccctacggacaatacacttacgtgtagagctcctgcatcgaaaccaaattagaatgtaagataatagttaagtt

SEQ ID NO: 2303 - DNA, 693 bp, Riboviria sp.
  misc_feature 1..693: note = isolate rob114pic1 genomic sequence.1
  source 1..693: mol_type = genomic DNA
tttaacggtccgacagaccgatatgtatcgcagctcttttacaaactggaaaactgctcttttgcatactaggatgaaactgtggatcacgtttgtcaaggttacggccccatacactcctgatttccgagcctcttatgcagaatcaagtcccttttgtagaacctgacgtacaatgtcaaccccaaaacccaaactttttgtttttgttttgtcctctttataaagaagattgttgtggcttataaaccgcaggttttcttttagatgacagaatacgctgagaaaacatagacttttggtagtaggacctccgaaccctttatgtttatgcactactctgaataacgtattaatattttgttaatcatctaacacactgatctcgtgtagatccttgcgcatttggttagtaaattattgatacctattcaccccataagcgtatgccccgaatgaatttagaccagaattttaacgactattggaatatatgaattgacggataccagataatgattattgtcagcgagaccttgtagcagaacgcgactgctaatatgaatctggagtacggatgtttttatgactcaaacagttttctcaaaactgagagtaggatggatttccgacctcggcaggtaaagcttctaggcctgaccgttgcatcactgaagcagccaatgtatcaca

SEQ ID NO: 2304 - DNA, 695 bp, Changjiang crawfish virus 2
  misc_feature 1..695: note = strain CJLX30764 hypothetical protein 11
  source 1..695: mol_type = genomic DNA
ctcccggtaaatatatatacacagttaatagaactaactgtgtattatgtttgcctggaacgagggcagtatcccaagtagtgtggtaaccatttagcggtcccagcccacgctgtctcgtggtagaaaatgggtaactttttagggaagggtaaatccatccggtcatataattcacgcctttcaatgacatttgccaggtcacgctgattacagaagaccggtttaagaatagtttattgaggacatccatcattcaatgttcagtactataacctctcctctgaagacagagcgaaagttatggattgtttattgtatagtaaagttttgcgtgagtttgcatgcaaagcgtccccgtattattattcacaatcccagtggagggattgttagtcatcacttccacccatgcgattcgtgtgtggaaggtccaggagagtgcatcgtagacagctggtggcaatatacgtaagaccaccatgtcgcacgctgtagtggcgtgatcatccttagttaattgatgctttcatcttaacttccggtatgggccacttaccgttcatccattcataggtttcccgatataacatagtttgaacgccttttcaacacgatctactagcatcttcagtgggtaacaccctggagggaaaactagagaagccgttaacaattgaaaagattagtagact

SEQ ID NO: 2305 - DNA, 696 bp, Hubei picorna-like virus 51
  misc_feature 1..696: note = strain QTM27291 hypothetical protein 12
  source 1..696: mol_type = genomic DNA
atatttaaacgaaacgtaattaatgcgacaaacattagttaaaacgttgaaattctttcctttgtcactcgtcattgaaccccttaattctttgttattacttttaaatcatcatttcacccctctaaattttcaggttgaacgcgtttaggtaagtctggacaaccgattatgtgagacgtaactgccctcatgtaatttgtgcttgtcttcggcccctatcctgcaactacctttatcttattatcaaagtctttagtcaattcctgcgtacacctccaaagggtgccttagtgcagacgagatctgtttacgttcgagaacaaccatgtacttgggattttccgcctaataacgtaacaagagatcgctaaagatagagaaataaggtataaatgagatagtaataatatatgaaattaagcttagtaaatggataccgcgagatgcctatatctataaataggagaagcttagtggaaaacggcttataatagttttctgacaccccaatagaattggtgttaaaataattctatacactttttggatatagtgttaaaacaatcctctcattccacactgaaagtggaattcaaatactttcagacactgtttttataatttcgtgtaaaacaaaaattataacactttgtgaagtagtgttaaaataattctcaaaaacccaatgacaaa

SEQ ID NO: 2306 - DNA, 698 bp, Changjiang tombus-like virus 1
  misc_feature 1..698: note = strain CJLX26263 hypothetical1
  source 1..698: mol_type = genomic DNA
cgccaatatttcgtcgcctgtcttgcgttaagatgatgcttcagttgttggtctgcttgagtgtcgttggtctaactgcttggctgtgtgattatttgtttcaggtttatgatggggtacgcaggtggattcgggtacgacgtcgtgtcgccaatgttgtccgtaaggtcaacaatgacgttctcgaggttatagctaccgtggaagctgacattgcggctgatatcgatgcgtctactgctagtgctgtagatgatgaggtaattgaccgcactgtagttaaaaagcggaaggttaacaataaacaccgcgcatcccatttccgttcgtggttggttcgtatggcaaaagcaaaattcggacgggtccatgagactgaggctaacagactttgtgttcggaaatatttgtatgatctttgtgttgagcacggcgtggttgtgcgtcatatagcagagaatatagatttcgcgaccgcattagtttttgtcccaatgtcttatgagattgaagctctggcagttaaacacaccactgaggtgatggatcttaaagcgattgctgagcggttgcagccgctcggtcgatgtgcttgatggggccccgagaaaagggaggggatagacactaagccttctgtttatcccggcatcactcccaaattttcggggaaggcccgtccacgcaaatatctgact

SEQ ID NO: 2307 - DNA, 699 bp, Picornavirales sp.
  misc_feature 1..699: note = isolate H4_Bulk_Litter_22_scaffold_61
  source 1..699: mol_type = genomic DNA
gttttgtgggttatcccccactttatgaatgtcactgattttgtattttatgatttcatagattagaatatcttgtacagacactcatatttatttatctacttcccgcgttctgcggttgctcttaaataaattaaattgagcagttttatatattgatatgatgaattgttaggttccccatgtggaataaacaagaatttgtattctaaagatttagtatttcgaaagattgaagcgtcctaatattttaaagtgctcgctattacacaagcgttgttatggtgtaaatagtaaacggtatagttgatgtagcccggtttgcagccgccctataatttgctatatgtcagacaaacgcgatcgtattgtataacctcctttgatgatattaacgattgaacatttcgtatgaagctggacttaccaccagaacttggatttcagaatgattaacgactttcggcttttgctgggagttgctccaaggaagagttcttccgatttgaacatgcccgagaataaatcattggcgttgtgcattatttggcgattctaataacggtttactgaacgatgtaggaatttagttgttgtaatgttgaacgtattattcacttacacctatttctgggcatcctttatggaaaacggagtcaatacccgacttgtattagaacaggggaggcacttgctaat

SEQ ID NO: 2308 - DNA, 699 bp, Robinvale bee virus 7
  misc_feature 1..699: note = isolate VN1-35 nonstructural polyprotein1
  source 1..699: mol_type = genomic DNA
tgtggttaacaccacatgcttgatttgtttggccggaagccagacttgatttcaatttgcgttcattcgcacctggatgccatttgatgacaataacttgcgtgcgtttacgggcgtacgtatagacattaacatcgaaacatcttgtggctcataaccacactgaaattcaattctaacctgacaagatgaaagtatctatccccccctttttgttttgtatatgtacctgatggggcgatgtagccccatttatatttcattgatcgaggaataaataccaaaatatcatcactcgacaaaaaaggagtttggtcactgcccctttagtttcaatccgttctggtaataaactattgataatactccacaaagaaaatacaagaaaaagaaaagtgttttgagaagatgctagtaatttacccttgattaagatcattagtgtgtggtgttaagcacccactagataagcagagtcattctctgtaatcgttttgaacccttcgtcatcgattttgactagtaaaactatcaattcaggtcgtaaactcgactaggtctgtaccgccattccgaagaatatggcgggtatgccccacaacagagggatgaacaaaatatctaaccacaaaccagacacaacctacgatagactcaccaaacgcgcacacaacgatttgccccatatcagcacatatc

SEQ ID NO: 2309 - DNA, 701 bp, Beihai picorna-like virus 19
  misc_feature 1..701: note = strain BHJJX24523 hypothetical protein1
  source 1..701: mol_type = genomic DNA
ttcacggacattcttttattcttcgctgcttgtgagaaaggagcagcaagtcttatggttacttctcatttgtcaatggctaaatgccatgagtgtcatttgtataagtagaaactttatatttatatgtttataagagaacgattacccaggtttgcaaaagctatcaaaccccctctcgttgggagagggtcttcagttaagcgatttctatgaatttgcgatcgtcctgaagaggaagtgaccttcaataacatttgtcagtgtaaaagtaaacatctttttagtgcgtgtgcgttcacaacgtatgggcaagtagaccttgcgttttgacagcaaccttattgtggattgcctactagattacatatgtttacctattgaaatgcctctttggaatatacgagaccattggattacaatgagtttctctgaatgagtgcggaggatggaagagtgagtattgaactacaatgtacgaaatcatggtactataggatttccgatcagtcaatatgtcactaatggacctgctgaacacagggtataaaatgttctgagtggtgtaaagctgcaaccacgaaaaaccatgtcgggtttgtactaaaacagcagtagtaggaaagcactgaccggtgcagttcccccggagggtaacaccccggagacacctcgagtaatgtcgagagtgtgccgacctt

SEQ ID NO: 2310 - DNA, 704 bp, Miniopterus picornavirus 2
  misc_feature 1..704: note = strain Henan-Ms56-2 polyprotein gene,1
  source 1..704: mol_type = genomic DNA
tggcccttcccttcccctttcatgattcccttggatttgactcggattgtttgactacccttcttcttaccacattggccctagcggccaccggactgacctactcccatggcaagctgaacgccttcgcagcggaggtcccttcttcggatacggttgaccactgcataagtcgcgggcccaagtgagcttttggactgacccattttgttttctggactgccaccgccaagaattgcggagcagctctgtgtagagagatccttcctttaggccgaccccgtgtcccagcacggtagtaggactattggagtgctttgcacatctgcgcctagtgtcagatgagccagtggtgtcacaggaaaacgggacgcgattcgctatccctaagcatccctcttcggaggtaaagcgcctgtggcatacggtgggatcgtgccttcactcgagggccgggaaacccaccctggactggtgcagcttgacagagtgtcggccggcactctggcactagtagccggttgttctgggatatgctgttctcttacctctcctccttcaaatcctcctctcataccttcccccaggctttttcaaaagccccctcccacagagtcctctcttggattctctctcaaggagcccctcaccaccgtggctcctacctgcatgcaaccctgccctataacatttatgagcaggac

SEQ ID NO: 2311 - DNA, 705 bp, Rhizoctonia solani mitovirus 15
  misc_feature 1..705: note = isolate K-IL-s02-3-25b1
  source 1..705: mol_type = genomic DNA
gtaacaacggaaaacgaactcaaaatcttgagttcagctcttgtgagcactaatttggtatttatactaggttacgcttatgggagttcccacaagtaaagtagcgtcgacgattacactgttgacgggacccgtctctggcgttgagagggcccgggggcaacctcgggggaaaccgaagtcactttctcttgaatgagaatgatagaggcatttcaacatccagaacgtaagtccgatggcaagcgccatcagtcctacgaaatgctgcggccccctgctttgcaggggaaaccgaagtttaattttaaacttaccgtataaaacggtagtttgtacgtttgtcaagttgaaattaagtaggatcaatatatatctcctagaacttgatatttatgttcccgcaagtatggcgcttagtttcctttgtaggaaagtaattcctattcccagaccatttggtcttcgaggttataggttatccgtagggactaagttaaagtcataccaggggtatcaagatggagttttaataaaaggctgagacgccgcttcccgtgagggatgacgcatcaggaatgcccgtgagtagaccccggaccggtgtaatacggtaccgtagtggctgaaagagccatatctacgaatctcctctcgaaagaggggagaaacggaaactatctgagtgctccttatatatataac

SEQ ID NO: 2312 - DNA, 705 bp, Potato virus M
  misc_feature 1..705: note = isolate PVM-352, complete genome.1
  source 1..705: mol_type = genomic DNA
ttagtgtagcttaggtattgctattgtattgaatatttatggatgtgattgtagatttgttgtataaatacaagtttgagcgtttaagtaataagttagtgtgccctatagtcgttcactgtgtgcctggggctggcaagagtagcttaattcgcgagttgttagaattagatagtcgcttctgtgcatacacagctggtgtagaggaccagccaaggttgagcgggaattggatcaggaagtagagcgggcaacaaccggaaggcaaatttgtggttctggacgagtacactctgttgactgaagtgcccccggtatttgcattgttcggtgaccccatacaatcgaacacaagcgccgttcagcgtgctgactttgtgtgctcagtgagtagaagattcggcagtgccacgtgcgggctgttgcgagagttgggctggaacgttcgaagtgaaaaggctgacctggtgcaagtatctgacatatacacaaaagaacccctgggcaaagttgtgttcttcgaggaggaagtgggttgcttgctgagatcacacggggtggaagcattgagcttgcaggaaataacaggccaaactttcgaggtggtaacgttcgtgacttcagagaattctccagtgatcaatcgagcggctgcctatcagtgcatgacaaggcatcgaacggctctgcacatcttgtgtcctg

SEQ ID NO: 2313 - DNA, 705 bp, Beihai shrimp virus 3
  misc_feature 1..705: note = strain BHBJDX18821 hypothetical protein1
  source 1..705: mol_type = genomic DNA
aggggcgagcagatccattctgtggatctgcaccccaatatactctcttcaggtcatctgactcatgtcacaaagtcagagctgacctgggagggtgatcagctggtcgacagcgaggggcgcaaatcacaacagctaacaatacacacaagaacaacaacagacacaagcggtgaggtgacaattaaacaggaagatgcaggatttgaagacgtgagtgtgctccaagcggtagcgaccacgctggacaacaatggtgacgatgggagcgatgacatcatcagcattgaagaagccagtcccagcagtgacactgaggacaggccagtagaaccacaggctgaggaagaggaagatcaggatgtggtcgttggagttgaagaagaggaagagcctgtggcagaagactgggcagcagaggtagaggcagctgaagaagaagaactaatagagctggcagtcgaggcagaaagtggccttgccagtaagacagtattcaacacagagggcatcaagaaagttgacaaactcactgtgttgaacactgtctccacattctaccacctcaacagagacggccacacatacccagcagcacaagtgacatttagctttaaggatttcagcagatttcctgacaagaactacactgaggtgaaggctaagggcttgcctacattgacagtggctgtgcttccagcagaa

SEQ ID NO: 2314 - DNA, 706 bp, Bat iflavirus
  misc_feature 1..706: note = clone Bat/CAM/IfaV-P17/2013 polyprotein gene,1
  source 1..706: mol_type = genomic DNA
ggaccgtactttgtcgacgttttgaacgatgacgaatcggtatacgcttcggtacctattgttgcaagttcgttccctattttcgatttgcctgcccgaatttgactcaaacaattgtgacatactatgtctctgtttgaaagcactacacgagtttgcgcccagcatgtatgttttcaagtcttttgtataagtctgcctctatagtggttttctttgaccttaaagccttgtcaaccatcctatatgctgcatcgagacttgatgtcaatctgcctctactacgcaaatgtctagtaattagttataaggttttactattttccctcatttccaattttagtttgtagtgtatgtgagtatcattcttactccgactgttaagagaaaccaatttatagtcgttaaatatgataaatggaatgaatgatggtgtcattttaaaaacactcttctctataggcgtaagcattctcgctcttagagtcgtaaagaagaaatgccgtgtctatcagtatgttatgcgatttattttctgccacgcgcttctagtgcaatctagttgacatacagacattgcctaccactcgcgagggtcgaccggtagtgtaaggagtaagtgatgatttccgcttattctgtaccctttgcctggtgaggacagatcctgactaattttaaatataaatgaacactagcttccaag

SEQ ID NO: 2315 - DNA, 706 bp, Shahe heteroptera virus 4
  misc_feature 1..706: note = strain SHWC01c2975 hypothetical protein 11
  source 1..706: mol_type = genomic DNA
atgcatgtatatttttattcatatgtagcattatagaatgtaacacatatgcttatgaatcgagtaaaatcggtcacggcgtcactgtggtaaaattttaataatgttgcaaaaattttttagattacatgcgaccaaattaatatatggttttttacaataggttgacctcctattgtatgacgaatttttacaaaattcatttggtttaataatagataaattaaattaggaacgcgatttttaaaatggtatgtttaatcgaaagactaacacgtgagtaccgaaaggaaagactcatctgaacctaatcgattaaacgcttaatgaaatatatttaactcagttgttgttaccacaatgcaacaattgttataatcaacaaatacatcactaccgtggtttttaggtagtaaagcagtttcgattgcagactgtattgttttctttaggttaagagagtttatacactctcaaaacttggatggtttctttttgaagaaacgaatccaatccttaaaagatgtcatagccgtagtaagctaacgcacgatatttatatcctgttagattataccatcggctttatatgataagtacctgaagttagttaccgtgtaactaacgtccagactagtatcatataaaggcctgtataagcatgctgaagcgcttataagtgaatattttaagatcaatgtgaaat

SEQ ID NO: 2316 - DNA, 707 bp, Xincheng Mosquito Virus
  misc_feature 1..707: note = strain XC1-6 ORF1 (ORF1), ORF2 (ORF2),1
  source 1..707: mol_type = genomic DNA
acctattttactcatcattttacagcggtgtttataggtcgcttaatcaaaacttattcaatcaactttttgattaatttctttctttcattttctttaataaaacccgccggtcatggaacaaaataacttgagcgcattggagacattttataaatatattgaagaagtctttgtgctatctgggattcaaggatttgtgacagctgttttaggctatattcaagataattggcaaaggggaggtctgattgcaggttctgattctgattcctgcaatccattttggatctcccccgtaattagaaatcaagacgagtcaagagtgactgaaattgttagtgaatattcgagtcccggaagaaatctggtcgccatgctggttaaaaggaccgtgacaaaggaaattgatagtgttagttttatattaggatttttggctgctgtagtcttggtaatcgcctacattctgataaggatggcaatccaaaagatatgtgacaaaattaagggtaaggctagggatttcattaatagttgtataaggagtcatagggcaaatgttttagcccaatatgcagttgaaaaaggagatcaacaggatctttagaaaaaccctccggtcaaacaacaagtgatttgatagcagttagcagagatttagcaaacgacagatcaaaagttacttcaacagaagaagagttaat

SEQ ID NO: 2317 - DNA, 707 bp, Xinzhou nematode virus 2
  misc_feature 1..707: note = strain XZSJSC33555 hypothetical protein 11
  source 1..707: mol_type = genomic DNA
acaaaatgccccctcacttccggccgatatttggcgaatagtctcatgactactgcataggtcttcgtacctggaggattcgtgtagacagccctattattttcctacgggactatagtcgggtgttcgccggtatgggttatgagtttcaataaaccctatttaactgtctcttaaagactttatcttttcattctgaaatcccttaaggatttattgcaacacctgcatcatttgttttggacggacgccgaaagaaacaaaatgttgctgtcgcatggcaaaggactctgatagtcgtttgaagggcttctccggtatgaagccttcgaagtagccaacagcattgtggaagtttggggtcgcgcccaggtggaagcagttgcaagtcctacgatgacgtcctctctcacttgtaaatattgaggcatgtcttcttacgacttgttcgtctaccataagctactgcgtaatcggtttgtgatgggggtcacttactgtagcaggataaacgtgtgatatataatttaccgtatgttttgatctttccttggcggaagcggttaacccgtcattgtatgtaaccacgacttaacaaaatttcacttaagaaagaaagtcgtaccggaaaacgcacccccttgtttttgtgtagccctgccgaacgccgccatttgtggtatcgtcagtggcaaaataagaagaaa

SEQ ID NO: 2318 - DNA, 708 bp, Bat Paramyxovirus
  misc_feature 1..708: note = Eid_hel/GH-M74a/GHA/2009, complete genome.3
  source 1..708: mol_type = genomic DNA
caaagatcagtatggtcacctgagcccatcctccacacattcccacgactcctgagtctcgaccccgaagggcagaaatcacaactgacacgaaccccaaaagacaaaaaaagcaacctagctcacatctcaacccgctcactaaacaatctcaattgactgaacgctacatctccaatagattgcgataagccttgctaaccagtttatcaaacagctttgggaattttactctaaatctgaacttttggtcaactaaccgaatattaatctctcaaactatcatattaagggttaatcttgactaaacaaaacttaggaaatcagggcttatccgaaaaagacaaccaacagacgccgaaaatcaacacacacaaggaccaaccacagagaaaagaagaagcaacaaacacaggagagacccccaagccaccaccagaaacaccacatccaaggcacccccaccccccaacaccccacgccacagcccgtccacagaaagctccgacggcccggagacccccaggaacccggaaaccacacaaagaaacaggaccatcggcactcccagagagaccgaaaagaagatcggcgaccaagttcgaaggaaaagcgagacatccaaagaacccgagaaacaaaacaattcgactcacagcaagctcagtcagcaagcaatatcccaggaaacaaccctggtacagcaca

SEQ ID NO: 2319 - DNA, 708 bp, Beihai octopus viurs 2
  misc_feature 1..708: note = strain BHZY60909 hypothetical protein gene,1
  source 1..708: mol_type = genomic DNA
gaaacacctagggtgcttccctaggtgttgtttttgctttctttatagctttgacgttatggatatcctacttgtacgtatccatatcctcttagtatctttctttcggcaaagacactcttttacccgttgctttttccttctttgtaagaaattagtttgcggagttattactaccagaatctgattttggctctgtagctctgtaaccttttatgcttacccttacgaacttggactagtcttctgattatgagcttgcctatcgattaattaagacgatcttatattctctttagaaactgacttgtcttcggtcagtggaactatcaacctctaaaagaaccattcatggaccctttctatgttttgctccccttaggtatctccgaggagtgctgggaaatcttcataggaaatgctaacagaatgtctagtaactgaacaaatactactctaactttattgttcaacaaactctatataaggaagtggttattatatagttttatgtcggtggctccaccggaaaaccatgtacgcgcttagacttagaaatctacttgattcgtcatttagatagtatagacttaagaaatgcgggctgatatgcgctgaagtcatatcgctcaaagtgttcaccgagcatagtagtgaacacgggtgctgctttccctgtaagcaggttttcaaaacccctctatttat

SEQ ID NO: 2320 - DNA, 708 bp, Changjiang tombus-like virus 14
  misc_feature 1..708: note = strain CJLX30318 hypothetical1
  source 1..708: mol_type = genomic DNA
atgaccgtaaactgcacatcctaactcatggcgattcaacaacttgtacaggcgacttttgtcgttggtattgctcaatcgtgcatcatcaaaccgtttctggcttggaggcgtcgcagaagggctctgattctggatgccaaggatgatttgaacgtgttgaattcaccatccacccttaagactcccttgaatgccttcactgaggtgcattcgcattccatccgtcgtggtgttgcacctgaggtgtcggagatgacgacaatcaggagacggcagcacaaaaccttttgtgcgaagtgggcccgggccgccaaggttcggttcctctttgtacagatgtgtcaggacactccccttaacaggggggctgttcacaggtggttgttgggacagtggcgcgagacgtatcggacgcagattggtagtgatctgcacaagatggatgtgttccttcgggacactatagagatggcgttcttgcccactgatgaatgcgtggcccaggacaagaagtccagtagggaggtgaagaagcaggcacgcatggagttttataatgagaggaagtttgtggagggatggaaatagggatgcctggtgcaagttcctggttatgatagcagacccgttatagataacataccaggggtaagggtgcgagcactggatgatgataagggtcagaagaaggagcggttcgttgtc

SEQ ID NO: 2321 - DNA, 708 bp, Beihai sobemo-like virus 1
  misc_feature 1..708: note = strain HWRTX12503 hypothetical protein 11
  source 1..708: mol_type = genomic DNA
ccgcgcccggcatgtttatggctttgacgaagatgagttcgagtccaatggccgaaccattatagtccacgacagtaagatctcaggcgatcgcgctctgcgccgccaggagaatgagcgtatggctgacatcgccgcacaacggaaagctctgctgcgcactcgtgatcagattgcgagtgagcgccgtgagcttgaacgtcaaactcgctcatatagggaaaatctccaacggaaacgggaggcgcttaaagaggctcaaattgaagcccaacggcgcctcaaagaactgaaggaggccaagactgctttcctcaaagagcatgaggccaaagcagccgagctggaccgagctattaatgccatgtccagctcactccctagtgaaagcaaagaccatacgcatgaggattttcggcggaggctgtcaccgggccagcccgagccagaaagtccggtgaagggaaagaaagttacatttcaatcccagggccagcacgatacgaagaactcgaaacctatcgaaactactcaggaatccactggctcgaaagcaccccccagctcatcggaaccgaaacgccctccgttgaagcaccactcacctgggtcggaaactggaaaactaccgcgccgccggaaaaggcgccgcgcggcttcgaaccggaagaagcaataaaagtccttccgggactttccggttatgtc

SEQ ID NO: 2322 - DNA, 711 bp, Ceratobasidium endornavirus B
  misc_feature 1..711: note = isolate Murdoch-2 polyprotein and1
  source 1..711: mol_type = genomic DNA
accccaccaataggcgctgaaggccaactaaagcatcaaacattaatcgcatactatctgagaaggctcaaatctaaggctaaaggagaaccaaggctcgaagaaataatttctaaatatgaatttgagcaaaaacaaaatttgacacatacaataacaacaagtggaaaatataacttaagtggaattatacctattaaaaacaattatggaatattactagataaaggcacaattataacttacatacgggaacaagaatgttgggtattaacgcataaaccagtaacaacccactttattggcgataacgatggaaatatagccaaccaatcgagacaaggtagttatgaattaagaaataaggataaatcaaaataccaacatattccagctgaacctgtcattaagaacaccttgacaaaagataaattaagacaactattagaaaaaaaatatacctataaaacaaaaatagccccacacaaattagattacactactttaacagatggacatataaatgaagaatggaaaaaatttttattggatgcttatgatgactgttcgtttatacctgacaatgggaaaatagccgtgtatgggatcataccaggccagttagatagggacccaggtgatgaagattactcaatatggatatgtggtgccaaaccagatggaagacacaaccgaatcaatgacatagtt

SEQ ID NO: 2323 - DNA, 711 bp, Sclerotinia sclerotiorum umbra-like virus 2
  misc_feature 1..711: note = isolate BCS2_DN31091
  source 1..711: mol_type = genomic DNA
atgtgcggtggcaattttccctgtcgtgcgctacgacattaaagacgcgtatggagagaccagttgtgccaaggcaaaatgtctgtaaactttggtaacttggacgtgaatcccctaattaacgatacaaagctggggcgtccacacaccatggggcggagccgttcattcggaaagatggtagagggccaattccctcgcatgcagcgcccatgttcaaacggcgtggtggcggttggccaacaccccttcatcgggatgttggtgcccccaacatatggctaagggggggccaacgtgctaatcccagcggtaaattctcgggattgactagggagagaccaagactgatggaaagacatcaaacgaggtgattgaacctgaccgggagagagttcccatgactggccaagcgcgcgtgggcgggacaaccacgcgtacaatattgtcccacgcttatgaggcgtctaataagtgtgtaaggtaagacgagtttcgaggtcgttggcgacccgagatttatgcttaagacgtgtttcgaggtcgttagcggccttgagtacccgctctggttggaattgcctggagggtaaatacgcattcctggctctggaaagacagaatcttgactgctggaaagacagcggcgttgtctggcgcttaaggggcagccccccacagggtgtggtggacgacaccagatgatttagt

SEQ ID NO: 2324 - DNA, 711 bp, Forsythia suspensa marnavirus
  misc_feature 1..711: note = strain pt110-mar-6, complete genome.1
  source 1..711: mol_type = genomic DNA
aagtgtgtacaatcggtttgttaaccaattatacatacattattactaggggtggtaaaacaccctagcatggttatagccgaccatgtgccctctccttccaattagtgtaggatgaagcggacctactgttaaatcaacaacggactggtggctctttggactgtataagtaagcgacagcatgcaacgtgcagtggacaaagatccatgtaacacgttgtcataccggtgagcttagaaagaggatattggcaatcccgcgggacgcgcggaaataaattcgttccaccccaacccacgttttgcatattgttagtgttgtgagtaaaccagaaaactctcttatatgggagcatcgcttatagagcgactccggaaacttaaaacaaacagattgcggccaaaacttaaataacttgtatattcaagccaataagatctggaatagtgggcaaagccattaactttggaaatgatctctaggagtaacagcatggtacctatccgaatcgtacaggtagtgccgacgttaaaccatgtttggtcggagtaatgaaccgatctcctttagtgattgtccttagtgaaaactttgtgctaggctgtaactcagctagccggaacccccccggtgaacgaaataggggtgggaaagggacgcaggaaccctgaaaagaaactgcacacgaatcagatacaaacgaataca

SEQ ID NO: 2325 - DNA, 712 bp, Picornavirales sp.
  misc_feature 1..712: note = isolate rfb199shi3 genomic sequence.1
  source 1..712: mol_type = genomic DNA
tattggagcagccgcaactttgggagcatcattgggagcagcgtctatacaatccaacacagctaaagagaccaataccactaatttaaatttccagcgagatgtcattagtcagggtgagaagtcttttacggatgctggactaccaaaattcatgtattatggaggacaatcagcaactcagccaaacaccctcttgcaccttggtggatctaatttctatgaacaatcgggtgttaacgcgaatttgccacatttcactacgggaggttattctcaatggaaccatactggaacaactcagcaacttggtaaaaactcagctagaactaactcagtacttgacggtgcgcctcacctctacaacagctttgtcagggaaggagagactgggcccccacgccttggatatggtgattggacagttgtcccacacccgacagcgtactctgatcagtcgattcagacggatagagcgatcacgtctaacttctctggcggccccgctaagccgacaagaaatacaggcacaaattttacgtcaactccaatgtctcaacgttcaagctataatagccctggaaggtcttcagaaccgccaatgtctgaagcagatatcgttaaaggattgtatgctatgagaataaggtaacgtacctcggctttcgccttcacgttcgcaaatgcattagccatagaaaattatatagtc

SEQ ID NO: 2326 - DNA, 714 bp, Beihai picorna-like virus 8
  misc_feature 1..714: note = strain BHNXC41454 hypothetical protein1
  source 1..714: mol_type = genomic DNA
gcggctagttgccgcacgctttgtagtagtatttgtacgttataattatcaggttagaagagtactaatactactctctaatctcacatttaactatagatgattacactcaaaaattatatttcatacgtccaagcacgatacgcttacacatacgctttaggttaagaccgtaccatcttaacctttatttcttttggtacttggttactatgtacccgtaattcactagacaatggtctagcacataacaaatcgtcaacttagagagcgttacgtttgctcatgctgatcacataagcatccactctcaagtttttatttaccacgtcatcaataagattgacatcgattcttttctaaacgactgttttgtattgcgaaaagtcatcccaccaacttataaaccctgaatttatagatcacacccgcagtagggttgaacgtgatctttttcattttatttgttggaacaatcgggacttttcggttgcattaatccgacgaactggaacaagttaacaatatatcgtttttgcaagtataatttcaggtagtctacaccgggctactagggttgttcgcagcacccgtcctttaaatacctctgactaacgattgagatagactagaactatgtccataatttggtaactgacttgttgaataataaaatcttttgatcaaacccccagacttgttttcaaaataatc

SEQ ID NO: 2327 - DNA, 715 bp, unidentified
  source 1..715: mol_type = unassigned DNA; note = DsRNA virus environmental sample clone mill.culi_contig891 sequence
ccgggccccggcttatcttcccacaacgctctcgcatagtgatactataggttagctatgcgggagtgacaggcttgcaaacgtggggttacgcaagttgggcctaggtaccccttggggtgcctaggtctgggcgggagccaagccacggcagtaatgtcgtggcgcgattttctaggagattcctagagtctcctagaactgacttacatctttttataaacttcttgatggcaataccccattaatctcccaatattataaactctatagagtttctttgagagtttgcgtatgtataacgcaaggtttctctctaatgcgttgggtttggtcggtattgcgtcaataagtttataataactggtctgtcagcccgttctgattttgtcctgtgttcttcctactctttgctttgtgtgttttatttaaagccgactgtatgaatgtaagcttatttctaagcttgcaggccaaaatcgtcagcaaggggttgatagccttgcgatagggcgtgctaagtgtgggaaaccactaaatgccgagagactgcaacggccgtaattcatatggtgcacagtcctcacctactggcgggtagctccggcttataacaccagttctgtgctatctttggatatttggaagtattttggaagtgattcgatttgtgaaagtaaaagtttggaagttctttggaagttttcgaaagcgt

SEQ ID NO: 2328 - DNA, 716 bp, Heterobasidion mitovirus 3
  misc_feature 1..716: note = isolate HetMV3-an1 RNA-dependent RNA1
  source 1..716: mol_type = genomic DNA
ggggtagactctcgtaaagagagcctatcacgtccaaagactaggacgtagatgatcagattcatcgtaatgtgacatcgccgtaacgcaaggctacggaaaggaatgccgagagaataacttactctctgcaacccttagtgtaaggagtgtgtcgttgggtgttttctgaatacctaagagtagaactcttatgttaagatctcagccagggttagtaacctggtgagcaatcgaagcataagtgttcccacttatagtactcctgttctcctccataattgccgtcaaaagcaagaaagagtgcaaaacagaaccgtactagacgtccccgcactgcctacgcgatctgtagaaggtaccattggaggtccttccggggcggaatttcaccgctagtgaacgaaacgatttcgatcgttctctgaaactgtgtgcgatttccattaaaatcagtaaacaacgtataattattaacgatacttgctgatggacggataatccactgtaaaccttaaaggtaccttatggtatatcaggttaaaaactgatgaaggggtaaagcaattcaccccaatccataaggaggtctacctgactctcctagagtagctgcggccccttgaagtgatgtagaaatatataacttcttaaccttcgtgagggaaaccgactttgacacgaccaaacttgaggcaacctacaattttaaattt

SEQ ID NO: 2329 - DNA, 716 bp, Riboviria sp.
  misc_feature 1..716: note = isolate cfe153shi01 genomic sequence.1
  source 1..716: mol_type = genomic DNA
tagaatatacaaaatatcttcccttagctgtagtaacaagatatgctgagcctataagggtaacaacatttgctgctagagaagtgcacaaacaagtggagaggagtgtagggctcaggttaagagccttcaacagattagctgtgaaagcatccccaacctgggctataaccccagttgagggtccagcttttgattgtaccggcatattgccgaaaatacaaaagcacaaaaacgataacgatacacgtaatacgtatattcgtttttgtgcttttctcaaaagtacagcttgtttacgcgattttctcaaaatcgcattgttttcgcgcttttctcaaaagtgcatctgtttattcgattttctcaaaatcgaatttgtttatacttttctcaaaagtaattttattttatagatttcttcaaaatctatatttgttttatcacttttatcaaaagtgaatccgtttattagattttctcaaaatctaacattctatcatatttataaaatatttaaattttcctggcttcttcaaaaccaggaacttttgttggatattttgtccaacacattattattaaattattttaacacaagtattaggttttacctgatatatgtaaatattttagcgctttttataaaagcacacagtttacatacttggactattcgcataaggatttgccaagtattaagtattttcggcaat

SEQ ID NO: 2330 - DNA, 716 bp, Wenling picorna-like virus 2
  misc_feature 1..716: note = strain WLJQ104117 hypothetical protein1
  source 1..716: mol_type = genomic DNA
gggaaaacccctccgtgcaaagtaacgctcctcaaggttcgtctgcgactaagcccaatgaactgtataaacccttgaagttactttgtgcaacatagtgtatttctcacgtgctttatttaacttcaactcttctgtattatcagacgcaagcgtagattgataatacttatcgagttgtcgaacacctctgatttatgaacgatctcagttgtaatagagagaacatttattgtattagaggccatatttattgtgatgctagtaataatcacttcattttgaatgtgtaaagactgctgctgcttctaatttatttgctctataggggtcatcccatcctatagcataaattatttgtggaaattgagttagtaataacacagccgctctgctagtatcactctatctatggtcctattacaatacttgctatcttagttcaacctctacattccggcagagtgtagttgtaactcaatccagcggctcgaccccgttggatgccactttataggcgacgcctagtaaaacctgtgaagaccttgggtcgatcagagctcccaatgtggatacattttaacagaccaagcaattcaagcaaagggctcacttatgtgaaaatacctccttgttttgtggctccaagtggatcatgagcccccactagaatgtagatcataagtagtgtactgatcactgaccctgtctgagga

SEQ ID NO: 2331 - DNA, 717 bp, Wenling yellow goosefish hantavirus
  misc_feature 1..717: note = strain XQTMS34106 segment S,1
  source 1..717: mol_type = genomic DNA
cccagaaaactaattgcaaactcaaaacctcaatctacatgaagccgacagtgacactcttaaactggttgtcaaaagctaaacttggggcaaacgcagcaagcaacgaagaattctttgttgtcctctgcttttggcacggttacaaggcgattgggaacgaaagtgttgttagctggtggagaggtgcagttaacgaagggaggccacaagaggagaaagtgagcgaagcagagtttgacgaagcgattgaggctgagagtccattaaggaacatacagataaccagaggcggaccaagtggtgaaatcctgtaccttgcgacatctgaagagacagttttgtttaatcagcaactgtctgatcaggggtttgattgtgcaagttgatggaacagattttgacttgggctgagaacaagggtgtaggataccatacattaggagaaaaagagaacaaagtgttcttgtgttgctggacagcatataataatcgcggctccaggtcaacttgtgaacattggataagagaaggttgcggaaaccaaacagagactgaattccaaaggattagaactaagttctcttggtgtcacagtctcgctacttggtggccacatcatctctctgggacaaaagtcatcatttgggagaaagccgttcccggcacggtattcgtaagcccacttaagaagcacgagacaacaagtcgatagtc

SEQ ID NO: 2332 - DNA, 717 bp, Beihai picorna-like virus 47
  misc_feature 1..717: note = strain SCJXSX39359 hypothetical1
  source 1..717: mol_type = genomic DNA
cgtggattaacacccacgcaatgatgcattcctcaggaattcctcggaagctattgatgattgaactggctttctacggattccccagaaattcctcggatatagtgaatgattgaactgagcatccatcgtttgcaacgcattttatttctaacgccggagacggctttaaacatctacccctttatgtattgtctataccgcgtgcgcaagctgcacgtgagtgagttgtccggccccagggctatgtgattcgtctaagttaataatacctctcgacgacgaattcacaaccttggtaggtcggttgcggcttatgccgctctcttataaacaaataaaagaaataaaaattagaaaataccgctaaaacaaaacaaaaaactttaattcgaacgtacattttgtacaacgcttatatatttctattttctgcggtatacgtaatgaaagtcatggttgatgactgtatagatcgatgtcatattggattatggaaatccactcactgacaaaggatcaaagcctctcagatttgacgctttgacatgtacacgaatcctagtttactagtatggaagctatgatctttcgttcatcctatatgtgaaaaccagatagggtaccctcgatgtactgaaactcagatagagggatgggacctcgataaaagaccctattaaatgaaagttacttacgatataacgatataaaacg

SEQ ID NO: 2333 - DNA, 717 bp, Hubei toti-like virus 13
  misc_feature 1..717: note = strain QTM25941 hypothetical protein 1 and1
  source 1..717: mol_type = genomic DNA
gcctgacacgcagacctagccctctttgcctgccgtacacagtattgtacgaccattcagcagggaactcttagagtgcgagaaatcgcggagaacaacgtttatcctgaaaccctaaacctgcgacaaccatcatgggttacgtttttttttgagtctgagagtaataacatgtacccgaactctgagtcagtctaaaaacacgcggtggagtggcatgtcaaccgttgtgtctgtggggtgccacccgtgtaataggacaagataacgaggggagagagtgggacttaccggtaggacgttgagtataaaccttcagttaaagtaaataacggcataaatatggaatcgaactttaatcaaactgataatagggatgtactagtcaacgaaaattcagttgatatagtggacgagacgtcaaggttagttacagatgtgttgtgcgtgaacacattgtacgctaaagtggaacgccactggatttggaccattggaattaacgtggttctgttgtgtgtagtagtcatattgggaatatggattggactattatacattcagcaacaggaacacgtttctgaaatcaaaaaaatgaattacggaattggaatgatgaaaaaatcagcaaatgaatcggaacgtttgctgttggaagtgtgcaaggctgagttcggccagacagcttccatttgtgaactcaactggctctagtta

SEQ ID NO: 2334 - DNA, 718 bp, Aedes vexans iflavirus
  misc_feature 1..718: note = strain Barkedji Village, complete genome.1
  source 1..718: mol_type = genomic DNA
ccagcgtgcgcatctacctcagggaagaggtccgatttcatatctcagtttcttgggatatgttgtaattcggatagtagatcctacctttggaatatgggtaaaagttatatttccaaaaattcaataaatatatttataagttagttcacagggctataacctaccccttattagtaacaaaataaataaaatactcggtactgaccggggtatattattgtatttatagagatcaaatttagtagttcgtgggaaaactatggtcgttttatgaattatcgttctttggaggtatccatttactggcttggtcagtcaggctcgattattcattttatattttgctctctactcttacaatgtatatgtataaatatagttttaaggcaaggcatagataataaagatatgttagtaagtaaacaagagtacgcgacgttatgttgtatgaaaatagtcattgacttaccagtagccctggcgtaaccagtaacatagctattggctcttgtcggaagcaaccgctactttattatcgtatgtgacagatttatctacaatacgtgttaacctttgtgttagaacctcgatgatatgtgtatccatagacttcgggtatatgctttctaaaagcatgcacgtacttctgaaccgtcattatgagcgttagacgacgaaggaatatcgactcatttccctttttaaaatcttactt

SEQ ID NO: 2335 - DNA, 718 bp, Wenzhou yanvirus-like virus 1
  misc_feature 1..718: note = strain WZFSL78003 RNA-dependent RNA1
  source 1..718: mol_type = genomic DNA
cctggcgttggcataggattagttagactaacttcacacctccctcctcatcccgattagttagttttgcactataccggtttttggagttccagttctgcctgttggtgtgtaaacgttttgagccaggttcaatatgtgtgaaaccgagcggggtcctgcactttgatcaccagtaattcttcctgagaagtttccgtcgctctatgggagatggcagcattgtgcaactgtacaacggacgtacagtggatctgacaggggcgtcgccacgcgtttgagagacgtgttaataaatatggcggccgggcctcttaagcgcgcctacgaggagcgtccaaccaagcgatggataggtggaggtgttccggagccccagcggtagcttccaccgaaacatagtctctctaggggtccgagcatatcaacgggtaacgggctgtcactcctttccttgtggaatctgtaccattctgatgcgaacgcggtacctagtacctcggtccagtcagacttctttttggacgtgtatgccaatggactgccattcatcggcacgcacacatgttatgctgtccctccccctcctgccgctgctcctccggcacttccacctccggtgtggtcgtgcaccaggtcagcggtgacaatagcatactttttagtccataggaagcttctcccctccccaccaattcgggacctcaccgttcccgga

SEQ ID NO: 2336 - DNA, 721 bp, Picornavirales sp.
  misc_feature 1..721: note = isolate rfb200shi4nc genomic sequence.1
  source 1..721: mol_type = genomic DNA
tttcacaacgaaaatggccgctgctgcacttgctggtgccgctctttcaggaggttctaatataatcgcatctttaggttcaacaggattacagtcttatacatcattaaagttacaaactggcgaacaaaaatacaatcaaaatgttatggacactgccacaaaagcttttactgatgttggtttacctaagtatatggcctatacaggaaattcaggttctcttcatttacctggccaacagtaccacgtttctggctccaacttttattcagctggccttgttggtcaatcagttccttttttatctactccgtatcaagcttttactcatacaggaagacctaatactaccgtaaatcaaccctctgaaagaagagcaggattaggtgtgtattcacaggtacgtccctggaatgagcctcaaaatgtaaatgagctaggaaatacttcttaccaaaatttgccgataaatagggctctaatggcaagtatggctcggaatgagaaccctaccggaaacatgcaaactttgccgaaaacaaattttacaagaagtagttttcctactgccactccattacaaaattttgtaggtagaaatactgaactgcatcaacaggcagcccgacttctacaatgacctgcttagtctagttgacgtctggtctattttctttccaatcacttagtgtagcgcttgtattggttaatcttaatt

SEQ ID NO: 2337 - DNA, 722 bp, Human rubulavirus 4
  misc_feature 1..722: note = strain t146a296_HPIV4, complete genome.4
  source 1..722: mol_type = genomic DNA
tcaacaaagttattctgtaatataaactaatcttatgagtgaaaagatacccacacaaggtggtcgatagacaaacagcaagagcagcaactgcaacaaaacttcaagggaaaaataattcgagaaatataataaattgacctcagagcaaacacaacatcgatccacaatagtcaacacaatcaacaatactccatgaggcttcacccatcaacagcaaaaagcacagtccattaagcagagcccaactcgcctcatcctcaaccatccactgaaagaaaaaatacatgaaagacctttggccaccagatccaaacaatccagcacaaaaattcaaacaaccgcaacactccattcggcctcaacaaacaatccgccaatctgtccatcattcccacactgacacacaaccatcccattcctcaccagcaacttaatccgcaagtcaaggaagattctccatatatttagccagtccgtcaatccgacacatcatcgtattttttaagaaaaaagagagatgagcaattgatacattctattttccatacgtatagtaaacattaaatcatggattcaccatagaccaagaccagaaattgaaagatcagaatgatcttgaacagcgatggataagcattgagaaacaaaaaagatagattatctccaacaacgaatggcacaaagcatccaacaacaggggggaagagagcacccccaag

SEQ ID NO: 2338 - DNA, 722 bp, Sanxia picorna-like virus 3
  misc_feature 1..722: note = strain SXXX36208 hypothetical protein 11
  source 1..722: mol_type = genomic DNA
ctctcttacaaaattttgaaggatctatcttcgatccatagaatacattattgatttgtattttatctatgtaaggaaaacagcactttcgttttgccggattatggaaattaattcggttatagtacgaaatggcaaaaacgacggtaaccaatcagagaatttcattattcttttgattgaccccgtggctttaaacatatgcgtgatagtatatgttaagcaaacaaaacattttgggtaaaaccaaaaggttccatctgttaagaggaataaaaatatttaccacttttatagtggcggttttcactaggtatttagtgttgctcgtgaagcaatcctagaatattaaacgaacatcttttacgaagcacattgctcgcttgtcgaagggttttataatttactgaaaaacgagagaagacgcatgctagaagtatgtagttgctccgtgcacaccaccgcgcgtccgcagtttaacgttctctcatatctttgcacgagatatgtttgacgaattagaaaaacaggttttcgaaggagaccgttttgatttacaggtacgtgaaaagtaacctatagggattaggtacggcattcagactctcatctggacgtaagtccgctaatactataggccaagatctcaatcggattggctaaatttaagactattagttttttaattttagtaccaaaacaacaagagcccaaccaacatc

SEQ ID NO: 2339 - DNA, 723 bp, Soybean leaf-associated negative-stranded RNA virus 4
  misc_feature 1..723: note = isolate1R
  source 1..723: mol_type = genomic DNA
ccccagacatacagccagcccagcatcctccttgagatttcacatactgtctcctgtcccccatccctatcacgagtccggatggagaaatataaagatccgagaagagacacaatgtatccttccgagatcaaaagttctgctggtaaaagagtagctttctttgtaatgcctaccggacatggaaagacgcatcagcacagtcctgaaagagggatatacgatgccgccaccatagttcctccgagcggaactgccttcctccgttttgcgcgcgatcatgggaagaagacggggaaatgggacacttatgaccgagagtggactcgtcttcttgtagaatatgtggagagtacaataggtaatatagtcgttatgattcctcattacgcaaatggtattcgtgcagggtgggtagatatgggaggagctatcctgaccaggaaagcccttgaacataactttagagagaggaaagacaaccttgagtcatatgaatattatagaatggttgaaaagaggcgcggtgctcctgagtttgaatctaacaaagaacttgaaaagtgtttgctattgaccgcagaaaggtggattgttcgaggaatagacgagccttccaggattccctatctccttgactactaatcagtacgtctgtaataactattaagaaaaaattcgagaatagactctcaaattgaaaatttctaccaagattacatc

SEQ ID NO: 2340 - DNA, 724 bp, Rabbit calicivirus
  misc_feature 1..724: note = isolate BEN-12 capsid protein gene, complete1
  source 1..724: mol_type = genomic DNA
ttgtgagcaaactgaactcacaaaaagtgtcgttctgaccttgaagtcgcaccctatgactattcttgacgcaatgatcattcaaaccaaaagaggacttccaagtggcatgcccttcacatcagttataaattccatatgtcattggttactttggtcagcagcagtttataaagcatgtgcagagataggtctccactgttcaaacctgtatgaagatgcccctttttacacgtacggtgatgatggagtttatgccatgacgcccatgatggttagtttactgcctgccattatagaaaacctccgtgattatggtttgtctccaactgctgccgataaaactgagtacattgacgtgtgcccattaaaagatgtggcattcttgaaaaggcatttcaaaatgacagacattggttgggtgtctttgctcgacagatccagcatcctcaggcaacttgagtggtgcaaaaccagcaaacggcacatgacactggaagagactcatgaccttgcaaaggaggaacgcggtgtacagcttgaggaactccaagtggtggctgctgctcatggtaaggaattctttgacttcatcaagccagagttgatgcgccaacaagcttacacgaagttcaacgtgtacgactatgacgcagcttggaaaattcttgcagatcgcaagagggtcgtctcggtagtacctgacgacaattttgtgaatgtt

SEQ ID NO: 2341 - DNA, 724 bp, Wenzhou picorna-like virus 29
  misc_feature 1..724: note = strain BHBei77092 hypothetical1
  source 1..724: mol_type = genomic DNA
ggggggaggggtaaaaccctcctctccttttggcacgaacagagattcctccttgttaggttaagtcctggtggtggatcactctcccattaggttaagtcctgactttgactgtccctctgtgctatgtcgagattccttgtgattaagtagtaagtcctgaccttgggttaccccactgttaggttgtaagtcttggtcccaactaaccctcggcgtggctgtgtcgaactgagaacctttatttgtttagattaggacaagcgattttctttgtcgctataagttcgtcaggcattgcttattgcctgtccctttctatctgtcccagagtcctgtgactattcttgtcccaaaacattgtagctgctagtaccatcgtgtgttgattattacaggtaacagcgtagatcttcactggcaacagtaaagcacgacagcggaacgcagagcactatggtgtactaaggcacttatagtttctaactctatctttttcgacaaccggatgcgcatgacgggattccttctttaggaatgaaagggtaattattgcgtagtcgggtttaccggctattgtctactcgttgtgtgttaatgttcgcttccagaacagtccgaaagtgcactctatttctttcttcagtgtgtactgccacgtgttgtcttcttagtggcatctctttaacccgctagggatcttttatttttgcaattttaatat

SEQ ID NO: 2342 - DNA, 724 bp, Shahe picorna-like virus 11
  misc_feature 1..724: note = strain SHWC13613 hypothetical protein 11
  source 1..724: mol_type = genomic DNA
gtaaacttttagtttacatcagcctttaaggattcctcatgggattctttatttcaattggattgaatagttactttaagtactttttgatcgaagaatttattcgacggtcttaatttattttccactgttctttacattttgtcttatgcaagatttttatttatctatcaccggatgaccggagtgaatattaatttacatgatctttctcactatgataaaagtgtcgttttattcattttacgttaaaatgtttcccctttaattatattaattatttccgtatagttacctgagctataattcaggagtttgtgcaatacttgcagttaacactgtaagattgataaagattttgataaatcacatactgtccccaatctgtacacaaggatgtatttatagtcgtagtttttattctatgaagtagaacttacatgaatattattaacgaaagtgtgaacaggatttatttctattataggcgcgagaaaccatatcaattatgatagtggtaggacgtggttagaaagaatcagtttccaacacatattagtttttattacatagaacacgatgcacaataacgaaaaatacttattaaatacgtgcaccatacttgtgatgctgatagaatttcccaattagacaatgactcaacattattgatcgacgtggattacgtattctaaaaagctggtgctgttaacctaaagagaat

SEQ ID NO: 2343 - DNA, 728 bp, Lampyris noctiluca iflavirus 1
  misc_feature 1..728: note = isolate 17FIN2, complete genome.1
  source 1..728: mol_type = genomic DNA
gtggggggaaaccccacgttctgcaaagtgtaataacccttaagcccgtttcatacgtacctcactaaattgttatgaccactggaggatgctttgtgttatcggtctaaccacggccgagagcaattcatttcgtagatagtgttagtaacatgctggttgacacatacctgacgtcaataagtaaaagactttgtagaatgtagttcgaacccattacctttaaaacccaaaaccaaaactttcttatcaattatgaagaggattaaacccctaatataattgttcgtgtcattgcgttcaatgacttaaaaccatgcactaaagcaagtttaattttacgagcttttaaaatttggcaaatttttgtaagtgtagctactcaaagttttcgcagactttgttttaaactgtaatctttagatataattcagcgactgatatttgcgagatatcggaacgttttatattctattgaccagtgatattaccttaattggttgtatcgagacatagtaaggactataaccttctctcaaacggtgtgtttattagtatttcagaagcacaaacgttttcatattttatatgttggtacttgagtataagtatccctattttgaaacccttaatggaactgggaaccattattgtataaaccccttaccaagttatgatcgtagtttcttggtggaccgttaaatcgatcactactcgtgggaacaatt

SEQ ID NO: 2344 - DNA, 728 bp, Niviventer confucianus picornavirus
  misc_feature 1..728: note = strain Wencheng-Rt386-11
  source 1..728: mol_type = genomic DNA
ccacgtgtgtatgccaacctacatggactcgtgcatgtaggttggattcacaaccctttcataaccccccccttttaacccaacccttcgtaaccgtacgcttcactcgcctttgggtatagcggcccaatgtgctgaagaaaaggatacgctataaggggccaacgggtggtggcccttaagaccacccaacctagaagcttgtacactcgggcaatagtgaggcccacatccagtgggtcaagcccaaagcattcttgttccccggtatgatctcataagctgtacccacggctgaaagagtgattatcgttatcccactcagtacttcggagagcctagtacaccacttggaaatggaagtctgtgatccggggttgaccctgaaccccagaaactcatgatgaggctaaccttcccgaacacggcgacgtgtggttagcctgcgctggcatgaggcctctttgtaggcagactgaaatggaagggtgacgaagagccgactgagctactgttttattcctccggccccctgaatgcggctaatcctaactcctggtccagtacttgtaacccaacaggtggctggtcgtaatgcgtaagccgggagcggaaccgactactttggggcgtccgtgtttctcaatattattcatttctagcttatggtgacaatttatgattgcagagattgtgctgtatttgtgtctgagagaagaagtaacaat

SEQ ID NO: 2345 - DNA, 729 bp, Fusarium sacchari hypovirus 1
  misc_feature 1..729: note = strain FZ06, complete genome.1
  source 1..729: mol_type = genomic DNA
tgcctgtaaaatccttcaggtgtttccttttggaaactaggagtgagaacaccacgctttcagtggtcagtatttgtatcgtttgtgttcgaatactactggctgttatcttttgttctcgtgagctttcgctcgtggcctttggccggaaactctattgagttttgtgggatttcctcccgtgggctttgcccgtggcacttgtgccgtttactccgaaatgagtgaaaactatttcaaatgcatgttaagacctcaccgcaaagtgtataaactaacagaaggcataaaacctgatgaatggagtagaccattcacggagaaccttattaggctgcctgtataaccgttcttcccacgactttatcaatcacgtagactgcggtccataatcgtgtttaagttgagactcgtcagcggagtcaagaacagaacgttaaaataacgctgattaacatgctttcaacatcttccggtggacgtttactggttaactgtatttggtttaaatttgaggtgtgacccctaccttcaagctaatttgacacgaccataccctgcgtaactagaaacctaacaagtcgagttcgaacttgagggttgtgttatgatatggtggaatcgtcaataatgaaccttgttaaagagccaattagcacaccgtgatgctcggttttaaaattttagaatggctgacccggcctagatgggtgtgtcacgtccaagaac

SEQ ID NO: 2346 - DNA, 731 bp, Caliciviridae sp.
  misc_feature 1..731: note = isolate hwf182cal1 genomic sequence.1
  source 1..731: mol_type = genomic DNA
tcccgtataagggaatggacatattgagttaacaatatgccattcccttatacgggagtgagcccacgaccgttggggtttttaccccaccgttcgtggacctcatttctgcttattacttcccccactttcatcggggacgttccttttgccgcacacccagtgcggcaggaggtaacgagtttattttgtatagttgttattagtcacaccggagggcgtgctttacgctcttaagggcttaacccactccgttgtgcctgtcacttgtcgcttgacggcggctggtctagtacgggtctagttagtaccactcagtggtcagggtgtgccgcccgttgaaggctggtattcccgcgtgagggggctaccgtggtaacacggtccttgcgtgtgtgtgagccagtatgctctctggagctgccattgtttgggaaagctcttccccgaacaactaagtgcctgatggcctcatttggctgattggtgctctcaagacatgtgccggaggcaagcttgttggaaccaccagcaagccctgaccggtagctaattagtcccttgacggcatcgaatttttcctttttccttttctttttgtgaactgaatatagtgatttgtgtttagtgcttttgtgcctttgtcacttttactttgtcaaatattagtgtttgtgcatttgttttaaactgcaacttgttgttaatttttggacaatttgaacttagac

SEQ ID NO: 2347 - DNA, 731 bp, Picornavirales sp.
  misc_feature 1..731: note = isolate RtCb-PicoV/HeB2014 polyprotein gene,1
  source 1..731: mol_type = genomic DNA
tttgaaagggccctggatataatagggttaaacccctattatatccaggaattgccaacccataatccattgtccatcaatgttttatgggggggaccctttctcccctccccctccaaataccttttacccctctgtaaccaagagtgtgcaaaatctatttactagcccagaattgcggcttctggggaggtttattcctcatgcctaacaagatgttacgcaaactccgggctacggccctgggcttttgccctaaagatttagaagtttacactatcgtccaacaggaggacaacaaaccagttgttctaaggacaagcacttctgtttccccggtgagactggatagactgtacccacggttgaaactggttgatccgttacccgactcactacttcgagaagattagtaggaaactgtgaaactgattccattgatccggatactttccccgtatccagaaactactgatgagggttgacttcccgactacggcgacgtagtgtcatccctgcgctggcagtaggcctctttgaggatggaagatgtggatcggtaaccgaaggtcctattgagctagtgtttatacctccggcctcctgaatgcggctaatcctaacccatgatctagtgctcacaaaccagtgagtagctagtcgtaacgcgtaagtcgtgggcggaaccgactactttggagtgaccgtgtttcctattttacttttgtttg

SEQ ID NO: 2348 - DNA, 732 bp, Wenling triplecross lizardfish paramyxovirus
  misc_feature 1..732: note = strain XDLYMC449513
  source 1..732: mol_type = genomic DNA
accctaagtgatatcactaactgattaagcaaaacttaggatgaagcagttggaaaacagtttctcaacatttaaattgtgcatacgtatctactttgaaaacaaccacctggggaagagatggatgattatacaccaatcaaagatattatatcagcagaggccctttctgacctgacagcaataataattatcattttacagatccacacggagctcggaatcaggccttatcctttcagtccagatattcatgatagatttcgagtattgtctatcagagctagtgatttcaccagacttagcataagaaggagggatctccttaactacgggatagactcgttacttggaaaggctgaaccgaatccgcagattgcttttgagcttgctagagttaggctgctcttagatctcctaagaaaatacacccacccttatatagagcctgacacaaagaaaacaaaccagaaatgaattaagatctctaacgatccgatatcagatgagttcggataacatacagatgattaacacctataaccttcttaatattgcatttgaacaaaaagaaattgatatcaatctgagtttaacaatactgtaagagatcatatactatgattttggataattaagaaaaacttaggattacacattatatacatcattctgtgtgacaacattcatcaaactagcttcaaaggcgttagcctctcaaaaagtgtcagt

SEQ ID NO: 2349 - DNA, 732 bp, Helicoverpa armigera iflavirus
  misc_feature 1..732: note = strain HBLF2013-1 polyprotein gene,1
  source 1..732: mol_type = genomic DNA
cgatctcgggtttaacccgtgcagtgcttttaatagattttcaatattctatcgtttatctccgactttattgattagtagcgtctcttgttcatttttcagctcgatttttatcgttcgtgattttatgttcgttgagacgttttctgaactttgttagtcggagattttgttagaatatctttttctattaatgcattagtagtttaggtttcttttgcttagttttgtttattctggttttatctccagtacaattggaatattggaaaactttgccttcgtttcaaagagccgggctactttcccgtgcatgttttatttcctgcttactgagtgtaaagcttggttaccgtagatgtattaagttatgtaatgtaatttatgcatcgttaaattctctttacgtattatcgatttatcctccggatagataatgaattaacggattgaattttcggtaattgagtgtgtaatttcaggacccaccgtgagcagcgggtgtagagcgcatatcttggtattagttgttaattttgaatactaaagttaattgatttcttgaacttagtgtagtcatgtcttaccaatgttcaagttacggcaattaattaggtatctattttaacttgacaagcccttcatgcggaagaaccgaagttgtggtagttggctagtattaacagaaaatggggtgcgtgagctacattagtggtgtaactttaattaaat

SEQ ID NO: 2350 - DNA, 732 bp, Robinvale bee virus 9
  misc_feature 1..732: note = isolate VN3-31 polyprotein gene, complete1
  source 1..732: mol_type = genomic DNA
ggtatcagacccgtcatcaccttagcatacgtaataggtatctttagatcattctaaaagcattctttctactggagtacactctcctatatcaaaagtgaccagtgtatatggttggtgaaccattgtaaacaatcaccgtagctcttttaacgttataaagatggaattttaagctactaaatctctaaaactctgtactcaagccatgttaaggcgaagtaccaagataggggttttaccctcatcttgctcgtattgtgatgcgttggtgcctgatctgggctaacccaatacgtgatacatatacatatatagcactatgtgctactgcattaagaatttactctatgggtataaaaaacataaattacaaactccccatatagatccattttagtgttggatttctaatacactatgatagcattttactatgttagtaagcggataatagcagccgctggtcctacgttacatataatatatactaacctctccgtgaagcaaccttccgacgttactatagaaaactctaggataccctagtaacctctccgctccgagaaaggacgacgttaatactaatcaactgattttgtgtaataaggcgttcgctgaacactagtttaattactaatcatgtaaaagtcaagattgaaggaatcacaaccttaaatagtgatagtctagctagacgataaactcaattaagaaccagagtacaacaat

SEQ ID NO: 2351 - DNA, 733 bp, Kimberley virus
  misc_feature 1..733: note = isolate CS368, complete genome.1
  source 1..733: mol_type = genomic DNA
ctaattaaaccgtgtacctcaatattatatataatccattgcatgagtaatgaaaaaaatgcgagcgacctttaaactcaatatgaatttttgatataaattaatcccaatttaacaggcatcatggagttttccagatgcaaactgagtcttcaaataatcaattttaaacccattgagattgaaagaagagcactactaggcttgcttgctgttaagagtataaagaccttgcacagaggtaaccaaatgattacaaggctttctgagatcttgataccaagtgcaattgtgaatggagaatttgttgttcgaaatgataaaaagaatggttactgaatctttgtgggggaggcttatggagctatagattcagatgatttaagaggagtcagagaaaaggtgatgaaaattagcagaaccataccattgattatcacaggagaggaatatggggctattgatttggacataacgctagaagattccgaaataatattcttaaaaagaaagaatgagcttgacatctgtgacttacctcgaaaaatgagatttctgcattgagcacaggcatcaaataatacttttattcacgctccaataaatggacaagtaaataaaggaaccaaataaatccttaaacagatgaaaaccttataaacatgaaaaaaatcaaattctcaagctgagacccactgtccttacgataggtaacttaagatcaacaggcatc

SEQ ID NO: 2352 - DNA, 734 bp, Halophytophthora RNA virus 2
  misc_feature 1..734: note = isolate HRV2/BD641 RNA-dependent RNA1
  source 1..734: mol_type = genomic DNA
atgatggtgataaacattgaaactgaaacaaagagctttgctgcgcagctgggcaactctgacaagaaattacagcttaaggaaattttcaaaagaaaattctgtggagacttcgcaagtcaaaaatatatttccttcgggagccagccatgtttggatttaggtggtgaaggtgattgtttctacagatgcatgtactactcattgcctcactcatttcaagcaagttatgcagaattttatagcaatttttctgatggccagtgggttgatgaagctaagatcatcaggttttgtgaaaccttccctgtgaagatttttgtgcattacggtgatgaaaagggtgtgatcaaacaatttggtgtaccataccttctggtggtgcatttgcttctctccaagggtcattacacattgatggggtacaaagaaacggggccttttatgcaaaaactactgatgtcaaataactaccatgcttctgcactgtctgaggatgtttatgactctattagcagcctcggcgtaggcttcatggaggattttgaaattctttgcaaaatttataggtcttgtccgggtttagttaccatgccaaacacaaatgtggaagttgtttcaaaatgcaaagatatgttgttgaacaatcattaccatgaaagaaacaacacagatatggtagcacacatccaagttatgatcaattcacttctttgtactaatccgggcggcag

SEQ ID NO: 2353 - DNA, 734 bp, Solenopsis invicta virus 4
  misc_feature 1..734: note = isolate Gainesville-Sin, complete2
  source 1..734: mol_type = genomic DNA
tcgctttagcggattgtgtttccttaggttaagaacagtaagctttttgctgagtagtaagtaatgcgtaactcaagaaatcccgcaaggtttgaattcttgagaccactgccctgctgagtcatggtctagtaattgtagtgcaatacttatataacagtcaggccactaagaagtaatctcttagtttgctaaagtcctgaagaaacgatggaactagcaattccggactttccatagaggaacctgctaaatgtggatgccaccccagagagctccatttagtatgtcagatataagtatgaatgcaatgaatgatagtggcgaccccctatgggacccctcataggtaagcttggtatgtcaagaacactctcatcctaaagttagaacgatctgttcagctggagtttaaacattatgcttacatgtttaagttgtgcttcagttaaatcttaagccggtttcgtactgggacacacaaaccgttaatcttccattcgtggctagattgtgagtacccaattttattttgtacttaatgctgtttattttgctgtctattgctgcccttgctgttttattatttgctaatttttgcttatataatttgctatttactgctgctataattgatactttaggaatcaatccaatcgtaaaatattgcgttataactctaacttctgttttgcttatttttgctattatttacgaattaataaagattaaac

SEQ ID NO: 2354 - DNA, 734 bp, Beihai picorna-like virus 83
  misc_feature 1..734: note = strain BHWZXX15514 hypothetical1
  source 1..734: mol_type = genomic DNA
tagacgtatgtctatgcacactttgttaacataacccggggcttgccgcctgcggggccttgtaaaaaggatactccaataacggtttgactggatagcctccagtcagggttttcccgccggctatgtagcttgccgctcatagttaaattggactccaatttacttggtgttcaggagaagatgaagaagtttgggagttttaagtctgcctgactgtaaaaggcaaccccctccttagccagtgagccatgtcgcaactaaataagtgcctcgctcggccccagtgggaaactggataaaaagactttccccgttttgttagtgaacgaaatcacacctatatcgtttgatagtaagcaaacgcatgtttggcagcgtgccctttgccactggatacgtatgtagacgtagcgatggaggacctgctccagcaggtatcaacgcaagggatttgaagaccttgtagcgaaatcgcatttaaatagaatcgtggcggattctagcctatctactaaggcctcattttgtatgcaagtactcttgtgatatgcgacgaacacggtaggatgagttcagtaccgcccctaggatgatctccttcggtgacgggaacaaactcgtttatcctgctgctagtaagcaatttgaacgacagaacgtgtgcaaagtgggattccccgctagtcgtgcctagactttaaattggcatttctttttctctttccctcatc

SEQ ID NO: 2355 - DNA, 734 bp, Beihai weivirus-like virus 16
  misc_feature 1..734: note = strain BHZY60618 RNA-dependent RNA1
  source 1..734: mol_type = genomic DNA
ggcacatgcattaattcgtctgcggacgggaaaggatcacagatagcatgcaccggtggcttttgaataccaccatgggaagtcggggaggcagtttggaaactgtcgagatgtgggagcatgggttacctatacctggcacattcgttcacatgtgcgatccatgcgcggttgtagcagaccgttctaccacgggcttattcttccgtgccgggcagaatgccaatgtcccggtcggagcctgccgcgagcctacagggggccgctgaggtgaaggctcttcagatttccgcatcccgggcggttggggaccagccatccccgtaaaatctgaggattgtactctcgtgctgctaccggaagcttgactgcaagggagtgggcccgaatccggaaggtgaagggacagtcaggtgaccagccaactgtgtgtgaaagggaatttccagcccggggatcacatggaaggtcggagggtacacaaaatgactacggccgagcgccctgcgatagtgggttgacttgtccggggggggacgctccatgccattttggctcgcttttcgtgcaatggatgacttcctcagcgcggggactgttgcccgcgccgccgcggttgctgcggtgttattttcaatggcatcatttgaataattaggcaaaagtgatcctcgacttgaaccgaaaagctcacatataaacattgttgtttaagtgcacgtgacatttcgctt

SEQ ID NO: 2356 - DNA, 736 bp, Rhizoctonia solani mitovirus 37
  misc_feature 1..736: note = putative RNA-dependent RNA1
  source 1..736: mol_type = genomic DNA
ggggccgtgaggctccttatgagtaatcgaaatctcgattaccagcgataaatcgcacattacattgttttgtgtagttcgtcgttccccaacagtaacgaaggggatcactggaggacttgtcgtagctcatacggccggtgttaaggtggtctcggcagaccaaaacctcgttgcgagggggttccctaccagaaatggtgttaaagggaactgagaaagttgctctcccaagagtaaccgtattgcgatataggttatcgtctgccagtcgtctaaggcgcaagccttagaagacgcagtcttctctgctgctgcggcccctgcgaaagcggggaaaccgaagttttatagagcttattaagattattaggccctagggacagtataccaggcactggtcagtagaccaggcgttagtacctgaaccctgtgcgaagaaaccttaagttcaccctaccagcgagagcgtagtacgactcctggaaagagaatttaagaatgtattcacccgaatcggattcaaatctttttggatctgaaggcggtcactggataccatgcatggtgctaaggggaacccgctttggaaagctggttatccaagagctacctagggacgtgaggaataccaagtagtaatacttgagatcctcgccttttacgtgtgggagcaacctcgtagcagttcggctgacgagggacccatgacggaggcaccacctttttccaaaaa

SEQ ID NO: 2357 - DNA, 736 bp, Rice Picorna-like virus 2
  misc_feature 1..736: note = isolate FYBPH-9, complete genome.2
  source 1..736: mol_type = genomic DNA
gtgtccccaaatacgcaccgcgtagcgcttaaactacggtggcccgtcgtaagttgcgcggtggacaggggggacacaggtcagtcccgggttttttaaccgtactactcaggcgggactataaaatatccagagaggaggccaccacccacacgttttatagcggtaagcgtgtggtgtacattccgctgctaataacgataataataccgcttctgcgggatatgtacagcctcgggaaactgaagttgtgtgcgaggagtttgagggccttagcgtcgacgccgatccttctgccacgggcgctactgaatttattcaggaagcgtgcgcggcagtagatgttcttggcaagtactacgcgggcagctccatccacgcaaagcagcaagatttgcagggcctgcgacagtacttttctcggccccggcttgtgggccgaggtactatcaccactggctttaggggtcgcattgcggtcctgaacgtcaacgcctccaacctttttaccactttgttcccgaacggccttgcgcggctcactggtgtctatggggtgcggtttaagatctgctttaagttgcaggttgcctctacccctttccatcagggccttctgtcacttagttggcagtatggctctttgtcaaccagtaccacggtttatcagcgtgcttcgcgcgctgagactgccaccaacattcctcatgtcaggctggatttgtcagaactcact

SEQ ID NO: 2358 - DNA, 736 bp, Canne point virus
  misc_feature 1..736: note = segment 1 RNA-dependent RNA polymerase gene,1R
  source 1..736: mol_type = genomic DNA
atctaccaacaaagccatgcttgggaatctcaaaacgtaaccaaagattgagtgatttttctttgcattatactccttctcttttgtgttgtgatggataggcacctactaagtttggcctaaatactcactattccgtccagttttgtaatttcagctccataatctcatattattccacgagggtatgtggcattgtaattgctcatacaaacaagttcctatttttctcttatatcgattttgctgatttaaaatcactatgggcctagagccaacttgctaagatgtccgatccatcagaagatttgcccttagccggtccatcaggagttctccaaggacccgggagattccctagaccattgacccgtcatcatgaatcttttgaagaagaaacaaggcgccgtcttacctccattgaattaagaatcaaaggcctggaggatagagtctccgctcaatccacaatcttgggtgagataaaaagcatgctggaaacactcaccattgcagccaatgtgccgactcactcagtaacatcctatagccaaatccgcagaggccgatcggcgcgcaaaaattagacagccaaaaatttgttcgtaagaactgtcatgatatttggatgtttgctgtattaaaacttccagtcgcatgcacgaagaatggattataccctcctccttccttattatagtgacagttttaacggacaaaaacgagcagagccatt

SEQ ID NO: 2359 - DNA, 737 bp, Picornavirales N_OV_039
  misc_feature 1..737: note = putative non-structural protein1
  source 1..737: mol_type = genomic DNA
cacggattttgtccgtgtacgtctcgcttgatagttgagcttcgctcagctcagagttctccatttgattggaggcattcagggattcgtccctgtacgatctgtatcattacctttactgagtaaccagagaaattagactactctctacctttatgttttagtagattttaaaacctaaacgactgtgccgcccctgtggggttagtcagtgtccttgaactgttgttcgagggagtattaggcgatcttgtatcgccatttttgtaaattattatacagacttataatgtctataaacttagaaaacaaacaaaaatacatatgtaaacatagagtcacatacggctgtgttcggcctatagaaccttactgaacttatcataataaagaaacgcgagttttataaaagaatacattcattaatacctgccttaccaggttctttgtgaatatctcaacgccagagagaagtaaagtatgacaacacaagttaatcatgaccaatgatgaggttatcgattacgccctggtgcagggtagtacagataaattgctgtgggagcaccaagtccactccgtgagatcgaccggaaacagttgctgtcttttattcatagtctaacaaaatgaattaaacaacgtatacactcctaacccgtttctatgcactaataaatatcaaatgaattcaatcaaatgatattactggtgctaactaacacaactgtcttaat

SEQ ID NO: 2360 - DNA, 738 bp, Lactuca sativa marnavirus
  misc_feature 1..738: note = strain pt151-mar-11, complete genome.1
  source 1..738: mol_type = genomic DNA
ttattgctaggtacccctttaggggggaactaggacattatggtttttgtctgatagcttgagttttctcttgctagtttattcgtaggcatacatggaaatgctcgttagtatctgatctaaccccaccatagtatcgcggcttacgtgtattatgctggcaagtggactgctaaagcgaccaaattcttatgtttacgaatttacgaatgaaccaaattttgttgatcacgtccttttataaagtgacaacggttttcgtaataagggctttaccgtttgtaagtaaaaagctactgttgtttgacacactatgttagggtgtgccgtagaacagtttgcgctttgcgcaattgcatattgaagaaaaaataatcaaataaaaagtttatatttacatttatgttttataccggttgatgaccaaccttcacaatatatcctttaaagaagctaatctttgtgtgttatgttatgaaaaccttgttgatggcgccgttttggcttacagtcactgcaagttattctgttcacactgacatcacatggacagccagatgttttcatttggtatgcaccctcggtctttgttttcataataatatgctttaacggtgtattgtgaggtacctcctcagatagaagtgcagagggctgaacctaacagtaaatttttggtatccttgaccgggagaaataatacgtcatccaagaaccagagaattacgattttacacg

SEQ ID NO: 2361 - DNA, 741 bp, unidentified
  source 1..741: mol_type = unassigned DNA; note = Uncultured virus isolate acc_9.16 sequence
ctgaaacctttttctaaccggtcgaaaccctcaaccgcctcggaaacgttgaggttgagtacaggggcgtaaccgtctaggttacgtctccccccagctcttaggttggttagtctgttagcgcaatgccttacttccgcctttgagttacggcagccctaccgggggatacagggttgcttagcccgcgagggtcagtgcttcggcagtcttatgtgggtccctgagtcacataaggcaacgtacaaaagggacatatggagttctcttcgggggtctctatatgttcttatgtactccctatatgaaccttacaacgccaacggttttcattgcccgctttctccccctggagagagatgactatcgaagacggtgtaatggttgctataattagaataagctatacattaaggacttagtattaaacactagggggacgcctctaggagtctccgttcgggcgtgggatgtggtatagcatttcactcggagaggccaaaacagggatcgcctgtgctaacacaaatgtcaactgactgcaacggccatgcttaattgctctcctaggtgggtacagtcgggcccgtcttcaggtgggtcgcctgtccgctattagtatctgaagttacgaagttataattcaaatcgaaaatctttattgcaattcttatttacgaaagcggacgtctagtaaactatcttgggaagcctacgtctggtggtagttgaaaccaaata

SEQ ID NO: 2362 - DNA, 741 bp, Ustilaginoidea virens nonsegmented virus 1
  misc_feature 1..741: note = strain GX-10 fusion1
  source 1..741: mol_type = genomic DNA
aggtgttgtcgaagctggccaccagcttcgcagccaagtgtggagggtaccccgttatgctacatacctcctcgaagaccatttgcatgctcctggtcgagtgctgggagttgaagtcgtcgtagtccagcataacgttgtacccctggccgtgtctcaaagctacgaccttctcgcacataccgagcgtgccgtactgccctgggtcgaggaccaccctcctgttcctccacgccttggcaaccagcgacaataggctacgaatgtgtcgagtacccggggcgcggttgctgtggatggttgccctcgcctccacttcgatttggagggtagtcgtgtgggtaggaggggccgcccacgcgcgaaggtaagtgccctgggctaaggcgttccccagtagaacgctcgggcgcggtggcgcccgcggtacctacaagcccgcacacgcgtctgacggattcggcctagtattgccaactaagtcgtcctccccgtagcgcgtgtggcggttaatcgggagagccaggtggagggttatggcgcgcaaacaacacgtcccaggttttaacgttctgggtgcggccttgccacctccttaaccatttaagagactggtgcatggtggtgttcccgtgtcgagcgggcggtcagacacgagctcaggggagtcgaatccccctgagtaacgtggtttatgcgtagcatagctgatacggccgcaggcccactgttactgaatgc

SEQ ID NO: 2363 - DNA, 742 bp, Simian virus 41
  misc_feature 1..742: note = complete genome.1
  source 1..742: mol_type = genomic DNA
aatacttcgaggccttgatctcagaatgcaatctctggaagggaaagtggataagattcttgcaacctcggcaaccataacagccttaaagaatgaagtgacaagtctaaaagcaaatgtggccacagttgagggcatgatgactactatgaaaattatggacccaagcactccaactaatgtaccagttgaaaagataagaaagaacctgaaagatactcctgttataatctcagggcccctgagtgagagccacatcactgaagggagtgatatgattgtgcttgatgaattagccaggccttctctaagttccacaaagaagattgtgaggagacctgaacccaagaaggatttaacaggtatgaaattaatgttgatccaactagctaatgactgtatggggaagcctgatcaaaaggcagaaatcgtggcaaaaattcatgcggctactcgtgaggctcagctgttagatatcaagcgcagcatcatcaagtctgcaatataagaaatcttagttgagtacatacctaagacacaacaataattccactacatatatattgaatcgaagtgagcactagggtggataggtcaagggacacatctaggcatcagaaatccgagtcaatctgcactgtccgggtttaagaaaaaaccaagtgtcaagagcatcagataggcacgaacctaacacaccccgagacacaccagccacacacatccgggccgaccagcagcc

SEQ ID NO: 2364 - DNA, 743 bp, Beihai picorna-like virus 59
  misc_feature 1..743: note = strain BHBei77099 hypothetical protein1
  source 1..743: mol_type = genomic DNA
gtgggtggcttaggccacgcatagagtttttctagtcatcatttgatgccagtagtagcacttatagtccttaggggctatttagtgtgtttactgagaagtgttacatgtcatgtataatgttgctaaagatgatattgttttaagcacttcgaaattttattgggtatagtagtgcaacgtctactatatcctttctctctaattagagagataaaatcaatatgtccaccttgtactcatttttgagtacatgttaattagtcagtggaggaagaactaaactttgcagagaagaattagtgtttgcaaactaaggaatagctctgcaatttatgcttttaaaaagatgatcggttaattcgccgtcatttcacttcctatatggaagtgttttataagggattgctgtcgtgaaagatatcttgcgtaagaagaacgtgtctaaggggaagaaaaattcatcccctatagttagtaaggaagaaattcgtcagaggaaggctctggaaaaggagcggaaaactaggatagaaagagataaaaccagattgaatgatctggataccgttgtgcataaaaagaaaagtaagaagattgttccctatgagggagatcataataatatcttggatatcccagtgaagcaagatcatgaattcgatgattttctggacaatataccagattcagaattctttgatgagagtgatattccacctgttcataacaacaatgtggat

SEQ ID NO: 2365 - DNA, 744 bp, Wenzhou picorna-like virus 43
  misc_feature 1..744: note = strain WZSBei69573 hypothetical1
  source 1..744: mol_type = genomic DNA
ccacggtcctaatcgaccgtgtatccttttgaccccgtgtaggttgcgggtgaacgcctcattttgttaattcgaagttctcgggttttcaactgaggtgttgccagtgtggacttttgtcgcttatgtttcctatacatcgacttgtgtgtataggtacaacaacctccaactttaaccttaacctttatttgagtgtttattttaagatgtctctaactcagctctcttgctgtcatggctaatgactcgtgtgtagattgtattggatgtgcccatcgtgtaacgggccatcacttaccacctaaatattagttactcgtcgtggaggctaatagcatttgggagtgatggttatgatttcgatgggtaactggctgcccgctagtggttccggtcaggcccgattgtagatctatgcatgccttattagtaacaaaatccttgagtggtatcatagggtggagccccagggctccggtgtgaacactgcttgaggtggtcccctaggacatgcaccggggagaggctcctcgaggaaccggtggcgaaggctacaggtgttccaactgtagtcggcgtgagacctagaatttcccttggtggagggcccacattaaaaaccccgtggggcagaaaggcaccatttacaaaccatatgaaaattacaactagtgatatagacgattttgttggtacagagagacctgcgattataattgttgatacaagagttattacaag

SEQ ID NO: 2366 - DNA, 745 bp, Barns Ness breadcrumb sponge aquatic picorna-like virus 3
  misc_feature 1..745: note = isolate1
  source 1..745: mol_type = genomic DNA
ccgtataggcattttgcctatacggagattattgagttgtgtggtttaccccacaccggttcattcatttatggactgcagcacatgttgtgagagtatagcatctctcattgacaatatgtgcggatttaacttgtccttaaatggacttctttgtgcgcttttgattgttttagctataaacaatacaaacctttgtaaaagaattgaaaataaaattataaaaataaatttcaatcaatgttgcaagcgaatacttgcgttctttatgtaaaagtttacactgatcagaccaaactaaaattttgacacgatctaagctgtaatctacagcatgtaaagagttcagtttactgctctttatgattattttaatgctattcctgtatagctgtttttatgacaaataggaacttccgaattatacgagaattcacatctcttggtaacgccttcgggtagggaccaaacccctgacgagactctgtagaaagcgtttctctcagtgatgggaagatattgctcttcaatgaattttgaatttgagcgtcttcttgcatctgttgaaactaacttttgcattgaaagtggccgtttttgaccgcggaataacactttatgatttgcatgactaaatctggccttttattacgccagacaaaaagttgcagtgtcgactgttgagaaattttctctgcaggtcaactgcttggaaagttcttcaactcgtcgatgttaacaacat

SEQ ID NO: 2367 - DNA, 746 bp, Marmot picobirnavirus
  misc_feature 1..746: note = clone c328515_g1_i1_libraryA_2739 segment I1
  source 1..746: mol_type = genomic DNA
tctaattctatttttattcttagtgttcttctaccttattcaaggcgaaacacccaaactaattagattggtcaaatttacacgtagcacacttcgtttgagtgtgaatatgtgtagaatgatcaagctacagtaacacacaaacatccaaccaatgtcacaactaaggaggtgaatctctagtgacacacaatcagctactctactggcagaacgtagagacaaacagagctaacgtggctcgagagactgaaacgcatcgagcgaacgtcgcacaagagactgagactaatcggtctaacttagcacgagaagctgagacaaatcggtctaacttagcgcgcgaagcggaaacaaatcggcataacaaagtgtccgagcgtgagactgaaaggagtaaccggcagagagagtttctcacaacactgcagcgtcagcaggactggcagctggggctcttaaacgagcagtatcggcgtgacgccttagcggaaacgaaacgatcgaacaaggctaacgaagagctgaaccgactacgaacgtatattgatgagtcgatccggagcgaaacaaaccggattcagtcgttagcgaacactcaagctaactcgatacgtcaggcaactctatctgaaacagtaagatccaatcagaaacaagaagcgttatcagcacagcgcaacgctgaaagtgaacgcgctaacttagcgtctgagtcaattcgagaagcgcagaacgctatcgct

SEQ ID NO: 2368 - DNA, 746 bp, Cragig virus 8
  misc_feature 1..746: note = complete genome.1
  source 1..746: mol_type = genomic DNA
ccctgcacacgcgtacgattatttagatctatatctataatatagttacttttaaatgtgaatgtttcattgcaaatttgagagtgacaactcttaaacattgtgatgtaatttgcatattctaagaattatttagtatatatttatttattcgatatttgtgttcggtttgaagagccgtcaacattatatatttttctggaaattcgacacttttatgacttatggtagtaagttgaagatactgtttacagtactaccacgtgaccagcgatggtcttaaaatatatctctttttctacttatcagaatttttcttgaagaaaattcagatatgatgatcataatgattactcagatgcatggcttgccctgtctgttttaccgaatattgataaattattctaccctcatcgactatgaattttacaacgttgccgcttttattaggtaacctcttggttaggttagcgatttgaggatgaagaaattgattatttgaagatgtctttggtattttgatgtattattaacgaaaatgccaccaagcccacccgggtcgaaacggactattgtccttattagacacggggaaccgcagagtcaagggtgatgacactttgaaggagcttgctcctaggtggtcaccatacgtttggaatttattccttattaaaacttgtctcgttagttgaacttataaccctaaaacactcttgtttttggtttatttgttcactcggttc

SEQ ID NO: 2369 - DNA, 746 bp, Beihai narna-like virus 15
  misc_feature 1..746: note = strain BHHZL10358 RNA-dependent RNA1
  source 1..746: mol_type = genomic DNA
cttagagggaaatcctgattcatcactgaatcagttccgtgcaacattagttgattccgattaactagcgctgtgctgaacgttaatcgtcgtgtgatctggagagagttaaaatttagactctttggaactaaattctctcttgctgcgacgttatctaaggtaggtgtcctatttaggacaggtacctagggaggcagccccttccaaaaccttaaagagtctagcctgacaactactgagtcatagttgtgacaaagactaagttctttgaaggcgaaaatacctgacttggcaatcacaaaagaataaaccgatcagatccatcggaaggatctaatggttctttcaaatgtgatcgggaagccatccaaacccgtcctgccggtagtaataccaaaggaaaggtggaccttaaaatttcaaaggtgcttgaatcctatgctggttgcataagaatttggcatcagattaattttaaagggtgtttttctttttcagaaaaggcacagatcgcacactttagaaaagtgttcttagggattgagacgagtaagtacccaaaggtatttaaaggtctcctagccgatcgtttttcaattgaattgaatcaggatcgtccagaggtccctatctctggtcatagactattctatccatcttatgatcggaagctattccgatatttaagtggaatttcgaatggtcagagaccaaagacccaacttagactcttctgggactta

SEQ ID NO: 2370 - DNA, 747 bp, Hubei tetragnatha maxillosa virus 2
  misc_feature 1..747: note = strain QTM20713 hypothetical1
  source 1..747: mol_type = genomic DNA
actgcgtaggcaaaacctacgcagtttcttttgactcctctcagaggagagggatcaagtaagtcgatgtatcgcattgataaagggtgggctgacatgtaagtcgatgctgtcattacatgtccatcgctttgtttattagttttaagattttcttcgtctccaatttatttttcgaaatatcttcaacaagaaaaattattgttttaattgactgagttcttataagactatgagtttattgtgtatttctctcttatttgaaccctcgtattttatatagatgcattatgtgtatttggattgtctttcttgacgcttttgaaagggtacaggatatttactttctccagttctcgttggaaaggctctttgaatgattgatatatgctgtttcacattgtttcttgcatagtattgtagacataggctcggcacgcattggcacttccgtacagcaactactctacaacgaatatgtatagcgacaatgtaacgttaaccttggtgatgagttggtgataccctcttggttatgtttcagtatatgtttttctttttaaagatgtgtcccgaggccattctttggtttgatggattgatgaaaagaatacagacattttgttgacatttattatatgagcatattatacacacgacgatgtgaaagaacattgacaatatgaaagcatattgactacaggaaagactgttgacaataggaaagactatacatatgactttaca

SEQ ID NO: 2371 - DNA, 748 bp, Sogatella furcifera totivirus 2
  misc_feature 1..748: note = complete genome.1
  source 1..748: mol_type = genomic DNA
caaaagtggcgaggcttttgcccgggcacaccgactctacgattgggagttgggtgtgtccggtctctgcactctggactgctcgcaagtctaaacttaattttgggtaggatggcgaaagcgtgtagcctgaaatccgaaactaccctcatattacatctggattacgcaattgtgcacctgagagactataacatgtacccgaacgcgtaagaatactaaaaaccatgtgggagtggcatgtcatgcgaagcatctatcgttggccctctggttggacgtgtttgaagcggggcgagagtgggttagtccggtagggtttagatttcattttttggactggagagtcagtactcacccgaaacaaacatggaaaacttaacaatcaacacacaaagtagggacgcactagtcaacgaagtaagtgttgacttagaggatgagacatcaaggttagttatagatacacttggtgtaagtgtattatacgataaggttgacaccaataggaaaatactttatggaattgggatgattttggtggcgtgcggagcaatttttgggattatggctgggctcctatacgttcaacaccaggatctgacctcttatgcctctcatatggaaacaaaatggattggattgaataacaggataagggaatcggagtccttattagctacagtatgcaagtctgagttcggacagtcatctgtagtatgttcgcggaattcttcttcttttaata

SEQ ID NO: 2372 - DNA, 748 bp, White ash mosaic virus
  misc_feature 1..748: note = replicase, 27 kDa protein, 11 kDa protein,1
  source 1..748: mol_type = genomic DNA
gccctgtagtcccttataatctagtaagtaggtaatttagctatagatatatgtttcttccttgtttgaacatgagtatatcagcagttattgacatagtaaataaatcacactttgtaccctgctacccctgcacacaactgccccccgtcattaacggagtaccgggatcagggaagagcacactcctcaaggaattgcttaatctgcataacgtccgcatctacacagccggcataccctacggatgatcccttaagactgaaggcgtactcccactgagtgagttcacaagccgagctaaccatctgtgcatcctcgacgagtaccaacttgccactgataaagaatttgagccattccaggtattggtgggcgaccccttccaaggagctacacaccgtagacctcacttcattgccaccaccagcttcagagtgcccaaagcaatctgcgaacacctcagaagcagagatttccagattgagagtgacaaagaaggtgatctaatcaagggatctccattcaccacagctgttgaaggagagttactgcacttgggccaagtcagcaaggaccttgcacactcacacaacgcttgctcgaaaggtcccacggaagttcaagggcttgaatttgacacagtgaccttgctttaccactcatctgaactatccaatagaatcggattctacgttgcctgcactagagcttgcaagagattgctgttgctctctgatgagcacgt

SEQ ID NO: 2373 - DNA, 750 bp, Solenopsis invicta virus 2
  misc_feature 1..750: note = complete genome.2
  source 1..750: mol_type = genomic DNA
atggactccctaccaccgcaactcaatttactaattggtacagtgagaactttgcttcttctgggatatctttccttgcaagtggcggcgcaaattgagtccctggcagtagcagtgtttcgtcctctgttacgccgagtcgggtacaacctgctagactcaatcaggactatgccagcttcgcacagtcatctcccgctaacaatcaaggatttgacccatggggagtgaaggactcgccaattattgatgatgacgaacgtgttcaatctaatttggaaactgagacagaaataccgaatgaagctgaggaagggttatcagagactgttgaggcagttggtgaggttacgactggagttgaggcagctgaggcgaccgctgcggtgtccactccttggaccttgctggctatagccaatcaacaactaggccaagcagttagtacagcacatgtgtcaggattgcaacagcaatcctcggcggattacacggccaatatgcagtctcacggcttgaatgtaggtcttaatgcagatcttattcgtgaacagcagagccagaccatttcgaggcagcaggcaggaggttctattgggtctttgcttgggccccttggaacgttgatcggacaggccattgccggatataactctgtgaaccaagaggatttgaaaacagccgcttctttcaacggctatgttaatccccaaatgagtaacatcgttgcttcgcagacaacatctggtg

SEQ ID NO: 2374 - DNA, 750 bp, Robinvale bee virus 8
  misc_feature 1..750: note = isolate VN1-22 nonstructural polyprotein and1
  source 1..750: mol_type = genomic DNA
gaaatatgtatggagtgtcttctttaagacacttcatatgtatgagtaacgattaatttcggttacgacgacctaatggaaggcgtccctttgagaatcatggcgggatgtcaacccccgcgaagcgatagaatgagtcgcgtgattgaaatgagggagaataaaattcttcggtaggttgttgtaatctctatggtctgggaccatattctaagtttttactgcttttttaagaaaaagtttatcgagagcataactcgtgtgaaagcaacatggtgagtctaacatcagtagaaaaatgacaacccctcccctatatgttatgtaagtatatggcagtgtgccattaaaacaaaaataaaaatctgtatattttatatttcgacaaacagtttgtaagacgttagtcttcaaaaattaagaacgcccctgtgtttattcacttgtagacgcaaaattgtttgatctccattttgtcatcagatatgacaagaaaaagacaaagtgctcaacattagtacgtcttgtaatggttttcaccgtcagaaagatattagcaattcgattttccaacctctacgctcctaaaaggactacgttaaaaggaagacgatggtatgttacagctgcagttgcagccgaggacagcctggcaatctagtaagaacaagagagaaaatgatgagtaggttgtaaactcaactagcatatggtagagggcgaagatagctttaccaatccggggctcca

SEQ ID NO: 2375 - DNA, 751 bp, Bremia lactucae associated fusagravirus 1
  misc_feature 1..751: note = isolate DML-A_DN430091
  source 1..751: mol_type = genomic DNA
ctgaccagttgtttctccactccggactgcgatctagtcattaagtcctttcacaagccgccgaatcaagtattaggggagctggtgactgggttgactcagggtgcagtgtgccttgcctggtgagatggacacacaagatgtgaccgccactatagggtccatgaggagttaaatcgatttggtgaacccgtgctaaggttcaccgaccttttaattcaggggatgccgaagggtgaaacttggttactatctgtcttgagtggctgcataaccgcatcaagcgagaaactattcaatgggtagatagttttagcatttggattaaccactaaatgcttatgggccggcaaccggaactgccacattagtatcatccttcgggatgggcgcgttggataccgcgcttgaaatggaaacactgcgctcacattagaggtgagcaactacagtcaagctgggtttttagccaattctcggacactgtagtgggagaccacggtggttaagcatcttcggatgcgttcgtgtggataacctgaatggcatcagggtgtgatcaagtctgagcttcctctttgagatgctttaaccttactcaggggacttgtgagctaacgtaggcgagtatagagtagatgcaaactcgtcgaacgtgctttttggttttagaacaccaaggagtggagagactacacccatacgaattcgggaaaccgagttaacgaatagtccagcccaaagggagcct

SEQ ID NO: 2376 - DNA, 751 bp, Picornavirales sp.
  misc_feature 1..751: note = isolate wag054shi1 genomic sequence.1
  source 1..751: mol_type = genomic DNA
gattcaatctaatacagccaaacagaccaatcagaccaatcttgattttcagaaaagtttaattgataggggagaaaaatcatttacagataaaggattaccgtcttttctttattgggggggatcaagcgcacaaactccaaattctttaatacagttaggaggacaaaatttctatgaacaatccggtgttaattcgaatctcccatattttacaggaactccatacgctcagtggaaccatgttggcacacctaagatccagcaacaaaaaccttcaccctctagctctcaggcacatgcaggagtgtcagctcagtctggaaagtctccagcctttgtatcttcaactagttcaggaagcgtatcttccggagggacagttagtatcaatgttggaaagcataatttcagcggtcagacagatacgacaggacttggaaatggccgttactctgcagttcctccaccaaccttaacgtacaatagcgttggaatccagaatgctgcaaggactcatgattttgccacgcaatctaatccatctgtgagaagtgcctcccaacagacttgggcccggtttgactcttcaaagtccactcaaacaagtttaacgggctcccagtttatggtcgacaaaggtacccaagccaatcctttcaggtactatgccaaccgttgagttcctaggcaatgccgtcactcacgctaatgcacacaaaatcgagttcttatacgataacgcagaaat

SEQ ID NO: 2377 - DNA, 753 bp, Marburg marburgvirus
  misc_feature 1..753: note = isolate Marburg1
  source 1..753: mol_type = genomic DNA
cccggatactacagcacgattacccacccatccacttcgatatgattcaccctcagatcacagcaatcaaccctatttgaatatccaaaccactatttagtatcctattacttgtcactattgtgtgagacaacataagctatcaaataacaatcacgggcaagaactgggcatacgatggtgatttgagagtattgttcagtgctacaaattcttttttcaattgctataatgatacaactacaaatctccgtacacttgccgcaatactgtaattaacactgctgtatctcttcctcaagccatctgatttaactcaataaacatgacttgattcagagaatatgctgaaaatgttattgattgaacttctcaaatggtgcactatcctactgttttactcaacttggtatattgtaacatatcagcggactctccacttttcttcttgtatattctctataagtcatttacttgatagaatgtcaagtctactggttcagagtctcctcactccaatgaatgtaataattaactgttagcttagatgacaacagttatgaggttatataattactcatggtgtaaaatgtaattcttacctctatttcttctgttttccctctcctttataatatgccaattaagaaaaactaaaaatcgaagaatattaaagattttctttaatattcagaaaaggttttttattctcttctttctttttacaaatatattaaaataataattctcaca

SEQ ID NO: 2378 - DNA, 753 bp, Arma picornavirus GZ
  misc_feature 1..753: note = complete genome.1
  source 1..753: mol_type = genomic DNA
cccatatctttctgcttattacgacccccaaacccttccttttggattgtacctcatcctgcaaaattcttgtttggttccatatggactttcactaccagatcctttcgatgttccccgcttatttacatatatatcttcaggacgattctgaatatgaacggattttcccttttgctcgactacctgatcgttgcttcaataaattatttatgtatagcacatttgtacaaaattttcttgcagacggagactgggcgaacttgttcttcggcgattttgctgttgctcacagcactagtgaccgaggttatatacatgacattgacaagtacgtccacttttcgtatgataatgaccgctttgctaatactttcccactatttcagcgcactgattatctggattatttatttcatgaaccagttccttataatgtacgaaaactcagaggatggtattgtagtgttcgaaacctatcacatcattttcaggaacatgtcgcacgccatcttagtttggaatggcttgcaattataaaattactaaactctccattacccgtatctttaccgccactgttggcgcttcagatgaacaagtttattgtttatttggagcaaagacagattaaagaaatttgggcacttctgggtatcccccgttttgagtgtgtttatttcggcccgggattttagctccttacgaggaagcttgccgtaaaacttaaatcttattttaaaacacttcaaa

SEQ ID NO: 2379 - DNA, 753 bp, Picornavirales sp.
  misc_feature 1..753: note = isolate RtNn-PicoV/SAX2016 polyprotein gene,1
  source 1..753: mol_type = genomic DNA
ggagtgctcaaaatagcagattggtgtgtacgaggcttgtcaacacttgctgcaattgtgtcaatagcaggctctgtgtatttaatctatcgcctctttgctaaagatcaaggtccatattcgggtgcgccgcagagaggtctgaaagccccagttccccgtgtggtgaaagctcagggaccagattatgacttcgccatatctttacagaagcggagtctcttccctgtgacatgcttgaatggtccattcactgctcttggattaaaaggaaagtggattctcctacctcgccactgcaaagtgggggaaaccctggatctagccggaacagaatacaaagtgctagacaatgcagagctagaatgtaatgagggaaagcttgaattgaggtgtgtgaagattgatcgtcctgtggatttccccaacattttgaaaagaataccaaagaaatttgaagaacgccaggattgtgttttgtgtgtgaattctgaaaagtttccagggttgacctgcccagttggcaaaatccaaaattggggtaagttgtgcttgtctggtaatgtgacatgtcgcaccttaaagtacaactacccaactagatcaggccagtgtgggggtgtggtcactaaatgtggtgaaattctgggtgtacacattggtggtgatggacagaatgggtatgctacagctttgtatcaacattattttgatgccctagatgatgctatagagcagggccatatagtggag

SEQ ID NO: 2380 - DNA, 754 bp, Shuangao Bedbug Virus 2
  misc_feature 1..754: note = strain SACC-1 ORF1 (ORF1), glycoprotein1
  source 1..754: mol_type = genomic DNA
aaatatctattagtatacatactctatagcctagaaaaaacaatgatcaagaatccttcagtcatcatgtcagagtcagaatggtcatcggaagattcttcatctcttcacacttcctcaactcaatgtgatctaagcccacttcaaaatcaatttttagctatgtctgcaaaaatacagaataacatagatagaattaataatagacctagatttacgcctctgaattctcaggtaatcagaaagtgtttcaacgtaaaactttctagtggtgagcttgaacaggggttaaaggatgacggagaggaatggatgttttactcagcacaagacacagtatcaaagtccattccggtgtatactagaggaaagatctttcctccacttttaaaaggatctattgtcaaaattaaaacagtcgaagtccctgtctcttctgagaaggaacatccctataaaactaaattgaaccctatatcggagcaataacctctacattgatcttccagattgataacaggtgagctctaatggggaaacatgtaacctccgcattgatcagttacctgcttcacatacctgtgcgcctttaacattaaccaaattgcttttctactcctttaattaaaataatttagattttgaaaaactgtaaagcttaaaactcactaaatagaaatctcaatgagatcttaatctgtttatctcaattgatcttctcctgtttttactgccccaatccacatcccctgcc

SEQ ID NO: 2381 - DNA, 756 bp, Picornavirales sp.
  misc_feature 1..756: note = isolate RtMrut-PicoV/JL2014-2 polyprotein gene,1
  source 1..756: mol_type = genomic DNA
tttgaaagggggcccctgcagctcatcagctgcagggtcccccggtggactgggtacacttctcgcccccttctggggtgggggtgtggctcagttaaccaccactgggtggctaccagttttcatagaatagccaatcccgtaacatttgccacctaagcatagtttaacctcctacaattggtcgaagccgcttggaataagactgattgtatactgtgagcctgagtattctcttctgtcttccggttgctctacaaccggataagggctgtacctgggcggtcctactcttcacaggagtctgcataggtggctttcacctctggacaatgcactccacacccactcccacactcaagttagtataagttgtgcatgtgaaatgttgtgaacgcgttgggtaggtgtagcgactacaagtgtgccagcggatttcccctggtggtaacaccagcctctgggcccaaaaggcatgtctctgaccgcacttgtacacaatcccagtgatgcccaccgttagtagtgatctagtaatctgcacttctcaactagcaaaccgtgtgcttggaggtgtaggtatggcaggctgaaggatgccctgaaggtacccgcaggtaacgttaagacactgtggatctgatcaggggcccaccggctctccgggtagaagtcttcggaccttgggttaaaaaacgtctaggcctgtcccccagagggatctggggtttcccttataaccccaatactgacaat

SEQ ID NO: 2382 - DNA, 756 bp, Perth bee virus 2
  misc_feature 1..756: note = isolate WA1-14 nonstructural polyprotein gene,1
  source 1..756: mol_type = genomic DNA
attaataatacgtatttctttatttgccgtatcctgtacgatactcaggccatgggatggttttcccacaaaaacaatacacaaagttccttaacattcttttgattattttgattctatataacagcttacgtagtactatgtaagtgagctgttattgatttataatttgatttttaaggttgtgcattgacctgagtatagtctaactatacgcaaataatgtgttcatattaaagttggtctttaattagattctaacatcgaatgctttcactttcagatatgaagtctatatgatttatcacacacgttgttatgggtttagcttacgaagtgtgtagagtagtgagattgactattcagtagatcaatcagagcctttacacatgaggtgttttccctattagtagatgtggtcttgaatatatatttcccatcatttccggattttcattaatcggtaggagacaagaaaagacaggttgtgacacctatgagagaacgaacttatgaatcttaatgttagataagtaagttgtcagaagtggacgtaatacaagtcgtatacttatagctgttacctccccctgttaaagatctgatccgtgatcagatttccacattatgtggcgcttagaattatattggcgtgtaattcaagtgacttgtttagtccccgcatatgttaatcttgagagcgtgagaatataattgataaaatacaaaattcaaaaatatttcagatttgacaag

SEQ ID NO: 2383 - DNA, 756 bp, Hubei picorna-like virus 48
  misc_feature 1..756: note = strain spider129651 hypothetical1
  source 1..756: mol_type = genomic DNA
tccgatctatgggtcatgcccatgggtctcattttaacggtcggagcaaccgatagataagctctactacgttcatatcagagatactcgcatctagtttttgctacgtgtcagttttctcgaagtatggatctagtaacttatcagctccaaacaccaaacacaccaaacatcaatcataaatcatttaatcgtgagattttactaagtataaatgtccagtagttctactatacggctgtggtggtacgtggttggcgcttaactgtaacaggttcagtaggccacgtgctgctcattacgcactccagcggaaacaatggttaaattgtatagttagagcaaaagatcttagtaaaattggtgatgcaagtctttcattatgttccgggtagcgaacttgataatttgatttagttcggattaccgagttggaccgagttcattgatggaagcaaccgcattggttatattgcgcaagcgaggcatattgtgatttactttctttggtagtactattcttaggatcaagtatcgagagatactcctttggacaactggaaccccgagaagtaaagttgatcaatatcgttttgcaagtgtatgagaccaatgtatgtgttttgacagtttgccgaaactgtccgtcagttataataatggtagtaagaggttgcacgagacgtaaaccttggctacaccctttgactcctttgtaggtgaaaaggagggttttattcattttaaacttaaacc

SEQ ID NO: 2384 - DNA, 757 bp, Beihai picorna-like virus 114
  misc_feature 1..757: note = strain BHZY60932 hypothetical protein1
  source 1..757: mol_type = genomic DNA
ctggggggctaaccacctcccattttgatctgcctcttccctgttggtcagatatgaactttttagtcatatctgaaccggaatgcagttttcgtaaaatgtaacgtttaagtgtctttgtatcgttttgtaaatcaaagtcttaatcaatgttaacttagtattttcagtagaaattacgcgatttttgtcaattagtaagaattctataggcgtagccttagaccttattatggcaatttggacagtgttctaccagtcaatactagagttcttagtattagaactataaaataatactatctcttggaagcagagattgaaaataattccaccccttaggcacctgagacccaattcttaggaatccaccgtataggatttaaaataagatactgaagttaatggaagcgacaagcttgcccgagaggtaacctcgctaaacgaccctataaggattcgacccctttatagtacgatttttgccgctatgggacgatcaccggccccgttacttaataccttctatctttcattgttcacaatcttagtttagtcgatcttaaatgtgacgaactatttatattgatacgcagggtaccctctgattgaatctcaccttagtttaagttaagaggactacgcgtaaccagaccgccaatgctggatgcctatcaatacctaattttgtgatcatgtttgaggggaggatctgtgacaactgccaatttgatcataagtggcctcaatatagatc

SEQ ID NO: 2385 - DNA, 759 bp, Picornavirales sp.
  misc_feature 1..759: note = isolate H1_Bulk_30_scaffold_14 RNA-dependent RNA2
  source 1..759: mol_type = genomic DNA
ggagattgcaaatacggtgtatgcagatgtaaataaatagctgcatggtaaattgcatacatgacagggcgtctccaggaaacgtagctttttagctttactactcagggccgtttgtccagagaaatgcggctcttactttccttatgaagctaaggttgtgagtattttgcttcgctaacacagataactttacagttgaggcacaagcgtgccgtgaatggaccgctagagtccttgccgctaatcttacttattatagattgcgacgtgagctttttgaacagttcaacgatttagtttttgatgaagaccagagtcaacctttggttaatgttaacgaggaagtgttcatagtagttagacagtttttgacttcacgtaatgatgccattaatgatgataagcgcttgtcttttgacaaggctatttttgagttgaggcgcgcttgcgcaaaggctttaaagtctacaccaccttccacaccttctgagggtgtttcgagtcacgtctctccatgatgtccagagaaatgccgctcgccatttgagtgtgagaccattcagtggcgtataatgtctcgcttcttctaaaaataattctaacgagggaaacctccgtgacgccgacgttaagtgcgacgaaataaattctttggcaattactaattcgccagagacgactggagtgacttcatttgtacaggaggctgtagaatgtcaggatatcattccagaggctgttaaccttggcacttta

SEQ ID NO: 2386 - DNA, 760 bp, Nephila clavipes virus 1
  misc_feature 1..760: note = isolate SC, complete genome.1
  source 1..760: mol_type = genomic DNA
gtggtgggtgttcccaccacggtttctaagttttcaatttgaacatttgtttattacattatataagtagtgttgttacgacaacacgctatatttttgtaaggaccatttgtttgaatcttttcttagttatttttcctttgtttacgtttttctgtgttagtgtgtttgtgtttgtttagagcttgtattcactccctttctatgtagtgacaagccaaaaatctactatataaaatacctttcatcaagttagtttcaaatgaattccggtttacggttataggatagttgatatattgtgttattgcaatgagttcgtgaaaaccccttaacagggctaggaagaatggacccccgcttaacgggataagttgtcttctcgttctctctttaagtttgttaatctcactttattatcgctatcacaacttcacgaatagaaagtttcagttgtaggctagatacggaggactcagatatggtgtttgtagaagttcacttggtaattcttgtggatggagactcttcgtgaggtcgccctctatcgctgtctgatgaggttgctagtaacactggaccgagtattgtgtgtcgaagccaatttacgaagtagtttctcggcttttatgaaactatccaggacatgaatcgacagttgctcctatcctgagtatcgatcgatactgaatgagtactgaaggttgaccatttagtttatgatttattgattaagatttaagatttaaagcgatttaaa

SEQ ID NO: 2387 - DNA, 760 bp, Beihai picorna-like virus 44
  misc_feature 1..760: note = strain BHXG26143 hypothetical protein1
  source 1..760: mol_type = genomic DNA
gcgggattttctcccgcactcttatttcaccgacgttaatcatagcccttgctatcatcaactttgagtgatatatgttcctattggtagttgtatactatacggtatacccgtttggctgcaattacaatagtgcaagatctatgattgttagccagtagggtgatatctgatcccacaattatcaatacttaatagactttgattcttccagtctataaaattagaatcaacaaacccaaattttatgtagtaatgttttgttttgtcttacaacttataccttgagtttataaaacacacctttgctcgttattataaaaatattattatttatgagaataaaatgtgaaataggttgttctgcaaccacctggttgggctattaccacgcccctgacttaccagtgtttcagtatggagaagcccgggcgatttgccaaagggttatttgtattgaatatcacattaaaattagtacatttgtttaatatatgaaattattggtatcttcgtttagttcccaatagacacttttaagtgagtcgtgcagacgttcgtttttcggagtcaacttgacccaataattttaatatattaaattcgagaagatcaatgctaatttgatgtgagtttcgagaggattgagcacccttgagaaaggttttacatttgaagcttataatgcgatggtaattttatcgatagcagctaaacttcgactttatatgttttaaaaaacttacctttaatcaatgat

SEQ ID NO: 2388 - DNA, 761 bp, Wenzhou picorna-like virus 40
  misc_feature 1..761: note = strain WZFSL83107 hypothetical1
  source 1..761: mol_type = genomic DNA
ataaaatgcatgtataatttttattcatatttatatttatgttatgtaacatatatgcttatgaaccgagtaaaatcggtcacggcgtcactatggtaaaataatatatatatagaaaactttttcacgtacatgcgaacaaaaagatttatagtttttcatatagggttgacaaccccatatgtgatggagttttcacaaaactccatatgtttgatgacaaaataataattatttgatgcagtttattaaaagatctaagattgaattgtgattctattttaaactttatatggactaacacggatacgagatttatctcgaaggtatctctggacatcgtataaaacggagagtagaatcttctgataaggactactggcctcaatacaatgtatcacgagcgttgtattgttgtatctcaaccatcacaccactactagtgactagtagagtagtaaaacagtttcgactgaaggctgtgatttttcttttgtggcgcgggtttatacactcgtaaaacaggcttgtttcttttggaagcaaatgggccatcccatgttatgtcataccagagtaggctaacgtacggtgcttgcacactactagctaataccatcggatcttgtatttaagtacctgaggattgagtgtcgttggaaacgatacgagctcaatcataacagactagtaaatatttgatgcctgtattagcataccgaaagcgtaaccaaatgaccaatcatggatcaatgtgaaat

SEQ ID NO: 2389 - DNA, 762 bp, Pythium polare RNA virus 1
  misc_feature 1..762: note = PpRV1-OPU1176 genomic RNA, complete1
  source 1..762: mol_type = genomic DNA
ggattttaaagggggtaagacacctttaaaattcgtccgatttgcgcttgtgccgtggtttgatccgatacgttcgtctctccgcttgccgctgccagtctggaaccacggtccggaaagcatgccttctctggaatccaccgctgaggtcctctggttacaaatcggtcggcaggttcgcctgtcagcgtcgtcgaatgagcgaagttgacgcttgcgatctactctgacacccgtaccaccggtacggacgttatgaccctcgtcccgcccgtaaggttctacgttatgagccagttaacggtcttcgccgaaccgtgtacaaatgaggccccggactatccgcctatcggatatgccaaggtgaaagaacctgacaacagagagagagctgtgaccgctgggagagaccgctgacggcagtagatctgcaagcgctaaacggaatccggaccggggcgtgacacttggcaaagctggggagttttcgacgagcttcctattgcaaccttgtggatcgaacagtgttcttagttttccaattaagtgcgattaggattggcccgaggggcgaatgcaccgtatgaaggatacgcgttgggcgtgtattactgtatgggaagaagcagattatggattctctgtgttcgtctaagaaacttggtaactggtcagtcctagcgaggcaagggagtggtggtttagtcgatgagccacctgtgggtaactggaccccttgcgttaccgtcgcattgaaggtga

SEQ ID NO: 2390 - DNA, 763 bp, Soybean leaf-associated negative-stranded RNA virus 2
  misc_feature 1..763: note = isolate1R
  source 1..763: mol_type = genomic DNA
ctgctgtcgtagatcgagatggacctctgaagagtggcatgccgaggatgttttactccatcttccggctcagctcaggtgcctcgctcaacccgcttttgatcatcactcgatttgcccgaaagtatccgcagttctatgcggagtttcccgatctcgagaccgagtttcacgccgctgcgcatgcgcttgctcggttctacgacgttaacgagaagcgtcggatgtatctgaaggtaatcttcggaagtgattacgtccctgtgcctcgaactgatgtcgactctcttttgggagttgctgtcttcaccttgcagcaaaccgagcgttctctgcaaaactacaacggcggcaccctcagtgtagctcatcgagagaaacttctctcactcctcaatgtttccgccgcaaaggaggaagacgtcccggagtcctaagtctccttctagtctcgcactgtactgtcattggtgattaaataaaacttaggagagaatcaattcgacgtcgatacgatgctttacgataagtttctgacatatgtcatctccgtcgagctactagcgaatctctgcgagagagctggtatcgaagaatccggaccgaagaaagaagatgttccatctcgatgcgtcttgccgattccttccgtgcctatcgagcatgatgatcgagagagagcaaagttggttgagctaactacctcttcgtcagagcgtctgtaacgcaaatataataaaacttaggagacaaataaatcacc

SEQ ID NO: 2391 - DNA, 764 bp, Ipomoea aquatica botybirnavirus
  misc_feature 1..764: note = strain pt078-rha-1-newwen-plant_78,1
  source 1..764: mol_type = genomic DNA
agatgtgtataagagacagagtcccaacccgttccaccgaaggtaggcacaaaaggtgggtgttaccacaccaccggcccctctcagcactagctccatcactggatttgtcgtgtctgctagaccagctccatagcagatggtttgcttattatcccgcattccgcggctggcaataaaaggcgaagcctgtgctttggcttttattgcaagccgcggaatgcgggataataagcaaaccatctgctatggagctggtctagcagacacgacaaatccagtgatggagctagtactgagaggggccggtggtgtggtaacacccaccttttgtgcctaccttcggtggaacgggttgggaattccgtaaggaccccagtaatgtccgtgcgacggggaaaagctacaacagcctgcctgtaacctgtaagggccaagggactacccagagtgtaacgactgcgaatcgtttactcagtatctaggaacagtctacttcccacaactcaattgagtttctggtcgtcgaaagccagagttaaaactgtgggcggtgttcgaccttcacaatcttagtaaccccgatttttgcgatagatcaacttttgaatatcgcccggcagagtgagttaatccaacagccacccatctacataaacaacaaaatatcggaaacacaccagcaccctcgaaactaggcagagcgatttaatccaacagccgcacgctaactattaaaacaacaaaacataccatctgtcaac

SEQ ID NO: 2392 - DNA, 768 bp, Shuangao insect virus 8
  misc_feature 1..768: note = strain insectZJ96360 hypothetical protein2
  source 1..768: mol_type = genomic DNA
gttgggataagctccaattctagtttaacccgggatgtgcttttgttgcccgaagattcaatttggtgagccgtaagtcagcccagacaagcgcagtaaccaatgcgaatgaagttctccttgagcgaccgagaaggcgcgcaggtgaagatgtatcacttagtaggggaggttattaaacgaatctgaaaagtagttttaatgaagttgtacttactattgccccacggattgaacggaaagaaaccgtcatacccagtgctgcaggaacagttactagacctttaaaagtaggcgggccaagttactgcagaatagttaattcaacggatttaagatgaaaagtaagaggcagtgaacaccgaagcgaaacgtaaacgagataaaatgaggccagatgcccaagtcgtaagctccaccacaacccagtggaatggagtaaagctcagaagggttctcggatacattagacattagtcgagagtctccctaccgcacttggggaggtaacaaactcttagcctgtgacgttggattgagagcaacataggttataaattaggaaacgctttcaaaattgctctgggcaggattttcaaatcagaacttcctgctttaaataaaagtgcacaaataagtctatatattttatgtcagaagattttgataaggagattttgctatttacaattaaagcttctatagttgttttacttgtttatatttcagctttatctttgatttgtataattgaaaaccgaatttaca

SEQ ID NO: 2393 - DNA, 768 bp, Dicistroviridae sp.
  misc_feature 1..768: note = isolate fcc172dic1 genomic sequence.1
  source 1..768: mol_type = genomic DNA
acttataatatcttacgggcctacgtggcctacgctagtacaatgtagtatagcagggacttaaaggtcctttcaaaaccaatataggctcggaaatccgaagtacaccctataccagcatttacgcaggattgcgtaaaggtcaatgaaattaacaataagtatatcgtatacaagagattgtatccacaaaaaaggagccgtaattcctaatgagcagcatatagcgcggtgtgacgcggtgtgcgaagggattataggttcttttttgtggatacaatctcttgtatacgatatacttattgttaatttcattgacctttacgcaatcctgcgtaaatgctggtatagggtgtacttcggatttccgagcctatattggttttgaaaggacctttaagtccctgctatactacattgtactagcgtaggccacgtaggcccgtaagatattataagtattttattatattttattcaccccccacattaaccccagttaaagctttataactataagtaagccgtgccgaaacgttaatcggtcgctagttgcgtaacaactattagtttaattttccaaaatttatttttcacaattcttagttaagattttagcttgccttaagcagtctttatatcttctgtatattattttaaagtttataggagcaaagttcgctttactcgctatagctattttatttattttaggaatattatcacctcgtaattatttaattataacattagctttatctatttata

SEQ ID NO: 2394 - DNA, 768 bp, Beihai picorna-like virus 82
  misc_feature 1..768: note = strain YYSZX17728 hypothetical protein1
  source 1..768: mol_type = genomic DNA
cggcataccaacgcacgcccaatgtttgaccctcaagctctggcatttagtctgtttatcttggttaatactcttcggaggggtacaagttcgctgcggctgaaagcgggaagctctgtccttatggggccgaacccttgtcgttatgggggggaacctatgtccttatgtggggaagccttgtccttatggggccgctcttacgagagtgtatctttttgtttttagttttaagtctgcttttagcacttaggtcgtagaaagctagattggcctaagtccttctttctctcttttactattttcctttctttctttctcttatgtagtggtgatctaccttcttcacccgtggataaatacacgttaaactttgagattccattctttcaacttgatgttttgtcatgttcctttagtacgttcggagggtaaaacctctttcgcggaacgagattatgtcatgatgagattgattgttgtctgtttagaatgatgtctgacatactgctgtcagtttgatgaggagttctcataacctctaggcgacttgagattcgcccttgttcattgcaatttgctagtacgtatacgtggttggtctgatcatttgcgcagttcccgtgacaggaactgtgtgtatgtgttcagatgtggagactaaatccaactgctattaggttacgtatcagctcgtcacaattgcttcgttcaagtttgctcgtggggtagtgctatgacccacctgttttgctctcacaacattcg

SEQ ID NO: 2395 - DNA, 768 bp, Hubei picorna-like virus 25
  misc_feature 1..768: note = strain QTM27237 hypothetical protein 11
  source 1..768: mol_type = genomic DNA
tatgcctaacggcataccatacagtgtagaggaattttgatatcggcatctctatagaacaagactgcaagccagaaacatgactatagacttaaccgagaagttttcaatttacacaaccccctgggatcaaaccctcttgtctgtccagactttaaatggactcgcctttccaattaggccagacttttgcttttatcgaagtaactatatagatactagcaaaggaaagcggcgtattgtattaacacgaaacgttgtgctgtgttttgtcgaaacaccataataaatcaacaaagacgacctatcgctaacgaataatggacgaagaattcggacttatttactatgacgattaagcgggcgtatatgtttggtattacttaacggttttatcgaccatgttacccgtagttataggaatagacgttttggacttcacctaggatagccctgaccggcttacccgacggattgaacgagacggctatttctatgagcctttagattgacaaacgtgcaagtttttgtcgcatcatattgcgcgctttgcgattttcagtaatggagaaagcaaggacttcgacctgacccgttccacggtacataatctggttatatatattagaacgttagacatgtattatgctaatatatatttcccgggcctgaaaaccctaaagaaccctaaggacgacgatggcaatcgatgagtgatatgacgaggaccgcttcggaggcggacttgtattggcggacgcgttagaa

SEQ ID NO: 2396 - DNA, 769 bp, Shahe picorna-like virus 14
  misc_feature 1..769: note = strain SHWC13617 hypothetical protein1
  source 1..769: mol_type = genomic DNA
tatatgattaaaatcgtatttatttattatttagttgttcctttataatttgcagtagtgcttacgttagcactttgcaattttattttggaacattaaatttataagtatttacttttctagtcttatagctctgtttgtgtacctggatgtgggaatacattccaaacaatttcaagggtttttttgaatatcaaaaaccctaatcgagtatcgccgtcaagtcttagcagttttatcgctaaggttactcgttccctcccttttggaggagctctacggtttgacggtcttaatttgtccattttccatttggattttattaagaccttttttgttttagtacactttttctagttttattgttttgctttgcctcttttccattgaggttttagcttgatgatttaatttttcttccctactatttcttttctctttttctacctattctatctctacttctctattgtttagaagacgttgccttttctattgaaaattctttattgcgctcttaaatgacctttatttgaatttaatacatagattttggttttcttattctttccgcaattgtccgcaccttatatgtggggttggttggttttccagaaaccagcgctgtacgagatatctttctcccaattagtgggagtttcaacagcttaagctcgccaaaactattttttacgacggagttcgtactaccctggttttgaaatgaaagtggtggaaaacagccgaaaggcacagggggagaggagtc

SEQ ID NO: 2397 - DNA, 772 bp, Potato leafroll virus
  misc_feature 1..772: note = isolate May8B, complete genome.1
  source 1..772: mol_type = genomic DNA
atgggcaagcggcaccgtccgccaaaacaaacggcaactccgacatccccgacgccgctacaagcgcaccaccaatggacagaatggtcgaacagatcatcacggctatggtggggagaatcaatctctcggagatagaggagaagatagtgagcagggtgtctcagaaagccctgcagaagcccaaacaaaagaagcgcggaaggcgtggagggaagaacaagcaaaacagttcacctcctacttcaacgcaatctacaagtggggcgcccaagaaggaggctgccccccaggcttcaggaagtgtgggcacatcccgcgctactaccacccccgcaccagaggcgaaacccagtgggggcaaaaactctgccaagttcatcccgagctggcggagaaaacagcaggattcggctggccaaaagcaggatctgaagctgaactccaaagcctgaatctacaggctgccaggtggctccaacgcgcggagtcggccactatccctggcgcagaagcaagaaagcgcgtgattgagaaaacagtggaggcatacagaaattgtgtaactaacgccccactgtgctcccttaaatccaaactggattgggctggctttcaacaagatatccgtgaagcagtccagtcccttgagctagacgctggtgtaggcattccctatatcgcgtatggcctccccacacaccgaggatgggttgaggaccataagcttctcccagcgctcactcagctgacctttgaccgactacagaag

SEQ ID NO: 2398 - DNA, 773 bp, Guangdong chinese water skink picornavirus
  misc_feature 1..773: note = strain ZGLXR1196821
  source 1..773: mol_type = genomic DNA
ggggaaaaccccctacaacttttttcgcgcagttattggaatctgcgtaggcaataacatcgatgtcgctactctgtgcttcggtgcagagcggcctatgtcgcatgttgccaacatcaaaattctgggagagtcgcgaactccttaacactgccttgcctcgacggagccgttgttatagtgtcgacgggatacaaacattaaactaaacccacttgcctcgacggaaccccttaccttttattttattttatagtatgaaagtgaatcttgtatgaatgttcatagaaaactgcaaatgagtaccacgtctaacatgagagaatgatactggagaaatccaagtttagaagtcactacgaatcccagcggaaacaagggaattctgagcttctaataggcgtttaagactatttgcaaaattctggtgcgtaagtgatattttcattgcgtagaacgctggtaaccactccggctagtataagcattgttagtcacttattatgaaactccacactatcctttctggagaagcacacaaacttacatggtaaagctagaccattatcttaagcggtgagtacactgcaaccttgtaacaatgcttgtatgactactttttgtatatcttgagcaatattgttgaggtggacatgtccaaaggtaatgttgttgggaatggaggggtccattttcccgtgcacgtagtgtactagtattgggtgatagccttgcggcggatcaaccatgtattttaatccgttgactttcac

SEQ ID NO: 2399 - DNA, 774 bp, Hosta virus X
  misc_feature 1..774: note = TGB1 (TGB1), TGB2 (TGB2), TGB3 (TGB3), and coat1
  source 1..774: mol_type = genomic DNA
gaagaatcagagaccggttctgcccaaaacatatcctcatcaattgcgaaaagaccccaacacaaatctctgactttgtcaaagctcagtgggacttctctgactttgcatacgccaacgacttcacggcctttgaccaaagtcaggatggagccatgctccagtttgagatcatcaaagcaaagtttcacaacattccagaggatataattttaggctacatggacatcaagacaaatgcaaaaatcttcttaggaaccctggccatcatgaggctcacaggcgaaggacccaccttcgacgccaacaccgaatgcaacatcgcgtacacacacttacgattcaacgtgccggaaaatgttgcacaagtgtacgctggagatgattccgccctctcaaaggtctgccctgaaaaagactccttcaagcaattcgcggaccgactcaccctaaaatccaaaccccaggtgttcccgcaaacacagggcgcctgggctgagttttgcgggcttctaatcacaccaagaggaatcataaaggaccccgtgaagctgcacgcctcctgggtgctggcaaccaaacttggcacactgcaacaaatcaaatgcgttaactcgtacggtgaagacctcaagctttcttacgaccttggtgaccatctacaggagctcctctcggagtcccagtgcagaacccaccaagtcaccgttagggagctggttaagttcgctggaaaagtcgaaaagcatcaagcagagatcagatcagtggcca

SEQ ID NO: 2400 - DNA, 775 bp, Wenzhou picorna-like virus 45
  misc_feature 1..775: note = strain WZSBei69068 hypothetical1
  source 1..775: mol_type = genomic DNA
gtgaggatgaacctcacatgattcttttatggctcgttgatgagcaatggtttaattaccatttttcaaatgatgcgagttcgcgtgctaatgattagcagtggttttattaccattgccttaatataatttagcataggcggttttgttaccgcttcattatttcatatcaattcattttgtataactttgtgtgtattttctttttgttttaattttgttatgaacgggcttacgctttagccaagctatacgctacggcagtacggtctaatgactagagagactgctagaatttcaattttgaaacaggatgattgtactttcagccaatgatttaaactttttgataaaaagtgcgttacgttaagttgcaaatggtgtctgattcagactttggttggtcggcagaattcttacgaccttaatgcggcacattagctccattgcgggagtttaggccacaatttattgtgtagtgtctatgtaacaagacggtgtgagagatctttgatcgtggctctttgataaaaggcgttttttgcgaggcgtataagatttggattataggagataccaataaaatcataaaaatcggtgggtatcactttaagtagcgagaaagacatgccttcccaaaggcttagtttagggtgctgcttacactcgcaagtgtatttgcattatcttgtggatatttaagtggacttaagtattcgtgggaacaagataatggcttgtactacctcggtaagtttccgatgacgcgacgacg

SEQ ID NO: 2401 - DNA, 776 bp, Picornavirales sp.
  misc_feature 1..776: note = isolate H4_Rhizo_44_scaffold_11 hypothetical2R
  source 1..776: mol_type = genomic DNA
atttggtagcccaaatatatatagtttattatctaaatgctttgtgcaatatagcacggcatccgatctattatggttgtgtcaatatttgacgctcactatttgttattacaatggaattgaccggattttccggcactattgtatatcaaatatgagtagagacaatgagacacttcgactgtattagtcgatgttagagagtttgagctctagtatttagatttaatctatagcatagattatttctgatggccctgattcgtggcattaataaaattaccaatcgccccccctgcatattacaagaaagtaaatcagtttttaactggcattattaaatcgtgtatccttttggaataaatccgtacaaataatgtttttacacaaaataacagaaaaatagataaaagtgtccaaacaaaaacatatacatatatatatacatttgacacagaacacacaatttttgtgtaggtttatggaatagttttcactgtcgaaagctattagcaaacatcgcaaacgcctctccaaatcgaatcacttatgtggtgtctgaagatttgacgcgaatcgtaaagatgtggtatagtacagtaacagttgttaccgaggctagcctagcaagttagtagaccataaactaaccttcttttgttacagcatcatgtaagagtcaagatgcagatttctatatctttaaatagaatatctctatactgggagaaaactacgtcaccaaaatccagatacaacagacaatttacacgata

SEQ ID NO: 2402 - DNA, 777 bp, Iflaviridae sp.
  misc_feature 1..777: note = isolate ecw123ifl1 genomic sequence.1
  source 1..777: mol_type = genomic DNA
tttaaatctagtgcataacatcgcactagttatattttggagataagtaccataatatatttaaagtttgcattgctttcaatcgtgaaacattccttcagaattatttcatgctattaaccgatgagccgtgagtaagccctacaagcgcagtaaaaggtttttagaaagagttttcctttagtaaaaaggagacggtacgattataaaataataccttccgcatttattagcaatgccgaggtggagaagtaaagtggaaagttaatttgatactagtaataatgaaaaaaataattatgtaaaagtgggaatgaggctaaagattgccaataccccatgatcattcgcccagctaggcatgtaccgagctattagaaagaataattataataaataaatattagaagatgattaataagtactaatgaacgcccatggaagacccttttaaagggagatatattatcgatcatttagttaactcaaaaataagcggtttggaggactttaagcctataactcctagagcatctatttgtggaaagtgcagtgcgcatataattatatccgttgtattatttaaacagtcccattacatcgtgctggtgtgggatagcagctggtaattgatatttgatcctaatgaacttggtattttatttggactacttttcaaaacattgggcaggaattttaaatcaaaaactcctgctttaaaatcagcacaaacaaataaataaatacttaaaactttagaacatttcaattttaaat

SEQ ID NO: 2403 - DNA, 777 bp, Beihai paphia shell virus 4
  misc_feature 1..777: note = strain BWBFG40859 hypothetical protein1
  source 1..777: mol_type = genomic DNA
caggggcactccccctgcacttcctattttaacttcatatgagacgtggttactccatatgtcgtagtgatgtaagtttgctgtatgattgcgaacaccgtaatgtgcggtagaacctctctcacaaaacaaccaagaaccacggtgatactacccgtgttaattgtagtacaaccccaaccaaccccaacctgttagcttaaacagtataaacctcgagcaactcgtgttaactaacgtagcgatattatcttatgttattttagtcaacaacttctttagtgttgagtcctagaagtaaaacaacactcaacttcattcctttgtattagttattcaggatcacctagaattatcgacgtaatcttttattttatatgtctacaaatattgatatggaaaatatgggacgctttcggtttccaatggtgagattcggatactcactgcggaggttggataacttaaagttttctgaagcttaggttcttatcactgtttatatatcttatatattcgtcggagctctgcctttcgtattctccctcagatatggtatgaaaatagactatgtcaattcatattcctctactgtgaaaatatataagtgtataatacatattccctaacacagatttagtcaccccattctttattagtaatcaacatataaatattagattcaaccgtataagacttggtgttgaatgaatcactttacttagatagtaatgaggccaaggtaagagctttaatcttccaacagaaacaaacaaa

SEQ ID NO: 2404 - DNA, 778 bp, Neofusicoccum parvum chrysovirus 1
  misc_feature 1..778: note = isolate CREA-VE-22AS3 segment1
  source 1..778: mol_type = genomic DNA
gaaaaaggcttctcatttttgcacatgtacgagcgctctccactaaacacgttaggcacaccaggtaacgcccaagacccaacagctagctaactgcccaccacaacgccccactcccacgcggccgctatgagcaacagggtgccacgtggtttcgctcacatattctccgacttggataccgcgagcgcttgggacaacgcactgagcgaggttgaagaacgcgagccggacgagagcgtggttattgagggcgaccccgagatctacgagacactgcgcagtcacggaggcccgccgcccgactacgaaactagtgagatagctagcgtgtacggccaaagagcagccccacccccgccagtggctgggtgcgcccgcaaccgctttgcccgcaccgagcgccccgcaaaccaccgcgaagcgccgcagaggttggctacaccacctcctcgcccccgtcgagacactcagttctacagttcggactggccggggcgcgacgctctacccacacgaggcggcatcgaggaacagacggcgcgcgttgaggcaaggaaccggtggctgcaggctgaattggacctattaacagaggacgacctgcggttcaacaacacacagcacagagcgcgtgccccatccgtacgcagagagtccggattataccaacgcgtgagcgagacagctgctcgagaccggcgccagcgcgaacgccagcgtagcaaccgagggagtagcaccaacggctctggcagcacactcgtgcggtacggcg

SEQ ID NO: 2405 - DNA, 779 bp, Cylindrotheca closterium
  misc_feature 1..779: note = RNA virus KT12RNAV genomic RNA, complete1
  source 1..779: mol_type = genomic DNA
tcctgcattgaccacatgcagggtttttcgggtattagccgttcttaattgaacgcaaatatttcgtttatttacgctatgaactccaacgacctggagttatttttgaactgcgtaagtaacgcagtttgatcaaaatatagtttagatttaacatttcgaagttttttagccgacatttttatgtcgtggtaggcaaaccattgccggtgacagaaatcccattgatatagtcacttaaataaaaccgttccttttaggaatgtgagcatttcagatttgggcagtgaatggggccccaaatcagtcgcacaattgcggcattacgttttaacgtttatcgtagtcaaaacgttgatttttacttagtttgattgtaaaactaatgtgtgttacgaaagaaagtcgactcactgatgagtttattgtgttccttagttggttacgctttaggtggtttgccaatcccacctttagttctcatttgagatataggaagacagtgaatgaattattagtaacgtaagtacgtccatttttgtggagcacgtgtaggtcggtaccgtatgggtaaaaccgttaacctgatcgtgtaaaacattgatgacacatgaagagacaagatttctatttagagatagggaagccaaacccgcacaaaaaatagagcaaaggtgcaatctacgagcctaatgtatttatacaaaccgtgagtccactaaccgaaagtatttacaggatcaaaacgagtttacagtggaaatttggtaatcaggaat

SEQ ID NO: 2406 - DNA, 779 bp, Guangdong fish caecilians picornavirus
  misc_feature 1..779: note = strain GDYYC830051
  source 1..779: mol_type = genomic DNA
gggatttatccccatgctgaatttatcccactctaaatattagagtgttgtactcctctttggcccaccattgtacggggtgtgtaccgtacactagttatagtaagtaccactagttcttggttccttctcgtgttagtgcacacgttcttgcgctaagttttctaacttttctttgtctaaactttaaatatgtgcttcttttaacctggaggtctatcgtatttgtggagaaaagctattctaagcaaggaaaacaataacactttctatcttctttgtttctgggttgtcctcttaaccaagctggtcccatgggggcgtgggtaaatggccctatggattagccatagtggttatgtaggcgaaataaggggaacccccaatcatgttgtacgttgagttgttcatggtaactgctttatatacatatctataattgcccataagaggtaggctacgggtgaaacctctattgtagacggtaaggctgcggtaaagattttctttcaacgcagggggaccgctgttctgcagtgggaatatataaatatttatgtactgtgggtggatgactaggctaaggcttgattgtttaggggtgcttaggaagttattagaggaaggggttcacttatatgaaattgaaaaaggatgaacgctatcccacctcaaacttcctgagccttttcttggctctttcaggttttaaatccccaaatgattaaaatatatgatatagatacaaatattggtttttgttttgctgattagtagca

SEQ ID NO: 2407 - DNA, 779 bp, Wenzhou picorna-like virus 5
  misc_feature 1..779: note = strain WZSLuoI84329 hypothetical1
  source 1..779: mol_type = genomic DNA
acgcattatgcgtatgcggggatcatcgagatgccggattaacttccggccagttggccttgaggaggtcagcctcctttcgagctagagtagcactttgggggttcgccccctctgtgctagttttgttttgtaattaaatttattcttttatgcaggtatcgaccgtgttaaaccagcggtcatcgacctgagaaggtcattaaatatatctaccaatcttttgtgatagagacgtaaaataaacctataaaaataaattgcgtccaatgtattgttattttgtcggtctgtagccggcactatatgttgtatgttaatcacaggctttttactgatcaaatggaagcctaatatgtccattagaactaatccgtaattaacggtaatatgagtattatgactgctcgtctaacagtcatagctccgcctgagagtgcaacgtaatgcaatcaggcttgagtcgggacgaattatcccgaccacatttgaggaacgccttcgggtagggcctcaaccccagacgagactcagtagcaagcgtaatgtgagttgtgcttaggtatagcctcattcatgaatttggattttgagcgcctttgtgcaacagcattgctaacttgtggattgagggtggccattgtgtccatggaataacacccaatgatgtccttgattaaatttcattcgtgagactaaagatgctgtgtcgactgtcgaagatttattctttgcaggacacctgcacggaataatctttgactcgtcgttcaataacc

SEQ ID NO: 2408 - DNA, 780 bp, Hubei picorna-like virus 33
  misc_feature 1..780: note = strain QTM27281 hypothetical protein1
  source 1..780: mol_type = genomic DNA
gcaggtttccctcacacggaaacctgcgcacgcgtattaaacaaccattgcatctgcaatcacgtcttagcattgctagtaagttgctttaaacttgctagttgtcctttgactagttgtatgatccgatggactttaatatataatttaattatatattttaccggattaatggtacgacttggaccgtgtgaagtaaacagcttcgcacgttttcttggatttaaccatcgatttataggatggtcactgatgtatatcagttattttcttataaattgattcttgagcgagttttcttttaaaactgcatgcgaagcaatttattgtttcgtagattcgaggtgacattgatcgtttgacctaataaggcgactgaaaaaccaccggcttattagttagatcttggatgttgcttatgtaccgcaggggtcttatccgccccctcctgtaagctactgcacgggtagactggtgtctccttttaatattgtttcagacccatgcgagtcgagtattagaaggctgatcttccggcgactgtgtagatggagctaatgaggatggcttactctcctcgtcatcggaacctaattgctgggacgtcatcaaatacttgggcgatccagttcttgagcggcattattcgcacaggtgaaaaagtcctgctggtctagtgctagtgtgcctcgctcgaatctctgacaaggtagtctttatggttatctataggagttcgggaattagggtgtgaacgagaactaaatttcattttttacg

SEQ ID NO: 2409 - DNA, 780 bp, Beihai sipunculid worm virus 3
  misc_feature 1..780: note = strain BHZC37455 hypothetical1
  source 1..780: mol_type = genomic DNA
ataggacatcctttacggatgtcctataggctcttttcttatgtcgatctacagtttgaactgctgtagcagtcgcatgagatgtattcatgctatcagttaatttgactttattaatagttgcgctcttctgggacactatttttattgtccctttagagattgctatatgaagtcctcttggacactcatttgcattgtccaattgtttaacgctagtattactttattctcgttggcagagtactgccattataagttttgaagcttagttcacttcatgaaaggctttctttcaaaaaccctttcaacccccccttttgggggcttacatgttcaaatctttcgttcggggaaagatttattgtttgctcccggcttcctctaattgattttagtgaaagctgatttatttgatgtaattcgcttagtgttttatgccctaaagagaatcccacctttactatctaacaaccgtttaataacctcgtgacctaataagaacgtggaacgagtaggaatgatttagtttaggaagaattggtctcttggagtataatttatcagacgtacttgaacatatttagctcaataccaaatagtaaccttacgtttaagcacgtgaaccacacgtgtagggtatgtagccgtgcccgatatttgagtaagaagtgctatttgtgagatacatataatgatatttcagttattaactttttgatattttaggaagttttgtttaggcctggtgcctaccgaaacctcacccagtttctaatt

SEQ ID NO: 2410 - DNA, 781 bp, Culex negev-like virus 1
  misc_feature 1..781: note = strain mosWSX37710, complete genome.1
  source 1..781: mol_type = genomic DNA
ctggcgacaaatgtcacaggtgcgttcgtggaagacgtaaaatctctaatagattattatatcgctagggctaattttactaacactaccatagattacgataagttgagcgaagttctatcgaatgtaaaaattaacgtaaccactacgcagtctaaaccgtcgttttcttactaccgccggcttatagattactatatcgaccacgactacaatatcacacaccatatttttggtggcggttctatagttggtgataggactaaaaggtttacgttcgctggattgttcgagagctccattcttgccatagttagaccgattttacatataatacacgaatttttcttggaatttattgaacccttattagaacgtttgatagatatattcgcaaaaataacattaccattagttaaaacaatatttactttttcaaaaactttgttcgaacacatatacaattacataatcgaaaacgtacctgaacagacattgatagactttttcgaaagatttttaaaatttttatacagaatattgcatgttgttgttgaaaaatttgtagacattctaataaacactaacactacacataaaatttttgagtttgttgcactatatttaattctgttttactattttaaagcatatttcttatcattaattatcacaatagtaacttttgtaatcattggcatagaacgcaccgacgaacataccataatggttatattaatttttacttttctattgattcgctgctacactaacccacgaa

SEQ ID NO: 2411 - DNA, 781 bp, Beihai weivirus-like virus 21
  misc_feature 1..781: note = strain BHZY60786 RNA-dependent RNA1
  source 1..781: mol_type = genomic DNA
tgacgttgctttcgggcgacgaggtaccgtgcgcgacggtaggacagctgccccggcggccgtaggatacaaggttggcgtctgttcagtatgaggtgaaaccatggatgtctaagacattgcattggtactcctgcggatggcacttgattccgaaaaccggcgtggggactttttgggcgcatgctgtgggcaggcatgtgagtagtgggcgctcgtggttttttctcagctctggtgtcgcaaccaccaccagcatattctgttaaacagtgtgctgtgtgtccgtgccatagtgtagagctgacccgtgctgtagggctgcattatggtatacgtgagagtgtaaaatagggaggccagtccctgcccgccaaattaccttccgtggtcaacccagcctcgaggggagaccctgagccaattcgtggacctgctgcggccaggttgaaggtgaaggccacccgactccgaatgccaacggaaaacagtcgggcatcctaccagcctatctggatgaacctgatgccccgcacgagagtgtactttaggggataggggagctggaggatggaggttacggttccgtgtcatgaagtgtggaagcgatgcatggcacgtaggcatccagaggccgtgggcggtcattgtgatcatggggtcactgagtaccgctcgcgaattttcatccacgttagcatcacattgtcgcgcagaggaagagtcccagtggtgttgatgtgtgagacgtttgtgtcggtgtttgccattcattacagag

SEQ ID NO: 2412 - DNA, 782 bp, Mirafiori lettuce big-vein virus
  misc_feature 1..782: note = isolate F_Meta-contig11655-RC1
  source 1..782: mol_type = genomic DNA
aaaaggaaaaaacattgcatcaaaacagtaaaaacattcagtcacttcaaattttgactatggactataacaaagatctaccagaaaatgtaagaacagtgactaaaggtgaaagtaatgaagcagaaacggttagcaaggctgattgtgaaaagtctaatagtcttagcattcaattgttcctcaattatcatgttaaagagattacagttaatgattcaaaaatacaaacaagaaatatctatcttttaaacttgttaaagggatatcaaactagttacaaagaagtaacaagattcctgttcggttcttggttacttttcgaagaggagctgcagccaccctttaacataaaagccatgataataattgacacgaaccaagaattagtagacgtctcagaatacaaaggaatcgagctaattctagggaatgacatacaatcgtgtattgattcattttatatgcatatttacaaggaagatctaattatctttaatgaatcaggagactttatgttcctgacagatcattttaagattccaaaatattttgcaagactggatggacaacaaataaaagtcaggaaaattattgaaaaaagatatttagaagtatctaaagggaaaacactcaaggagagaacttagctgttttaataaaaaatcaaacaaaacaagtgagaactacaaccaagatcaattaagcaagtaaaaatagtgatatcaaaacaaaaaccaaccttcaagttctttgtcatactcctctgcataacgttaata

SEQ ID NO: 2413 - DNA, 782 bp, Wenzhou picorna-like virus 50
  misc_feature 1..782: note = strain WZSLuoI83448 hypothetical2
  source 1..782: mol_type = genomic DNA
atattgcatttggtcctgggatgacattaaactcatccaaactccggaaccatctgtagtataagtttaaaatggttgtgttgtattggataccatatgtgttgaatttttgatgttattttgtacatatataggcttgcatcacatagacattctcccagtgggaatacctgtttttacaggaggtctcgtcaaccacacaaatatcatgcggaaagtgctttgagtagagcacttatcctaagttcataaaattacttactacacttaatactaataccaaaattgaagcggaaggaggctccgcataccaagtctccaaaacctctcgcgattcgaaggcgcagacagtcaactttgttgatggcgatacgccttggtcgtatgatattgtcgcaactcctgacgcgacgaccaagctctctggattctctgatgccgaactcggtgacttccttagccgacctatcaagatcaaggaatatcagtggacgcctggatcttctttgtcagttacgcgtttcagtccgtggacggaattttttagtaatgctgatgttcttgataaaattaatcgttatcgtaacttgcgctgtaatttgcgcctaaaagttctcgttaacggaaacagtttttattatggacgtgcattgctaacatacaatccgtacattgccaatgatcaagtgactgtcaatcgtgcatttattgctcaagatttgattcaagcgtctcagaagccacatttgttgttagatcctacaacttcacaaggtggtgag

SEQ ID NO: 2414 - DNA, 782 bp, Wuhan insect virus 20
  misc_feature 1..782: note = strain WHCCII13322 hypothetical protein 1,2
  source 1..782: mol_type = genomic DNA
tttagctaggatagttagatagcataactatgaatagatcaggaaatagacgtggtaataatggatctgtgcggttaccagcacaaattttggccagagcgctgacgcaacaaatgaacaacaagtcagcaagaaaaccccgtcctcccaaaagtaggcgaaaacagccgattgcacctggcaatcgagggcttcgtgacaccttcgtgttcacggttgattcactgaaaggcaattctgaagggaccttaacttttggtcctagccttaaggagtgtcctgctttttctgggggagtgacgaaggggtaccacgagttcaaagtggtttgggttaggttcaccttcatttctgaagctgcctcaacctcctctgggtcaatggcatatgagatagatccacatttgaagttgacaaaactgtcctccaccgtttttaaattcggaataacaaaaggaggatcaagaacctaccgagcctcgcagatcaatggcaatgaatgggtatccacttcggatgaccaattcaggtttctgtacaagggcaatggagacacaactacagctggtagttggcaagtgacaatgatggtccatttccagaactccaaataggtagacgacgacccggcacctgctccggtgccacctccatctccacccccctccccctcacctagtccacaaccaacaccagatgatgagagattcattgtttacactggtgttgcaacaactcgcataagagcaaagacaaccgatgatgcattaattctcaacccg

SEQ ID NO: 2415 - DNA, 783 bp, Nilaparvata lugens honeydew virus-3
  misc_feature 1..783: note = genomic RNA, complete genome,1
  source 1..783: mol_type = genomic DNA
tattttatacccccatgcttcatggcagatgcatacagtggagatgcatccctgtcaaagcataccctcttttagttataagattttattattattatcaaattaggcctaagtataatataataaaatgctcgttactgaacggggctcttttgagtgtataaaaatttggttagaatgtaagtttgatgactccatcactcgcggagttatatatgaattaaagaatgtatgggcattccctcacaaatatgaaacatgaccctataattatatcgggaagtactcctatggcgtttatgttgctacttactgtatacatatttcggcattagttgtcaccatgcaagattctgtcctctattatgcatttgtataggccatccgacttgtcgcctaaactatacagatgtgtattatgataatgtttcgagtactagaactacttattagttattccatatatgcataatcatggtattaattgtgagattcatatattttgcgtcagtcgacacatggtgttttataaaatggggttgcattgtaaacatttcaccgtcttcgtcgatcattccatatttttttttaaagctcaaactcttctctttatctatcttttcggagtggcgcccgagatttataatctcattaaattgagagtaaattgagccattttgtatttcctttcttttcttccgtaaaatgtttagctactccgaccaccagggataggtcgatcatccacccccaagaattacgaatcagatacaactaaatacg

SEQ ID NO: 2416 - DNA, 783 bp, Hubei tetragnatha maxillosa virus 3
  misc_feature 1..783: note = strain SSZZ2994 hypothetical1
  source 1..783: mol_type = genomic DNA
ggggcttttcccccatggctctcattttaacggcaaagataatcatgccgatagttaagctctcagtgatcttagatgtgcatttggtatacttagtttcgacttttatgcttcttgtacaatctattacactgttggtttttcatgatttcaccctttaagttgaaaaacttattttgattttgattttcgaatttagaagtaagacccctttgtttgacttaacttttgttattttgacattgggcaatccactgacttttgagaatcaccccttgtggttagaagaccacgtacgtaactttagcatagatccttggatagctagttacggcgacgaagtctacttacactttaatttactaagcagagagaaagtgctgacaaattgatttagttcgatttgtcggaattgccgaggtccctcacagaaacccgcctctttagtattttatttgttgtagtagcaggctttgacgatgaactgatataagtacaaactgatcctttggtcggaccccgttcacaagtcttggaacaacacatcgcgaggtgtgccttggccggtaatcatcgctatggttacccgtggacaattgggccccccggctgcgctagcaagcaggaggaacatatcaggaattcaacgaagtatcttttacctgcgttttaataagaaatgcaggagttgataaatagggcttaaactggaagcgagactgcagcggctaaagcagcagtaaatggtgccagtgtaggtgttttctctttttaaatctcatt

SEQ ID NO: 2417 - DNA, 784 bp, Shahe arthropod virus 1
  misc_feature 1..784: note = strain SHWC0209c12762 hypothetical protein1
  source 1..784: mol_type = genomic DNA
gctcttccgatctggggaaacccccctgttctcttttgaaagctgaagtattggattttgcgtgatttattgagttaccgcagtttcatctgaatttattccggattttgcaaaatgttcttttgtttaattgataccagcgggattttatctaacgaatctagccacacttttaatcattagcactctttagtacaacggcaccaaccaacccccccttttatcattttaatattcttctgtgacaggcgccttagcgcagtcagtgtttgaggattctttatccatttcggaccgcgttatctatttatagatcctttttacgatttcacactgattgtttttaacaaccatcacccttatatttacgtgtacaaaaaattataaaaacgtcgcaagacaccaaaaacaactgtcttttcatacattagatgcaataataacactgatgaattagactatgaatcagatttacctatatgatactaaaacgtcgccgaggcataaagagcggacccaaaaggaaaacctacgtcaagtattatatctgctgatcagccatcttttttattttgtgcgctgtttttgcggacactttgtaaatgctatgtcgttgctgggctcacttttcgagcaataattactagaacccaaaaaatgaataaaggtcttacgggtattcttaggcagcaactttcattgtcaatccaaacatgtttcggtgtttggttctagcaattaatccttcccacgattcctattttaactctttttaacattcacg

SEQ ID NO: 2418 - DNA, 786 bp, Trichoderma asperellum hypovirus 1
  misc_feature 1..786: note = strain TaHv1CBS 131938, complete1
  source 1..786: mol_type = genomic DNA
gggttccgactaaggtgctgtttacagcttaatcgggtgaacgcgcccaacttcaatgggtcaccaatttgggttcgtgatgttcgaaccattggaggttaaatattttgcgttcgtgtcacattgtgacgtgacctatttaggtcgtagggtgagtccctgtggtccattaggacggtgcctctcttggggcgttgcacgaggtgcagcatatcaaaagtaaaatcaccaaaaacaatttaaaatatgaaatgataaaatttgacctgggacgtcattaaactcacggcctcaattgccaccgctcatcggtctcagtgaaggggtgaaagcggccacggtcgttagtaaatataactgggaatgagtaggagagtctgggcccgattaccagttggctgatattaagcggatagattttaaaggttcacctccaggctcaatcggactgagatccgttgtcggcagtaatgagtgcaactcacaattctggctaggtaagacgaaaagacgttaaaacctgaggtgttcgatcaactttaagactatttcggttaaatatggctgggtgggaaaggtagtaagctacccaaaaccttaggctgagatgtcactttgtgtccggtaaaactccggggaagcggaaaaatgcacgctgcacatgacacgagagacacttgactgtactttggtcccgaacgggagcacatgggggtcgatgacaattgggaaagaccaattgacttggcagtggaaagaactgctattcaccatgatcacatataa

SEQ ID NO: 2419 - DNA, 786 bp, Mobovirus A
  misc_feature 1..786: note = isolate MBOVA, complete genome.1
  source 1..786: mol_type = genomic DNA
acatgggcgtttataacgccctaccagtcctctttgaacgtgtgctgtccatctatcagcgcaccatggtctcacgaccatgttgttcaataggtattctaatccaatccctattctcccacaaaccttcttgtaactctgttaagccttttacatccatgtaatttaattttctccacctaaaaggatttcccccatggtcctttttggctcgaacaaatgctacatagggtcttgttttctccccctggctctcttgccagggttccataccccaattcctctatttccatgatttttcatcatggtttatttttactgtcttcttattttctgaggtgaccaactcctaagccgactgggtcgcggaagcccggactcctcgcatcactagggtgcgtagcgatgtaggcgaaaatattggttgctagatgcatacatatagtgaattgatactacaccaaactctgttctttttgaaactagctattttctaagtaaggtaggctacgggtgaaaccttaccattgcaggtacgtgaaccgcaacggacatttggccgaagactggtgtacccacgtcagttataggacctcttcaacgttggtggacggcatgtcactgattagttaggctagtgaatttaagttcagggggtatcttttagcttaagcgtgtattctagtaggacttgcagagcctccccacctaggaggatctctgtttatagccccttttccttgttccgttagttttccacacttttacaatatttgatgatttgtt

SEQ ID NO: 2420 - DNA, 788 bp, Bovine torovirus
  misc_feature 1..788: note = isolate BToV-China/BToV yak-XZ01/2019, complete1
  source 1..788: mol_type = genomic DNA
tgacgtattcttagttgattttgaagccttgaaataaagcttttaaaccccttttacggtttgtccaccatacggacattgttcagaccgcagtgtcttgtcaaggaggttcagccttgacattacttctctgtgaggaatctactcagaaatactgcttgcgtactagtagttacaagagttgacacttagtacttacaagcgggttcaaccgccctccggaacggtggaaactccctcccgaacgtgcgcttgacgtgaccaatttaggtctagctttctgagaaatactccagggctgtatttgaccacatctgttattcatttgtggttgtccacaaccaaacatcgtgtgactcacctccagctttgctgcaggccttttggactaaacgagtcgcacgttttgtgactagttttaggacttttcacactcccctaccgccaacctgattcttttcatccttaagttttgcgtttatacgctattttcttacggttggcagtttgtttggttgtttgcacagtttcttttaataccaatttttactgtgctcttagtttttacagctaaggctgttttttatttactcaagttgcttgaagcagcttttacaacactagttttagttttaattgaaaagttaaagggcgtcaggaaacaacgcagacgcccttcttgtggtgtctagttagtcctaatctggcaaacaaatatcaggttgttgactccctttggagtgagacctacgagtatcagtttgcttattttggacacccatataaaa

SEQ ID NO: 2421 - DNA, 789 bp, Picornavirales sp.
  misc_feature 1..789: note = isolate muf160shi3 genomic sequence.2
  source 1..789: mol_type = genomic DNA
tttagtgttgatgggcttggccgcaggtgcttcagcaattggcactgcggtcaatgctggtatggctgctaggggacagaataaagctattgaccaacaaacttcagtcaataacacaaatttgcagatgcagaaaaacgctatgaattatcaaactctaaattggcaacgtaatgtagatctgtttaaacagagtggattacctggttggatggcggaaacccaaggtggaggtagtggtaatgttgcgtttaacgatttccctaaaataactcaacaagtagctggtaataatttctcttcagcagcaatacctggaaatttagtgagcgattttggcaattctatgatgcaacaagtgatgggtatcgctaattaccagtacatgacaaaacaaggttttggtccaaaagtatctaccatgtcacaaacagatcgcggtgacattaatcctaccagcacattttcgacccaaacagagccaaatcctactgggacctcgatgactgcgactccaaacacccctgaagaactttggggtgatctgggaggcacagtgcctagtacatcctcaacagtagctatgcccgatgcgtctgcagccgctgaggcgattccagctgcagcgccgattgaagaatagccctagtaaacgtgttacttgtgaaaaacatccgcggattttttcacgatggtacagttgtcaaaataaatacatgggcttgaaagacttgaggatttactttgaccttttgtgtttcttggataataaccttgaaatattcaaag

SEQ ID NO: 2422 - DNA, 789 bp, Pearces Creek picornavirus
  misc_feature 1..789: note = isolate A888, complete genome.1
  source 1..789: mol_type = genomic DNA
acccctggggcccacgcggcgccagtactctggttcgcttagaacctttgtacgcctgttttccctcccctaaataaattaagatcaccactactgtggggagtagtccgactccgcaccgatacgtcgcaccagtgaactggttcgcttaggacctttacacggagtagatggtgttcccttcccccgtaacttagaagcatgaaccaaccgaccaatagtggcgttgcatccagcagcgcagcggtcaagcacttctgtttccccggcgcgaagcgtcgttacccgcccagcctactgcgggaagcctagtagcaccccaattgatcgcgcggttgcgttcagccacaaccccagtggtagctctgaggaatggagctcgccgtccccccacagcaatgtggtggcttgctcgcgcgtgtcctcgggttcactcaaagagtgttcaccgcaacatcaagtaaggtgtgaagagcctactgcgctaggctggttttcctccggagccgtgaatgctgctaatcccaacctccgagcgtgtgcgcacaatccagtgttgctacgtcgtaacgcgtaagtcggaggcggaacagactactttcggtactccgtgtttccttattttgtttcaatattttatggtgacattgactgatatctgtgaatttgctcgctgcccctgaatattgccttatattacttaatagcatttcacgaaaacgacccagctttcaattgagcttattaactttgctgtatctttaaaccagatccacaagtcggtgtaca

SEQ ID NO: 2423 - DNA, 790 bp, Beihai sesarmid crab virus 1
  misc_feature 1..790: note = strain SCJXSX39422 hypothetical1
  source 1..790: mol_type = genomic DNA
cagaataatagctacctgcaagtcattattgacttgcaggtagtattttatgtaattgtgcctatgtttatgcatggttctacggacctatgtttatgcatggtcaccaaacatttattattctgggagaaggatactcctccacattatgtggtaaaaaaccaaatcacggcgtttaaaggcctgaattgcttttagcccactccctttctatggagtgaccaaaacggcggtagggtagagattatatctccctagtccgcgtctttgctgaatattgattcagaaaggaatggcaattcattgtgatgaagttttaggacagactttaaaatgtcctcgtgtgttatgttatatgataagagcagtaccagattttctgctctacatttgctctatgatttttcataacatatcgtctttaagattgtactttattgattagtttttgctggtttagacctagctattaaggtgagtcgcccactctgcatacttacgagtatgtcgaagtaacgatagtctttttagtaaagttgcgcttcagatggatcgtgatcaccacctgatactgtctttttaacgaagctctgaaagtttaaatacttataaagcatgtgtttgttaaagagaccaccgtcctgctgttgttagttaaaaataaccaggttaccgaattcatatgaggaagtctttaagaagatatgggggttggtactcccgaacggataattagtacctgattagttaagaactcgtgttggtcgtgcgttaacggctgtgcccattg

SEQ ID NO: 2424 - DNA, 792 bp, Brevicoryne brassicae picorna-like virus
  misc_feature 1..792: note = isolate IL, complete1
  source 1..792: mol_type = genomic DNA
ttgaaaagatcgtgtagggtatttaccctacatgatctatcatattcttttcatgacgacatttgttcttgacatgcaccatatttgttctctttgaggattcttatggtatatgttacaggattcttgtcgtagtcgtttggatatgattattggcacgtcccgctgattgcgtaacaatcaacaatttagtctataagctttcttttcaaaatttaaataattaattcgctctaacaacattagaattcttctatttcaattatactttattaaccaaaaatatttagctttaagactagctttgtgagctttgcacacacgtcatttatgtattacactttagaaggtaccataaatggacaatttcggttgtcttggctgatacgataatcagtttctattctaaggcttcgggtgaagtgtctatcccgttgaaattaacaccgctggataagagtctttaaacttactatctgagattgtatttagtacaggcgatagttttatgtaatctaggctggagacagtacgattatataaatctagtttaaagaatttctgtttggtttgtgtatggcatattcagtgattatacgtaatcactgtctcgtttataatgtttaatatttttcggcaaacggaaggttgtagttactctgagagatttaataccgtatctaatagaatttagaactcatgatttgttctattagtccagcatattgctataccgtattattttgcctttagtagcgttttaaccaactgacttattagccgcatttacct

SEQ ID NO: 2425 - DNA, 792 bp, Beihai picorna-like virus 1
  misc_feature 1..792: note = strain BHZC36988 hypothetical protein 12
  source 1..792: mol_type = genomic DNA
atattgtacatattgtcctgggaagacgtaaaactcattccaaccccccggaactattcgtgggatgtgtaagtttaaaatagtcttgtagtattggttaccgttaatctgtaaatttttgtgttatttgtatttctttctggcttgctacttgttgacacttccctcgtgaagtacccgtatttacgggaggtttcgtcagccacacaaacactatgcaggaagtgcactgagcaatgcacttaccctaagttcataaaatagctttctaatataattaataataatgataataataataatgaaggaggtgccgcgtatgacatttccaaaatttcaaatgaaacaagtactcaaacaactaattttgttgatggagacagcccttggtcgtatgacattgttgcaacacctgatgagacaaccagactcgcaggtttcactgacgcacaattaggtgatttcctcagcagacctattaaaattaaagagtatcaatggactccgtcatcatcgttgtctgtcgcacgttttaatccgtgggctttgttttttgcaaatgctgatgttcttgataaaatcaatcgctatcgtaatttacgttgtaatcttcgtcttaaggtgttagtgaatggcaatagtttttactacggccgtgctttactttcttataatccttttgttacgaatgatgaagttacagtgaatcgaacatttattgaacaagatcttgttcaggcttctcaaaaaccccatttgcttttagatccgacttcttcgcaaggaggagaa

SEQ ID NO: 2426 - DNA, 793 bp, Toad HDV-like virus
  misc_feature 1..793: note = complete genome
  source 1..793: mol_type = genomic DNA
ttctgaagaaaaccccgggaaaggaacaaccccgagtttttctccctttcgacagccgccacactgtctcatcagctgggataggggctctgtcgagccccccggcccccaggagagagaaaaactctgggcaagagattttgatctccttattgagaggaagatttttggaagattccgggagcgggaattgttcttccgggcgagaccgaccgtggcccatcctcggataggtcgggccctctcgggactgctgtcgccccggagactctcggagatggagatgcctcggcgcgggtggcctcggtccaggaggcgaaatcttccgtttcaagtcggaaccgatggagtcccccttgggtccttcgaaagctgaaagaagttggaaaaatcgggcatccggagaacctggaaatggactttgaggagagtgttgctaaggctttttacctgtcctgtttttcccgatttcccgcatgtggctcttccgcaaagaggggctccctgaccgttttgtccttcctcccctccgcgcctttcccagttttgctccgggaaagaatttgacagtttcttctccagatctctcgattcccttagggccaaactagcccccgggagcggcgcgttctcgtcggttccctccccccccattactaacaattaccgtctgagttcattgtccccaaatcctcaaacgggatcgcccccgggctgcagcgggagtctaaaaagccttttggcataatagttctccgctgagtcggaggcgcggtcccctatttttgaggaa

SEQ ID NO: 2427 - DNA, 795 bp, Beihai picorna-like virus 21
  misc_feature 1..795: note = strain BHZY60822 hypothetical protein1
  source 1..795: mol_type = genomic DNA
taaagtctccatgcgcattatgcgcgtggagacttaaattgaattaattggcattaatatatgcccttgaaccttgtttacgagctatgaagggcattatgatgcccccatacctcgaaggaaagaagcaagctttagatcctttattgtaggatcttagtttgatttaagttatttattttattattctactggggggtggtcccctacaaaaaccacacactatatgtatatggaaaccaaaacgatggtagtagactctctgttggagttgaagtccatggccttaatggcaagagatatcgtggaatgccaccacgataaataaattaaataagcaacacgaaataattcgtgcattttatcggagtaacccgaagtgcgaaagtgctcgaaggtactcgtgtatatttgatatgtatccttgttcgggatgctgtctagtagccactgtcaagcctagcagtgtagtattataatatattacatcattgatagtatatacgagtataggcggagagcagttagtaacccttgtccgaagaggaaaggtaggtgcaagcagtattgtaagccttgttgcctgacacatagtctaaggaaaggtcggtctcgcccgttagaagtatcggattgtttagagtagttatatcagtagacgctcgttcaaaattgttaactgaattcttaatatttctatagcagaattaaaattgcaataggactcaaattagaacaaaagttattataaagaattaaaacgatatttttgaggtaaattgacaaagacagaag

SEQ ID NO: 2428 - DNA, 796 bp, Yado-kari virus 1
  misc_feature 1..796: note = genomic RNA, complete genome.1
  source 1..796: mol_type = genomic DNA
tggataaaaggccgacaccttttatcccttctatcaattctttttgatagttgttttctaagtcacatggtagcgaaccacaattcgttctttgacgttgttatgaactcatatcatttccataacgtaattcgatcaaaagtcttggtggtgtgtacttcctcacaccttgtcgtttattttgatgcactagcaacgacgtaaaatgcatcctattttacaatttcctttcacacgtggagttaaaccttcactttactctttttcaacgtgtgcctagcattgtatttgaaagctaagtaccctgtgtcatatgaatcacacatccttgtgatatttctagtggtcccaagctcgtttcagccgagtataagatgacagtccctgctgttaattgtgtcatctttagtcccttgcccccctatcttcgtttatttgaagatagataggatttggtttagccacagtgttctatacctagatagctgcgggacgtgattccccgttgggaagctatttctaaaacaatcacaaaaacaggtataaaattaaaaatcacaaaacaacttaaacatgcatggttataagcatgtgcgtgactgagtatgtcctaggttttgcctaagatggaccactacttcacgttgttataactatttgaatcatacactattcatctgtgcctcggaccggccttgtaggaccccgacccatcatgatttctatccgcaccaaacatgtcaagtcaggacctcaacgccaatcccccgttgtgccagtccattgattcatccct

SEQ ID NO: 2429 - DNA, 797 bp, Beihai picorna-like virus 36
  misc_feature 1..797: note = strain BHJJX25939 hypothetical protein1
  source 1..797: mol_type = genomic DNA
cctgcaggtattacctgcaggaggtctgagatctggaattcgtcgatctgcgacgacaggctggttgtttactagctttgttgttgtttttgtgcgtggaaacacccgtttcatctttgtatgtatgtatattagttactatatgtttgtttgccggtgtcgttaaaccggccatgccccgcatatgcggggctagtttatgttgtaaatattgtatcctataataacgtatggtccctgttcggaccagtgtatgaaaaagtggactattttgggttggagcccaacatggaggaacttaccccagtagtttgaactggggacccggggtcggtttaacgagccggccccgtgagttctggattagcatggcgctgtccacataaatacgtacgacctttattttagaataataacctttgcggatgccttagggtgtacgcagtatacagacgacaggtcaacattgacgtttttggagttggtccgtgcctctgtgctgatcccgaagcacatgcgattaaagaacgacccgagatatggtatcatcatttgtagttgtacgaagcgtatgtatctgctattgtgtaaacatagtctggtaaagccatgatttatagcatggacaggccagtttgtggtactgaagcagtagatttgttagcatttcgttagtggattgcaagtgatggtagcgaagtccccaagaaattagatgttgtccgatatttgagcacgcgacttttgtcgcgagctcaagtcgtcagttgttactgacgaacttgagactcgcgttt

SEQ ID NO: 2430 - DNA, 798 bp, Beihai picorna-like virus 29
  misc_feature 1..798: note = strain HOU158675 hypothetical protein1
  source 1..798: mol_type = genomic DNA
cggacgttcacgtccgtatgagatatagtttagttggcagcttagcccgctgcccgggttttacctgtattttaggtactgtttaggtttgttcttgaatgggatcgcaggatacatggtagaaccatgattctgtcccatttttgaggaaacctttctgatactgttacgattgacttctatataaacgttttttaatgctctgaggagtaaaccttataagaaatctagggagtccaccctacgacaaaacaaaccccaatgctcatgagggcctgcgcatgtcgcttttattgtgtagaccttccgtacgtcgatgagggaagtttaggccttgagcaagcctttagaacttcttaccttactttcgagtgaggtggcccacagtggtgtggacgttcttgattggaaatgatcatattaggtcatagtagtgaattatgatgatgttatgcataattcgaacttattgaaactttgatatggtaatgtcggtttaaatacgcaaaagtgtgtgagactagagtactcgactttgctaccgaatggccctgttattggaaatgatatttgtatcgatggcgtattctgattctgcaggattcttacttatgagatgtgtgagttttatccggtcataagcctaattatcatagtgttggatgtggtgagggttaatagcccaccagcttctatgcaaaagaacttagctggcccaacacgccagacgcctagccttcgggagggaattttatcgttactaaaaaccaaacacagagcggggagagcttgctgaca

SEQ ID NO: 2431 - DNA, 799 bp, Beihai weivirus-like virus 15
  misc_feature 1..799: note = strain BWBFG27289 hypothetical1
  source 1..799: mol_type = genomic DNA
gacatgtcactccagaattcgctgcccccgggtcggtcagggggtggcatatggccgtggagaaggccttggtcgaggagtgtcggccatgcatgtgtggggggccggttgcccaccggtcgagatgggggccctcgagacattgccgactcggggataggcgagctcaccgctgaaacccttggcttattctttcgtgcgggcgtggtgtgacgtcccgtcaaaagcctgctggagtatcggcactcctgaggtgcaagccagtacgcgctgtgcttcgaggtgggcacagttcctttgccagggacgaaggcgtaccaacgtcactcaccgtgccatccagagcaccaaccatttgtggcacgggcgtgtgagtcaggataccacatctgtgggacacccctggtgttgtgtggaaatcggaccgcgacggagcacgccacgtcgcaacgggcaccgtgggaagcacatattggggaggcagagtgacggggaatggactacggcaccgctgcgccgcggaggcgcctgccctcgccattttggcagacggcagatacaccccacaattttgatcgattttccgcgcacacccgcgtgtcggtgcgaccgactgccaattttgggactgtatgaagcgcgtctgttctcgcgcgtccgtgcctatagcggacatcacggtccacaagagacaagtgatcccacaccgactgaccgagctccggcagccgccgggggaggttttgcacgaaggagttgagacgttcggggtctggagagagtggtaccgtcgtgtgcc

SEQ ID NO: 2432 - DNA, 800 bp, Beihai picorna-like virus 24
  misc_feature 1..800: note = strain BHZY60459 hypothetical protein1
  source 1..800: mol_type = genomic DNA
tgcaactgtgctttgcagcacagttgtattacttacggataatgtaattcggtatattttatcgattatgttgttgttaacagtttatgacactctaaatgagtcttacatactggcgcctaccgcggcttcagtatgtaatcaagaagaaagttccatcgactgtctaacgacagtcgtggtttctctctttatttgtattataaattgctaatatcacaattatattattccgtatattactgtgtatttctgtatcatgtgtaatatgttttctaatcacaggatgcttggtcaaggacttaaaagctcccgatagggcaccatgggagaactgattattaattcagtatcttaaacagcagtattgtctaaccacgactagcctgcgtctattttctcttttagttaaaataggacaagcctatcaccttgcgtttttgttaacgcccactagttccgattaaccaagtggttaaacttagaagttaatcaattaagagatgcattggagtcctctgctccattactctataaaaacctaccccaaagagtagaacttgagggatgatatgattatagcctaactaactggcaccataagtgaaaacgttagtccccacacatgcccggtcgtctcttgtgacggacggggaatcgtagggtcatgatcctcacgacttgaaagagcttgctcttagcaaaggatatacatcacggagatctaaggatcaatgaagtgattaaaacgtggcccgccgtattgaacatacaaacccattaatttcgggtttagttca

SEQ ID NO: 2433 - DNA, 800 bp, Beihai octopus viurs 1
  misc_feature 1..800: note = strain BHZY180716 hypothetical protein 1 and1
  source 1..800: mol_type = genomic DNA
gtgctgcagcgcgtaagcgctgtagcactccataggtatttggacctcaaccggtccaggtatcactctacatattatatgtgggcgtttcgacgccctgctgtatttttagagcgttaggtcgctctgcaatattgcgggcgtcaagcccgtagcattgtagaagcacagtaagattttggaactcttttaaccaggtatcgatggtgttaaaccagccatcaccccctttttgtcctgagctggacgctaaacatgctcgattgtcctatagtaagacattaaactgctttttgtccatgagtaagacataaaatcgctcaatagtcctagatatgacataaaactttctgttgtggctttaggaaccacacactagacttaaaattctgtattgaagaaatgttcggatgtagagatttaagcaacctctctgcaatacgcaatatgtaagacgtatatgtcgattgttgtgcaccctctatgatcgttccacagaattaccgagccccgtcgtgtagcgagcacctcggcggatgattagttaagccatgtcgaatatgtaccgaagcgatcctgcgtttttaataaacaatgatcttcggagccaattacatgacatgcccaggctactatctgcgacgctgttaggtacgagtgtaagaaaaatttcttatacgttgaattttgatgttcgagtgccatttaaggctatcattataggttattcctatgtacttgatgctagccaaatttaaaacctatatggtcagttgtgaactgtgaatcactcggcttgg

SEQ ID NO: 2434 - DNA, 801 bp, Heterobasidion mitovirus 1
  misc_feature 1..801: note = strain an1 RNA-dependent RNA polymerase1
  source 1..801: mol_type = genomic DNA
ggggtagactcctaagataggagcctatctcggccaaagacgaggccgatgatgatcagattcatcatatgaagatgacatcaccacaacgcgaggttgcggttaggaatgtcccttgattagtaaccaaggcacaaccctttgcataaggaagtagacgttgggttgaaatacctaagatccataagatttgaagagataacatcaatatcaaaccatatgggttatagtatgtcgaccttctattctatctggtgtcgaatcagattagaaagacaggacgaaccgtactagacggcccttatttgcttttgcgatccgcagaaggaacctttggaggttcttccggggtggaatatataattccggagatcaatgactttcgtcattccaaagattaagtgttgagtgctctgatcggctgtatgaaaattacagtccttcatcctagcacttctttaatggggtgacaattttacaaagttattgtgaaccagaattggtattccaataagcatatactcatacgcttattgttaatcacgatattgtatatgtggaaggataatccaacaggtaaccttaatggtacctgtgaggcaactctgctattaatacgcagagtagaggtaagtaattcacctcacccttacaggaggtctaccagactctcctagagtagctgcagccccttggacctaatgtgaaaacattgggtccttaactaatcccgttaaacggagaagagggaaactgacttttacatgacctagttaacgatacaacctttaatcacaaaat

SEQ ID NO: 2435 - DNA, 801 bp, Niviventer confucianus picornavirus
  misc_feature 1..801: note = strain Wencheng-Nc42-21
  source 1..801: mol_type = genomic DNA
cagtgtgtatgccatccctcatagcatgcctatgactgatggattcacaaccctttcataacccctcccctaattcccaccttgcaaccatacgctttactccgcttcgggttttgcggcccgatgtcgtgaagaaacggttacgcaaacttagtggcgaacggggcctgccaccataagtggccccattagaagaatgtacgatccgcccagtaggcggccaccatccaggtggtttacgggcaagcacttctgtttccccggtgacgttacataggatgtccccacgtctgaaagtgactgatccgttacccgcctcaccactgcgagacggttagtacgatgtaatagctgatcaccgttgatccgggcgttttccccccgcccagaaacatgtgatgaggagcggcatccctcctatggcaacatagggcctctcctgcgttggcacgtgggctccttgagcacggtgtgatgtgaaagtcatccgaagaccttattgcgctggtgttgagtcctccgcccccctgaatgcggctaatcctaactccggatcatccgccggcaagcccgccggtagggtgtcgtaacgcgtaagtctggagcggaaccgactactttgggtgtggcgtgtttccttatttgtttggttgattgcatatggtgacaattcgttgtattgacgtttgccacttcccctgcaaatattaccaaaccaggtgctgtttttgtgctaactcctgccttactattaccaagaaattttcagagtcacttattccctcggttgtttggagcata

SEQ ID NO: 2436 - DNA, 801 bp, Beihai picorna-like virus 79
  misc_feature 1..801: note = strain BHBJDX18844 hypothetical1
  source 1..801: mol_type = genomic DNA
cgagggggtagtattaactaccccctcggtatatgaagtcatagacgagacttcttaatttacacttagtctattctttggtcgtatggtatctacgggaccatgcctcacgacgtccaatgtcaataagtggcgctgacacgctagtccgctataagcgggtcactggccatgagatgaaaagcctattctgaatatgattatttgtaagttatttacattcgcgaaccccataatttgagatacagtatgttcgcttcggagcatcctggagcattaacggttaacagttaccggctcgaaattgcacaacaacatcgtgcatcttgaccatttactttacgccaatgatggagtaaccatttcaccgacaagctagtactcttgtacgaaacactaggattgaaatgttcgaaactgattttagtattgtaggtcaccactttttactcttacgagagaggacgtagctttcccacaagcacgtaatagtgatgaaaattcaccattaagggagcagtaagcgctgtctgaacaaatgctgcgtatgtgcacacgcaatagaagaatgcacccttttaccttgccggtgctctcgcgagcatcgggttcaagtccttcacgaatttccgttgattatgacgattgtcccagattttctggttgtacgataagagtcaactgataataggaagtagtgaacttaattgtttgcaatgtcccttggaggcgcccagacatcaccaaagccatcttttggctttggcgttatttgggcagaacctggttaccgaaactatc

SEQ ID NO: 2437 - DNA, 801 bp, Beihai picorna-like virus 49
  misc_feature 1..801: note = strain BHZC36855 hypothetical protein1
  source 1..801: mol_type = genomic DNA
cttctttagattagtagtaaatatttgtttctgttcattggaaaactatcagtaatataattattgttgttatgactgatgtgcccaatttttggaacggtaacgactgcgtagcatcccccaatgtaggactacgtagacgcttagtcggtaattgtagctattgatagttacatttcgtgacaggttgaatgaatattaaaaataatcatagtacaccaatttgatgtaggccaacccgttgtttgtatatgcatgtttcatatttgcgtttatatacatttgacaaacagtttttcgtaaaaagggctttactgttgtgaataaagctcgcgccgttttgatgtggtaagttaggccgcaccgttgggcgcacgagatttgaagaaaaaacaaaataaaaagaaaataatgccaaagaaaaaggtagcagaactaccatgtatgtttaaaagtgctggcagcaaaccttgaatgcaatgttggagcatggtatgagtacactgactcgtattgatataagaggttttctctgcatagtcactgcaagttatacggttcacactagtatcatatgttacaaatgcgtttgttgagtagttgtttagtttttaatgcgttatgcaccctaggtaattagtcaagtagtatgagtgatcatgtgcgttgtttttatgttacgtccagggtaaaagtcccaggaacagtttaccgctcctgtagagcgggtagccgagctccgggcgataaacgcagcacgcaaagaccagagtgaacacagttaagtaataagtaagtaat

SEQ ID NO: 2438 - DNA, 803 bp, Plasmopara viticola lesion associated Partitivirus 6
  misc_feature 1..803: note = isolate1
  source 1..803: mol_type = genomic DNA
ggctcgtcccaagtcgagcttgcaattgctaattcattcctcttttcccctctccaccctcaagctctaaagcaattatagcaaccatgcagttcgagccgccgatcaagccagccgacatgaccattaagatcactgatggagacaatagcaaccaaagcatcgattcgaatggcatcgtgattggccgctggaagaccggtctctttggtttcaccgattcgatagtgcccaatggcgtcatgtcttgttgctgtcccggtcttgtggtagctcagatatcggctcgtcttggctttatgccattttattacgtgctcagtatctttggagggctttatctagtagcacttattgcggtgacaacccacagtcgctttttcgactttattatatggttgtgcgttgtaatatcggccctctccatgatgcgtttgcgctggcgtattcgatcacttttcagtattcctggatctcatgctgaggacgccgccttcagtttttgctgtggatgctgctcgatcgcacagatggcctcgcatgttgaatcgtatgagccgggcactttttcatttgccccacgcgccacacttcaaggctactcactgaattaaggctttattataaaatagaccatcactatttgcctggaggaagatgggtacgcaagggtacagatataatctctaatactatttacataggcgatttccattcgaaactgaactccgtaactcaatctttgctatactgtcgcaaatttttcagctcttcctacgcttttttcgtaacctctacccact

SEQ ID NO: 2439 - DNA, 803 bp, Human parainfluenza virus 4b
  misc_feature 1..803: note = strain HPIV4b/Seattle/USA/SC0496/2019,2
  source 1..803: mol_type = genomic DNA
tgcaatcaaagcattagaggtgaggttagacaggatcgaagggaaagttgacaaaattatgctcacccaaaatacaattcagcaaacaaaaaatgacactcaacaaattaaaggctcacttgcaacaattgagggcctaatcacaacaatgaaaataatggaccctggagtcccatcaaaagtaagtcttagaagcttaaacaaagagccagagcaagttccaataatcgtcactggtactggcgatgtctcaaaatttgttgatcaagacaatacaataacacttgatccgttagcaagacccattttgtccggaaccaagcaaacaactgatgaaaggagagcaggtgttcgtatagatgcacttaaaataacagtatcagaaatgattcgagatctatttggagactgtgataagagcagaaaacttcttgaatcaataaacatggcaaccacagagcaagaaatcaacctgatcaaaactaatgctcttagaagcatcacttaaactatgagatctatgaaccacggaggtcacagtgacccaaattcactcaatacgccaagcaatcaaccccacactcagaagggacaactgcaccgcatccctaagaatcgacaccaactcaagcgacggcgacatcaatcatcacaaaacaaaatacagaacatcagcactgcatacaaaatcaccccccggcacacataattcatcgaccgacagattccctccatgacattacaaagtatttaagaaaaaaaccaaaagtaaggggggacccatcatccaatcgactgtggcc

SEQ ID NO: 2440 - DNA, 804 bp, Weivirus-like virus sp.
  misc_feature 1..804: note = isolate cra070shi3 genomic sequence.1
  source 1..804: mol_type = genomic DNA
aaatcccctccattagggccggtcatctgcaaccggtagagttattttgtttatcttaggaaaacgtggcatctcaacaccaaaaacctgtaaaaaagggctgtttaactcgcattactgctaaagtacggtaaagctaaccggtaaaaagacccgggggtggaaatcccccgggctctttttaccggttagctttaccgtactttagcagtaatgcgagttaaacagcccttttttacaggtttttggtgttgagatgccacgttttcctaagataaacaaaataactctaccggttgcagatgaccggccctaatggaggggatttctgcctcaaagtttcacatactaagttgtgagtgtcacgcactttacgcgtttttagaattagattagatatccgacttactacatcaggacattaggtcttttcacattttccgttcgtctgataatgaccgctgttggttaatattttgatgggtttaacccactaactccaaccaggcattatttttcgttcacattttccattaaaactaagaatgaccacgtttggatacgctgtctgctttgaggtttttgcttacattgaaatagagcgcggctctaattactcattgaagcaaaggctagcttagtgacactggggccacacttcttgtgttatcgcttagtaacgcgctacggcgtcttcccccactatcgcaatatgtgcgggatttagtcaggggcagtgcctgacactttattgcgtttttctatattttgccgttttggacggccccacagctggtaacacct

SEQ ID NO: 2441 - DNA, 806 bp, Warroolaba Creek virus 2
  misc_feature 1..806: note = strain WRCV2 205660 hypothetical protein1
  source 1..806: mol_type = genomic DNA
taaggcataataaccgaagttacccttaaaaccaacattgaaaacaatattctacctaaaagtcgtgtgtacatatatatatgtacacacgacttttaggtagaatattgttttcaatgttggttttaagggtaacttcggttattatgccttacggtcttcattgttaatggttttcgcggctcgcagtccctaattgttgaattgttcttactgatacgttgtcttcattgttgatggtaagtagagtggtttttcagaagatagctctattattactgttttcaatgttgatggccttcgtttggactttctttattaatgacggtaatcaaagattacacccaattttagaattaaacttttaagtagggtatgctgattttatcctctctcttaattgattttgatatctggtaattgatctcgaaagaagatgcgtcttctggatttgtaatagctgggccttaagatcgtaggtgttattacatggggaaacacattactttggttgatgatgatatttcgatgatgattcatgatgcatgtgcttgtattaagcctgatacaagaacttactaatttgcatagtgcaaagggttagcatatgatttctctgatgtggattttgacactgcctttgattaggatgtgtggatgatcttgaagcatcattggatgtttatgcgagcgtgttgtttaccaatttcaggatatgtggaagcggttgtgtatgatctatacgcacatttagttcccagagggcgttgtcgtctccccctaagcaagggagaaacacgtggcac

SEQ ID NO: 2442 - DNA, 806 bp, Wenzhou shrimp virus 4
  misc_feature 1..806: note = strain WZRBX43306 hypothetical protein 1 and1
  source 1..806: mol_type = genomic DNA
cccgccgcccttcaggcgacgagtggaggtcacaagccctcataaactgtggagtgtaagacacatgccctttaaaggcatgaagattcttgcttattttagcagatgaatcatactagcttgctttacaatattagcaatcgagccagaccacgaggattgaacttcaattgaaaatgaaggacggtccgaatgccctcactttatagagaagtgtgccctcactttatagagcagtagcgttttccctcactctataaagcagatccatattataattgttgccctcacttgattgaatatttcaagccagcgaagcaagttggtgtggtcccggcgtgttaggtgagccgtttaagacatctaacaaatatttagtttctttcttttctcgaactaaattctttacttcaatcgctgaaacttgtatgtgacttaacttaggccagcatattttgtgtaagcgcagtgatagtctgactctatccgaggaatcactacctcgttaaataaatgtggcccggccagggttatccaagcctgagacttcgaaactctcaggtggcatacttcaagcggagcgtaagacctaaccaccgttggctagtggcgcagtatgagcgaattaatggattgtagcaaagtagctttgaataactcctacgatcagcacgcaaccgggttttcgtgccccggcattatgcaactcatattaacggctagcaaagtctatgtccttgtgtggacatgtgtgtgtgggcccttaaccgggttatttgattaggctatattcgcgaccatatatt

SEQ ID NO: 2443 - DNA, 807 bp, Shuangao insect virus 8
  misc_feature 1..807: note = strain insectZJ96360 hypothetical protein1
  source 1..807: mol_type = genomic DNA
tacacaacaatcaatgaatttacccccacgtgatgtagttgtgcctaacgttcctgaaacacaaactaatatgggaaccttagaacacactggattacctattgaacctatttggcaaattacggatatacctccggattttaaatggatgactgaacaatggaaatttcacacaacttttgaagtaaaagatacacaacttcctggagatgttatttatacaacacgcgttgttcaatctgatgcaagtaaggattctaatttaacattggcacaatggcatgatattccattcgcttgttctaagtggtggaatggaaaaatttcttatcgttttacgatagttaaaccccctcgtgttgttggaaaattattaattcgatatcgtcaagattgtttcgataaatggaatgctgttgatgctcctagctctggttgggacatcaaggattcgaaaatgcgctcaattttgaaagaatgggacttaggacaatcatcacagtttgaatttgatattacaggctcaaacccaattcgtgcccgacccacccatctttatgaaaataaaccgcaaatagatggaactagtttaagtttaaacgatgttgctgaattccgaacaccttatatcctgtttgaaatgggacgtatcagcatagaagttgctcaaaccatatcacctggtggaatttttccgagcaattatatagttatagttgagaagtgtttgaaggatagtgagtttatgaccccaacggacccccgaactgatcataaattgactttatataattctattactgaatc

SEQ ID NO: 2444 - DNA, 807 bp, Beihai picorna-like virus 14
  misc_feature 1..807: note = strain BHHK130444 hypothetical protein1
  source 1..807: mol_type = genomic DNA
ctccacgtgcgcgatttgcgcacgtggagttatagtgtagttggcgatcttcttcgcccgatttaagtgttaaggtagtgctattaagcgttacgacgctttctagttctgcacttaatacttttttttgttttacatctttatcatacccgttccctgggatagtgggaccccctctgtcatgaggtaagacattaactgagattagacaggtctgtgaagtatgtcaaacgtatatatagtaataccgatttcttatgcctctataggaagatgaagtatttaactggtggtgtgtacttgtttttaacaagcgcgtcctttatggattcacactttatcacctaggaataggtgacaccaagttactcgtaagagagactatcttgtaatcggtcatgaattgataattcagactcgattgtaaactgatctttattgatcactctagcgcctacttggcgtattttgaaagagtaaggagttcgagacgtgccctactagcatgggccgacgtaatggtcaagcgaaactcgatttatctcattagttccggtgagacttcagaatcacatatcttgagattggcactcgatgatagattgtgagctacttgacaaatataatatttaggacactttaactagcatttagcaatagttttatcgcaatgtttagggtattcagaaaccttggtatttataccgtaagacgatttatgagttatttcgcgaattttagtgtgagtgtgatgtggattatttttgcattcgagggactaccatccttttattttttgaacacagc

SEQ ID NO: 2445 - DNA, 810 bp, Wuhan coneheads virus 1
  misc_feature 1..810: note = strain ZCM4592 hypothetical protein gene,1
  source 1..810: mol_type = genomic DNA
gcatggggacgatatccccatgcgatcggcctgtgttaatcagactctgttatacctagtgtcttatttggcttccagtaagacacaatttggtatcagacaataattaacaaaacaaattaattttaaggtataattttaagtaacttagttcaaagggctattaaacccctgattagtaacaaaattataaaatactcggttctgaccggggtaattcttttaacaataatatatgataattttatcgaagataacagttagcacctaccagatggcgctgttgcgtagagtataacccccaactctacttcccaactttgataatttttaattatatttttggagaattatgtataaaaattgaggaaacccctcaggtttaactacgacggcgaattaagatgagcgaaagtaaagtgcttaccaaggaggcgtaataatagggacccctctaaccagcaaacactggacgttacttaaggtaagaattacattttattagtagccggcttatagtaggcgtttaaggttaagcgacaaccctagtggtttacagtattctagcctatgtgctaatcctcgacggcagtagatcgctggcgatcgggaatatacctggatgtgaattaagtaaatctataggtatggatactcttctgaccctccagttttacactgtactaatcagctgaggaagagcagattatttcctttttttttcttcttatggtgacaattttatgatttatttataaagttgttatttaatttgaattttattgtattgacttatatattttatttaaa

SEQ ID NO: 2446 - DNA, 811 bp, Beihai sipunculid worm virus 1
  misc_feature 1..811: note = strain BHNXC40689 hypothetical1
  source 1..811: mol_type = genomic DNA
tatgcaacttcctattgaagttgcatcgagtgttgctgtagttatttgtgagctacgcattaaatttgactattcactaccaaagtagacgtcaatgtccctattggacttggctatctgctttatgttgtattttgaagcatctttgtgttgctcttctgagtagcatgaagtgttttcacctttatatttagttttttgcaatcttttgattgtcaaaccactaccctagtaaaattacatcggtaattcgtctttatgtttgtgggtctcaccacccactacttgtatattatatatgtttgatcggcattggttataaaaatttttgtatttttaattaattatttgtttaaaaactgtcaatgtcttaaactagtctttgtttctcatcttcggtgaaagttgttgcactttgtgctgacgacttttattatgcgaagtaggttgtatctgcctgagtgaggtacgtattcaaagattaagactgttcgaatcctgtagcgttccgtgattggtcttgagccatgagccgtccgcgtaacaaggtaaacagtaaacaaaaactgtaatagacttattatttaacactatcgcagtactgctctgatcaagcagttgattggtttcgcaagccatgacaaaagggtcatctatgatacagaaaatagacgttaagcaaggtccgaaataccaagggtcccgcttcaaccgatgaagccctggaaacaattattctctctgctgtttgaagtgcttaacaaattctcagtcattctccactgagtcttcttaattcacttccataatc

SEQ ID NO: 2447 - DNA, 812 bp, Plasmopara viticola lesion associated mycoophiovirus 4
  misc_feature 1..812: note = isolate1R
  source 1..812: mol_type = genomic DNA
gacataaacgctaaaggcaagataggataagtggaaagtcacttctgacgccataaaaacatgcagtccctggaatccactatgacagttaaagaggctggagagctgttaaaccttatgctcacgcatcatggccaatctcggagggatatcctcattctgttcgctgactttttcatgaagatgtcaacggttgtagcagaaaggtcgtcaagtgcatggtctgagcggatgtcacgagcagcagcttgtttcaattctgtaaacggttctatgagaagtgaggaattcagtaaggagcgccttcaactttccactgcaatcatagcacttagtagcgcaacagatgccactccgacgctcgatttcttccggttgaacacaccagagatcctgatagaggttcaatctttccgctcaatgcaccaggttgatcaattgtccatccaactctctatgaggtctgtatttatgttctggcttgcattcgaccaactcaggattatcgaagagtcgcgctctatagtggaagatgcactggcaatgagcttgagtaaatttgtcgaagagaatgcagtagtagcaaggtggttttcattgatgatgacagagaagttcgatgcttccatatgtacctccgtactcgatgatactgtcatggtgatttccagatgattctgcgagttttcctttgtcgtccgagattcatttccatatgatcttaaaaaaactaagagaatgaatcatcacgattttatcattataagtttaagaacaatcactctcagcgaactacagattactacagaatc

SEQ ID NO: 2448 - DNA, 813 bp, Beihai weivirus-like virus 1
  misc_feature 1..813: note = strain BWBFG40821 RNA-dependent RNA1
  source 1..813: mol_type = genomic DNA
gggtgaggggaattcggggcgtatgccgcgccacagtggcgtaattggcagcccctgcattaggcccaacagaaaaacctaaagagggccgcattttttccgggcaccgtgggcccggtgaaggggagcggcagggggacaatacctgtcgtgagatgaccgcctcgcatgtaacgggagtttaccgtctcacttggagttgtgcgagttgtaccgcgtcccaacgggagtgtcagccttgttcttccagccctagccggtccgcagccggtgggtcagagcctgagtggggtcctactccgcccctgaggtgtggccttgcacgaccgtggatatgggtcccacgtgggtttcgccagcccttaagtcgtgtatcccgagtcccccattgggaatggcccctccagagcgtgtacattttgagcgctcgtacgaggaacgtcgaagctggttgcaggcgcgaaatcgcctgcagttggttaggggaccagtgatgatgtctacggaaccgggggcggcggccgaaaccgccgcggatgacgcaggagaagcaacgtacccgatctgaccgagcttgagccggcgatggaaggacgggcaacctgctgtgtgagggtgcatcgcgtaataccgaccttgtcgggcccatcctccagtcatccacccatgtacagtctgcgggcgtctggtgtgcgaacccccggcccggtccgggcacaccagacgcatgtatagggccgttttggccatggctcaggcgatccccgcctgagacggttgttttgtttgttttcttttttttgtttggacgtg

SEQ ID NO: 2449 - DNA, 815 bp, Barns Ness breadcrumb sponge aquatic picorna-like virus 1
  misc_feature 1..815: note = isolate1
  source 1..815: mol_type = genomic DNA
tcccgcgcacgcgaaagcgtgtgcggagttgttgttgtagttggcgtttatacgcccatcatgagttcaaagtaccttctttgctgcgttacgacgcagccccgaagttcttttaacttttgttgtttacgatatttatcagacccgttccctgggatagtgggacccctgtcatgaggataatcattactgacgttagacagacgtatgaagtatgataaattgtaataagtaactatgaaagagtttattcctcaaactcttaatgattagtttactaaattggtgtgtaccttcctttacggaaggcgcgtccattatgtttttaacatttatggattcacattttttagtctagtaatagactacgatttagttcaggtaagactgacttttctggaatcggttatggattgataatcctgacttgttttcaaatgatcttgattgatctctcttatgcctattaggcgtttatttaaagagtaagacgttgaattatgtacccttctagcatgggtagacttaattgtcacacattgttcattaagactgttaattccggcagtcagtaagaattcagtgttctgagggttggcacccgatgatgacactgttgctactttaatttaaacaaattttaggacatacatttaatttcacaataaattattgtcgcgaagtttggagtattcaaaaactctgtagttcgctacgtaagacgactttatgttttgtgtattgattttgtatgagagagctatttcttgtattatttgaaatcgagaaaccactccttttatcttggatacagc

SEQ ID NO: 2450 - DNA, 816 bp, Dinocampus coccinellae paralysis virus
  misc_feature 1..816: note = strain Quebec2013, complete1
  source 1..816: mol_type = genomic DNA
aatccctccatacatcttaccctacaagggtcgtaaatctgttcaaagttaatttcaagcagagaacagtagatattttatttaattttaagacatactttagttcacgaggctatctatttattagaaccctctattagtaacaaaacattaaaatactcgtttcagaacggggcttcattttgaagtgaataaaatatttagataacttagtaagtacctgaacgaattataaatagtaaaagaacgagttcgttaggattgaatcgtaaattttaaataattcaattactatatgcttatgccaggtatagttctttctatatatttgacttattatatattatagtgtactagtctacataaatccattgtagatgatgaatatggcaagttggaaccagattactcatattcttgtggcgtagagtgctctccaaagctctacggtcccctataattataataatgatagtatatagaggagaatagtatcgtttctcttttgaatgagtataagtacgtaactttagtattcgaactttataaggatctcgtgggaacgctagactgcgacttaagtgaatagcctttaatcacttagtacaatttgtttcagtataaacatgtaggccggcttgctacgtccgcagaggagtcgttaactatttatcattttggtaacttagtcctcagacggtgacggatggaaagacatcgattccttttatatgcagacaacaattattgatttgattttatttccttgtttgatatacacttgttttatttccctttataatcaattttgttaat

SEQ ID NO: 2451 - DNA, 817 bp, unidentified
  source 1..817: mol_type = unassigned DNA; note = DsRNA virus environmental sample clone smat.culi_contig1191 sequence
tagtgtgacgcctatacagcgtcacagatcttcctaccgaaggttggtgggttactatgcggagtcgcctgtcgagggccatccacaggagtgggcaaccctcgggagatgaaccggtgaccctttatcgctccgcttgggtcccggccctacctattttctcgttcacctggcgaggaagtaggggggtgggcgtatgcctgccgtacgagtaattgtacggcgtgatttcggtggggtacttagccttcctgctaggttcctcaccagaatttccccactagatctatccaatagttgtgggcagggtctatttttgcccagtgtatatggaaacactggagtctcttatagggtctgctcatgagagcactaactaagtcgatagcttactgatagtgagtaagtactccttatataacaccttatatgaccactcctgcgaaatgcaggggtacctgaagtcttacagcgccgagacaatgagattctcggtggccaaaacgtcggtttggtatgaccagggcgtgctaagtgatctggcgctcgtttaggcggcggttccatatgaaccccaccggctaaacttgcttccttcattggataagatctaaatgccgagagactgcaacggccacaatgttgtaggggaacagtccctccttacgttagggtaagggggcagttggtgccttcactgttataccgaaagatttatgacaagcgatttccaagtgattttttagattgagaaccgagcgagcaaatttgaaagccagcgttaagttgagaaaactattcgagcctattgggcgtt

SEQ ID NO: 2452 - DNA, 817 bp, Wenzhou picorna-like virus 41
  misc_feature 1..817: note = strain WZFSL80064 hypothetical1
  source 1..817: mol_type = genomic DNA
cacgtgattcccggaatttttatcggcgttaacgcatattattacatttattagtacgtataatagcaatattgtattgtattagttagtgtagtatgtgtgttggtgtctggaatcgttactaagaaattagtagtttataagcagaaatgcttattctcaatttttatgtaggtaatagggaaaccgtcaaatgcagtcgtagggaataaataacttacaactgatacctacattaggattcaacgacgattacatagttgtgattttcgttgtcttaggaaatccggaaagtatttacataatataagtacacgtagttatcttgaagggtacccctcgtccgtaaggaagtcagttgtttccccttctgactagagccggtagctgactaagcccgatacgccttaactgtgttagtttaggacctttggctgcttagagtaacgtgctctcccaatggataggaactgcttttacaaattatacatattgagctataatgatttagctactcatttgtcgtgggtgtatgtataaggcgtaatttctaactcctatttggaacatggctagtttcgccgctagtggtgttgtcgtaaggccacagaggtaatgaaagtatttataagaactaaattaacggaacggattcaaatggattggaacatggactcaatatgaagataataatccaataccctcataggcagagtgaaataagagatagttatccattcaccgtctatttgtcgtagacacctatgtaacattggtgattattactcatggagagatatacgggcaacccccaaat

SEQ ID NO: 2453 - DNA, 818 bp, Sanxia picorna-like virus 2
  misc_feature 1..818: note = strain SXXX37883 hypothetical protein 11
  source 1..818: mol_type = genomic DNA
gagcttccagtctatagtaagtccgcattgaacggccttatgataagtcttctgaagagttttgacttcaatgagtcgatgtttgagcgaatgctcacatccattttgtgatcacttttgtgatatttgttttaaataaatttaataaataaataaaaatgatatatgttaatatttgagcttggtaaagctacaatattgaaaatacgtttgagcgccaatatattgggtttgagcccttggccgggtgtcgtgattaataatcccatgccccaattgttgttgtttagcgtatttgataattgtaggatagagaccatacagcgctatacttgctgtaaagattatatactacagaagttcgtaaatgtgcttattgtaggagctctggaatatggtgcgcgttaaataggcgcaagtttcactggctttgtttagggtatttacctgacttgatgtatataattgtttatcaacggatgatatggaaaaggtgacgttctcacttttagatcgcagtcatcatagcactcctggaggaggctatagtatatcgcgaagacgtcattttgatatttgacggttaaggcgtaaagaatccaccctgttatagaatagatacgagtcgcacgtcgcgccagtagtgattctatattaaatgtgatcacctccttatttctcttggaggtttctagttcgagactacaggcattcagccaaccccccactttccaggaaacaatagagatttatatatttattattattattataatattcttcattcattcatttctctattgttcctattttatatc

SEQ ID NO: 2454 - DNA, 819 bp, Yonago Culex iflavirus
  misc_feature 1..819: note = 17CxIT-T3-H35 gene for putative polyprotein,1
  source 1..819: mol_type = genomic DNA
ccccttttcatcttcacaataatatctattatgaatctacactactagttggattttcattgccttacagaatacgtatagtgtattgctggactagatggtgtatgttgatatagaattattttgaagtaaagccccaaacaaagcaaccccgctctcttttagttcttaagtttaattattaatttattttaagttccctcccctattccaatatccctattatcctttagtttaaacaagttgataggcctgggaaccctggagactttgagaaaaacccataatgatttagcaatttcacatggaactgattgagtgactaagtgcctaaatgtaggttgagtttcgacaaaaagcctttacttagttagacaacactccgatgttaatctcggaatttcttgtgacggtttctatatttgttcctgatagtcagacgtatagattctaatgtacaagaccgaagacttaactacgtttagtggtagtatattatacacggtgtatgaacgatttattcaagtaaaagccgtgagttatataatatatatatcagattgttgagcttgatagcgtgcgaaacgtgcagtgattgtgattttggtttatcttgaaaagtatcatagaaaaatattaattattaatgtgctatggatagatgcgctacgccccaaatccttcagagctatcccacgactggcatcgtgtaattaaatgtggtaagttaatatgagatgactcactgtgtgcccggttgctttgctagtttgttcaccgtaaggaagaaactagttttacaaaccttccaattctttt

SEQ ID NO: 2455 - DNA, 820 bp, Weivirus-like virus sp.
  misc_feature 1..820: note = isolate zftfla02pic2 genomic sequence.1
  source 1..820: mol_type = genomic DNA
tcattaccttgttgtttattatgataagctagagtcggcctctttcatagtgacttgttttgacgtagttccccgtatcgtagcattgctgatacgttcagttttcgacctaggcatctttaatgtagttcggttgtagattcagataaatgcacaacaaaatggttgtaaacaaccagaaaggaactctttgtttaattttcttaaactttgctaaagttttagttattctttgaccctggctcgttattatttcgcattactagaaagagaaatatgcgtgagccataaagttaatttattaactatgctttagaccaccttcttctgtaacaatatcgcagaagatagtcccgtaaatgatgattcactgaaagggcagtggtaacaccaccgtcggaatgaaccttttaacaggggattgacccgagtccttgacaacccaccatttgtagttgatactatatcctacaccatgctttatgggagcaccatccacggttcattagtagttcgcgaaattgaagaattaaacctgttatgaaaggatttagtaggacacgacctgtcttgatgtcattcgagtaggagccgttaacaatccgaaaggtctaagtaatgcagcttaattccataggtttctgcgggattgtcatttcgcctttctcatctccttagggaccagtatgctggtccctttggagccctttcatagtgcgctgattgctagtaacaatcagtgtactaagtttgggattctttcgatttaattctttagaggaatcccctcgcccaactttttatcatacagtacaacatc

SEQ ID NO: 2456 - DNA, 821 bp, Equine torovirus
  misc_feature 1..821: note = strain Berne 5' UTR and replicase polyprotein 1a1
  source 1..821: mol_type = genomic DNA
acgtatctttagaagtttatgaagccttgaaataaaaagctataaaccttattacggttagtccaccacacggctaaattttcagtgcgcagtcactagtcagggaggttcagccctgtcttttacttctgtgtaggaatctgtacagatatattgtctgcatactagtagttacaagagagtgcatttagtacttacaagcgggtcaaaccgccctccggaaaggtgcactttccctcccgaacgtgtgtagaccgtgaccattgtgtctagctatctgtaacaaactatacggttgtattttactcaactttaaggcttttataaaacttgcaagtgccaattttggcatttgttctttagccttttaaacctcacctccctacgggcaggcgcttaagcgactaaacgaggtatagccaattagttgttactcccctccagctttgctgcaggcccttagtttgggactaaagtgagtaaacatactttttggattacatctttctaaactactgccaaactgttgttttatatatttaagttttgcggttttacgctatttacttacggttggcagtttgtttggttgtttgcacaattttttgttataccaatttttactgtgtttttactttttacagttaaggctattttttatcttcttaggcttgttgaattaagtttttccactttaataatttggcttatagaggttttaagaaaaaggaaacaacaatttagacgtcgttctttagacgtctaaattttaaatctggccaataaatatcaggttattgactccttgtggagcgagactt

SEQ ID NO: 2457 - DNA, 825 bp, Apple luteovirus 1
  misc_feature 1..825: note = isolate PA8, complete genome.2
  source 1..825: mol_type = genomic DNA
tgataactttgcaaggtcccaaataggtagacgcagctccatcaccttcacccaagcctgacccaaaacccagtcctcctccaccttcaccgaaacccgcaaaggaaaggcgatttttcgcctactctggtataccaaagacgaagatcaaaactaaaggcaatgacgactccatcattgcctcctccaacttggagcagcaggtcttccggtatatagaggcaaacaatcagaaagacgtcacgttgaacgcgcgttggtattcgacttccacagtgaagaacaagccaatgattgtattcgacgtgcccgctggtgattggtttgttgatttcctttgtgagggttacatgcctattgaggcaataggtggtagtgaggaccagaagtggatgggaattgtagcgtacaacaatgataccgcggatatttggtccgtcggggtgtacgacaatgtctcaatcactgagctcaacataacttcctcttggaagcttggtcacaaagatttagagctcaatgggtgtcatttccatgacggtcaggttgtagagagagatagcatcggttcatgtaaagtatcatccaataccggtggatctctctttttggtggcaccatccattatgaagacagcaaaatacaactactgtgtctcatatggcgattacactgacaaaaccttggagtttggttttgtatccatggtgtttgatgagcgtgatggagctaacaccgccgttccgcacattagaagagagctcaagaatgttaaatatcttcggccttctcctgtgcgtctgaacgacggcggtgattatattg

SEQ ID NO: 2458 - DNA, 826 bp, Hepeviridae sp.
  misc_feature 1..826: note = isolate wpk139hep01 genomic sequence.1
  source 1..826: mol_type = genomic DNA
actacacttcaccagaaagtgttcaaaaggtcctgccgggtaaacccgacagggccttttgaacactttctggtgaagtgtagtatcgccagtgggtttctccagccaaatctggaggagcgggctgcagcgtgactgcagtggtgtgacccggtaccatgattctgggaaatggtgtgaatgagaagtgtgattgagtgtttagccccgacccactggggtttcgctactgttggtgcagtggttgagcattgtggggtgaaataggggatacttcttttaggagcagtcttttagccatattggctgtgacatttaaattcttaatacgtctggttcttgataccagcgctcatttcttctttctatcattcttctcttactggctgtctaactgccaagagctgctaccgctgcgcccggcggggttaactccaggactagcctggagctgtggccgccaaaaagttagatgctgtgactaaccaggcggtgagctctcctccagtgtccacattgggggtccggtagcgatcggggtcgacaggtaggctacgggtgaaacctgtctgggttactactatgtaggagaaccactggagcgctaagcacgcggacatttgtgagatccaaagtcaggcaaaccagcttggtatgggtcaaaaacatctcaacgcgagtggggcggtgtctccagggccccgcgggacctattcccctggtgtggcgtagctggagctgcgcccaccttcctgtatgcagtactccccttgagggggctaatcaggggcatgttaggttttaaaccacaacagtgttgaagttc

SEQ ID NO: 2459 - DNA, 826 bp, Apodemus agrarius picornavirus
  misc_feature 1..826: note = strain Longquan-Aa118 polyprotein1
  source 1..826: mol_type = genomic DNA
tttgaaaggggtgcggatatcatggcgtttctcgccatgatatccgcacattgcaaacccatattgcatacccactgggtatgcattatggggaggcccctttcacccctccccccccaattaccttttccccctctagtaaccatacgctttactcagcgtaactactccgggttacgtgatgaagaagaggctacggagattctcgggctacggccctggagccactccggctcctaaagatttagaagtttgagcacacccgcccactagggccccccatccaggggggcaacgggcaagcacttctgtttccccggtatgatctgataggctgtaaccacggctgaaacagagattatcgttatccgcttcactacttcgagaagcctagtaatgatgggtgaaattgaatccgttgatccggtgtctcccccacaccagaaactcatgatgagggttgccatcccggctacggcgacgtagcgggcatccctgcgctggcatgaggcctcttaggaggacggatgatatggatcttgtcgtgaagagcctattgagctagtgtcgactcctccgcccccgtgaatgcggctaatcctaaccccggagcaggtgggtccaatccagggcctggcctgtcgtaatgcgtaagtctgggacggaaccgactactttcgggaaggcgtgtttccatttgttcattatttgtgtgtttatggtgacaactctgggtaaacgttctattgcgtttattgagagattcccaacaattgaacaaacgagaactacctgttttattaaatttacacagagaagaattaca

SEQ ID NO: 2460 - DNA, 827 bp, unidentified
  source 1..827: mol_type = unassigned DNA; note = Bryopsis mitochondria-associated dsRNA genes for capsid protein,1 sequence
tgtataatgggtttggaatccatatacatcctgaaatcgttcattgttgcatcgcgagctggagttatcgcgggggagtttatctcttctagggaaatgatggcgtgacttaagaccgaaaagtgtcgaaaagcgttggaccggcctctgtttacaagccgcctctattatgaatgtgctccttcctctgttagtgtgagagcttaagttattagcctaggtgacgccgtagggtgctctgtgcccggggattgttgctgtaaaagagtactgaagtgcaatcggctcagaaaggctatataagagtgcctttgtcaaacggcaacctgccgcttagttggtaatcaccagccccctggcgcctaagttaagcgtctcctaacccgtggcgtaggtatctaaaaggagctgtgcaccgtatagctggaagtttcggggggtgacgtcgctgtccatgtgacacagtaacccagggtgccttcgcaagggtatacctgtggtgctatcctcactcagtcggccgggttcaactcctttatgcttataccaagatatttcctacattatatcatactatagggtgctagttatagttttattcttaatatatcgataggccaaacattcttagtttgagctctttcgtgcatttttctcacatatgtacatatgtttcactatttatcagaatactcgaaaggtataccgtactgaaaaatcggataaagaggttgacgatctaatatggtttctcaaattggaaggacgtccgaaatgggttagctttgtaatgaagtgaccagggtgaggcatgatgccgccacttc

SEQ ID NO: 2461 - DNA, 828 bp, Beihai picorna-like virus 35
  misc_feature 1..828: note = strain BHZC37213 hypothetical protein1
  source 1..828: mol_type = genomic DNA
gggagagaaccatggattaacatccatggttctctccctacatatgattgtgtgtcgtttcaccgcgacacccggcaatcatacatattcattgcagatctcgttctgctcttattttacgtagatatagacgtgttgaataggggtagaacccctaatcgcatttgctgtatttgctttaagagacctatagaataggcaatagcttaatctatagattatgagaatgtatattaatatgatatttagtcaccactccggaaattaaccacttctaagtgatgaccgtatgaatgaaacagttgtggctactgttttgtacgtttatgccgtcaccccagagagtcaactctgagaataaatcacccacttctgcgagaagttgtagcagcctgtaaggacgagctgtgtttcgacttgttcgcatagattattgaatctcatgaactgaagtttaatgactgataattaacgcttgtaaggttttttaatcgttggaatcccacctattagtttcgatttcgcttaactgatctccacccgcagtagggttgaagagagatcatagatctaacgaacttttaggaagaattggtccaccggttttaatttgactgacgtactagtacttactataagtgaacaatatagatttatatatgcacgtttacctcatgacaacctgagtgaggaggtttggtcacctaaatttaccgtgtctctgtatgaattttgaggttatcgatagttgttctactgatgtgattgagatgatatcgtcttggtttgtttagcccgttgaggttagtccctattcccactaaaatt

SEQ ID NO: 2462 - DNA, 829 bp, Hubei picorna-like virus 46
  misc_feature 1..829: note = strain spider133332 hypothetical1
  source 1..829: mol_type = genomic DNA
gttacctggatggcgcaagtagaagttgctttgctcagtatacttgttcatataataactaaaccttttatgtaaacctttttatatgtgtttgtgtatgtttattgtgtttgtccctacactgtgtattaggacctctatgtacgttgtcataagtcccacagtaaaacaaatataatatcaggtaattctcatgtatcaatatctctacgggtattggggaagttttcaagttttgggtgccgacgaagatgccgacgacttaggaatcaaaatgcctttatggtcatggggtgcttaatatgctatcatacctcttgcggagcttttaaagccgttcaaagtccctgtatagcagcacctcgtggggtcatgccgttgttttcctatggctagatatagctactgtccttcgttggggaaccgccctctaggcgattatgggtcctttactgatgtggttattataattggttcacaatgttcgagaaatccttcttaagaccgcttaagaatcgtcgagaccgtgaactagggtacacgcgtggagacgttccgttgtgaatcaattataatcgacatggtattggtcatgagagttattgggtctcaccaaccctcggagtaatgtatccgaatgtcctgtaagttgtttttgagcaacctcttcaggaaggtgggtttctcaccaaagaggcggatgtggccggaacccggtgacgctactcaataagagtggggctctgcggagagacgtggtgacaccttggaatagacagggatttttcagttccaaattagctttcatgtgtttgtacaaattaaattt

SEQ ID NO: 2463 - DNA, 832 bp, unidentified
  source 1..832: mol_type = unassigned DNA; note = DsRNA virus environmental sample clone pepp.ochl_contig321 sequence
ctcgtgcaatggggcccctgtcccctgaccatacctacccgcctccgggccacctgagtttctgtacagagctcagacccgggggtaacaggccccattgcacgagcaggtaggtctcggggtctacccctgtcgaagttccggcttcggcaggggctgggcgtaagccagccatcagagcgatctggtggcgagatttggcactccgttaacacgtttgtggaggcggagtgttgattcacccaatagcattcttgaccatcatgggttttcacccaccctttccccctagctataggctttggggtaagggtgtgtgtaaaacccctagtagccgattgccatctgcccacacaggctcatttgaaaaagcaccgaaagctctgcggagcaccctctatcccctgcgggatttgaggaagtttgaggctcttgccttgcctccaattgatggaggtggccaaattaccctctgatgggttcgagaggtaagctaagttggcttggtagttaggcggttgtactgctcgagggcaggtttccggctgctacctttaaggtcataaatgccgagagactgcaacggccgcaatagggtagggggacagtccctagttgagttaggtcaactggggtggtttgagcgcccccacaggtaatccacacacgttaggcgagtttttccaaaatatccaagttatccaggtgatcttcgagtgtattccagacgattagagtgtttactccagatttttaaagtgtacttcaagggaatttcgtataacaagcgtaaaaaccgttcttttaagaacgaaccgtatttattgttgag

SEQ ID NO: 2464 - DNA, 832 bp, unidentified
  source 1..832: mol_type = unassigned DNA; note = UNVERIFIED: Macaque picobirnavirus 0 ORF1-like gene, complete1 sequence
agatgcatatggttttactaaacctatgcttcaaaaactcgagccatttgtattcaaagtggttagagtagaagcaacaacaacatccgtcacagaaaggaggaaatagtgtgacaagtaatcaattatcttatctagcgaatcaagaaacggttcgacacaatctagccgttgaaaatgaaactcatcgctacaacactgaagcactagctgaactaaatcggcataacttagctacagaacaaagtgcgacagtaacaaacgcaataaacgataacagccagaaggaaaacgctcgacacaatttatctcttgagcagatacaagcattagctcaaggtgaagtcggtagacacaatcaggcgagcgaagagttagctagcagtagtttgtctgagcaaatacgtcatgcgctaatttctgaagatactcagaatattttagcaggagcgcaggcacttaacgcgcaaactaatgcgttgagtcagcaggagacagccagacacaacttctcacaagagcaggtttctaattacactgctatggagcagcaccgccataaccaagcaggtgaagaactgtcatctgagagtaacttgttaagcggacagagaagtttattagactacacaacaaaacagcagaatattgatctgcaaaataatgtccttgatgaaacaaagagacataatactgttaacgaaatattaacaggggttgatcttgctcaacaaattgtaaacaaaaatctcgacagaagagatagaactacgaattccctatttaatggaattttccgaatagggtcaatggtaaaataggagggcatacc

SEQ ID NO: 2465 - DNA, 832 bp, Picornavirales sp.
  misc_feature 1..832: note = isolate RtMruf-PicoV/JL2014-1 polyprotein gene,1
  source 1..832: mol_type = genomic DNA
ctagactttctaccctcttgaatggcgaattccagagtaaagtcacctctgccttgccgctatacacacccaaccaatcgattcggccccacgtgtatagccccttggtcaagtgacctcttacgtctggacgcggatttaagacctgaatatccgctgaaagttaacaccatgtttgccccgattatgtgatgtttctgctcttgctgggcggaacatccgtcgggatgccaaagcaatttgtgtccccttctttctttggacttcggtcccccggtcgaagccgcttggaataagacagggttattttccctccttcctctcttctactttgttaagctctatttaacaaaagggtatgtctggcccctcccttcttggggaatgtgcgcggcggtctttccgtctctcgaaaagcgtgcatgccagatgcaagagaaggtgaagaaagtaagttgtgtctaacgttaagacaggaacgaatgtgtctgtagcgacctctcaaaggctgcggtctccccacctggtaacaggtgccgcagcggccaaaagccacgtggttaacagccacctttgagagcggtgcaaccccagcaccacactttcgttgttgttttctcactaaccacaactcgcttctctgaagccctcttgtagagttgccaagaatgtccagaaggtaccccggtccacgggatctgatctggagctccatgcgtgtgctctacacacgttcgggagttaaaaactgtcacagcaactccaaactaggtggtcctagttttcacttttatttgtcaagtcatatggtgatggttaaaggagaacgaca

SEQ ID NO: 2466 - DNA, 832 bp, Shahe isopoda virus 3
  misc_feature 1..832: note = strain SHWC0209c10670 RNA-dependent RNA1
  source 1..832: mol_type = genomic DNA
cccggcaaagccgtccgggtgcggctttgtacgagtgggcggtggtagaccgctcgctcgtggcgctagaagtgacagcgcggagcccgacattggtgaaacatgaacgctatagagttctatcggcccacgggccgggcctcactgtccatacgcctgggggtagtcctttgcggacgctatccatcgcgtcaatgtcagtggggagctcggggtgcagggagggtaccggtgttgcattgggatagactgttttgcgcgaaaacgcttgggtgtcgaccagatttatttctaccacaacatggctttaattagcgcgtgtggcagggtctcccttgtttaatctacggcttaggcagctcattggcattcacggtatttactcttatgcattagtcaccgcacgttgaggggcggttggaccacgggtagaattctgggtggtttcatcattcctgaatccggaaacgggaagttggcggcgataatgcctatacgacctgtggcccggggactaaggcggtcaaatcaaagaaaccgcttttccaaagccagctgtcctttagagggaggctggcccacgttgttagtgggtgacatatctttctgaactctgagctctgctcacgtatttttctttggcacacgtagggtccctcccgcttacagataagcagcttaaaacgtattgctaggtagaagagttctatctaaggccacgaaaagtccttcgcgtccgcgagtacggtgcttccctcgatcagcacagcttgaagcttagtatcggtgataccttgaagaaccagagtttagaaaacaacttttaccacag

SEQ ID NO: 2467 - DNA, 833 bp, Southern cowpea mosaic virus
  misc_feature 1..833: note = complete genome.1
  source 1..833: mol_type = genomic DNA
gatggtagagatgggcttgtgtgacccggtgcggctttttgtcaaacaagagccgcacccgtctcgtaagttgaaggaagggaggtatcggcttatctcctcggtctcaatcgtcgaccaattggtcgaaagaatgctctttggagctcagaacgagttagagattgctgagtggcaatctatcccttcaaaacccggtatggggctttccgtcatccaccaagctgacgcgatattccgtgacttgcgagtcaaacataccgtgtgtcctgcagctgaagcagacatatctggttttgattggtccgttcaggactgggaattgtgggctgatgttgaaatgagaatcgttttgggctctttcccacccatgatggctagagctgctaggaacaggttttcatgcttcatgaactcagtcctgcaactctcaaacggacagttactccagcaagagctgccggggatcatgaaatctggatcttattgcacctcctccactaattcgcggatacgttgccttatggctgagcttattggttccccatggtgcatcgccatgggtgacgactccgtggagggttttgtggagggggctagggagaagtatgcggggctggggcacttgtgcaaggattacaagccttgtgcaaccacccccacaggccagttgtatgccgtggagttctgttcccacgtgattaaacgcaataaggcgtttcttacatcatggcccaaaactctgtataggttccttagcacgccgagggagacgctggaagatctcgagagagagcttgcatcctcccccatgtggcataagattcagagtt

SEQ ID NO: 2468 - DNA, 834 bp, Aedes camptorhynchus toti-like virus 1
  misc_feature 1..834: note = strain mos172CP87493,1
  source 1..834: mol_type = genomic DNA
gagcttacgctccgttgggtatccctctcatacgctgttatgagacggaagggggtgaggtgttttcggattaatagcccctaaatcccaaagaggcttgtgaaacttcctgttctaaatagtcgtttcacaggccggtaatgctggaaggttatgggatgcaaccaccagtccccgcgagggggtgcgcttcggcggtctatagcagatctcgtaccggctataggcgaaatacgtaagtattccctgtatgaaaacccaaacctcctcgatcacaaaccgcctttatccccagattatagggggccctataaggccccatattaatctacgtgtacgtactactgcgagtttcgacttgtgaaatgtatgaatcactgtttactggctggactatcgatcgaggtttcggttatcataaaacaaaaactcagctgtgttttgatcaaatatcaaaacagcggctgggagtacctttcaattattgtcttcgggcaataactgatagttctttgcaagtaactttataggtagcggccttagttagggcgggacgtcctgggtggcgcgatgctggccaaaatctgttcgtcagtgctaaataggagttgggcaagtgcctgcttcttaaacgccgagagactacaacggcctcactgtgggaaaggatcaaacgacgtgatcccatggtgactaattttaggggtatagtccccctctgtgctaggaggggcttcctgcatactctatatctagcatatcgttacgatctttgaattttttacgcgctttaagtcttgagaacctactcttgggaattattttcggataatt

SEQ ID NO: 2469 - DNA, 836 bp, Beihai weivirus-like virus 8
  misc_feature 1..836: note = strain BHZC36478 RNA-dependent RNA1
  source 1..836: mol_type = genomic DNA
accaacgccacggcttgcccgtggaatgcattaattcgtatcgttgtaattaagccattttggctaaagtcccaggccttgaggaggaaatgcctcaggggagatgacgtaggacaattgcatacccaggggatgttccgcccctctctccttgtccggggttctgaagggagaaaccctaacaagtcaggcttattcttgacccctcgcttgatgagcgcaagcagggtgcagcctgccggtccagtgggaaggagctggcctgaggtgaaagtcgtgccgaacgcgggttgacagccgcgtagggttagccgccttaatcggtacaggagttccccctctcccgcgcatccttaagggatgtgaccccagcacccaagccgtaatggcgtggaatgttggaaggggaactaaggaatggttgcgccgtgatccagcactgcttgacaaatctggactcatctagcagcaggaatgtgtattctaagccctccgacctctgacgagactatcaaacatccaaggtagcacgtgattaggttcaagtcaagtcggtgaaggtggtttcttgagccccaccttttggaaacaccaggagttgatcgccctggctcggcgccgaacggacagattcatttctgcccgatagttttggccgcgctcgtgtggagtacacattttggatgagatgtcagtgtgcctagctttcgcgagctttgcacacacaacgctctgtatatagtttcacttgtattccgtggaacgtcgaacatcgatggcccacgtggacctgggcgaagacctagttgtcgtctatcaagctttctgttttttct

SEQ ID NO: 2470 - DNA, 837 bp, Hubei picorna-like virus 1
  misc_feature 1..837: note = strain WHSF7464 hypothetical protein 11
  source 1..837: mol_type = genomic DNA
gtttatagcgcatgtagagtttttttgaagattgatcaacctaaagttgagagatgagtatacttcgtgtagatacaaattgtgaaccgtgttcgcatatacgcgaagtatatgctttcacgtttcatgcttttgtctgcatgagttatatgtcattatgagaatgatttagtttgtctcggtctttgaaaacgtttttacggttctagcagaaactaccctcgcgaagtagggtccatctgtagtcctttcggacaaacgtgttaaccggaacacgtcgtaatgttgccttaattggcattttcacgggcttcttgacttttgctccggagcatcagttatatagaagttgggtctgacgagcccttcaccatagttgtgtacgtcttagatatacactacttgtccatatgtttggacaatacatagtttatggtttagatatatatatctatgttcaagctgtttgtcagcccaagggatcacgccattgatcctcctttaatatgggtgtaaatttcttcgcactttggaaacagagtgcaagtattggcaaaaaccctaagcctgtgatttgattcaggatagccaaacgatcttcaagatcatactttttcagggggcgaaatacccagaataatcaatcctgcccgggttcgcaagaacacggggtgttaacctcatgcaatgtacaagcgctgaccttcgctctctgcttggtacttccgacgccgtcattggttaggacatgtggtgctgggcaaccagaaatgaatcccaacacgggattcatggtttctcagcattgtgacatcttgtttgcaatgctgatttatc

SEQ ID NO: 2471 - DNA, 840 bp, Scaphoideus titanus iflavirus 2
  misc_feature 1..840: note = isolate St_USA, complete genome.1
  source 1..840: mol_type = genomic DNA
cgtattttgaccgtatcgatctgtttatataatagcgacgtattttagtgagaatcgtttccttatataatatagttgatatgtgatatagtcaatatacagaagaataattgtttcctggtaattcatagcaaagtaaaatctgtccctattgtctatactagttttaagttttagttttaagacacctttcttagttttaaattttgtttgcatgttaatgttgttgaatctgcgagaaaatgttgattttgtatgaatgaaattttcctattaagttaggtccgtttgtgtttgaatgaagagtatgtattagtatgtttgtttctattcctaatccctcctttgtccttgataatctttattattagtaaattatgtagtagaactctaccggaattcgattttgtatagttcttacctgcagcggttagatgaagaactactttttctttaattattgagctcagccctgtgacgttgtatgagagtatgcttttgcattatctttactgaacgcatctatttttataggttacgatttgcgtgtttatgcattatgtcggtttaaccctataatagaagagcgttgtaatagagaagcattagaacttccttgtatgattagaatcagatcctggtaaagcaataattatagacgaagtaaagtacaattgacatgccccggtagtgaccttcagacaagtccccctctgaagttcgaatcattttctaaagtaataaagtattatcccttttcctctttttatccttggattgatttctttatttggacacgaccactgcttgtttttatgactattttgaatattttatgat

SEQ ID NO: 2472 - DNA, 840 bp, Beihai weivirus-like virus 10
  misc_feature 1..840: note = strain BHZY59101 RNA-dependent RNA1
  source 1..840: mol_type = genomic DNA
gcggagcatgcttgtggtgtgttgagccattttggctcgcgctgtgtcgctaattagcattttgctttaattaaagtcccaggcctcagggaggaaatgccctgggggagatggcgtaggagtgtgcatacacggggatgttccgcccctcgctccaactccggggttctgaagggagaaaccccaacaagcctggcttattcttgacccctcgcccgatgagcacgggcagggcgcagcctgccggaccagtgtggagctggcctgaggtgaaggccgtgccgagcgcgggttagccgccgcgtaggattggccatccttaatcggtataggaggggcccctctcccgcgcatccctaagggatgtgaccccagcacccaagctataatggcgtggtgtgttggtagggcctccaaaaagtggttacgatgtgtcccagcactgcttgacaaatctgggcgcacctagcagcagcagcacgtttccaagcccgccgacctctcacgtggactatcaaacattcacggtagccgttgacccatttccagtcatgtcggttgtggtggctttggcttgagcgccaccattaggaaacaccaggatttagtcacctgcctgggcgccgaacgggttcgggattcttcccgtccgccgatagttttggcccagatgtgtgggaatgtgctgtgggtgtgggcgaccttcgattattgcgtcgttggtcttttgctctgtaaatagcgttcaacttttcgtggttccataagcggcccacgacgacctgggtgaggacttagtccgtgctcacgccgttgcagtgtgttagcatctcttccgcg

SEQ ID NO: 2473 - DNA, 842 bp, Shahe picorna-like virus 1
  misc_feature 1..842: note = strain SHWC13622 hypothetical protein 11
  source 1..842: mol_type = genomic DNA
catgcacagcggttttcccgctgtgcatgtgtcttcacgttgatttttcttcgaatgcgtttattcgcattttgtcttttgaatcaactcgtattgtaagtgcaattgcttgctgtgatatttcgtatacacctatagcctttgtgcacgtgtgtagacgactgtttcagtatgtttgaccattttcaatacaaacaacaagttttatgacatttcttgtgaacaaataaatgtcaccaccctagagcattgctactaagctttgttagtagaagttgtttagagtcaaaacgacggacctctatttagagaacccgtgtccgatggtgataagaactttaatcgccccgggtgagttgccctcacatctttatgatgtgtagggcgctctcggttagtattgtggtggattttataaatacgtcagatggctcgacgttaaagcctatggttgtgaatcaaccagcagaagggaaaagccaacccaaactgctttgttaaaaactttgccgaatgcggaagtaccgtgaagcaaaggacggtaaccaaacttacatgtgactgcgacggaatagcatgtattttaatccaataacgttcaccagcccaggcgggaacctgagctcaaatttatttgactcgttggttaacgccgagaaacataatcaaggtgatatgtccatgaagtgggaagcttgcttcctgtgggtatctcggaaagtttggcccggaatttattccccccaaatgagtacaccttggtcagatagatgaagtacgcactatttttagtgcgtgtttcttctatcgtgtttcatggctatttatcatttaaatagatc

SEQ ID NO: 2474 - DNA, 846 bp, Chaetoceros tenuissimus RNA virus
  misc_feature 1..846: note = genes for replicase polyprotein,1
  source 1..846: mol_type = genomic DNA
gaaatatatattatgtatttcgtgctctttagcactgatctaagaaggatcttattatagattgttactttgtagcacaggaccctttttagggtcctatgttagatcgtctaactttgtatattaagatgtggacatttcagttaactattgaattacgtattatgtaatcttggtgctccagattggtaatctggagcttccattgtaacttagaattaataaatatctaaaatttaccaccttgagtgtttattctacgaatattcactctttgctctcagccttgcgctgagagcttttgctccccatttatggggagctttttgctctacacttttgtgtggagctttttcctgcctttatggcaggattttcgatgttttatctgagtcgactacggtcaagtgtttatactcagacttatcatcacctatagaaatttcaaaaattttattagttgaatttctatgattcgttacctttataagaatggtttcgtatgttcgaggaatcccctcagtactatttagtaattttgtttattaaaatctccgacgaaaggagagtttatcagaaatagaactttagtgccgaaataatcggtcctcggctacgttttaagcaacgtatcgctacatttatattatattaggtattcgcaataccatttagagattatgtatcgtttaagcatcagttaccgctggtgtagggtgttggcactcccgacttttaaatacctctacctcttttgtgagccgatatcactagattttcgtaaactactattacgattgttttaaatatagtttttcaaacacaacccccctcttcacttttatc

SEQ ID NO: 2475 - DNA, 846 bp, Renmark bee virus 3
  misc_feature 1..846: note = isolate SA-4 nonstructural polyprotein and1
  source 1..846: mol_type = genomic DNA
cgtatattctaccattttggtaggatatacgtgagtattagtttcgacctttacgggtcaaggataattttaaaccttctttatggaggactgaatttgattgcacaattgttgtgaaccgtaaggtcatttcaactttgtttatatcaataagtcacttattttgatttgtttttaaatgtctttgatcatttaattctaaaatagagtaaactatattatcaaatctgtacgggtcttttcagacccaaataactaaatgaaaccaacccttttatgtttatatgttgtagtgcgtttattttacacgcattgtttttataagtaaaattagttgatattaatctgcctttcttaagttcaaatcttttagatacctctcgtcggaaagacagcaaattaattattttctattgttgaagtttagtggatatgtacttcttgttttccaaacatccatcataaaatattataaaatatgcccctaaaaagagccaagtattgtttaatacatttagtattgtttaactcatttatgtttcttttgcagaaaactttttataaaattactacacacagaatagaatatttctggtgtgaaatctattagcaaatctcgcaaacgcctctccgttcttttatggacgacgcgaatcgtgtagagatgataagttacagcatcagttgatgccgaggactatctagcaagttagtaaccctgtgtggaaaattttatattaataccacatcaaagtaagagtcttagatgtatgttccagtgcattgcactggatatccttagcacgggagaaataaaactgcaccccaaaacctattagtacaacc

SEQ ID NO: 2476 - DNA, 847 bp, Kummerowia striata picorna-like virus
  misc_feature 1..847: note = strain pt119-pic-7 genomic2
  source 1..847: mol_type = genomic DNA
gtgcaacccctcatctcaaccaggtgatttgaggtattttaattcctggggttcctggcgaagaagcacaactctcgccttgataccggtgtcggctagtagatccgatggttcacctggtgcgcagcccgttccttaaaccatttaatattgcaccttgtaggactgagccctcctgcaagtagtttagtggcttactgaagaaacatttcaaaaaacaaacttaggtgtctacaatcaagacacctcaacccctgttgttcaaacaggtacaacgtcatttgtggcagatccggtgtcggccatacaaagtgttggcaggtcccaagatgtgtacgatttgtacacgcctaatagcacaagcaccattgccgattacctggctaagccatatcaagtttttgccggtactttcactgttgttgattcaattggagctattttgtatgcttcagacacaaaaccgtattatacaaattcattgaaaataaataagttgcaaggcttctttggtttgcgttccactttgtgtattcgtctggatttaaatggcacgccttatcatgcagggcgtcttcgtttatgttattatccttgtttttccctcaatgtgaggaaggggagtgctcacatcacgaatgccattcctttgtctcagttacccggtgttgacattgaagcaaatgagtcgtctgttgttctgcgtattccgtatgtagctacgtcacagtttatcgaactgactggcggagcggtcgactggggtcgtgtatatattgccgtcttgtccccgttaaggacaggccctgacaatttgctcgaggttaattaccgcgtctggacatgg

SEQ ID NO: 2477 - DNA, 847 bp, Shahe picorna-like virus 2
  misc_feature 1..847: note = strain SHWC0209c12507 hypothetical1
  source 1..847: mol_type = genomic DNA
gggggacacacccccacgcacaccgtagattaattgagacatcagttagtcttgttggaaccagttgtactgtcttttggagagttacgactctcctccagaccagacttcatgttccatcgcacttttctacaaaccattattctgaggttagccacctcgtgcaacggctcatagacgcatacatgctcagtatacgtataaaatctatgttgattttacagaaaaacatagtcgctattatagcgcaacaaagctaaatactagataatttctgtattattagaagtatttattcctatgaattttaaaggaacgggcggcacccggctatgttggtttatgttatgtttatttgcgcactccacgcaagattatttaaacatgtcctgtctggacactttaggttgacacctagtaatcggtcgaattgataattcacctattacaacatcgaactcattggagttccatgttccgcttcgtttgaagcaatccggagtgaggcgtttatttgcggacctgtcttgcagggttatcttaaaggataacgcaaatgattaggagtattgaccggtactcagtcggaattattgtagataggtgtggcaacccatgacctacaataagctactggaatgtgaatacgttgtcgggctacctctcgggagaaatcgtgagacttacgcaataggttcgaggtatccaaaaatccttactagtagtgacactgttgtgtgtcttgctagtgtaagccgtttggtaacgactattctgtttggctgttggaataaatttgagggacgtgtgtaatagtgaccacgcaccttttatctttgatatcgca

SEQ ID NO: 2478 - DNA, 848 bp, Potato virus M
  misc_feature 1..848: note = isolate VIRUBRA 4/035 223K polyprotein-like gene,1
  source 1..848: mol_type = genomic DNA
catcgtgtgttttcaacatgcggtcctgtgtcgttttgcgccctacatgcggtacattgagatgaaagtgcatgaggtgctaccaaagaattactacatccactcagggaagggcctggaggagctggatgcttgggtcaaggaagggaagtttgacggtatttgcacggaatctgattatgaggcattcgatgcatcgcaagatgaatttatcatggctttcgagctggaattgatgaagtacttaaggctgccaagtgatctaatcgaggattacaagttcatcaaactagcttggggtctaaactaggcaatttcgccataatgcgcttctccggggaagcaagcactttcctgtttaacacactggccaacatgttattcactttcatgaggtataacatacggggtgatgaattcatatgctttgctggggacgatatgtgcgcgtcgcgaagattgcaacccacaaagaaatttgctcacttcttggacaagctcaaactgaaagcaaaggtgcaattcgtaaacaaaccaactttctgtggctggcacttgtgccccgatggtatatataagaagccgcaactcgtgctagagagaatgtgcattgcgaaagagatgaacaacctgagcaattgcattgacaactacgccattgaggtggcgtacgcatacaagttgggggagaaggctgtgaatagaatggatgaggaggaagtcgctgcgttctacaattgcgtgagaatgattgtgcgaaacaaacacctcatccgctccgatgtgaaacgagtatttgaagtgctttaattagtgtagcttaggtattgctattgtattgaatattt

SEQ ID NO: 2479 - DNA, 848 bp, Picoa juniperi mycovirus 1
  misc_feature 1..848: note = isolate ANK_VIR-89, complete genome.2
  source 1..848: mol_type = genomic DNA
ggtgcaggaaaactttttcccgacgtgtccaaaatttcctatctagtgatttcgatattaatactcctgaacaggaggccattcgacgcatttttgtttttaccaactataaaaatgacgttgaaaaatcgaaattacgtaacttatccagtgaacgatgtactcctgctacgtttacttcattggatgagtcttttctttatgttgatttttcttccctttcaaaatctctcaaaatcaccagggaaccttatgatgcagtatctgcatatattctttatttcctttttgatcctattcctattgaagtatggaaattcattcctacaacaatcttttggtcagagaacttatcaattccattttcacaaaataattattctaatagaagctatcccacgcctactatcatttcgaaattccgtgaattatttccttctccaggcggacgtgcttatgaaaaatctttcattttacctcatgatgttctttcctctcttgaaaaacctaataaaactaagaatctctacagactcatatctcgtcttcttcatgtgaaatgggagcctaatgttgtttctggtcttttacttgcttgtatttccttgcctactttagatttgttctttaccatcattattaattgggatgagttttggcaatgtgataagaaacaattagttaaagtgttaaaggacttacatactgggattcgtcttacattcagtcttccaaacggagttaggttgacctcagaacagactagacatcactacggtctcgatgcactctacggccggtccgacactttaactaatttttctgcaaaagatgaaattgctcaaaga

SEQ ID NO: 2480 - DNA, 848 bp, Phytophthora infestans RNA virus 3
  misc_feature 1..848: note = complete genome.1
  source 1..848: mol_type = genomic DNA
tgagatttacgcgcgagcgtagatccgccctagacgagtggtccaactggcagttaaagctagccagggactgctcgggtcaaagctagtcagttgccgagtggcgacggcggctgatactagagaaggcgacaccaagtgtggacgctgactcgcacgaccttaaacgtcttgggtgcgcgtaactgcaggttttggcaagcttgtagcctagcgtgagcttcagtgtcatggttaagtcaagaacataaaccggatagcactggagccgaaaggcgattacccgtagaagctggctttgccggtgtagtgttctggtatggacacgctaggggtgggtcgtcggttgtttaacgcgagtggggtatgctaaagcattaaccacttgaggcttagcgtgaaaaactaagcccgcgaatgaccatgctaatcggcaatagccgtgtagttgtgcacacaactatgtcacaggggtggccctgtataccggtatcttcttacggtatactaccaagttatgttaacctgcggtgcgatgaataagtatcagaagcagggtgtggcagcaggaggaattctgttgttgctaacgtacgctcaactggcctcacggcagcgggtaagaaccgtatgagttgggtggaacgtgccttgggcgatagacgtccagggtggaacggccggataacttggggaagcagaaagctgcggggattgaatggcctgcctacgggtgcctgatagtgacggaacatattggataacgttaatccaattttcaaataattaacctctccgcagcctagcagctgggatacatagcgggttaactactattaacgataaag

SEQ ID NO: 2481 - DNA, 848 bp, Beihai picorna-like virus 25
  misc_feature 1..848: note = strain BHJJX20433 hypothetical protein1
  source 1..848: mol_type = genomic DNA
gtcagacgttaatattactttgtttaaagagtcttattattctcgttatctaacttattattcaatggtctccgttcatatagttgcttatgctatatgttccgcgattttctgacctaataagatgcttggttaagaaccataaaagtccccgcataggaatggggtggccttagggtctctacaacaacggtttcggcatttgctgagcccgtgtcttgatttgatttgtgaacgcgtaatttaaattttaaaagcattctggatcaaatctagttgccaattgaaatttagttaaacgcatattcattttttattcgaggaagaactatgcattgcgtgagtgtttccgcaaaatgaattggtgggatattccccatcacccaattctaaatctttacaattgcatgaatgtgcataaacacatttgaaacttaatgagtagcattagagtttaaagattgtggtttataccactttataacagtttgttttacaaggttagatctataacggatttccgggggtctagcgcggttgccacagactcaacatcctttctttttggaaatgatagtgtgtttgttagtgtacattactacggttgtttttatttaatttgggaccaacttttgttgaacttacattgatttacggatgtcaaccagttacaatttctttagtctgggagatagaacgccttgtaagtagactaaaactacagatcgggggcgcggattaatgctatcgtggacaatgatgtgtttcattgatttgtctggaaactttgtttcttccccttaaaaaccggcattccaactgcttttaagcatagtcgcgtgcagaca

SEQ ID NO: 2482 - DNA, 850 bp, Picornavirales sp.
  misc_feature 1..850: note = isolate ytb135pic02 genomic sequence.1
  source 1..850: mol_type = genomic DNA
atagtttcactctggaggttacacataagtcaatttcttgaaatacacataacatagacgtgtcaattagcagatagaaatatggctttatgtgtatatatgtaattttgaatttgattgcgtgtattgtccattttctacagatagggactcaataattttgcagtgcgctccatctcccattagtgctgtataaattattccttttcctttttcccttccctttggatttataatgtgcttatgtttcacttgcataagcaaacttaaaattatatattgtattgtgattttccaatagtatataaatttaagtagacaagttgtgaacttactcttcggagtattttattctcttctgatatgatttggctttgtattttttcggatgtttgatatggcatgtgaactgattgaagggcttcggcaatatgtgaggatctgtaatggtatccaaatattctgatagtattacgcgtggcgaattgagatgtgacttattttaaaaagaaaactcactcacacatcactacgagtcgtacgtaattaactaaccgagttgtcccccctgttcactatcggctaacctgatgcctccaggcgttccgtcggaaacttcatcgctaagcctagcggctgaaacttacaatcaccctttccactgttttgttattgcctagtgcgagaaagacgcttttagatcgtgaatctataagctggagtgaagtacgcgtgagacatgtgttctgcgtatgaaccttcataacaaaattagtggtcggctattgacagtaagaccttcagtgactgcgaaaatggatcaagatgcccaaccttgaccaattggctg

SEQ ID NO: 2483 - DNA, 851 bp, Hubei leech virus 3
  misc_feature 1..851: note = strain SZmix63518 hypothetical protein 1 and1
  source 1..851: mol_type = genomic DNA
atataattgattgatttcaattatattcgtttgacgtgttcgcacgttgggtgaaaatcctgtttccgagatttatatatgtatttgaaccattagctcttttagttcaaggtacagctaattctggcctttgttctactaaacaagattgatttttggattcttttaaggccttttcgtacagctcatctgtgcgttgacaagcttgaccgatgtttcaatgcattttatttttcccggaacagacataaccctgtttctacagcagacctatctgctatatcaaaggaaccccctatatgtttacagaaaaatattccactaaatgtagtgaagaagaatgccccgttggcactcttttaacgggaggacataaacctgattctttcaggcctgcccccccgttttacgggaggacataaccctagcttctactaggcctgcccccccgtgtatcagggcccctgccctgatacctctgtttttactttgaggcatttgtaagacctcaccagattcatattgttataaaaatacgaaaataacaattcctcaatatgaacgttccagattggaataaaaaataatctataccctttggtaatttatgtcgatctaagtttaactcgttccactttgtttggttttactcactgcaatctatgatgttcacagtataccaacttatgaaagcgcttgatactttatcgcgttatgcaccctagtcttttgtgacgccggtttgacatttcgacatattttattaaatacttatcaggttaaagtccagatatatcccaaggaaggggagaaataatactccatttaagactcagaattacaattttaag

SEQ ID NO: 2484 - DNA, 853 bp, Morelia viridis nidovirus 2
  misc_feature 1..853: note = strain F17-700-11, complete genome.1
  source 1..853: mol_type = genomic DNA
ggtatatataatatacctccagacagtgatcctgtcaattgtgaaaaccatatttgttaaccagttaaataactgtttgaccgcctgctaaagtgggcaacttgtttttgctaaaccccaagacagtttagatcagtccaatttaatcaaacaaaacaattgaaatattttattttattgtcagagtagttaactgattgtttgagaattagtgtaccagcacaaccactcagccagcctaccaaaggcccttggccacttcccctctcacgacttataaaagtcgccacccagataatctacgaaagtagacatcactcctatttccacccataggcactaggagaacaggataaccccgaaaggggcatcctgcctgtgtctctcacattcgctagccagatatcttcacagactctgctaggcttgtgacccagtccgttcccaaagaccgttacctcccgagtagcgcttaggcgcgaaagggaagggagtacctcccgagtaagcgaaagctgaaagggacgggaaccacggcaagactaatcttagtcttacagtgtgggcaatctggtaattgtccccaacaatcaacccaatttgatgtgaaaacatctaactcggttggcttctaactagctataaactaggatatctcttaacggagactccgaggagggccaccaacagtccaccagtttatagtaagcaacaacaggggcgatcttccaagacacctctcaccacaagacacaacaacagtcttgtgaagccgacaatattgtctacggacgtattatcgagggttttaaaggaggagttagtgattaaactaatttcaacaccaataact

SEQ ID NO: 2485 - DNA, 853 bp, Scaphoideus titanus iflavirus 1
  misc_feature 1..853: note = isolate St_IT1, complete genome.1
  source 1..853: mol_type = genomic DNA
atttgttcgactatacaatagcaacttatctttgtgagaattgtttccttgtttagatcgacttatgttggatgtagtcaatatatacgagaataggtgtttccttgattttattcgtttagcttagcttctcgcgtaatttcaatagcatggtaaaacgtatccctgttgctacattttagttgttaagttttagtttttaagaacaacttttaatgttaagaaattttgtttgcttgttagcgttgatgaatctgcgaaaaaatgttttcaagtatgaatgaaattttcctatttagttaggtctgtatgtgtatgaatgaagtgtgtgtattagtatgttttgtttctaacctttacccattcctgttcctttgtaattcttcctctacaagtaattttgttagtagtacttataaagaattcgatcgtatatagaccttacttgcagcagttagatgaaggtctacttttcgattagaaattgagctcagccctgtgacgatgagtgagtgtatgctttaatattatctgtactgaacgaacttaagtatataggttacgatttgcgtgtttatgcattatgtcggtttaaccctatcttaagagatcgttgtatttgagaaattttagttcttcctcgcttgtttagaatcagatcctggtaaagcaatttctttttgcgaagtaaagtatatgtgacatgccctttatatgacctcttgaataagtccccctcaagagtatgaatacattatgaaagttttggaataattaccctttcccttcttttccctcgactgttatcttttggacacgacccctgctttgtttaattgattttatagcaaat

SEQ ID NO: 2486 - DNA, 853 bp, Hubei leech virus 4
  misc_feature 1..853: note = strain CJLX30730 hypothetical protein 1 and1
  source 1..853: mol_type = genomic DNA
tgtatatatttgattaactatcaaatatattcacgttttatgaaaggatgttgcttttagcaacatctaggaagtagtgcttacttctgacctatagcctggttttggcacgaacggataccgtatcgtcataatgcaactgggcctttatggtaccgcctcttatcattgtacgataatcactcgaacaaaccaactatagtcctggcacgtgcgtatgcatgccgtcactatgcagagggccttgaaggtaccgccactagtcattgtactgtaattacacgaacaaataaagcacaaccccatttaagttccctattcctgggttaaggaatgacgaactatcgtctaagcaaatagtgtgttgataatcactaaactatcatccccccttttttatgttaaatgtcaggtgtttcctgaccttcctcacaagggaatgcgttcttaacaattttatattgttaaacacactagtctttttagacttttattatctggttttatgaatactttgaccatgaccccatactacagaatgcgacgttcgcgtttgctccatagtatgtaatttcaaaggtatgttgtgggtttccaaccctccttgttttacgcgttttgccgaacttgatattataataacaaatttccatgtgcctgggtgtacttgaagatggaacgatgaactgtttcctatcacttcttgatataccccgcacctctgagttatttttaaagaatattgtttttagcctttatgactgcaaagatcagcatattgtttacgttatcccctatgtatgttaagggacactattaattgtagaaacaagtaacatatgtccatgacgct

SEQ ID NO: 2487 - DNA, 853 bp, Beihai picorna-like virus 32
  misc_feature 1..853: note = strain BHNXC41402 hypothetical protein1
  source 1..853: mol_type = genomic DNA
ggaactccctgtaggcctcaaagcctacaggagttccctagagaaagtatattgtgtcgtttgaccgcgacacccgatatatgctttcacagatattcggattttatattccttttcaatgtgaaaaacattggcactggtaagtgctgtcgttactgggatgtgaaatcccggttcgtagtattttgctatatgtgtttaaaggagtctttgtatgctgctaacgcggcttcatcgcaaagtccttatttcatctgttatatttcgtcaccacccttatggtcacccgtaagtgatggttcatcatagattctatttgtggcgagtagagtttattattgatgtataccaccccggagagtcaacttcgttacgaaaatcaagccccttgcgctatcatgtattaggaaattgtaaggaacgtttcccgtattacttgatagtgtcgattgatgctaactcataagattggcttcatttgaggattatttatactagatggtttagtattcgtgaagaatcccactcacattatatgatttcgcttaaccaccttcactcgcagtagagttgaacgaaggtgtagatctaacatttttgtgagaagaattggtcttctcggagctatttgctcaacgtaccgagacattattgatgtatacaataccatattttacaactacgttttaaccagggacaacctgacctggagagtttaagccactcaatttttccgtagctctgtctgatatgtgaggtaatcattactcagaagaagtttcaactatgatgcagtagatatcgtagtattgtttagcccttgtggttagttccctattcccattttgaaatc

SEQ ID NO: 2488 - DNA, 854 bp, Beihai picorna-like virus 33
  misc_feature 1..854: note = strain BWBFG40845 hypothetical protein1
  source 1..854: mol_type = genomic DNA
gggagagaaccatggaataactccatggttctctcccttacatatgtttgtgtagtgtaccgcactacccggcaaacatacatattcattgcagtacttgttctgctcttattttaaaatgcgtaaaggcgtgtcaaataggggtagaacccctaattgcacttcctttatacattataagagacctatacaattaccgaaaggcaaatgtatagattatgagaatgtatattaatatgatatttagtcatcactccggaaaaaactaattccgtaagagatgaccgcattgtcagctatagttgtggctactatagcatatgtgaatgccgtcaccccgtagagtcaactgcgtcattaaatcagcaccttctgtggaaaatcatagtagcttttaaggacgagctatgttttgatttgtccatatagaacattgaatgttattgtatgacattggatgactgagatttatgcaaattgttttgtattcagatgagaatcccacttttagtgtgtattactcgatttaacctatttccacccgcagcagggttgaagtgagatagtagagttaacgccattcgaagaagaattggtctcgtgtgtgtactttaatccaccgatatagagctatgtcaataagcctcttatgtggagctctggtatacaatatgcgtttatttaagtacgtttacctcatgacaacctgagtgaggaggtttggtcacctaaatttttcgtacctatgaatatttcgctgaggtctcacacagttagaaaatcgattgctttagcaggatttgttcttagttttgtttagccctttgaggttagtcctagttcccatttaaatc

SEQ ID NO: 2489 - DNA, 856 bp, Weivirus-like virus sp.
  misc_feature 1..856: note = isolate war204pic4nc genomic sequence.1
  source 1..856: mol_type = genomic DNA
atgcctgaaaaggagtggtgaagatccaaaccatgttgatagtgccttgtttagcctcggagagcagttggcgactgtttgcaagcgaatgtttattatagtatttactaaagtatcatgtacctgtatcgtttacgttgggtacatagaagtggcgacgattcctgccttgtacttactatattagatttagcccgaagtttccgttgtaagatagctacttatatcaatccaaatataaatgtcccctttattttttataaagagtaatttcccccataccgctgaaagtgtctacaggtacgaacgttattaccagaatttattttggattatgcggaatgtggagtgtttcatgtatgtgttgctctatttactgtgtgaatgtgtgcgtatgtgacaggacctcttcttaattgaagaggacagacgagccaacttgattttcttgtaaaaacatttactgaaagtgtttctatctatgatttctacaactaggacctgcccgtgtagcctctggctagtagaattctccttcgcgagttttcgaacgctaatgcctcgtgtttgactcacttaagcctgatgagactttcgatttctctcaggagggtgttttctctctgatgttgagcctagaatgataagatagaagtgcgattaagacctgttttcggattattgacggaaccgttttccttgaatgtgattgagtgaagttgtctacctaacgccaaaaggagccatgtcataaactttgtttggccaccgatttagttaggaagttaaactctatgtgttcgccttaaccggcccaaaacccctttttgctggcgagtgcccaaacccttaaaca

SEQ ID NO: 2490 - DNA, 856 bp, Changjiang tombus-like virus 15
  misc_feature 1..856: note = strain CJLX30583 hypothetical1
  source 1..856: mol_type = genomic DNA
ctggtggcctgtgtgcaattaattctttgtgttcatgcctcatcagcattgaacagtacttcaatattttgattatcaattctttgcacaccgcccaatgtatccagtgaaccatggctagacagcggattgctttgccaactgcggacgtcatcgtgccgagacgttaaaacgacgcatcgtctactgccagcaccgatgttaactgtgcaggaccccccagacaaaggaaaacatgagcgcactcgtacgtggattaaccaagtacgcgtgtgctggccttgccctggccactgtctatgctgcggatcaattggtgaagaggttccaccggcgacgcgctttgctgcgtgatgctaaggaggaccttgcagccctcaattcgccatcagtcatgcgtgggcctggtcttgaccaggtcccaggggtggtcactatgctggagcgccaaggcgttgctccagtggccgcctcttccaccactcatctcctccgaaacaaccataagtacttctgtgcgaagtgggctcgggcagtgaaggctcgctttgagtttgccaggatgtgtgaggacaccccccttaaccgtgctgctgtccataggtggctcctttctcagtggaaggagcttaagaacagcgctgggaaggggatgccgttgcatgtcatggacctttacatgaccgatgctatggacatgagcttcctgccaactgccgaatatatgcagagtgagtctaagagggcagttaggaagcgcgcccgcatggagtactacaacgagcggaaatttgtggagggatggaaataggggggcctagtgagggtaagggggtttgataccgtcccgcgattt

SEQ ID NO: 2491 - DNA, 858 bp, Beihai weivirus-like virus 3
  misc_feature 1..858: note = strain BHZY60776 RNA-dependent RNA1
  source 1..858: mol_type = genomic DNA
ccatgccagaagacgaattcgatgttggccccgttcttttggggcctcatctgcatttgaatttattaagggagcgtcgggggaggaaatgcccccggtggagatgacgttgtgcgcaatatgggttgggggttcaaagcatcacccacccaggggatttcaccgtctcatccgggcctgcgcactgaagggggccgcaccccgagtcagccttgttcttctgccacgtgtttcactgtgcacggggtgagagcctgtagcggcgtgtcgagccccacgcctgaggtgaaggcttataggagactggatttcacccccagtttaggattggcctcctttaactcctatacccgagatgggcaatgcggtaggcaccccatgatgccccacatctgttgatgagttgttctttttaactctctcagatgggcgtagggatacggggagaagtcgaagctggccgccaagccgcaaggcgtggttggttggttacccatcctgtgttgaatggcgcggtaccgaggcctggcgtatccaggtaatgctttcaagaacatggttagagcctcgacggttgaggaaccggtcaccgaccaccgtatgagccagcggggaacccttcctgttccaggcttgttcgacccatgtttaagagagtgttggtgtgtatagaaatcagtgacgatgcaagtccgagcaggcaacaaaataaaagtaaaatatgcctgctcgtccattgtatagttttttccggacctgattctgtatgaacaggcacaagcgactcccgcttgagacgtgtatagtttttccgaaacgtcacagtagtgttcatccgagtgtacattctttaagaga

SEQ ID NO: 2492 - DNA, 859 bp, Beihai picorna-like virus 15
  misc_feature 1..859: note = strain BHXG24735 hypothetical protein1
  source 1..859: mol_type = genomic DNA
cgcagataaagaactccacgtgcgcgtttcgcgcacgtggagttattgttgtatttggcgtttgactacgcccagtgtacttgttatgtagtgagttggggcgttacgacgccccctcttcctgcattagcagctacattgacttcaatttcatctttatcatacccgttccctgggatagtgggaccccctctgtcatgaggatagtcatttctgacgtaagacagacgtatgaagaatgacatattgaatataggtaacattgacgaactatgcctctaagttcgaatgatatgtttaccgaattgatgtgtaccttcttttgaaggcacgtctactttcttgatgagaccgaccgaaaggcggcacttgattgtagattcacattttatgtttctcgtgagagaacacaattcggtacaggtaagactgacctgtctggcaatcggtcagagattgataatctcgactcgatttgttgtgattttgtattgatcactttagcgccgagaaggcgtttgcaccgagagtaagcggtacgagacatgccctactagcatgggccgacgtaatggtcaagtgaaacttgttttaggctatctgttccggtagtcacgcagaattaagtgtactgaggggtggcacccgatgaaggcacttttgctactttgtgtaaacaaattctaggacatcattttgatattttgtcaataattttatcgctatgtttggggtatttacagaaactctggcttttgccgtaagacgatttatgagacattatttgagacttgatgtaagtgattgatcttttgatcagtaattcgagggactacgttccttttatcttgaacacagc

SEQ ID NO: 2493 - DNA, 860 bp, Wenzhou picorna-like virus 53
  misc_feature 1..860: note = strain WZSLuoI86067 hypothetical1
  source 1..860: mol_type = genomic DNA
gctataggtctacctatagcaagtttcattcctgaagcagataagcctctcgaggatattaatttgattttatgttacactgtatacactagatgtgggtgttgttactcacacactagaagacggtggactaaagattttattatatattgtatacaatcaaccccaacctattggttgaaggcttccagacgttttacgcctagctggcaacaaattagtcaccagcgatccaaaacgaatttggagtgggtttgacatcccactaagaaattgtcctgcatagcagggaaactaacgtctggccaaaatcctattattaggtgcgcagcgggttcgctttaacctgccactcttgtttactgtcagtccgaaagagtaatagtcggacagaatatgtcaatgaattgaccggaatgaggaccaagttgattgagcctcgccctccgaatgggccaagaatattttcttatattcccacgtatatacacaatttagcacaatagtgtattaacccccttattgttttggggcattgaatattgtgtatagactttgtcatagagtcacacttgtggatattttctgctcgaaacgagtagatagggagattcatcacacaacctggataatcttttgattataaaccatatggaagtgtgggttgaagctcaagtgtgactggtctgagagcgtctatttgatcagtagacagcgcttgatgaagaccgcagttggtggattaacaaccacttatggtatatggcaacctgtgtgaacagtttctttactctgatcgtgtgcttcgtgcaccagggtaaagtattgtttgacaggacttgggacttttctatacaaaa

SEQ ID NO: 2494 - DNA, 860 bp, Beihai weivirus-like virus 9
  misc_feature 1..860: note = strain BWBFG39428 RNA-dependent RNA1
  source 1..860: mol_type = genomic DNA
gcctgcgcctcgataacagtggtattacgtttcaccccgtgttgcttgcatttaattaaagtcccagggctcgaggaggaaatgcctcgggtgagatggcgtagagttcttataaaacaggggcacgttccgccgtcccctcctaactcggggttctgaagggagaaaccctaacaagccaggcttattcttgacccctcgcgtgatgagcgcacgcagggcgcagcctgccggcatggtgtaggagccagcctgaggtgaaagccgtatcgagcgcgggttagcagccgcgtaggatttgccaccttaatcggtacaggagtcccccctctcccgcgcgctccctaagggatgcgtgaacccagcacccaagctgtaatggcgtggcctgttggaagggggactaaagaatggttacgatgtgtgccagcactgcgttttgggcttcggttcattacaagacaaatctggacatgcctagtagcaagagtgcgtactctaagcccgccgacctctcacgttgacgtcgtactgtggttcgcccacggacgcagctgatcccgttcatgtcatgtcggttgaagggtggtttcttgagccccacccgtggaagcaccaggagttgatcgcctggcgcggcgccgaacggggagtttgctcgcccgatagttttggccgcgcacgtgtggagtacgtattttgggcatgctgctgcgtttgaggatagtcccattcgcaccacgctcttccttaagggaaatgaattgttttagttatgttgttactgtttttccagtgatgccattttggcacacgaagacctggagaggacacagtcgtcgtcttgagttgcttcaaca

SEQ ID NO: 2495 - DNA, 861 bp, Riboviria sp.
  misc_feature 1..861: note = isolate bpk205shi02 genomic sequence.1
  source 1..861: mol_type = genomic DNA
gtccaaggggtttgaaggctcggtctaccactttgtggggataaattgtaactgcgagcaatggttgttggtttcaccctgaaacccgtggcggctgttaccccatctttgagttggtggtcacgctgcaaacgggctttcggtgaagccgtcctggagtctccaatactccagtctctttgctgctatgacagtagagaggtagagtcgtacaaggcggatcgcgaaatccgccatgacatccgtgaatccatgcgcacacatatgggttatggtacggctgctacttgtgttgagaatgtgatgttggaaacgtttaacaccaccggctatgatcttagcaatttctcgaccatccggacccagtgcgcggggttgcggaaaaccatgacacaatgggacgaattcttccagttgaaaggggttgacccattcaaactggtggacttcgagattctacccacttgtgttgtgcccaagttcgctgcgtcaatggccttgatgctgagaagcaaacttggaaggttagcaccaaatgatgctaacacgctccttgtggagagggagtacttgcgggtggcaaggaagttaaacgtgcgcgatgtggacatcgtcgcgcaccagcagttcgtgatgaatgctgtgttcggtgaaacgttgctggacagtgtagctttaaccaggagtcgcattccaaggtggatgcggtgggcgttcgaggtggaaacaccgacagcgcccgtccgcgtctgctaggggtgcccactcactgtgcgtggctgtgacactaaggttgctgatgagttgttagaacagatcagaacccaatgtctcggcaagttgtgcgcgcgcaggaatggg

SEQ ID NO: 2496 - DNA, 862 bp, Guarapuava tymovirus-like 3
  misc_feature 1..862: note = isolate GTV-like3_1 polyprotein and1
  source 1..862: mol_type = genomic DNA
ctcacgcgccgttctacctgactcccacgaagatgagtctaccgacagcacaccccaaagcgacaatctcacaacctgccgctctgaggctagccctacaaccccggtccttgaacccttacccacctccgctcttgcacccgcccaaggcacttccgctgatctctatgaattgcctcctttcgtggctcaggcccccctcggtggcgccgccacctcggccgcccctttttgcacgcccgtcggcccgtcgctctctgaaccggaacgtccgtcagcgtcgagccctctcgacagcgacgtcagcgccgcgcctggcgtctccgagcctttctaccttcttcacaactttcccgccgccagcgacattctctggcccacgcgtcgacgagtcaacggcgcttcgaaccttcccgtcccacacaacaactgcctcctcgttgccctggccgaagttatccctactcagtctgtgcgctcactttggacccgcctatgcgagctcctccctgactcacaactcgacagcgaggagatccgcacaatcggtcttagcaccgaacacctctctgcactcgcctggagccttcaggtccatgtcaccgtcgtctctggcaataccagcacctacggcaatccactcgcctccgctaaagaccattacaccatttattacggcaacaatcacttcagcgcccagagggtgctccgcggcgccactccccaaaaatatcgcccggtccgacattcagactacgcggccttacacaagttcaccaccaacagcgggcatcgcctccccttcgacaaatttcacaagcacaccgccgaccgtcatcgtgccaagaacctaatctccaac

SEQ ID NO: 2497 - DNA, 862 bp, Lactuca sativa picorna-like virus
  misc_feature 1..862: note = strain pt151-pic-8 genomic1
  source 1..862: mol_type = genomic DNA
gtaggtcatgtttgttgaattggaggcgaataatttccttgccgtctctaaacgcgctagtcagcgtggctttgcctatgacgaacctcggaagcataaccgagctatcaatattgctgaatagattacgtagatctattttaaagaagaatacggaccccataatacacatagagagatttgatcgtctatatgatttgagatgacttctttattttgtggttttttcgggcttttatttaaaagctccctcgggttggtctcccgagtgctttcgacattagtgtctaatgatataacgtttgagaagatattcagcccatcgtacgtacttttttccttatacggtagccccgtttggaattatttacttactggtggtattctcgcggtaaaatgactttctttttaattttcctttgtaaaatattaaatttttctctacctattttcattctatcatttatgtagttatctttctgtgtttcatatcactcggttttactgttggcaacacattgttttttacattatctcactcggtctacatggtggtacttcataacatttcactcggtctacaaggtggtacttcattttcattttcattggttatttgtccattgttgcgcacttcaacggttgatgtgtaattcgttgttttcccccagcgtgccgtagttcacggtaatatcatgaacatccacgagcgactgagcaggattagctttgacgttgctatcgccgtatattttatataatccgcgtgcggcaaacccataagtggtgcggaaagaacaaaaacatggaccattaaggccgtgagcatctttgtgatactactacaaacaaaaagcagacc

SEQ ID NO: 2498 - DNA, 863 bp, Beihai picorna-like virus 54
  misc_feature 1..863: note = strain BHNXC41489 hypothetical protein1
  source 1..863: mol_type = genomic DNA
ggttaacaccgcatagcagtcactttctcaagaaaatcttcttagaagactttcctgacatgaacgatttgttagagatttataagatttatttgtgagtatagtactccttgtagctcggcgaaatcgtagagtgcttaactattgatatagtcaattctccttgcagctctacggatttgtctggagcttgattttgatatcattagacactttaagtatctcctaatagctttttcatgcagaaagttttaaactaaagtaaccaacaccttttgtatactgccatgttggcagctagatgttcctactttgaagtcgttttataccgcttctggtagtgttttatatttgttttaaaatataaaaatcgcttgtgtgattcccagtagggaatttctaaatagtggactccagagatgagtaatggccactttgatgaacctagaataagcagttgacgcgagatagcactttgtgtgaaacggtcctgtgataaaaagagaagccgcctgagtgggctagagcgtttggaagcgttcgtcatcaaagatgaagaccctttatgggtaggatacaccaaatattgcaccaggcaatgtgcaatctgattttactatttgagtcagttaaaaccaaggttgaaggccaccttgaggtctctgcggcagaaatcaccgttcaatgacaaattctctcgtgtaaagtgagagagacaacagcaactattttcatcagttctattacactggtgaatcttacataggataatagagcaacttcccggtagatgtacccggatattaacgagcacgccgtagcgtgcacatcatgaaattttgtctttcccattccattttgga

SEQ ID NO: 2499 - DNA, 863 bp, Beihai picorna-like virus 2
  misc_feature 1..863: note = strain BHNXC40556 hypothetical protein1
  source 1..863: mol_type = genomic DNA
gatctccacacggtcctttcgaccgtgtggagattcagttaatttcttttgtcaaatagtttattctcagaagtgcatactatatgcttctgagactttatgtgtagtaagtcatactttagagttgagttattacactctactctactttatgatatatgtatgctatacttaaagtctatcagaattgtacttctgttagtgagatatttgatttataagaattacagtaatcgaaaccccgtcatttatcgactttctgtgtttgaaatgtcgcacagatcgtagttcctaaagttagacataacataatttaaggattgtcaaggctaatgattaagttgttaactttcttcttatgatttagttgtactttttaacttgatatagcgcacagcaccgtgcgcttccaatccgacctcttaggtttaatttgttagttcagtaaccgtcaattattgaatgtttacaaattaacccatttgtttattaacactatttaaacatcttatttataatatttttgatttagacataggacttatataacctgttgtatccccctactatatttcatacttgttttaacggaaaaccgcgtaaagagacgtataggattcccagagaatttgtcttatagtagaagaatcggccaatggagtatatttaacgaaacgtacatcgagatccaatgattgtcggaatatattaccaagatatgtatagtttaaggcatcgtacaccgcgatgttaaggtcgtcttacctgatttttaattacctctacttggaattgacccattaatagagtaaataattagtgtttatatattgtgatttacaataaagtattttgacgttttt

SEQ ID NO: 2500 - DNA, 864 bp, Rhizophagus irregularis mitovirus 1
  misc_feature 1..864: note = RNA-dependent RNA polymerase1
  source 1..864: mol_type = genomic DNA
gggtgtagccggtagaaataccggttacatgtcaagttactagagcttggctctaatagacctgatgtaggagtttaactcctgaagggaaagtccgatcttggaatggttggacctaactattagctcacctggaatctagcaggtttgtgttcagaacctacctttggagcagggaaccgtaaatgggttttcacacctatgagcccggttaaagcttaacagggtgcccggccagggcctctgacagggtagataagtaatttggaaacaggttactaagaaaggagagagggtaatccgaactcctgccttatagacagaagcgaccgctcttaaaccggagcgaagtagtagagatgattctctgaaaggacagctggcaaagtcagttgctagattcgtaacgaatctgggagtcaaataggtagggtagcacccatccttactataaggtcccccgaaggggataaactgatcacaaggaccaactcattagttaaaaggagataaggtgcttgggtaaccgagtaccggggtaactgggatctttcgatccaacgattgaaggaaattacgagccttattcctgttagtctgacagggtaaggtgagaccaggtctctggcaaactcatagagttaggaccaaaggtggcgacaccgaactgaaccacagttgcctgcggcctgtccggactagtggattccctaggctcatgctgagcaagaggattcaaaggtccaagtaacgaaatcaggaagagttctgggtagccctgtatagggcatcttgagctttaactgaggacagaaaccgaaggtttcaataatcgacgctaacggtcaattcaatctactaatt

SEQ ID NO: 2501 - DNA, 864 bp, Shahe picorna-like virus 5
  misc_feature 1..864: note = strain SHWC13542 hypothetical protein 11
  source 1..864: mol_type = genomic DNA
aatttttctgcacatttattgctagcgccttccctcggcgtaggacggtttgtctatcatctgtctgttcaatgccaaaccatgatgatcacgtattgtcatggtatgtatcagtcttaagactgctttgaggttttcaaatagagggtttgcactagctttgctggtgcttttggggagttatctccccttttagcgttattgcctcatgaaaagggctgtaacgcgtagttttcgctgcttttgactatgataaaagcagcatatttgcctttatggcaaagtcttttgttcttgactttactaagaacaataataggctagtatttgttgtaaatacgtatcgttccacgtattgtagtaaaggaacgcatgttttcaacatgtagggtgcaaatcccttgctggctctttgcgttttgatccactttatgccagtattgcctattgtatttttgagctttggatcagctcagttaagttttaaaaagaaataaaaattaaaaaatatctgtccaaataaaaagattatttttgtcatatttgttttaaaagctggacagcaaacagccattttaattaggtggagaaatagattttctctggttgttattatacgttttatgttcttaactgtcactgcatggaatatttccggttcacacaggttaaggacatagccaccctgtgagtttccggggcatgtttcaggccttgtaacgtattttgcatgcttcatttgattttaatggtttattcctggtaggtaagagtccaatcaggtcttccccgtgggatcacggggtatccctttgaccgggagaaataatacgtcatttacacgcctagagacacgaaacatta

SEQ ID NO: 2502 - DNA, 865 bp, Fusarium graminearum dsRNA mycovirus-3
  misc_feature 1..865: note = complete genome.1
  source 1..865: mol_type = genomic DNA
gaataatagacccgaggagggtggcctgattcgagccaggtagcccctccgtctgttatgtgatgtcctaaattgttgggcctcacctcaaggtgcagagacgattgcactggctgaacctcggccgtaaaacgaaacccggtgctaaatcacaaccacttcattctttcattggttgagcgggtggatacccaacacttacagatgttgggacggttcagcgcgcgtaagtccgttagggtagggtggctttatagcatttagccacaccaggccagcggcgcgtagcctaacatttagaaaattcgttcttccattaataacggtatgctccgttagggagaacgatgcttttaaatcgagcgtgcagcaactccgacctgggcatgtcgttaaactacctaccttatcttcgggtgaagctggtccccggagatccgacaaagccagtgcagcctcctgtgattaaaccagcgagtagggaaccgacgccgacttccagatatggtcgtccgccgagggtgtgccaaccgatcagcgcttgcgctgccagtgtaaaaactgcgctcttgagattagagggttggtgctaacgtagagatggtgtccccgcgggcttgttcctcgtagatatgcgagggagcggcttttgcccccgatccgcgggcatatactaccactcgaacgtgctagacttaaaaactctagtggagagacaacacctaccgccccgacctgcgcaatgtcttcgactgttcaggaattacgccatggcgcccccaagtagcaatgcttgggccggtgtggttgtatagggcacagaaagagtccgctctcccttcatatcccctgaagggcgggaacg

SEQ ID NO: 2503 - DNA, 866 bp, Wenling crustacean virus 8
  misc_feature 1..866: note = strain WLJQ104142 putative glycoprotein1
  source 1..866: mol_type = genomic DNA
ccacattaacttccgccccacgcacgccgcatgtggtataatattactccttactttatagttttcatttacacagtatactgcttcttgtttatcctccatatggtgttaaatatattagtagctcctataattgtactaatccttctcataataatcttgataattgttgcaggctgcttttccacagacttgagtgctaggtgttcgcctgagttgcctttatccaaatgctcaacacaacaacagtcagctggccttatcctcaatccataggatttgtgttgtatatatacgccttgtcgatacttatttcactatttgtatatgagcttttaaccctgctgcaaacaaagtccttcttgaggtttactatttacttgtctttcatactagggctggcttattacacacatcattatatggtacataatataaacaccattgatagttacaatcaaatgactaatgagtgatatagtagcatctatttccaatctacagagtgatagtctaaacttcaggtatagattcattatactcacaaccgtatcgctaagcagcatattaatcaacctactatctttgataggtttattaatttgtgagaagcattgttacttacctgtcactaactacaattgtgaagacatagactatatatattatgagtatatattctctcattacccttttataggattttacaacactttcagtagagaaggctgtgatttttatgttactttctataataaaatctgtgttagttgtgattcatcatcccgttgctataagctacaaggtgaaataacaaaaataggaaattgttttgctctagtgaaaagagactttagtgcttcagt

SEQ ID NO: 2504 - DNA, 867 bp, Beihai sea slater virus 2
  misc_feature 1..867: note = strain BHHZL10411 hypothetical protein 11
  source 1..867: mol_type = genomic DNA
tgcgtagcgttacacgctacgcacgcttattttatatctcgtttatttgatttatatatatttatttagggataaatatgaagatttctttgagaaggtaggccttggcttagatttcaatatttcaatattcgagatccccttttacacccccctcttttctttttaattggctggtgttcaaaattatttattaattttattttattattcgtattagtatgtttggaaatctttaactattacgaatttcattaagttggagtttcaaaattttcatctcgttccctagattatgtatgggaaaaagttcgtaccctaacgatttattcaatgggtaagtttgattggtataaacacgttttcaattttataactaaatatacttgttaataatctcttttattagagttatcctgcgggatgtcttagacataaaattattaataaaggtatttattataaaattagatttctatccggtttttacttagatcatgggaaatctacagtttctataaagtatgtagtcctgttaattagagggcctcaaatattaggtacgcttgatatttgcctctaatgaggaggggaaaaactaaaggtgcgattcgacatcaaacctactcctgtattcatattcgtacgcgtaagtgcttgggatggataattgaatactgtcttatgtaatgtctggatgtaaaagatatgagcaaagtagcaacgtcttgttaaataactcctcttatcggcgcgtttagtcctagtcgcgcagggacacattcttatgttatgtttgtataagatcattatcagccaccgtgcatatcccctcagaaatagcccgtaaagtacgatttatataca

SEQ ID NO: 2505 - DNA, 867 bp, Shahe picorna-like virus 9
  misc_feature 1..867: note = strain SHWC0209c12638 hypothetical1
  source 1..867: mol_type = genomic DNA
attttatcatatttagttttgctccggagaaaaccgggtaacaaatggacgacctttaattgtgagacacatgggggttggagccaacatgatattagagatcatgttcggtagatcatcttcggtctggcggtcatagacttccagggcttgatgtcgtccatggcgtgaataccagttaggtctaaaggcgtttgaacaaacaaacagaaaaatgatggtaaaccatcaccacctttacttcgttgtttcatcattgagacaggcgtgaaagaatgccatccgtggagtcgctttatacatactgcgctattctgaccaatattcgacatactagaaagagaatattgcttattgtagaccagccatatgagtgtaatcttggtgcagtccttgttacactatgatttcaactgccacgtaagtgatcgcgtcactatagaattccaaaaacattgttttgttctaccgtgtcaatttatcatcaggatacaatttttgcttaggcattcgatggttgtcgtcccttccatcgaacccgcacctcggagaaaggtgtgctcccacattacgtcaagttaaggtaaagctgctgttataacataatgagaatcaggagatcatttcctatggattagatattacgatttctgtagtatcctcatcatctgtatggatttgtaccaaatgtagttgtgtttattaagtggagcccgatacacttgggtcgtgtgatgagtaaacaagaaggtttggtcaccatttcttgttgggattatcgaggtccgagattttgcgacatttgaacaaatagtttgagagaattcccacttccatttattctagtgaattatagtgctttgcatt

SEQ ID NO: 2506 - DNA, 872 bp, Posavirus 1
  misc_feature 1..872: note = isolate Ishi-Im2/JPN/2016, complete genome.1
  source 1..872: mol_type = genomic DNA
agaatttccaattctcatatcgtagactggctgaaaagttggtcttgacgtcgtgaaaatggcgttatattttgagtgtaagggtttcctgaaaaggtaattcttatattgctgtgaaaacggctttctctttttatctcctcaaactccttattttgcattctggctgttcaagcggcccaaatcgcaagcgtattacatttccttgcgtgcgtacccgaaaatttattgaatttggcttgaattataagcaatgcttcttatagcggacactttgagaatataatgcttgcatggattaatgtatactgtttcaaataacaaacctagacacgcagttgcgttgatggttgtatcaatcacatacgggtgttgaactcgtgttaatcctcgatcgctatatgtttgcctcctacttccaataaaatagattacatacgcgacatgcctttgtggtttacctattggcctctgtcaaaaacaaatcgttcgatttgtagtttcctggcctaaaaagctgggcgcggtctggctctcgtcggatggaaaggtccatcaatggctggttgagtgtaagctccggtgttctggttgtcgcaattccagacgtcgtaataacctatattgcatctgactctaattcttgtggctctactgtatctagttcttgttctactaactctaacaatgctactggttctatgtttgaaaaactctcctatgtcaatatagataatgtccttgatcccgatatccctcacatcactgaagttcatcgcaagcggatttcagatgatatcctcgaatctcaaggctgtacttgctctgaacctattctcactcctcgtgtgtttactttttcaactcttggc

SEQ ID NO: 2507 - DNA, 872 bp, Hubei picorna-like virus 37
  misc_feature 1..872: note = strain QTM27228 hypothetical protein1
  source 1..872: mol_type = genomic DNA
ctaggaggcactcttttaaacactgtagatcggtcgggtaacagcgcagcgatacaagattcttccacagcccttcaggctgactggaagtttttcaaaatttcaaaaccccaacacttttaaatgtgatcactgctttccactataagactgcttgaacaacagtacgtggttagttagatttagttttaagtaaagaagagtaaaacatcaaagctctgacacggatgccgagcctgtgagtaagccagacaagcagcattaggcagaagtggtaaacgttcaccttgagaaacgtggacggcgcgtcaacgaagtttactttataagccatttgcaatcgcgtcgtgtgggaaattggaatgttttcttttatctaaagttcttgagtataaacaacccgaaaaggccgtagaaaccatgaagattacggacgagggggcgacaggctagttataactaagttatagcgaaatattagtgcccagttgtttaatatgaaagaatcgcggatttaagagaaagtaccatcgtacctgcgtaaatcgtataagaagattgaaatgagtttaagcaccaagcatacctagcgggttgcgactaggcaagtctaacttgacgggaaatttaaagcctcccatggtgtaagtaaatagcgaaagcgagggtctgacagtgtgcaagctcagatgctaacccttagttgttcttatttagcaaataagattaccctaaccaggtaacgacgtcgaaagccaatcaacataggtaaaatcttttaggccgttcatcaaaattaccctggcaggactttcaaaaagaacgttctgctttcaaataattgcacaacaataaaacaagtgaataataaa

SEQ ID NO: 2508 - DNA, 875 bp, Guangxi changeable lizard picornavirus 1
  misc_feature 1..875: note = strain GXSXC1289721
  source 1..875: mol_type = genomic DNA
tctagccgcggtatggcaaccgcggcgcccaggccccgcctgttgttggtccttttcttaacccacttttgtggctattgcctgtctctgcttgcatacaggcatgtgtcctttagtgagttgtcttggactgtatacatgggcctcggtctttgccacctctcccatttttcaccacttttgtaactaagccttctttctcgccacaatataacttgtcacactagagagtattttctacttggcggctctctagggcttctttatgaacacagtgttgatcactgggagtccaccggctacgctaagtttccctttcccccactgcctcacggcagttgggttcttaccctcccaccccctcccactttctctaatctttgtcttctttcgtcttgtttttctgggttgtccccgtaaccaagtcgatcaggccgccagggtctgaatactagtagcaggattagcctcttctagggtagacgaaacacgagggataggaagaagtagatttttgagtttagtttaaggtgcccttaactgggtaactgtcttcaggtctttgtattcgatcgcgcggacaagagtaggctacgggtgaactcttgtttttgttggagaaatcctcataatgtagtgcgacctgcaagtgcattgattggccgtttggtgcattaagttgtgccttacggacatcctctaacgcttggggtacaggagtgctacaccgctcgcgagtacactgctctggaggcgggcctttcattaggctcacctctctcttctttctagcctgcaaggtgacgggctcttgccccgatccctgtcggccgcttcctgcctggcttttaggttttacccactttatagcattg

SEQ ID NO: 2509 - DNA, 877 bp, Rhizophagus diaphanum mitovirus 1
  misc_feature 1..877: note = RNA-dependent RNA polymerase1
  source 1..877: mol_type = genomic DNA
cccaggttgtgaaacctggtaacatgtcaagtgactggagcttggctcgcagtgtagcttgactgaagggcttagaagcccggaagttaagtttgactctctcttctaacgaggatgagttctacacctgttaacccatctgaaatccagcaggtactgtttctatacagtcttcgtaacagggttgaaggagacacgcccgcggacgtgaatcttcttgaaaagtgaacttgggctggggccaccacctaaggcgaagacccatgaaggcaacaatgccaaaaaacataaagagattttctgtaaaagggatttctcgccatatgagacagaagcgaccgggttccctgcccgaagtagtaggaagtgtcagcgcaaacgcgagctagtttatactagtccgttcggccgaaagggccgttgggcactacaggttggttagtaccatccttacttatatggtcccgagagggataagtagaaacaggagaccaccctatagtgttggaccttagaatcgagcagttgtaaaactgtttgaggggcaaaaggattatggatctaggtgtcttacctagtttgtagtctatctaagctaaaactacttaggaaatggtcaaaggaggcgactccgatctgtaccacagaaacctgcagcctgaccgaagaaccgggatatccttaacaggaccccttgttcgccagaacccctaacggggaaggtaagcctttaaaggtaggtgagacctcctggtgatctattcaagtaaataaactccgaaggcccgttggtagccgaatggcatcatgggagataaagagggtcagaaactgaaggctatctattaactaacaatggaacaactaactctacatt

SEQ ID NO: 2510 - DNA, 877 bp, Picornavirales sp.
  misc_feature 1..877: note = isolate H2_Rhizo_Litter_7_scaffold_242
  source 1..877: mol_type = genomic DNA
gcatgtcattttagtcgcgcgagggggacgacgttaactacccccgccggaatactaatccttagacgttcttccctttggattaagtaaatcttaattacttttaaatggctaatagcgatttaccggaatttttacaaaaatacgtcacaaattttcccaaggccagttctggattgaacaatcaacaaaagcaaagtattgaagaattgagaaaacttcccattcaggatacagactcacctcgtttaatttgcttgaagtgttttcctgacatctctttcgagtctatgctaaaagaagaggtgtttaagtgttgttggtattcatatttagaacatagcagtcagtggaaaaatcatgtccgtgaacgatacgaacgtagtcgacgaattcgtgaagaagagtctgcctctgggtctcctgaggccgattaattttgggacgaaggacattatctgctattatttcttgtgtgaatatacgcgggaagaaaatccatgcccgcttaataatcaacttgtagcaaccaattctcttcaagaaaaattgtgtccattttgtcaaagtaaacgtaggtgtgtcaaagcagaataccatattaataataaattggctgatgtacttccaaattcaatcatttttacagaaatcgaagaccacactaagtcgttgagaacattgtactttaaaggattttatccaggagacgcaactctcacaggcaagaaccatttcaacattcgagccgggtacaattatcctgacggtcgctgtgtggaatttcatcaacgatatggacctcctcaaaacaattatctccgaactcaattcagctttggccactccccctgccccccaatcagaggaaatggag

SEQ ID NO: 2511 - DNA, 877 bp, Aedes albopictus negev-like virus
  misc_feature 1..877: note = isolate Aa23, complete genome.1
  source 1..877: mol_type = genomic DNA
cagactcccgaaccatataccaaattgctagatttagtatttaccaagtaccagaacgtcacactacaaattctgcaagatcccgttattcaaaacctcacatcttacctcacaaagaatctcacattgaattttacagcagaccctatagattacaacgctttgtccgcactactgaaccgcacccttgaagctttggtagtgaggttacccaacatgtcacagaccaccgattacaaaaattttgccaaagttatacatcaatccccatcaaacaccttatcattttggaaagaaatcatagactattttattgagcacgattacagtataactcacaaagtttacggacaacctgggacgaaaaagcggttctctgttgtaggctatttggaaagtgttttattgaaagttgcccatcggatcataggtacgttaaaggccgtgttgcacgatatcatagaacctatatttttaaaaattttacgcaccatagtatctcttaccgccgaaattgttaccgccgtatttcacgtaattaaggcattatggactgaaataaagacggccgtcatcgataatcctgagttagttcgtcatttttcaacttttgttaagtgggtcgttcagcttgttcgcgacgtttcccacgttctcgtggagcatctcgtcgagttgaatgaacagtataaggttgtggaattggtattgctatttgtcgtgtgtgttaggtatttgcgcggttacgtcatatctgcgtttatagtggccgccgcaggataccattttggatacgaacgtgtcacggaacataccataatagttatattaattgttattttttcatttatacacttcctatttccagatttaaaca

SEQ ID NO: 2512 - DNA, 877 bp, Beihai picorna-like virus 20
  misc_feature 1..877: note = strain BHJJX25607 hypothetical protein1
  source 1..877: mol_type = genomic DNA
cccgtatgcacatttacatgtgcatacggggattattattgaagtgctggggattctcccagcaagatttttacacgagtacgctcggtatttatcttttgaatgacataagtacgcttttgttattcattcaaaatattattttccgaaatttctttatgtacgtttgtgggtatctaataaccctctttcatgaacagaaataaaaagtttagacctaggtatagcagaggagtctttaaaaggccttactggtcctgatcatgaccacttaaactgattattctaaacagaattcaaacttatacactgtcgggtgtttaaatacgatgtgatgaaaacacttataaaacatagtgtcaactgatacacttgtacacttatatacaagagatctaagctgtaattaacagcagctgctttgttaagtttacttctttgcagtgttttaacacggaattcacatattcctgcatctaaatgcaaatgtgatctttgcctatgatatgtgcatagctgcaccgagttaacgctgaacgtctctcacaatcgtgagaactagtatgtagggaacgcaaaacaaacgaggctcagtagcaagcgttttgaatttattaaggtaggcttgctcatttatataaatgagtttcatatctggaagtaatgaccccagtatgatgagaggccttagtagataagataagctaacttgtgagttgaggatggccatttgtccgtggaataacatccaatgatgctcctgacgaacgttctttagcctaaccagctatcgaacccaaaggtgctgtgccgactgtcaaagattttatctttacaggacacctgtacagatatctttgacacgttgcatttaaca

SEQ ID NO: 2513 - DNA, 877 bp, Hubei picorna-like virus 38
  misc_feature 1..877: note = strain spider133826 hypothetical1
  source 1..877: mol_type = genomic DNA
gttagtagcccttcttttataaccccgtaacaaaaggttaaacccttgggaggacctgaagcacctaaaagcgcaagatggaaaagctactaaaacaaataattaagaaacagatgttataaaacatcacaccagcaataaaacattaacgttaactggttataagaactccttgagaaagagtatcccagttatattcaaaattttaaaagaggttacttaccaacttaaccgatatttcaaacgagcgcccgagttagccagacaaggaccagtagggagaaatagtaaatgttcaccttgagcaacacggaaggtgcgtgaatgaaggatttaatacaaccgtaaataatcgcgtcaagtgggaatctttacagagtgtagataagagaaaatttttataaactagagtccgaaaaacgactgttccgaacaaagtgttcacgaatacagttgtggggcgccaagcgagacaaattaaattttgtttgaccagttagtcccagctcttttaactattaaaattggaaactatctatcataaagtagagttagtacctttgtaaatcgtataagaagaatagttataggttaacttatttaggcttatttgacggatagcaatcaaactactagtattagtagacgggaaatttgaagcctcccaataaataagttaaatctagcataagcgtgaggccggcagcgtgtgagaccggataacacctcatagttcgcgacattgaatgtagagcaacataggtattttgtttcgaaactcgttcaaaattactctggtaggaattcaaaaattgaacatcctatcaccaaataatcacacaataataaaacaaacttaaataatcatatatcaata

SEQ ID NO: 2514 - DNA, 878 bp, Botrytis cinerea RNA virus 1
  misc_feature 1..878: note = strain BerBc-1, complete genome.1
  source 1..878: mol_type = genomic DNA
tgaataaaaggccgaaaggctggattttcagagcatcgctccgaagtccagctaccttttatattgtccacttaattagctagtggatgatctcaggtcgggagacaatccggccagtgtagtagggggcaggaaagaactaagcacgtgcttatcggttgagctcacccaacttgggctaaactgtagcgtgtggatactcaaggtgtcaaggtgcggtcaacatgcaaacacgaccagttccgaaaacatccacaaaccttgaggcctactacagagcgtaagaatgctagggtagaaagagctggggctataacccccggatctcttatcaggccagcatcgctcagcccctctttttgtgtaaatcccacccggtctagcggagtgggacgcatataaaatgagcgtgtgaaatcgctctaaccgtccaagcacatgacactaaactgtactcgcccaggatatggcgttaaactgtaccatccgcttttgccagcggttaaaacaatggcttttcataacagccgcgtgtgagtccgcgggataataagtgttctaacagactcaaaaagacatcctatttccaagttttcgtcgctacgtcaaacgtcggcacttcttggatctggtggggtaacatacacgtcaagtatggtgtgaaccggggctacacaactaccggggagctaacgtaactgcgctggtgctctactttcaacgtgcttcaggaccgaaaccgtccgtaaaccaatgggttgcacagaaagtaaaggcgtagggaacgtgcctgggacaagaaccaggtggacagactgacactcaccagtgccttcccgatcgaaggcagtagcaaacagtcggtgcgggaactccgc

SEQ ID NO: 2515 - DNA, 879 bp, Frankliniella occidentalis associated iflavirus 1
  misc_feature 1..879: note = isolate1
  source 1..879: mol_type = genomic DNA
cagggattttatccctggggctctttgagaagattcactaacactgcgttgtaagataaggaatactgtcattactcactcacctcctagatcattcgaaagaggtagtatgatttcagatatttaaactcgttacggcactgtggtagcttgcttttcaaactcgaatcaccattcgtttcacaaaattcgatttagtagtatgtctcattgactttacaagtaatcatataatacttgttgttttccatttgaggttttctacctcctaaatttaatcaaaattatgggttttcttcccgtgaaattcttttagtttttaggcgcttttcgaactttgtgcgaaacaaagcggaccgtgatatatagtggaagttcaatgtgaggtaacggaaagataaccgctgtgtaaaataggacttattctatgtgtgctctttgagaaattctttacctagtattttgaatgagatacgatggggaccacatagttttatcctagcttctaatatactctcgtatctgtttggagcgattgagaatagtagaagccataagttacttctgtgcacttgctagtaaaacggaaactagtcacctcttagcagtgagatactgttaccgggttggcatccggtatactgacattgatggaggttacctgatactggcgcagagctggtatggtgcattggatgagtgcttgcattcgccagtggattggtgtcggctgcacgcttataacgatgaactcgaagatgggatacctgtttaggtccttagtgagaagttatttgcctgtagacctcccttgtaatcgatgaaatctccggtgcataaaacgggctcagtgaagaacacagctactttgatttcaat

SEQ ID NO: 2516 - DNA, 881 bp, Ryegrass mottle virus
  misc_feature 1..881: note = genes for P1, protease and RNA-dependent RNA1
  source 1..881: mol_type = genomic DNA
gttgatacaactaggtctttgcgacccagtgcgtctcttcataaaacaggagccccatccactcaggaaagttcggactggcaggttgaggctgatttcatcggtatccctgttggaccaactggttgagagggttcttttcggttttcagaataacctcgagataagccgatggaagcagtgtccatcgaaacccggaatgggtctcacttctaaggagcaatccgatgcgttgtgggacgagctgaagttcaagtccaccctagcccccgcggctgaggcggacatatcgggattcgattggtcagtgcaacattgggagctaatggcggatgtcgaaatgagaattcgactcggagacttcagcaaccttgctgcaagggctgctaggaacaggtttacttgtttgtcgaactcggttttccaactgagtgatggcaccctgatttctcagggactaccaggcctaatgaagtccgggtcttattgcacttcgagctcaaattcacggataagatgcctaatggcgaagatcatcggctcacgatggtgtatagccatgggtgatgattccgtggagggttgggttgacaatgctgtagaaaagtatcatgcacttggtcatgagtgtaaagaatactcagcatgcgcccggacatacgtgagcgggagcggagaacaaacccttcaaacggttaatttctgctcgcacgagttgtccgagggtaagtgtcatcttacgacctggagcaaaacgcttttccgattcttccatagtacggctccgtgcattaggagtctggaaatggaattagcgggcagcccccagtggcccaaaatctatcggtacctgcgtcgggtgggcttagcgcccgacaaag

SEQ ID NO: 2517 - DNA, 882 bp, Marburg marburgvirus
  misc_feature 1..882: note = isolate Marburg4
  source 1..882: mol_type = genomic DNA
cattaagtgtgcaatgatgagaactttaagataattgctactgagcccttcttctgatctactgaaatcaacttgggagatttttgagaagctgataacttaatgtgaatcaacagtttacgtattatcgattattatggtttgagattcaactgttatcatcgtcaagagtgacctttcctatttgatgcattaatgttttaaactacctcttaagcctttgtggatggtctcaatatgcgcgtaagggttaatttaaagagatttcttgttgcatagtttttcgtgttactgatttaggcttgaagacatagttaagactggccgaaaatgctctccagtcaactccatttcctctcaggggagacgtgctgtccaaagagtcttaatccataatcaaccattgcaagaattaatttactttttccgttatacttatctacattaattctttaaatgtccagcattattaacaacttgccttacttcaatcttttggatgcaaatcataaggaaagatgagccactttccctctaccctaagctaaggaaatttctcttatcagctcaaaatatgatccgtcaggtcacgggccattcataatctgtttgagcgtgaatattgatcaaataaccaaatgatgttgcatttgtatagacgcaattatcctttattaagaaaaagacaaatagaacacagatagttgacaaaattttactttgataaattttgcgaggaattataaaaatcttgaaggataatttatagtagagtagaatcgaagaacattaagtgttctttgttagaattattcatccaagttgtttttgagtatattcgcttcaatacaactcctctttatatttgatttaagatttaaa

SEQ ID NO: 2518 - DNA, 882 bp, Barns Ness breadcrumb sponge weivirus-like virus 6
  misc_feature 1..882: note = isolate Z53,1
  source 1..882: mol_type = genomic DNA
gcgccgtaagcgcgaaggaggacacaggtacccgatgctgtactgattaattcaggcattttgcctggtaaagtcccagggccatgggaggaaatgcccatggcgagagagggaagacgacattgcaaaaccagggtttgcccccctctgccggagtcgtccgggtgttggtagagtccacccgtagaccgaggcttattcttctacactcactgtgcccgtagtgagtggcgagcctgctgacgctgttttttccggagcgtctgaggtgaaggccgtgcgagagggggatttagtcacctccttggtttggccaccttaactcgtactgaacggggcccaggctctttggcacgccttttgcgtggcaacactggctaccaaccggcgacgggtggatagttggaagccccgaatggaatggctatgatgcgacctggcgcgacggtggggagtctcgttctgttacctggtttcgccaggagattgactccgtcacaccacatcaatccagggccatgctgttgacaccgtcagcacatccccagtgaacctctcatgttgagtcagggccgacgcattttgctaggccaggcagggtcgagccccttaaatagccagcagcgagcacgttgcctgatgcagagtgattcctattcatattatgttcactgcctcccattgcttgagggggagggttaagggggaggttgatcacctccgggactagtctgaccggttaggcatggttgactgtgggtaaccaatcccacttagggcgttttgcaacacttgagcccgtttggctcatgtgacctggtatcaccaccggttacgttactttaatcacggcgctgtctgccgtcattgcctttattaaag

SEQ ID NO: 2519 - DNA, 885 bp, Hubei toti-like virus 10
  misc_feature 1..885: note = strain 3mos6210 hypothetical protein 1 and1
  source 1..885: mol_type = genomic DNA
cccaaaagggtctggtctatgtggcacccgattctcggtgcgggtccttgtttgcggatgccttgggccggccggggatcgttgcgacgggcaggtgctagccctagcgtagcctccttctacagttctcctggctgtgggaggaggtcggactgatgtcagctgcttgggtaaccaagcagcgtaacccgagcactctccttcgggagggtgtaaggtgtgcgcacactcttacacaactccttggtagaaacggcatataaaaaccgtggttatagcaaccatgggagactttttacccggccctttctagggcctatagtgatgccgatgtgaggaggtggagtgaacaggagataacaacatgcaactacaatctgagaatgcatttcaaaaatgacaccctcttgtagatgcccgtgtagggccagccaaaacgtcatctaagggcggggagctcgcagcgccccgctgatggatagggcgtgctaagtgtggggtttatttaatcctgctaaatgccgagagactgcaacggctgccaaaggctacaggggcacagtcccgtcgtacaggtgcgggcgggtgtttatacctgtagtgagtctgcgattttgacgagtgatattaacaagcgatattccaagttccaggtccctgagcaccttattcgagctatcttatatttcatacaaccattgtgtgaggcgttcttctaagcgttccgtcgcgtccttttcaggacgttagatttcgagtgtctttgaagtgaattaaacagttcttttcagaactacccaatcgcccttttcagggcggcaaggtttcggtgttttcaagtgttttcagttaggccatccaatttcaaacgcttctacttgttta

SEQ ID NO: 2520 - DNA, 887 bp, Beihai weivirus-like virus 19
  misc_feature 1..887: note = strain BHZY59816 RNA-dependent RNA1
  source 1..887: mol_type = genomic DNA
gccgtagtgccaggttaacgtattaattaatgtgcgggacacgtatgagccgggcccgtttgggtcacgcggcacttgccgcattaatacctgttggttgacacagagccggcagggtccacgcgtctcgacgtttgcttcggcgggcaggcgtcgcaacacagagtgccgctggcgcgtggatgtgagaccgttccttgtttattgctttacttggataggggtggcggcgcggatgcgccggcccgagtcataccccgaaggttgcctcatgcctgagtagcggagggtagttccgtgaacagcctggaagccgggtagcgccggtgacggtgagggcgccgctgttaaccctgtgcgtgggttggtccctttggagggggaacgtaaaatggcggttccgttgtgtgagtggtgactcgaaggattcgagcctgcgaggccggcaatgctgcgcttgctacgcagcaaccgtgaatatgtgggttttcggtctggatgtttcgttcgcgtagcgcgcgcgggtgaataatcgcctagggaggggcgacacacacggacaaaatggaagtgcgggggtaacggcccgcttaacgcactgcatgggggacgcccccccctttcgcgtgtttcccgcacgccgtaggatattgcatgatagtctgctgggagtagcaaacccgttacagacccgtagtcggctgcggcgccgacgaatttaaagtattgtaggccatatttcaaaactgcgtcgagaacactaccgggcgggccggtggtttcctctaaggtgcatctgtgtcgcactcggcgccacgcctttttctccggctgccggtgggggcagcttgcgtttttcgtcttcgcaatcgggagtgtttttagcg

SEQ ID NO: 2521 - DNA, 890 bp, Pink bollworm virus 4
  misc_feature 1..890: note = polyprotein gene, complete cds.1R
  source 1..890: mol_type = genomic DNA
cacgggttaatcccgtgcagcgctctagtagtatttcaaattttgaatcgttacagtgcatttttgttgactaattttgttatctagttcattgtcagttcgatttatcgttcgtgactataatgttcgtagaattttcacctttagtcttcgttaaatgtattgtttgttacaaaattctttgactactaaactttaggttagttatatattatagttaagataatttatatatatattataacgaaatatagtattaataaaatataaaatacaaggtaccgaccttggctatctctaacaactattaatgtaagtgttatgtattttcactgtcggccagtccaagctcttcatgggcgagacaaacagtgacaggagcacaatcatccctcctggcaacaagtacctctcacacttttattaatagaatgattgatagtgtataaataataattttaaggcaaggttagattgtattgtaaatgtctacgagtagatgaaacggtctttgataagtgtgttaaaatggggacccctccaactggtttgcagccagcgcctactgccaatagacataaaacgacataatcgaaagtgaccgctttatgtgcaatgctaacgaccactcttctgtaatggagggagtgtaattcggctgggcaagtcccaaaacctcgatgacgtgtttatccacggacttcgggaatatatctctaagatatagtcgaacttctgaaacttaaatttacggacgttttagtaggaagattaaaacgtgtccatttctttcatttcttttcttatggtgacaatttgagtgattatttcagagaatttgcgcaaatttataaaagttatttcccatacacatttttattcctatcacc

SEQ ID NO: 2522 - DNA, 891 bp, Rhizophagus diaphanum mitovirus 3
  misc_feature 1..891: note = RNA-dependent RNA polymerase1
  source 1..891: mol_type = genomic DNA
ccggccttcctttctgtccctagccaggcagataaactctcattcctatctaaatcctaactccggtgaggtctctgttaacgctgagaaccggcaaaacgcactcaatcaatgagttggccacttgtgatgatgcgtataacccttcctactcttggctagaggaaagaagggtttcctatacatgctccctcttttcctttccaaagtatgttactgtccctaatcttaaacggctgagtagattgtctctctagtatcagcaatgcttgaccatcctagctctcccgaagattgatcgcttctgggtcttggggtgtccgagataggaacggacataaatatatcattaattacattcatgaagtaagactcctcttaactccctactctactctagtcctaacactgttgaggctaaggtaagactgcggtcttcttagatcaactacttgtccctaattgcttccacttcataacaagtctcggctatcacgagcctcggctccggtagagttacttgagtcccttaagtcccaacgtccctgtccttaatacatctctctgttccctttctctctttcaaaactcccctctgactccttgaaagcgtagattcaggtcttggtaagcgtggcaaggttaataactcacaaagacttgtaaaccgcaaatccttattagtagaacataaatgattgttgaagataagaaggtctacccctcatcacttgtagggtcaacatgagtgtgcccgtcttgggtatgttactaattcggtacctatacggggggagattaaagcccgcacgtaccatccctaatcgaagatatctgtgtgatcagattttaatggacttactatgataagtagtacagcagttttcagta

SEQ ID NO: 2523 - DNA, 897 bp, Hubei odonate virus 5
  misc_feature 1..897: note = strain HBOV5 205551 hypothetical protein1
  source 1..897: mol_type = genomic DNA
gtgtttaaatttaggttaataccttcttttaaacactgtatacacacctaaaagcgtaaggtacaagaatcatacaccacctaaaagcggactgtatgtttaaaacaaaccccaaaatccaattaaaacaaaagcctagtcagttaatattaatctgatttaattcaagagatgtgggaagtctcgataatattaaccttttagttttaagttcaaagaagagtaaaacaactaagctctgacctcttagccgagccgtgaaccgccaaagaaaacgcagtaggcgacgagggtaaacgttcaccttgagaaacgatgaaggtgcgtaatcgaaaacttaattaataaattcatctcttgacaccaagttgagtgggaaaatttattagtttgaaactcagattgtaataaaattttgaaccgaaacgataagatttctatgaatgaataccttatcaagggtgcgccaagctagttagattaaattcgaaacgaaatactagtgcccattcaaaactataaaaacaattgaaactttaaactaataaaaatgtaccttcgtaaaccttgctcttttgagagatggatattataacacataattgcttgctagcgggtagtaactagccaatttattgaaggatgaaagccacatcccattatgtgattaagttagccttttggcgtagtgcaggaaccgtgtaagccctgataaaccactatagattatgacattgaattcagatcaacaaaggtatgcactttcggaaacccattctaaattactttggcaggacttcaaaattgaacgttctgctttcaaataattacacacaaaacaaaactttatttttcatttcaacttcgtttaatttgactttgaattaataatcaatt

SEQ ID NO: 2524 - DNA, 898 bp, Lentinula edodes mycovirus
  misc_feature 1..898: note = HKB gene for hypothetical protein,1
  source 1..898: mol_type = genomic DNA
ttgcatgcctgcaggtcgctagaaaagacatggttctaagtatagtcgacaacggtctattgaagatctcttgcagatggaagatgccgttgatacatagccaaccttagtcgttagggtaactatgtatggagagagtttagtcagtctgatctgaagaactactctctgtcgaacgataacagccatttcattttcattttctttcttttcatttttgttccattaaattcttatttatttcacgttctgcgggataagaggccactaccgcgatagaaattagtgtggaattaagcatccaatcaagaagcagaagtccaacagccagttggatactgtaagctggaacgggattcatgtccgtgcaaggacctaccccctctacctttctggagctccgtgcctacaaacttacctgacctagttatgcctagggtggtatgctgcgtaggagcgaggagactggggagatgcgggacattaagagtaggcaccgagtgtaacgactgcgaagctttgttcttggttagggaacagtctctccggcatacccgggggtgatagcatgcttgtgggtcttaattggctcgctgcttgtaggttaagtaaccttcttttcctccttttccactacactagtagtgacgataaaggttgctccttcctttcacttcagttattcttccgccgtcagcgaggaaacagttggttgcaataatcttggacttaagtgtttgagatctattgactgctgcgtacaacgttgaggtatcgtttgattgatttggattcttcccgcgctaaacggttaattttagtatcttgaagtggtagccccacaaattttcaaactagcgtgatttgagacgccctgagtggttaatcgcgtttaaaa

SEQ ID NO: 2525 - DNA, 900 bp, Barns Ness breadcrumb sponge weivirus-like virus 9
  misc_feature 1..900: note = isolate Q25,1
  source 1..900: mol_type = genomic DNA
tttcaccggcccttggttagggccgggacccttggttagggtcgttaatgttgtgttttgggattcgatgagagcaccattttggtattttgacaccgggcggtacctttgcgcgtggggcccgggtgcgaccagacacactcacgttgttgctcgtcaacgtgaggcaagatggagtgcggacgtctggcgcatgtgaaagatccgctcccctgcttggggagttgcgcggggccatatgccttaccccgcggccgacgataatgtctagctggtccgtcggcgtgaacccttatgcctcagtagctgcggtgctgcgcggtgaagagcctgggagacttggcacgtcttacggtgagggcggcgacttgccttcttggttgggttgggagttggagagctcccgtgaaagtcgtctggtgtggcggtaggccggcgaagcttgcgaagtatttttacagcaagtggattggcgtctgagtatcccgctcgggtgtctaatggttacgcatgtgaatacgttttgcatgcagaatacctccgtcatggcgttgtccgctttgtgagggcacgacctggtcgccgtctgtttggcttggcagagcgcgcgacttaccacaaaatgtctacggtttataaaacctcgtatgtggctacacccacttattaccgaatcctgagcactctttccacacgtgatcttttacttgcggcagtattagatcctttttcatattatgcccacacgtccatccttcgacgtgccgcactgatttgggcttgttttgatagtagcagccagcatggcttaaggtgcaacgcgcagttcactgctactctacgatatcgctgtcgcggttctggcgtccgtgactcagaaaacaatcatcgtcattcagt

SEQ ID NO: 2526 - DNA, 901 bp, Duck calicivirus
  misc_feature 1..901: note = isolate MW20 genomic sequence.1
  source 1..901: mol_type = genomic DNA
cgatatggcatacgtaaattctttactcttatttttcctatccctccacaagatggctcacgagcttatcgtgtggagtctctttggggtacgggcgcgggttagccgcgccccaactcccctctttatttcagttaggtcccccacttcccggtggcctggctgtgccacctatacacctggcaccacttttgtggtctcgctgggtgaaggccccattggccgtctggtcacagcacggcccaacctagtacccacgaacgcacccaactgagcgtcgcggcgtcatgaggcgggcggagcacccccctggtaacagggtcctcccgggccacaagccacgtgggcagggcgaaggtgaaggaagggtcccccgacccaacctcaagcctgaacccgcgttcaccctcatgatcaggcaaacccagcctggcggttgtttgttagtattggcgaaaagctggcaccgactgttcccaagaccacccaatggcaagggggctggtgagtagatgccctgcaggtaccctttcggatctgagcaggggcccttgactataccgttccggtaaacagggggtaagaaccatgaaagcgcagcccccacaacgggttcgtccaagggaggggtacccaccccgacctcacgacacccgtcatttcctttttctttttcctcttgtttatggtgacaccaatggtttttgagtctctggcgacttttgtttgtgtttggctcatcttctttttccactcaattcgcctgggcgcacaactcacaaccatttttggctttttgattcgctatttgattggcgtttttctttggctttgtttggagtgcgtggactttagaccctggtttctttatactgactctgcatggtccagatagaatatc

SEQ ID NO: 2527 - DNA, 903 bp, Beihai mollusks virus 1
  misc_feature 1..903: note = strain BHHK131425 hypothetical protein 11
  source 1..903: mol_type = genomic DNA
ggactctatataggtttcacaacctatatagagttccatttgattagatattgtccgcttagcaccggaccatgcttttcttaattttattgaatacttacattctgaataagtatagtagtctcctctcaggttattactataccctgtttggagtgtctactttattcctaataagtttcaccccttattagttatgtttaagttttagtgtctataagcaccttggtattaggttctttgaccctattaccaatgagtagcttacctaagtatacgtttttcgaaccgtataaattgcttaatgtattcattattatttattttatctcgttgataaagaattatcaaaaataagagagtttgctaaacttcttaaatcgtctacaaggcgcagtttattttatttctctgttaaaaatattaaccaattttattattgcttcaacggtaaatttgtacttgattaaaatcaggagtacattacccgtgtttagcttacgatttacgaatttaattaaattggaaatttgattgtaatgatttagatttgacatttcaattgcttagagaaatcccactttattaataagtttcatttacgataaatgcactcgcaaaggacgagtaaagcgcattttagatgtataactgttattgaagaacaattggttctctggattttgattaatgcgacgtacagcatgttataaatcccaatactctttaaagtacccttagcttcagcacgtaccagcgtgtagggagttgcttcccgtgattcatataaggctatgctttgagatgaggcatttagattgatagtttcaactttttatttatttttgtgattgttatttgttagcttttatagttactgatattaaccctttctttttaatc

SEQ ID NO: 2528 - DNA, 905 bp, Heliconius erato iflavirus
  misc_feature 1..905: note = complete genome.1
  source 1..905: mol_type = genomic DNA
cgcgggtttatcccgcgcagcgttgtagagcataatttcactaatatttcaaagtgcatgtctattgtaaattatttgtgttagttcagtttgtatgttcctaaaggttcgatacttgttcgtaatacagagatgtttcctttgatggcatgtatttgaatattagctttgtatgtttacgtcatagttttaaaataaattattttgttagttattgtatatattatatcattgtatagtattaataaaatataatactcggtactgaccggggctatatctaacgacttattattttcacatcatgtgttttcgtagtcggcctctatataattcctttcagtgggtattagtaactacgacaccggcataatcacccccggtggcaacaagcacctctcatgtgtttataataagaacgatttatagtgtaaaaataataattttaaggcaagactaatttctattgcaaatgtctatgagtagatgaaacatagtgaagaagtaagtgtgttaaaatagggacccctctaagtggctaaaaccaccgcctactactttttcacgtattatgacataatcgaaaatgaccgctttgtgtagaaagttggtgaccctcattctgtcatggaggtgaggttaatccggctgagtttatctcaaaacctcgatgacatgtgtatccatggatttcgggaacatatctctaagatatggtcggacttctgaaccctaaatttacggacgttttagtaggaagaataaaacgtgtccatttcttattcattttcttttatggtgacaatttattgagtattaacattattttgtttgtttgattctatcacttttacagtcttgtgtattctttccactttattttgaatttattaaatctttaaaaa

SEQ ID NO: 2529 - DNA, 906 bp, Beihai picorna-like virus 46
  misc_feature 1..906: note = strain BHZC37388 hypothetical protein1
  source 1..906: mol_type = genomic DNA
tctgtagattcgttcttatgaacgaatctacgcatatgcttgttttggctgcaaaaaacagccacttcgagaagtcgaagccatacatttagtaaatcgccgcactaccgtagcggataaatgatggtggaaaccatcacgaagttacgaatgtatgacaacgcgaagttatttccgtaggagcgctcactccgaatataaaatgagcaacacgtggaaaggaaaaaccacgataaaacaaaccggcaaaccatttgcctatatgtaatttgtctatttgcttttgcaaagagtaaccagggttttaacccactagtgtacaataagtttaaatcgaaagatacctctcgcaaaaacactagcttttataaagaaaacataaaacaaataaaaattatcgttattatgctatctgtatgctgaggtcacagctttacaaaagacctattaggtgatctattcaccttgataggagttaagacactcctccaacaacagtcatcatttagtccgtggctacttagagccacaaccaaacaaaccggagtggaaccggttgacacagccttgtgtgcttttatagcaccttggcactcaccttgtgagtgtgtcaaacctttagagtctcatggatataatacctgagaattacataggacacaaggaattagacgcgaaagtccacctcagagtggtagacgccccttagtttgttcctcctgttgaagacaacctttgacattactttgactagacaattaggtcccgatgaatatagagtgattagactcttgacataggaaagcctctgattgttgaacccttgtaatggataaggaagttggaaatttgagtgattcttggagaaccggtaaaaatagccgggcccttgacttgtaaatcaac

SEQ ID NO: 2530 - DNA, 908 bp, Riboviria sp.
  misc_feature 1..908: note = isolate nut157pic1nc genomic sequence.1
  source 1..908: mol_type = genomic DNA
ccgtgggacttttcagacccgagctcaatcaactcgccatgatgcctgcttgcactattcattctacatatggcccgcttctggttttgactaaaaagccaatactgagctgcgtcaattccgataaaccgaactaaatcaatttatcagcacttcgttccagattctgtagggtagaagttacaagactacttcacctttcctagtggatagcacataagaaagtaaacatgcgttgatttgtttttgtgtttgctatattgcttcataggtaaataagagaagaatgggttcaattcaaacaaaagcatgctcgtgagtgaatcgaagagccgtgttctaatattatttagagctagacagcaatatcgtaaacacaaaaacaaatcaacgcatgtttactttcttatgtgctatccactaggaaaggtgaagtagtcttgtaacttctaccctacagaatctggaacgaagtgctgataaattgatttagttcggtttatcggaattgacgcagctcagtattggctttttagtcaaaaccagaagcgggccatatgtagaatgaatagtgcaagcaggcatcatggcgagttgattgagctcgggtctgaaaagtcccacgggtattcaggtgcaggttctcttgaaaggttttacttctttgaagtaaaataagacaccgagaggtgtgtcctggactatgctggttaccttagtggatatggcttgatgaactgagataagcaaacattcgtgtttgttgcttgagcctttgattgatgtatcgattttagtagatggtttgatgaaactcctactgcgagatatattttaacccttttatgaaccgacgtggaatttggtaagaagaaagggcgaacgatggctttttattttctctcatt

SEQ ID NO: 2531 - DNA, 909 bp, Hovenia dulcis-associated virus 1
  misc_feature 1..909: note = isolate DF-390, complete genome.1
  source 1..909: mol_type = genomic DNA
cgtatcccttatgggatacggaccttttgttcatgtcgatttataatcagcactaaatacgtttagtaacgccattgtaataggacgcttgtcgactattatatataagagaattattacgcgtatcgtagtgtgaacatttcataacgccattgtacgtatcgtacgtttcaaaaccgcttagatttgttgtcgtacgtgcgtatatataagagaattatgccgtgttctggttatttattgatgtgttcatcaaaaacttttgataaaacacccattttatttcatttgtagatatttcatcattttagcttgtaaatatttaggtaattatattttgaagtgaatattatctgccagggcagcactgatatccaattatctgacctgacagcactgttattcatagatatttaataaaatgagtattatttgcctagacagcttatatctgcctagacaacactgtcactcaccaaaaacattttataaaatagaaaatggcgatctttgcatcttgttgcaattaagccaccaaaaatatatttatttgattaatgacaatatgtagccttttatcatttggcagatggatgaaggattactcacttgttgagcgtaccaattccacccatttgactataataaattagcgtatcatgttatcacccttattgttgttaataacctaggagtccagactcatatcacgggttagatgagataaaactggttactgcgtgtcttgcatagggctgcagcgaaaaatttctatgcacaagtattggatcttgtaaaaattcacgctttgacttttgagcgatatcacggtcacccataaattttcaattgtacaacctgcccacgagagttaacgttattttgtgtttattatacgattttattaca

SEQ ID NO: 2532 - DNA, 910 bp, Picornavirales N_OV_064
  misc_feature 1..910: note = putative non-structural protein1
  source 1..910: mol_type = genomic DNA
aatcctagggggcccctattttaagggccccctagatcgcgtgtcgtacgtcttacgacttttcatttattattttatttgaagaatttcctataccgcccttcctggcggtttcaacatcatatgtaatatatttttgtcttaaatttagttttttgatattacatatccccgttattgctcatgtgtgtttctcttgaagattcacgtatttcgaaacaatttagttgttattctattgtcctggagcaatatcgtattcagcaatgcgtttagattatgccaaatcctttggcgataacaaactcagagcacctgtcgcatagacaggccccccattccatgatatcatatcatgttcggataattagaagttccgaacctctagcttttattatgagctgcttaaatattcataattaacccaccccatgcagagtagactgtccaaacatttcgttattcaagactttttatagctcgataaattgtcctctgactctcaatcttatgcgctagaaccgaaatcttagcttagttctgatcatcctatatttgatctgatgactataatagttagactcgaacctcgcttagtctttaaagaagaggtaaccgtgtattatttttaatcttgctttgctagcagattgcttatactacccacggtaatattaggattgcaaggccacattagtgcctcctgtttattacccggtatttcaaaaccacggtctgaccgaaacttgttagtagtacttgcagaaatcagcaacatgaatctgtaagtggttatgctacaggatctttcattaggtccgcaaaactttcttaaggtttcaattcccagcgtcctttcgtcttagttttatactacttcactggatactaaaacagttttaccttaacc

SEQ ID NO: 2533 - DNA, 911 bp, Beihai picorna-like virus 38
  misc_feature 1..911: note = strain BHZC37430 hypothetical protein1
  source 1..911: mol_type = genomic DNA
cttgctatgggtcaaaccatagcaagttatactccgaagcagataagcctctcgggagttagtattgaacgattgtccagtgtgacgatttcgaattttatagatgtcctattggagattttctccagtcgaacttactagatattttatttcgtcatatttgggttttcttttagtatatattgtgttaaatcaaacccccccccatttttgagggaagtctttctacgtttttagactagccagcaacaattttgtcactggtgaaccaaaacgacggtatgacaggtttgacatcctgttgagtccgtgcctttttaaggaattgaacgtagagttctcaaaattacatttactgtggtttcaactgaaaagctctgtaagcagtaaaatgtgatttttgatagtgtttataagtaaaatattacttggtttagccgagtcctaggcgaaggtctgtgattagttgacctctatgcgcgacttacgagttgtgtttaagtaacaaggcgtcataggcttagccgcgcttatttgatagacgtgacgaccatctcgttatgttcatatttgtagatctgaagagtcatatcagactgattatttgatcaatcggtgtgcttacgctcaatatatgccctaagggagcaatctctccgagtcttacgagtccgttgagtgagagtgttatacaccaaatattgtgataatgtcatgagattatctactctaaatcttgtgttaaatatgaaccacctcttgattatttgtggttaaaataggcgctttactaaaagtagtaatttgaacagacacatgaaaagtggttttggtgattgccataagagcaaaattttcacccatctaggccgatgtaaaccttcccgtgtggaccgcgtgcggaacggggt

SEQ ID NO: 2534 - DNA, 913 bp, Picornavirales sp.
  misc_feature 1..913: note = isolate coa131shi1 genomic sequence.1
  source 1..913: mol_type = genomic DNA
cacctgacgcctgtctcttatacacagcgtaaatcattaaggtgcaattaatcaatagttgcacaagaaatcctgggaggtgactcccaggatttcttgtgcaactattgattaattgcaccttaatgatttacgcctacttggtgttgacacggctttttatttcacgccgacttttttgcgaaacgcatagacgccgcattcttgtcgacacggacttactaagcacgctgactatatgtagacacggatgatttttgtttagatctgactactggaaagacagttgactcaaggaaagacttgaaaaaccccacattaccatacttaattattgtataagtggttttagtcgctgacgtaaccactacctctggattagttttagtcgttgacgtaactattctcctaggttaagtatttcaagaatatcaatcttggtacttttatactttaatttatttatcgataatacattagggtgttgttctttaagagcagcccgaccataagacgaaataggacacttggatatttattaccggtacttctaacttcttattgaggtaaggttttcggaccctcactttctaagatgcattagtacttgttgtaggtacccctgttatcagcctatgcccccgcaagaatcatacaaattcttttgaatacgatttggtttgacgacgaggcgcactatgactctataccgttaagtaggagagggacatttctatattatacttaggttgttaccatctctcttggcatatcggcctatgccagttatagtgtttgtaagcagtacagcgtaagtctgcaagaacttcgtaggagtatacctccgaacctccggttaaaggcgcgcacgataataccggttgcataaaaactgagcgcacaatgtatcaca

SEQ ID NO: 2535 - DNA, 913 bp, Wenzhou picorna-like virus 33
  misc_feature 1..913: note = strain WZFSL76563 hypothetical2
  source 1..913: mol_type = genomic DNA
gcccatacacgcattcacgcagtacatagcgtcttggcggctgcgttgggtggcaggacagcctacccgttactactcagaggattcagagagtaccaagacacttacattggcttgtgcgagccatgtatgtacatagtagcacgcgacagatccagcaagaattgaagaatgttccactataagtggattagatgtacccagcaaagtccttgataatgctggagtcctgtttgctgatgaggcgagcatatgcgcggtggggcctggtggctctgagtcctcgtttttgcttgccgactccggtttgcaagatttgaagagtttcttttctcgaccagtcttgtggagtaggtccactttgagcacgaccccggctgtgcttacaacccacattttgacgtggacggagttgaacaatttgactccatcttggtccactaggctgcagggtgtcaggggtattcgtggcactttggtgtttaccgtggaacacaacgctaatccttttcaacagggattgctggttgcctcgtttcagtatggggacgaccagtataggcgggggttacggccatcattgtgtacgcagttgcctcatgttaggttagacattgcgcataacacttcagcatcactcaagattcctttcaggtcagagtttgagtatattggaagcgcctttagtgaagttaaccatgtttatggtactttcgctttgactcaggtgctgccaactccctctttgcccaattcatccttacctgtttttaaggtgtatgctcattgggaggatcttgaggtgtttggtagagtgccgctcaatggcaccacatttgtggttcctcagtccggcgccaatgtcaagccgcgcggattgactccttctgatagggagttagaggataatggc

SEQ ID NO: 2536 - DNA, 916 bp, Plasmopara viticola lesion associated flavi-like virus 1
  misc_feature 1..916: note = isolate1
  source 1..916: mol_type = genomic DNA
caggaagttagttattttctgtgtgtattaccacgtgctaggtaacaatttttctattgttgttatcggtatatttgtatttagtttttagtttacattatatgtttagctaagtagcttttaataaatgtctgggataggaaatacctcttccaaaagtagcactaatcagttaggtagaaatttgcttaaacaaacagtgtataatagttcacttctctcttgctattatagacagccagtggtcatttacaatactgaatcgacttgcgaccgaaactttacaggagtatttggcaatatattttatgacattacccctctaaaggaaggcggagtcaggttatcatatcttgaccctttacttgctaggacttacaacgacccgaaaactctacagcaaactcttgtagatcagggtatcaccggaactcatttggttgggaaatcggtggtatatgtttgtgagcaggacccacaaataccagttcctgcttctcctccaggttggttttactctaggtagaccatcctgtagagtcacagacaatcgttgttattgtctttacggtagggtttggattgagaaacctagttattgtgaaggacttgctgattataacagtaagattgtaaaagcagtattatctaccgatctggaaccagatatgaatgcctctcaggcaatttctaagtgtttcggttccccaaagttggagtttgacttcacaaggtggacgccggaatacaaagaaactttatatttgtgttccatcctcttcatatactcattttttatgagtagaaatctaggaatttctggtctgggtttagccgttggcctctgtaccaaagccctagatataaagaaaacggctttaattgttctggctataaccgggtttagaacaaaaca

SEQ ID NO: 2537 - DNA, 916 bp, Beihai picorna-like virus 30
  misc_feature 1..916: note = strain BHNXC41477 hypothetical protein1
  source 1..916: mol_type = genomic DNA
ggacgacaccgcgcggagtttcagttctaattgctgggtttgcccccagcaggctttgttccttgcagatatttctgcctagcttgcagttcccgggcaaaacccggataaaactgtattgttctaggatgaaattactgtattgtgatacattgtttattgaattgaaatggagttagctgctccttttttaatgcgtagcccctaggttgactacgtcgtaacaaaaccgaaccccccccttgtgcattggggggcttcggcccctcatgtgtgttttgtatattattgttcccaatgccgtttttgtggccttgtgccgcaggaattgtattcctgtatattattatttaacttaaaaaccgccttgcggagaaaaatttaaattttgggaggaaacatgtattagcgagaaaaatttatattgtatttttatttaactcaaaaatacgttaatacattggtacacacacattgtcaactaaccaccatcgtagggccgcccctacttgtgatggtgtgtgaaatttcagtgcttgaatgactgagagaacctgtaattgtttggttcttaactttgtgtggacagatctcttctaacgccgatgctttaaaagcagcagaggttactaagcggagatacttaattgatctgacagtctcagatgagagactagctggctggaaccagcgaagctaagatcagcctcggaggaaagaggtgaagaggacctaagagggtctagcagatggagtattagcatcgctaatgcgtagtgtagaattgcgaatcttaaatcaatccccccccttcaggtaacgaaggatcaggaagcattatctcattttgctttactgctgctacaaaaagtcagattattattatttgccttatctagtttgtcagtcccccatc

SEQ ID NO: 2538 - DNA, 916 bp, Beihai weivirus-like virus 2
  misc_feature 1..916: note = strain BHZC36779 hypothetical protein,1
  source 1..916: mol_type = genomic DNA
gggcgagggtaattttgggtgtacgcttccagcatgccaccaatgtctcataaagcaataaagagaggcagggtttgtggtgtgttgcaatgagcggcccattgcatgtcagcattttgctgagtctttttccgcggtccgtgccgcgatgaaggggagccaccggaggataatgccgtgtggtgagaagaccgctcgtcgactataagggggaatttaccgtctcgcccagtgctgtcgtcgaaagccttgatccagaggttaggtcatccttattcttcaatcccgaccctgtctgcagcaggagggttagagcctggaggagcccagcactgctcctgaggtgtggctttgcgtgtgcgtcgatatgggtccgacgtgggtttgccagcccgaaacacgtaccccgagtcctccctggatatggcacctcgagcgcgagaccattttggcacgcgagtaagaggaacgtcgaagctggttgtgcacgcgtaatcgtgcacagttggttaggggaccagaggtgatgactacgctcccgcaggcagcgtgcgacaacgctgcggtgacgaatgagagacgaggtgaaccaagggctgcgagctccgagccggcccaagtggctttgggaatccttgtcctgtgaggttactctcatgtcgaagatcccgctttcgcgggtgaccgccctcaagtcaccacccatgtacagcatctgcagcgtcgcgtttccactttttgtctaccacggattgtagagtggttgcgcgatggtaccacggaacaaaaatcaaataaacaattgaaaacctaaatgcaaagattcattgttttgtttcggcgcaggcgatccccgcctgagacggagtcactttgtgacagtttttgtttgttttaaagcgcgtcggttttgctc

SEQ ID NO: 2539 - DNA, 922 bp, Potato virus S
  misc_feature 1..922: note = isolate 18-1113-2, complete genome.2
  source 1..922: mol_type = genomic DNA
gttcacaggtaaaagctcgaataaactgtttcacagagagaatgccgcctaaaccagatccttctagttcaggggaggtgccacaagctgtgccacctgcaccacctccgcgcaattcggaagggcacagatccgcgcaatcggaggcgccagggcaaaatgaagaagccatgctggaacaaaggctcgttcgattgattgagcttatggctaaaaagaggcacaactcgacattgagtaacatctcctttgagataggtaggcccagtttggaaccaacacccgagatgagaaggaatccggaaaatccatactctcgattctcaattgacgagctgttcaaaatggaaatccggtcggtgtcgaacaacatggccaatactgaacaaatggcacagatcactgcagatattgccgggctcggtgttcccactgagcatgttgctggcgtcatactgaaggtcgtgatcatgtgcgcaagcgtgagcagttctgtctacctagaccctgcaggaactgttgaattccccactggagcagtccctttggactccataattgcaatcatgaaaaatcgtgctggactgaggaaggtgtgcaggctgtatgccccggtcgtctggaattacatgctcgttcagaacaggcctccttcggactggcaggcaatggggtttcaatggaatgcacgcttcgccgcttttgacacatttgattatgtgaccaacggcgccgcgatccagcctgtcgaggggctaatccgtaggcccacgcctgaggagacgatagctcataacgctcacaagagcatggcaattgacaagtctaacagaaatgaaaggctggccaacaccaacgttgaatacaccgggggcatgctcggtgctgagatcgtgcgtaaccatcggaatgcagcaaacca

SEQ ID NO: 2540 - DNA, 922 bp, Grapevine leafroll-associated virus 1
  misc_feature 1..922: note = clone a, complete genome.1
  source 1..922: mol_type = genomic DNA
gtattgtcctagtaggtatcgaacccgacaatcccaatcctaccattgctttccatttcagatctgaaatccactcttcttctctgctctcagctctcgggcatctcttctcgctttccttcctcgttaagacgcgctgaactacagttcgtctgtctttcctcatctcaaccgcttcttttcctttttctctcgtgtcttaactacgctctcctctagctcattttctccctttactttttcgtttcctttctatcaggggcgaaggtttttcttcatctcttaacctgtcttttcctcattctgctttttcctttctttctcgtcttctttttgtgtcgtaatacttcttcgcatactctcttccgctttcatttcctttcatcactctttctttttggttttctcatctcttctctttctactgcttttctttcttattcctttcttatctctctttacctttgtttcttctctttgttttacatatctctttctttttattttccttatttcgttttgtttcagcgggttttttcttcttcttttctctcgcactatccactgtttttccttatttcttcacttttctaactctcttttctacacgttttccaccgtctatttttatcattttcctttttgttcgtctaggttctcttcttctcttacccaggccttttccgcatataactaacatttcctttctctaaggatcttgggttttgtttaactgttgttacgttatcatctttgtgttcggttttcctttctttaattttagtttacctctttttcttcctacttacttcttttcttttattttaactttccttttaatttttctctcttgcttagcttttctttcttttcgtcgcctttatcttttactcttttcctttcattactttcaacccaaaat

SEQ ID NO: 2541 - DNA, 922 bp, Riptortus pedestris virus-2
  misc_feature 1..922: note = complete genome.1
  source 1..922: mol_type = genomic DNA
cctcaaggcacgcacgcttattaacttatcagattatatggacgattatcactagtattgataccgctaaaccaaccctctcttcttttaagattggaggatgctttagtaggctctctactactgtttagtctaaatatacgctggtatgacctttatatatttaaatatccttttataattaagttaacaaggtggtaccttaagtagcaccattaggttaccctatagtcgtaagtataggttaagaattttcttcttaaattatatttaattttagttgtagatacccaaaaaaaataataaaattataaaaggctttgccacaaaaaaaattacatttagatttttgtttatttttgtatgcatattttttgtttgttcttactaatagaattaagaatcaaacaataaagtagcgctatattttggccgtttctgtaacagattccgcccgagtatagtatagtggttatgagtcggagttccactataaaccaactcaaagatcgcttagcaccggtaaagtgagcggggagtgaacagcgaataaagtagctgtaggcaaccttggctcggcctgcacgtacatgtctatgttgtaggtagtctaaccaactctattacccgtggtttgcatcggaccctctttggatgtttctaggaccccttacaggtattaaagtactgacaatgagagtaacactaaacactgttagacgtaggcgcggttggtttagcagcaggaagtagtaaacctgttgcgtcgcgctcaattgaggcgatccgtaattgctggtccccgttagattttatcgtagtcgaaatctaactatagtgtttattgtgaaatcgtgaggaaatttgtcttgtaagtagaaaacattcaccttcttttttctctttttatggttaaatatat

SEQ ID NO: 2542 - DNA, 926 bp, unidentified
  source 1..926: mol_type = unassigned DNA; note = Translation control poly nucleotide.1 sequence
gaacaaacgttttaccggtttgtaaattggaattctcgaattcgccagtcgccttcttcgtatcaaggatctggaatttgaacggtatctttatcattttaatttctacttttcgtaccagtcatgggttttgtcaacttttcgctttttgatgtggacaaattgatggtatgggtgagcaaattcaatccaggcaagatattgtccgctatttgcaacttgggtatagactgctggaaccgttttcgcaaatggtacttcggtctcaactttgatgcacatatgtgggctgtcgatgcctttatgccactcatgccacattacacggagcagatggaacgcgtagtcggcgacctctgcagcgaaaccctagaatccaaattagaagactgtctggaattggacacttccgtcaaccagtattttgacgaagaagtgtacaaagaggatgacaagggcgtgatgaaactccaaaggagtgctgccaggaagcacattaaacgtgtgcgaccaggtatgatgacagcagccataaaagctgttgagacgaggatcagaaaccgccatgccattttcggagataacatgggattgatagacgaagctgcagttagagcaactgccagtgatatctgtggagagttcaaaataaatgaacaccacacgaggacattggtatacaccgcagcatatctttccatgacacctgaccagaagtccctagacagtgtcaagctcgcctataatccaaagagtcaagccagaaggactttagtgacagccgttcgtgagaacaaagctgttgctgggttcaaatcccttgaggatttttaggcggtccactcagctttccggttgaagatgccccatatcctattttaggcatcccggaaatcagggtagctgagaagcgggccagtagagtc

SEQ ID NO: 2543 - DNA, 928 bp, Solenopsis invicta virus 8
  misc_feature 1..928: note = isolate Formosa, complete genome.2
  source 1..928: mol_type = genomic DNA
tgagaaatacaacaaattttgtacaagctagtttaactattcaaattacacttgctatgactgtgatgcgaaagttaaatatttctaagatttacgtatatgacaattcacacttctttgacaatgcaacgacacacattacagacaacgtacgatactctaaaagacaggaaaattacgctgtcctttctaaagccgcccaacaaactttaacgaaagaaaactatcgatctcatacgaatcatactcttctttcagatcatataggtttatatattacattgtaagtatggatactttgatcgcagtttgcggattgttatccattaggttaggaacagtaagcccattgctgtggttcagtaatgcgtttcatctcaacaatcccgtaaggtttgatggttgagaacctctgccttggcgagctttggtctattagttctagtgcaattgctgcagtacagtcagggacccagagagtaatcctctggtgttctaaagtcctgaagttgagaaggactagcaatccggatcaaccagagtggaaccctttaaacgtggacgccaccccagagagctccgtttatcgtgtcacctgcagtaatgaatggaatgaatgatagaagcgacccacctagggacccctctaggatagtcatggtatgtcatgaaagactccatcactgggttagaacgatctgttcaactggctttggaaagcttggcttgagcttatctagtctagggccagtataaaatataagccggcttcgtactgggacacacaagccgttagacttctttttgctagtctgtgagtacccaatttttacctttaaatttatgctgtcttattgctatctttgtgctgcctttgctactttactgctgttatttgtgccaaactactgctagaataatcgttgct

SEQ ID NO: 2544 - DNA, 930 bp, Thrips tabaci associated iflavirus 1
  misc_feature 1..930: note = isolate ThassRNAV51
  source 1..930: mol_type = genomic DNA
gtacgtatttcgtacgtacagatccttgtaggagtttcaataattgttaatttcagagttagggatattcccgccgctagtattcacaatgaatctagtcgccagtttatctaaacctttggggtttctcagttatctttcttcttcatttccttttccaggatctcacaaaattcaatttgttaacttcaattttaattttcaatttgagattttaatctccaaaatttcttctaaattatgggttttctttcccgtgtaattttcaatgttgttgtgttttgaaaatcagaaaatcaaacaaagatgtgaatgtgtgtgtgaatgtgaacaagtcgagtgattctcgacagcgtatttctgacgtttaatacttatattaagattagttgaaaaacagtcgtcctgagtagcagtaagagcactagggccattttcaaaggcttaagagatgaactcctgtttctaatcaattctatgggagacatgctcttaagttgactggctaattgaaattgagtattttagtttggattgtgtggtctagttggacagacccctaagggaagtgccagtacctagaaattcgtaaggctatctttgtaccagctatatcgattaataaccggtatagttacgtctgggacccctagagggtttgggatcggcgtaccatgcagttttagtggcttcggcacttacttaaagtatgtgggaaccccatggaacttaggtagagcaagcgcattaattttgcgtagtccaatatagggacgtctattcctcctagagggaataggtagagagtcaacaacgtcatagacgaggtaattccgccataatatagtctggacagctagaatatggaagggcatctctacatgtagggatgggctctcaaaaccgatccggtgacgcaaggctgcctta

SEQ ID NO: 2545 - DNA, 935 bp, Warroolaba Creek virus 1
  misc_feature 1..935: note = strain WRCV1 205652 hypothetical protein2
  source 1..935: mol_type = genomic DNA
taaaattttattcgcgatgaaacgcctccttcctgatgcacatcaggatacggagaagatctctgagattgttagagataagaatacaacattgtacggagctattagcgaggttagtaacactgacgccctacaggttgatctctcagagttccgagctcttctccgtcgctttaatgaagacgttgaagagtttcggggtgcgcaaaagttcttccagaccactttggattctttaggagggactgtagatcgcctgaatggttcttttgtggacctcaatgcttccttaaatgttgtaaaagaagatgtcaaacagctagatatagctgttgatgacaattcaaaacaaatccttgttttgatagacgagaataaaacatatgagtctaagttggaagctcttgataaaagagtttctaaacttgaagattctaatgtctcgataaatttggggatttaatcatgtttgattttcttaaaccatattttaaacccccgcctcgtaaggttttctctcgccctatggcccgtgctgccaaggatgagagtatttctgatgttataaaagaacgtaaccttactgagtatcaagctattgaacaagtgttctctgaacgcttatcatcgatagagaccttctccccgtccagacgatttcttcctctacacgacgaccagaaatataggttccatagcctaaaacttgagcgggattatgagtatagtgttatcaaaggtgttctctttgatcaggtctttttcggtacaacaattaagcttgacaacttctctgaagttattatttacccttccgatccagaagttgcaccatctgatcctaaatatttggatacagtgattattatcctggtgaaggtgaatggatctgacactccggcatccggagtgtataaaatttacagtctaatata

SEQ ID NO: 2546 - DNA, 936 bp, Lymantria dispar iflavirus 1
  misc_feature 1..936: note = isolate Ames, complete genome.1
  source 1..936: mol_type = genomic DNA
cgattgtatcagagttttcaaattaattaatgagtctcttaagtgagttttatatttcttgagtttcatgttccgaaaaggttcgatgattatactcttggataatatttaatgacatttttggattggctcattattaagtcttttctctgtacttagttaaggtttatttgcttttaaattatatatattatacaacttatatgttttaaaaattgaaatactcggttcagaccggggctatatctaacaacttgtaataaagaatttacctattttcactatcggcctctcttattagtcttttagtagcatagagaaatagtgacatgagcataatcacccctcatggcaacaagtagctctttattttctattacaagtatgatttatagtgtataaaaattaattttaaggcaaggcaacataatattgtagatgtctatgagtagataaaacgtagttggaatgtgtgtgcgataaaatggggacccctccaactggctaacaccagcgcctactacatttcaacatattgcgacataatcgaaaatgaccgctctatgtgttatggttgtgaccactattctgatttattttggaggtagtgttaatccggctgagtttatctcaaaacctcgatgacaagtgtatccttggacttcgggcatatatctctaagatatagtcggacttctgaaccgtaaatttgcggaggctttaagtacgaagaataagcctgtccattttcttttttctttttcttatggttacaatctcagaatatactaaagcgttttcattgtttattgttatttcaattattctcaattgcaatcctattacccctttgttttatttttattccaaccttataattcttttgctaattgtttctcatactgattttaaatttgtatcaaaatatttttgaag

SEQ ID NO: 2547 - DNA, 942 bp, Hubei picorna-like virus 52
  misc_feature 1..942: note = strain QCM127295 hypothetical protein1
  source 1..942: mol_type = genomic DNA
tagttgatgtttaaacatcaactatacgcgatatatggagcttggtatgctcctaccaatttaaaactagtaccaaataagggctgaaacaatgctacggtgcttattggaacaatactaggtaattactactacttgctgaaacgtaagatacggtgagtactgtaattttcactttggtttcaccaaacttgggtaacaccataaccttcagtatgaattttgtatgaatgtatgaatgaatattgagtacggtataccgaaagagactagaaagttgcataaattcttgcaatttggtgggattatgacacgaccaccacccttgagtttacgaaccgaggctttgtttgaaatctctctaggtattactggctgtgggtatatgaacttataagtaacagcatatggaactcttagtacgcttgggtagtatgaggagccgtggggaataaacttggtccacagggagtagcccgaacgctgacctgacgataggctgctatgtccgactataaacctattcaattaggggtggcacacaccatgcactagtgcgggacaggaacggttgacaataaggaggccttctctaagcccttacgggggtgaggaagcggaacttcagaacagcttgcggaaaagaaggaaatatggtctgagaaagtaacttatatgcgacgccggcccttctagttaaagggaattgcctatggacgagatagattaggtaattaccatcggcggctgggtgcaccgatacatagtacggagtgcgcttcacagtggacttatctacacagtggagtggatcttagcttagtggacagacagacgtactaagcgacctagatctcccaaagataacgactttatgggcgtagtccggtcgtgcaggggttaccccgcggacaacgcaaattttcttccaaactttcactt

SEQ ID NO: 2548 - DNA, 945 bp, Fusarium poae mycovirus 1
  misc_feature 1..945: note = genomic RNA, complete genome.1
  source 1..945: mol_type = genomic DNA
gcgaccgttctttagatctttcgttcggacccccccagcccctggcggggcgtcaactttccacacgtcttagtttgctaagcggaccagccacaccgacacaaagagcttcggctctgggaaacagggcagactaccgcgatgtgcttacgatgatttgtggttagagcgcgcctcttgctaattctgaggtggtgccgcgcgagctttaggcccttttgttcggaactccaaaaataacttggctttccgctcagccctgagacaatagggttatccaacgacttggctattaatataacatcctccccactaacgaatcgcccttacactaacttagggtctttccgggggaaaggaacccgtaccgccatatttcaaaacacatggcttttcatggtccggggtcgttggagtaggtatgtgtgttagcggcagtgagtatatgaagcggttcatcgcggatttcctgctgagcaccctacgcccgaatttttaggaagaatggctcttaagaactaggtagccattctgcccttaaaatttgagggtgtggttatacgcgtccagcatgacgttaaaaggcacacttcgccttaggacggcgaaaaactcagctctgtagatctagcccgtgatccttctgcagtatcaacatatcgggaataagcatcctgtcgagttctggaaagcttgaactcagcggtggggtaaccaaggtacgaacttgggtgtgaagccattcaagacgtggatggtggagctaacgtattagtggatgtcatggtacggggtataggtccgggattaaccacccgggtgaacactaactcgccactacgaacgtgccagccttcgggttggtggacagactgacactcaccgcgccaagtcccggctaagggcggcgcagcaaacagtcggcgtgggaattattaccgcgtg

SEQ ID NO: 2549 - DNA, 945 bp, Nesidiocoris tenuis virus
  misc_feature 1..945: note = isolate SDQD, complete genome.2
  source 1..945: mol_type = genomic DNA
ggtcaattaaggtgacgaagatttcgtcattacacgaactgccggcgccgggaccgaatgtccaagtcttgtgcttcaaacagtccgaaaagaaggagttgaagcatttgaacgcagtaactatccatgaattttagggtcaggaaagtgcggtcgtctggatcgtgagactatcatcgctacctaacgaacagatctgcaagagtgaagaacatcaggtggtggggattacaagacataagaaagagttaatatactacacggtcgtagaagacgatctcgcaagattattaacccaccacatagacgaaaccacactcaactccgccgttgggtcgttgaaaggaggaatgcttgaaattcagagagacgaagctattcttcaatcatgggactgtcacgatgtctctttcagagcggccataatcgattgcggggaagaggacctcccgtcgacaaaaatttcggaacccttcaaggaaccactcgcttgtttcaagcccggtcacgttactgcagacatattttgacgatctttttcctggaagatcagctgagatccatgatttcgaccaatacctttgcgaaaattccactaaatcatatgttttggaaaatgccagttttgggggaaaaggttgggtacctagggcacagttatatgataagaaaaggccctctctgttgacatccattcaatcaaaaagggaaaattccctaaatgaggtcttacttgcctttcaaaagcgcaacggcgcggtaccggaattggctctggattccgctattgaccaagaagcgagtgttttggtaaaaaactttgtaaacacagcggtggacaagtcaagattggatttgctgagacagtttcgagaggaccaaactgtgctaaattcggcgcagattcgagaatggttggactcacaaccacccggagtcgaaaac

SEQ ID NO: 2550 - DNA, 946 bp, Hepevirus sp.
  misc_feature 1..946: note = isolate RtCm-HEV/XJ2016 non-structural polyprotein1
  source 1..946: mol_type = genomic DNA
gaccatagcccatgggagagttggacaagggatatccgcatggtcaaaaacaactgtggctctgtatggcccgtggttccgggcgattgagaaggctattgtggatcgactgccagacaatgtcttctacgcagacgcccagaaccctgatgtttttaatgcggcagtctcaggtctgacaggctatcaggtctttgagaatgacttctctgagttcgacagcacccaaaataactattcgctgtcgttggaatgtgcccttatgactgaggccggcatgcctgagtggatggtacgcctgtactggctcctccgatcagcctgggtcctgcaggcgccgaaggaggggctcaagggctattggaagaagcattcaggtgagcctggaacactgctgttcaatacggtatggaacatggccatcattgcatactgttatgattttgttggagagtgtgtatatgcttttaaaggagatgattcagttgtttgctgccaacgttacatccggcacggccgtgcagacgtcttgatcactggctgcggtctcaagttgaaggcagcctgttcttacataggtgggtatgccggctccatcgttgcctgcgggtgcggcgttgtgccggatatcatcagatttgccgcccgcctgacggagaagaactggaaaatcgctgataatgatgatggtaagagggcggctgagttaacaacagcagtgaaggatttcctggcaaaactggagaacgtgcatcatctggccataactttgggggcccgctatcacaacaagcctgtcgggctgctagtcaacctcgtcggtgccctcaaaacaatcgccgagggcaaaggccacctgaccaagcagattttaccaatcttgactctattgaaggggtttgaatgaataacatgtctttttgtgtggtatgagtgggtgtgcaga

SEQ ID NO: 2551 - DNA, 946 bp, Redbank virus
  misc_feature 1..946: note = strain REBV 205543 hypothetical protein gene,1
  source 1..946: mol_type = genomic DNA
tacacatagtcaataaagaagaatgggcccccatccttctttattgactatgtgtattattttatgactagctcgtttaaccttccagcggaagctctgtgccagtatttttcatttaggtgcatgttagcatttttcttatttgcccacgtactctgtaattcattaaccgaccagcggtcgctctgttggattatgactgtgcaattttgttccctcttgacaatcttattcttatttgatgacgactttttaggccctcaattcttggattgatattttgttactacccggatattattatgatcttgtatcagaaccacgccgataagctcggataatattatccctggctctgcaatttattatgacgactattgagatgaacactattggactatgacttgacttattatttgttatttgtacgttagaatcaggcaagcttgcctatcctgtttacttgtcgattaatctaggactgaacgttaatacgaactacttatcgagtaggtaacccactaccgaaattgtggctaacccgaaacattaagtagaatttttgtatcgattattaagaactttgattatgaaaccgcactcagtgacgcaagtaatactatgaaagaagaaacggcttttatagtgattaggacgtgaacgcaaaatcgtaatgtttgcctatacattgacgatttgttctgtctgagtagttattacgttatagaattcctaaagtatcttggaaccctcgtattactctcacacttgaggaggtgtgttagtattaaggtaatccattgatatgtgaagaattcgactaacggtgttggtatgttaccggtaaggtttgtactatgatgtacttaagggaccagttaggttaactcttggtgccacggccaagacccgctcaacgcgcataccgcatgaatggaaatatttt

SEQ ID NO: 2552 - DNA, 950 bp, Ngewotan negevirus
  misc_feature 1..950: note = strain Nepal12 hypothetical protein 1 and1
  source 1..950: mol_type = genomic DNA
gtgtcattctgacacacatcactcctctgtcacctatgagttttacaacatgacctttgtccctcagtcccttgctctgcgcgaacctcttcgtctctacaacaaggagtttaccgtcttgaagaacctcgttcccgtttccttcttcgagtggttcttccttgtacgttcagacgataaccgatttggtattgtgcccaggatttgtgacgaactttttcgcaactcaaccaggttgccaaagaatgtgcatgttagacgtgagggcaacgagttctgttttgttgaggtcagccacgactcctatacgtgtactcccaaactttacccgaatgttgcaactttgatgatggtccatgactttcctgttgatttcgacgacgtgcctttctcgcagggctcatacgcgtcgaccaacaataaggctatgggcgctgatcagtacctcgccaacaacgtcgcttctaaagtgtatgtcgttgacaaggtgggtgggtcttatatggtcacttatgacccccaagactactctggtccccgcttcattgttcgcagccacgggcatgttcccacggagaaaccgttctgttttgaccttgctacacactacgcgtcgcccattcactctatctttgcacacgtgacgaagttttttcacgaagcgctggtgtatttgttgcagttcctgaaagagatcgccgccgatctcgccctggtcctcttcaaagtcatcagcgaactatttgagattctcatgtcgatcgttccgtacaattcacatttctacactgcagggcttgtgtgtcttttcacgtatttccttttgcgtgacttgctcatctcgtccgttgtgtttttctgtgtgtacagttttaaaatctacactgattctctcatataaatgcttgttgaaactcttctcattttcttcgcgatcctcgcatactgcc

SEQ ID NO: 2553 - DNA, 950 bp, Shahe picorna-like virus 13
  misc_feature 1..950: note = strain SHWC13556 hypothetical protein1
  source 1..950: mol_type = genomic DNA
tatgggagcgcttttgcgcttccatatttctattttaaatacatcttcggtactttagggctctcctttaatgttcttgccttgttaattcaccaccattactgcacccctatcttatcagagtgactcggttacttagatgttctacttaaccttgccccttatggcaacaggaaaagttccaaaactgctcgttccgggagattcccatccggtaaaaacccaagaccacactcaacatccggagtgtctaaacccaaggacgaccattgataatatttgtaaaattcatttcaacgtacttattttaaagcatcaagcgtcattatgtcagttgattaattagtttcactgattaattgagataacaaacaacttcctaaatttattttaagtgttttgagttgaagttcacaaatattatgcgatcatattactaatcaccgcctatttccatatcttccgatgaattccgtacaggaatgtaataatttttgttatttgtatttaatttataactttgatctatgctcatcccaccgtttagccattattaggttctgttatgaaactagtaattattgtttgaaaaccagtagttccagcgcgtcgtggcctattgacccccaaacaaagtctttgtctttccctaaaggtttggtcacctataagtctggctctaacatcgagtacagcaagtctgcccaacatttgttgcatctgactctgggggcaacaaatgtggcgggataaagttacaaacctgataacacaggtagctttagcacaaaaccccacattcccacccgagtaatgtcaattttattattttatgcactttataactatgttatggcaaatttattataaaaatgtatttcaactatccaccttcttctttcacctttactgtcgaaactcttttccagtcaagaaaatcttaatgaaaa

SEQ ID NO: 2554 - DNA, 952 bp, Beihai weivirus-like virus 21
  misc_feature 1..952: note = strain BHZY60867 RNA-dependent RNA1
  source 1..952: mol_type = genomic DNA
gtccgctgccgtgcagtttaattaattcttttcgtgtgagctgcatgagtcggctccccctgtggggggcattttgtggctacggccacacaattacccatcggttgacacagagccggtggggtccgtgcgttacggtgtgtgcttcgacgggcgcacactggacgaaagagtgccgctggcgcacggatgcgagtaccgttccgagcttagagctttgctcggataggggtggcggtggcgagccattttggctgagtgacgtcatcggcccgagccataccccgaaggttgccttatgcctcagtagccgagggtagttcggtgaagagcctggaagccgggtagcgccggcgacggtgagggcaccgctgttaaccctgcgcgtgggttggccccttgggaggggggctgtaaaatggcggttctgttgtgcgagtggtggctcgaaggttctgggacctgctagtccggctctgcggcgttcactgcgtcgcatccgtgaagacgtggggaccgttccggatgttccgttcacgtagcgcgcgtgggtggataatcgccgaggaagccattttggcagaaggcgacgcacaacagacaaaatggactggcgggggttacggcccgcttttacgcgttgcaggaggacgccccctccatctttcgtggctcacacgacctagttttgcacgcccggtatgtttgtgggagtagtgacccgtgacagacccgtcgacttcaagtcggcactcaggaagagactggctcacccgtggttttgagcctgcttccgtaattaactacttaccctaaaacgagccgtgatttctctggtgggggccagagatttccttcaaggtgtatctgtgtcgcactacggctcatcacgttgcgtgtctggctgtctttgtcatactgacgccggatttgtcgtgctttcgttgtgaca

SEQ ID NO: 2555 - DNA, 955 bp, Apis rhabdovirus 1
  misc_feature 1..955: note = strain Apis/USA/A, complete genome.4
  source 1..955: mol_type = genomic DNA
agtttcctttaaccctatctctccaacctgaacaagcaaacacacacgctccgccaacatagaagacagagagccaagacaagtacaccaacgcaaccagcaacttcttcactttcaacacaaaaggaaaatcaacacggaatgttcctgcgaagcatcattccccccctccgcacacccccaattttgggaaataaaatagctttgatcaatagataatccctcacccgaaatcggaataccgcacaacaccctcgatcccaattccctgcaagctccaagcgatccagtttaagccaaaccacaataaaacccttcaagcgacaaagataaaggaccgtcaaacatagacaaaagttcaccagacccgtcacaaaaccaaagataacgacactccgtatccagccatccagttagaactttatctacaaacagttgtaataattcttatgatctctatggtctcattatccccagaatatgtctctcacaaagcaatgccagaaccacacaactatcacaccaaaaaaacctcggcacaatcaggctcattaaacaaaaaaccaagaatttcgcaaagatccagctccctcgtcaaaactccaaaataaaattagcctggcaagtccacaaaacaccgtcacaaacacatcccagtatatcaccaatatctgcccccacacacgcccctccccaaaaaagacacaccagatgtgataagcaaatccctgtcaattttcggcaaacaagaccccttttgcttctttcacaaccaaaagcaaacaatcggaaaacagcccacaaagcgaacacccatcagcatactccggagttcaataaggaaatttctaaaacagactgtttcatactgcaacagtccaattgaacattacattaccaatttatttgagaggaaaatatataaattgcacaatagacatttaagaaaaaaact

SEQ ID NO: 2556 - DNA, 959 bp, Forsythia suspensa picorna-like virus
  misc_feature 1..959: note = strain pt110-pic-2-NW genomic1
  source 1..959: mol_type = genomic DNA
tggagatccctctatcttgcgagtcactcaagttcctggtcgtgtcgaatatgattggcctggttggagatttggccatccaaatttttcttctacaacatctgaaattttggaaaaaccatttaaagcggctcaagcgttagcaagtggtggtgttcactttgacaaaaatggacacgctcgagtggaaattccatattactctaaattcgaacgcttgtttactcaatcaactaatccgtcgaataaggatgaccctaacgggttccaaaaatctatatctttaacagattctattggtatggtgtatattactgggtcttatcaaatcgatggtacactcacattttatccgcgagtgaccctcgagattaatcaggcgattggagatgatttcgaatttcaatatccgaaagcagtgccttgttttattgtagaatggtagttgttatattatgggttcttggtcttgctctgttattatcatgtatccttactggtataataggttattattttttaagattagtacatagaacatataattatacatgcagaaaaatacaaaaacatacatttagcttaggtgatgaggagatggcgcctatttataagccaactactcatagtgttcttgttccagtgcccttgtcctgacccttagtaccttacccagcatgaacgatctaagactaaccgagtggggtgcgagattaaaacttggtaacaagttctctcactatgaagccggggtctgatttagtagtgtgacaagtgggaacctggtgttcagcgtgctggagtccataacctctcccaatgtaaattctgcgtgaggcattggcaaagttgtgggtggctctggtggtccagtccggagggctagaagtcttcgagtccggagggtatcgtcaccgcccaatcttgtgacgtctttcttttaaatttactctacaatc

SEQ ID NO: 2557 - DNA, 969 bp, Pink bollworm virus 1
  misc_feature 1..969: note = polyprotein gene, complete cds.1
  source 1..969: mol_type = genomic DNA
ggttaatcccgtgcagcgctctagtagtatttcaaattttgaatcgttacagtgcatttttgttgactaattttgttatctagttcattgtcagttcgatttatcgttcgtgactataatgttcgtagaattttcacctttagtcttcgttaaatgtattgtttgttacaaaattctttgactactaaactttaggttagttatatattatagttaagataatttatatatatattataacgaaatatagtattaataaaatataaaatacaaggtaccgaccttggctatctctaacaactattaatgtaagtgttatgtattttcactgtcggccagtccaagctcttcatgggcgagacaaacagtgacaggagcacaatcatccctcctggcaacaagtacctctcacacttttattaatagaatgattgatagtgtataaataataattttaaggcaagattcagattgtaaataatgtttataagtacatcttatactcctagtaagagtccttaatatatatagacggtatactgggcgtaataatggggacccctccaacctgcaaacacaggacgtaaccagtgacgctagattatgagtataagacgaaagtgaccgcttatttatagtcgtggatgacagaaattctattagatagattttcttaaacgcgttctgatcgtgagaatacttttgcgagttactcatggcggagatcgtaagcagatccagactggttacggtacaatacctaaatgatcttacagtgataggtattacgtgtcttactggcatcgagttcgactgttacgcggatgaagcagcgtagctgaatttttcattttctttcttttatggtgacaagcgatattgaaacattttcgatattttccaagtgattaattgcatctcttatttcatttttaattgtgacttatattatttcaacaatcatcaaca

SEQ ID NO: 2558 - DNA, 970 bp, Larsen virus
  misc_feature 1..970: note = isolate Antarctic83 RNA-dependent RNA polymerase gene,1R
  source 1..970: mol_type = genomic DNA
cattttatgaaattacgacagaaggctttatcaagctgggaaaggccaaaggttttggtttttcgcagaacattggtaagccataccatcaatcatatagggatctgtattcaatcgaatggttggatactgtgacctgctatgagtggctgacgactgagttaacccttattaatccgaaggccgcttacgctaaaagtttgggcttaacaaacccatttcttatagtgaatgacctgatcccctggtcctttgtagtaaactactggactggtcacgagaagtggctatcctcactggatgcctttctcggactgaaacgtgagaacgagtgtaaaacgacaaaaatcgtttactacactgagtactcacgttgggataatcggaatgatccgcccactagggaggattatttaggggactacacgaagttcgatagaactgtcgaggagataaaagctcctgggcttacagacagagtgaaggcttggcctttctcttcgcagaaaagggccgtcaacatgtctgtcttaatcgcatcacaatttagaaatctttaattcctaaaaggagtacaattatgcaagctaaaagctttacagttacaggcggatctggtgaactcgaatttgaggttctatgtccagcgggcccaaaaagccctgctgaatttcgccttaagaatgaggagaaatccccactcttagcaccttacctttcagttctggctgacaaagtgaatcgatcttcctcacggaaggtttcaattctcttcgttaagccaattgaacaagaaggacaacgtgtcggtcaaaacgtttttaccgttcaagcaaaacttgatctgcgtagaagcgtcaccgatgcgaaaaaggacgttgaagatctactggctatcataaaccaggacgacttcaaagaaatcctcgcaaaagcaatttcaccaaattaacaaccggagttatttatt

SEQ ID NO: 2559 - DNA, 971 bp, Psammotettix alienus iflavirus 1
  misc_feature 1..971: note = complete genome.1
  source 1..971: mol_type = genomic DNA
tctttaactcatcaactgtgacttacatatacgcaagtatccctgtaatttcatcacattgatgttaaaatcatagttaattactgtaagttgaagtatccctctttgaaatactatacaactgagtaaccctgtctatgatcttaggtttaagacttagttttaagaaatttttatttttaataaccaatttgtatgaatgttttcatgtatgatacgctgcaactccaataaggattgtacgtgaatgaatgttttccaaattgtgtgaatgaagcgaagctcaaagaagtagtacgatttattccgaagctttgagaagtagtagcttttgtatgcttgacgtaacgtatgtttgttttattattaatttgtgtgttttagttttaagaagttctcaatttattttcttacttcatttgctccaattatttgtttgagccaatttgaaactgcatagtctttattaagttacaaagtttaatttatgcctaatactgctgattcccagccttagtagatcttgatggcaggcttccaacttgttggtaaaacaagatatcaagatctcttcttctacttttacagagctcagccttacgaagcgatgtgatagtttatacttgtgcctagagcgtaacctctgtactcatagaaatactagttagaacttgtttcttgcgttataacgtattgttgagatatcagagcatcgtgtcgacttgttttctattgcaccgtgagatgtaaaacctggtaaagctgtaaaactagagaagaaaaatacttcggaccggataagagtaaacttcaggataagtccccccctggagctaggtatattttaacacttataaagattgtatgttttagattgaggatggattcttttgtatcacgaccactgctatggaccttgactaagggatgtgtgcttgcactgccctaattttttgaatttgttttatgaa

SEQ ID NO: 2560 - DNA, 972 bp, Lucerne transient streak virus
  misc_feature 1..972: note = isolate LTSV-Can, complete genome.1
  source 1..972: mol_type = genomic DNA
gtaggcacggcgatcttgtgtacatagcagtagcagaaaggctaatagcgctgtccgaggccgacttggaagcccatccgaagcccagcgatttagttcgtttgggtctttgtgatcctgtgagattgtttgtaaagaatgagcctcaccctgccaataaggtgcgggaagggcgatttagactgatctcatcggtatcgctggttgatcaactagttgaaaggctgctattcgggccccaaaacaaggcagagatcgctttgtggcagtcggtgccttcaaaacctggtatgggattgtcacagaagtggcagttcgaggcgctgtggaaagatttgcaaatcaaacacgccagtgcccccgctgctgaggcggatatatcgggttttgattggtctgtgcagaaatgggagttagaagctgatgtgtgcatgagaatagaaaggggaaacttccctgcaagaatgaggaaagccgccttgaaccgcttcaagtgtttcgccaatgctgtgttccagctaagcaacggcgagttaatagagcaaggcttaccgggtctaatgaagtctggtagttattgtacctcgagtactaacagccggataaggtgccttatggctgaaataatacaagccccgtggtgcatcgccatgggagacgactcggtagaaggatatgttgagggggcccgtgagctctacggagaactgggtcacacatgtaaagattacatcccgtgtgctgctgagggagagatcctcaaggaagtgaacttttgctcacacagcatagctgcggatcgttgctatctccaatcctgggctaaaaccttatttagatatctggaacaccctgacgactttgaggagttggcagtggaattgcagggctgtccgcagtggccgcggatatacaagtacttacgtcggattggaagagtctccgacaaaattcccgaaccaagagaagaaa

SEQ ID NO: 2561 - DNA, 973 bp, Beihai picorna-like virus 51
  misc_feature 1..973: note = strain SCJXSX38939 hypothetical1
  source 1..973: mol_type = genomic DNA
tgcagggttaataaccctgcacctcgcgattgacgatttggttagattgtgcgcattatgttgaagattcgggctgacttatctttcgagatttttcagctcttcttattttcatatttttgcgtaactttttagctttttctgatatcctagggcttggaagtgtgcccagattttctatacacttaccttcagctccgttcgtgaacttgcacgttcggttctatttacactctcatgaatactgtagtgatgagtaaacaacacagtactaaagcttcgctattcattgaagctatgacaagataaatgtctaaacaaaatgacggtaaaactctacttagaagtgattccgtaaccatacgatttggtaaatatgaatagcaatttttgtatttttaatatccctctaacccagggatttgtatatgtatatattttacacatgttgtagagctcttgttgggctctttaaagaacagatgattactagtggagataaaaataattcgaatgttacacaagtttttaaataaaatctaaaaacttcactagttggaacctcagcgcggatagcgattactgatcgagaaattcgtaccactttgtgccatcgatatatcgatcttatggaaagcagcaaaccatggcgatccggaggggatcaccgcgttgagaggatggtgtgcaacttgactcgtggaggctgctttgcagtcggtcacgtaagagatctgcatgtcatgaggtaaagtcaagcgtgacctaagcgcttgcgaccattgatcaggttaaaagttcgggtggggcagctggtacagccaggccgtaggggaacgggattcggagaataccgccaatcaagcttcagatttcaaagaagcattcggaagccattatctatttgagttatcttttcattcaaaatcatcaactattataatttgctgatatcaatgaataagacaccaat

SEQ ID NO: 2562 - DNA, 975 bp, Rubella virus
  misc_feature 1..975: note = capsid protein, E1 and E2 envelope proteins, complete1
  source 1..975: mol_type = genomic DNA
tccgcatttccgcgcgatccagaagatcatcatgcgcccctgcgcccgcaattccttgtggccgctggccatacggagcccgaggtcgacgcctggtggcaggctcattacaccaccaacgccatcgaggtcgacttcactgagttcgacatgaaccagacccttgctactcgggacgtcgagctcgagatcagcgccgctctcttgggcctcccttgcgccgaagactaccgcgcgctccgcgccggcagctattgcactctgcgcgaactgggctccactgagaccggctgcgagcgcacaagcggcgagcccgccacgctactgcacaacaccaccgtggccatgtgcatggctatgcgcatggtccccaaaggcgtgcgctgggccgggattttccagggcgacgatatggtcatcttcctccccgagggcgcgcgcaatgcggcactcaagtggacccccgccgaggtgggcttgttcggcttccacatcccagtgaagcatgtgagcaccccaacccccagcttctgcgggcacgtcggcaccgcggccggcctcttccatgatgtcatgcaccaggcaatcaaggtgctttgccgccgtttcgaccccgacgtgcttgaagaacagcaggtggccctcctcgaccgcctccggggggtctacgcggctctgcctgacaccgttgcgccaatgctgcgtactatgactacagcgcggagcgcgtcctcgctatcgtgcgcgaacttaccgcgtacgcgggggcgcggcctcgaccacccggccaccatcggcgcgctcgaggagattcagactccctacgcgcgcgccaatctccacgacgctgactaacgcccccgtacgtggggcctttaatctcatctactctaaccaggtcatcacccaccgttgtttcgccgcatctggtgggtaccccactcttgccattcgggagagccccagggtgcccga

SEQ ID NO: 2563 - DNA, 976 bp, Euscelidius variegatus virus 1
  misc_feature 1..976: note = isolate to-1, complete genome.1
  source 1..976: mol_type = genomic DNA
tggactcgtattttgacctcagccgatttgctgtttgagctagatctgatagaaatgcaagataactggcgtctcgactgttgtagtcaaatgtgttgctagatctgaaagaaatgtaaccttttgatctttagttttaaggaattttaataaacttaaataaactattgcgaacgatctccaagaagtaattttttgtaaagttttgtgtcttgttgaagccgaagcgaagtagtaacgaaagtgaagcgcggacgaagcagtatatcaagcacatgttttaaaattcaaaattaacatatagtcacgacctatttcttcgtgtatccattgtgcatatggagaaataattgttgcatatagtcacagtctatcactctgtgtatcctggtttgtatttgcctcaggagaaataattgttaccaaatacatcccaaaaaggggttaaagtttatccctggccatttgccttaaactgattctcgtgcgtgtcacaatttggtcaccgagatgatgtaaaactcttcacaataaccttttgtagcaatggaagttgtgtaagtattatgagtagctacctaggttttgcaagtgcgtggaataactcgtcatcttttagtgaagaactctgcaccgtaggaatcccttactgatatcttagcgctgataggcttttgtttacggacaaagtcgacagttaagatatgggctgggcagaacttaagagtaggcctgagaaacctgctctgagttgcggctcctgtacgatattcatttgatgacttgtgtttctataatcgcaaacacttagacgtcccccgcgcggtaccggctggacgaagaagtacctttatggtaggccgttctcccgtcgaacgacgggatcaaacacccaactaggtcctgtgtctcgccgttctcgtcttctcggcgactcactttcatctcaatttctttttctctatattttttcaaa

SEQ ID NO: 2564 - DNA, 982 bp, Wuhan pillworm virus 1
  misc_feature 1..982: note = strain WHSFII20185 putative glycoprotein1
  source 1..982: mol_type = genomic DNA
gccccccccaagatactcacccaagtgtttaacaatcttgcttgaactgactacctacaaaaccggctgctacagtgactgtaacagtgtgtgagacataaagtcttaattactcactcttgccttaatcactgttatcaaagtggatttgacattctatataatcctgttttacgcagtattaatagccatcacatttgctctgttatactgctatatgaagtgattatgggccacaattcaggagtatagggtgtcaccaaacactattggacaccaatgtctggttgcttggatttaagttcagcactagaactggtatctgtgagggaatttgctgagaggattaataaggaggagtcaaaccttcaatcctttgtgagactattttattatttgaggaacaaagggttgactagtgaattggagaacgaatatagtagtatagtgaaaaggattgatgtgctgaggcctatacaagttctaggagaaggattaaactgttatacactaaatcaagaagtattatctaaatttgtcgtaagattgactattcattcagtggtgagtgatactggcttcagtagtaacagagtgaaggtagtttgtaagggaggaaagacagaaaaggtaaccggtatacaagctgtcagaaaagtactggaaccttgctataagaggagtagattgctagatagactcagcagaggctgtgaagcagttgtactttgtcagaagtggtttgtgacacttaaggtcattaaaagaggtagtatcagtaaactgcactgcctttgtagggatataaacatcacattgaataagaagcagctgagcttcttaggtatttataaggcaggttacgactacttctgtggggaattaaacttcttcctaactctgctagattatattagtggaggtagttttgatagaggcagtaacagcacacacataaaagaattgttgggtaaactaagtg

SEQ ID NO: 2565 - DNA, 983 bp, Hubei coleoptera virus 1
  misc_feature 1..983: note = strain QCM131202 hypothetical protein1
  source 1..983: mol_type = genomic DNA
tgcatacgtacatatttgaacatattttaacgtaatagtgtgaatgtttctttatattatgtttactctctttaagtatgatagtgttattaatgtattgagtggactataaaaatcagtgttatattaatttttggtatgaatataacacgtttatttgcgtatggattttgcgtccatatgaatgattttaagagaggctattgagttttatatattacggttttgatgttcaatgacaatgggaaagactataaatttcgttttagattttataattaatgtgtgaatgtggtagttcaagggattttatactcctgaatagtaacaaaattataaaataaacaaaaatattatgttagatttagttagtacctagacgatttaatattagtaagatgaacggtacgttaagattaagtttttacataagaacaagcttaattattatatgcttatcccagtgagagtatattctttgagatgtattatacataaaataagtgcagacagtgtaacaaaaatccagttatgctgcgttataagcaagttggtaccagatgactttataactttctggcacgaaggattattccccgacttcgtggtccccttattctatgtatgatttcatttttttgaggtatatttcttgcgtaggatttttaattctgagggtaagtacgctgctaagtaatcagaacgtattattgatcctgtgggaaagctagactggatcagagaacaatagcctttaatgttcttgaatgtatgtatttgttccagtataatttgtaggcaggcttgttacgttcgcagaggagtctttagtttaatgtaatttacatataaatcctcagacggtgacggatggaaagacatcattttccttttttatgcagattttatattgatttttcttgtttgtcgaagttattctcagtgttttatccctttaacgtttttctttaatattttgtata

SEQ ID NO: 2566 - DNA, 984 bp, Southern bean mosaic virus
  misc_feature 1..984: note = clone contig608 polyprotein P2ab and1
  source 1..984: mol_type = genomic DNA
agaggcacttagaattagttgctttgtgtgttaccgagagattgttcttactcagtgaagctgaggatctacacaataaatcccctgtggacctagttcagatggggttgtgtgacccagttcggctgtttgtcaagcaggagccccatgcttcccgaaaggtgaaggagggtagatttcgcttgatttcatccgtttcgctggtggatcagcttgtagagcgaatgcttttcgggccccaaaaccagcttgagatcgctgagtgggaacatattccctcaaaacctggtatgggcctttcgctgcaacgacaagccaaaagcttgttcgacgatttgagagtcaaacattctcgttgtcctgcggctgaggccgacatatcgggttttgactggtctgttcaagactgggagttgtgggctgatgtagagatgagaatagttttaggaggttttggacagaagttgtccatagccgctagaaacaggttttcgtgcttcatgaactcagtcttccagctctcggatggcacgcttatagaacagcaactgcctggtattatgaagtctggttcttactgcacttcctcgacaaactccagaatacgttgccttatggctgaacttattggttccccatggtgtatagccatgggtgatgattctgttgagggttgggttgatggtgcgaaggacaagtacatgagattaggccacacgtgcaaggattataaaccctgtgcaacatccatttccggtcgcttatacgaggtagagttttgctctcacgttataagggaagatcgatgttggttggcgtcgtggcccaaaactctgtataaatacttgtctgagggcaagtggttctttgaggaccttgagcgagagcttgggtcttctccccactggcctagaatcagacactatgtagtcgggaatactccatcgcccgacaaaactagattagaaaatttaagtccgagct

SEQ ID NO: 2567 - DNA, 985 bp, Barns Ness breadcrumb sponge weivirus-like virus 1
  misc_feature 1..985: note = isolate V92,1
  source 1..985: mol_type = genomic DNA
actgccagacagatgaattcaccgtgccaccgtgcacggttgctctgaatttgtagggagcgtcgggggaggaaatgcccctggcggagatgacgctgtgcacacaacgcgactactgatctaagcatcagtgagtccgggggattcttaccgtctcgtccgagcttgtgcactgaagggggccgcacccctagtcagccttgttcttctgccacacttttcactgtgagtgtggtgagagcctgtagtggcgtactaagctctgcgcctgaggtgaaggcctctgggaaactggatttaacccccggttgggactggcctcccttaattcccatacccgagacggacaatgcggtaggcacctcttgatgccccacaccagatgtgagtcggcctttttggacttgcacaggtggatgtagggaacgaggagaagtcgaagctggtcaccaagcagtaatgcgtggtgtgttggctatccgtccagtgttgattggttacggtaccgtggcccggcgtttttccgggtgatgctatcgagcatgtggttagagctccgacagaatgaggaaccggtcaccgaccactgttgagccgcagggaacccttctgttccggcttgtttgacccacgtgattagagaaacatcggtttgtatagaaatcagtgacgatgcatgcatccgaagccccaaataaataaaatatagcggcttctgtgtacagtgcaggcttggtccatccccacatgaactccttcgtggttaagcgacattcgatgcgttcggaaactgcttctgcgcggggtatgattgtgtgggggtggccagactttgcccagggttggacgtctatcacgtggttaagcgacttccgatgcgttcggtcactgcttctgcgtggttatgcccgttctgacgctgccaagcgactcccgcttgagacgtgtatagttttttcggccttgccgtctgtttatctgagtg

SEQ ID NO: 2568 - DNA, 987 bp, Chaetoceros tenuissimus
  misc_feature 1..987: note = RNA virus type-II DNA, nearly complete1
  source 1..987: mol_type = genomic DNA
catggacgtaatgtccatgcagagaattataatacttttatcagatatatctatgatattgtttcaagagttcatcttgaaactttcgtatgttagagcttgtatattgttgtcaatgtatgggttcttcccatacaacttcatatacaagatatttttcatacgctaagtttcgtaattgatagaatctcttgttgctttaagtagaatatttgatgaggtgttattattcgccccagttttctatctgtttacagctacgacttaaccattagtcgataacgcaggctgtatcctagttcagtaaagtacatagaatgcaaagatatttagactacttaagctactgataaagtttatactttcgcttttgatgtagatgttcatttacttaagtatagcgctctgaaccgagcgcttttgtttatgaaagaatttaatcaactctttcacccggccacacatctttagagatgtttatgacagtattaatttgtttaatactcgaggccaaatttcggtgtttttactaattgcaagatgtctacggactgccaaaatcttgtgtatttagtataaattcctctcccattttagttttaactatgaaattcttttattagttgactatttaggtttaggactttaacactgctcgaggaatccccctttatatgtgaaaattgcgatttaacacatactcgccccaaagaagggtttagagatgttagtaaaagaataacattttagagaagaatcggtccttggaggtgttttaatggaacgtaccccaagatcttattataaccggaatatacaaaggatgtatgtataatttaaggtatagttaccgctatgctagggccgacatgcccgatttttaattacctctacccgatgttgaccagtcaatatttttaaactaatgaattagttttattctaactttggaggaaagttatttggcacgccctttctattttaatc

SEQ ID NO: 2569 - DNA, 988 bp, Marine RNA virus SF-1
  misc_feature 1..988: note = RNA-dependent RNA polymerase and structural1
  source 1..988: mol_type = genomic DNA
aaaataatgcatgaaatatagattttatctatatttcatgccacatttgtgacccttgagaaggtcataccgcattatgcggttctaagttaataactcacttcagtccagaagactgttaagtagttctgacggtggaaagccgtcatctgttacattattagttataataggatgtgtactcctaactagacgatctctacccttaagtcggaagccagcgtttagtgctgagtgcttccgtcacctttggatgacaaatcgtctacttcgactcattaatccgaaagttacctaattttcgtaacccctgtgtctgtgttcagtaaatgacagacagtttgagataaactaaaaatctcccaagtctccacaagtgacatcaatgatctgaactttatttttgacgtttgagatggtgaatgaaggccttgtgcctgtcctcactcttctttaatctttagtaagtcagtgactaacttgtgttatcctagttgattatactaggcttatcgttttctacaaaattttgatgcaaaatcggaacgaatttattcgtaacccgtgagcgtttcaaggtctttgcccttgatcctaaattttttgctatatttcgtgtcgtatcaagtcattttattaatactttttgacttgcctgaacgatgatgtctcgtttgggaagctgcgtaagcagttaactaacaaggtataccagaggatgtaatccccttccagttaccccttgtgttttgaagtactttttcgtaacttcgtgacattcgacctggttctaactcagatgtttgataaactttcgaactatcactgtgaaaggtgctttagcaccttacttgaacccgtcgtctaacacggacatcgttaacgtatgtagaatactatgagagatgttaaattcctcttattgaccacattggaaggcccttagaaaaggcccacactatagactggtgtctaagtccatcccgcc

SEQ ID NO: 2570 - DNA, 989 bp, Sclerotium rolfsii mycovirus dsRNA 1
  misc_feature 1..989: note = strain BLH-1-16 hypothetical2
  source 1..989: mol_type = genomic DNA
ggcccgatagttaccaagcgcgcggtaatagactttaccgcttcagcaattcacgggtgcctacccctagtgtggatgaaggtgctcgcatttataatatagtacataaatatttgcctaaccacaaagttttaactggaggtcttccttcaagtagacgagctggtctcgattatttattgccacctgccctgaggagcggcaacgaaacggctggtccgttggcaggtagtacgctggacgtacgtgctcgaggcggtcctcgactcacggtcacgaagactgaggtcggtgttactgaggtaggagaaaatgttcacggtcccaagaatgaggatagagccctgtccccgcatgagactattacacgttctctttccggtgtttcgctgatcggaagtagtcgtggtagtgatgacggttctgcttcgtccccacggccgggtggtgttaccacctgccaacccccctcccctactggattatcgaggcaggcagtcaaagataactatgtgggcggtgtcgatgaaactacccaagctgcggatgtgacatcggcacgtatcggcaagcaagctgtgacaccggaagtatctgataacgaacaacctccaagtggtatcagatgggaacccttacgcagacaaggggcaaagttcgtcctgctcatcccgagtggagaaggtaaaacatatttggccgagacgtatcctgagatcttcaccgatcacgatgccctcgaggattacacaattgaggtccaaccgtacattgagcaggcacgcgaaagtggcgactggtcatacatcgatgcggtccaccgccggagtagcgccaagtgccaaacacctgtactactatcgtggaacgtttcgacatacgatcatacccgcttcgtgagtctaggtgcgtatttattgcgccaacctactaacattcgtgaaaacgagaataaccgtgccgctctgatcgcaacccacgattattgt

SEQ ID NO: 2571 - DNA, 992 bp, Wuhan japanese halfbeak arterivirus
  misc_feature 1..992: note = strain DSYS15584 1A, 1b1
  source 1..992: mol_type = genomic DNA
ctgaaaagcatcccctaaacttcagttaaacgctgattccgagaaagaaataccctgctttctcagctacaaaatctgtctggctcatagtgctggttaatcacatcccccgtggtgtaacactgtgacacatacaatttgtagtccctctccttactctacccccgagtgtctcttatcggttactcaaaagttgtgtttggtttgtccgcttttcggattttgtgttagaattacattataaccttatcctagtttgtgttgtgattatatgtaaaaactcttcgtgtgaaagtttgaaattttgtgtgttcttattgtacctctttaacccacatatataatttctggcctcttgccttacctgtaggatttccaaagcctaaagtataatctccccgctagaggtctgttgtgtgaatcagaccattctttaacgtaaagtcacccgtatcgacgctaccatcacacagtaggatcaagattagctccggcagccctggggcgtcttctttgatacaacatcacctttgctggtgcttgcaccgcttgggtatatttttcggtacttgcaccttcgggtgttgtggcctcttactagtttttctcccccttacgtaccttcgccccttgggcccggagtccctgtaattggcatcgcaattgtggtgtcaccctaggcactgcctttattggttctgtctaggtcggtgtggtaagggtagaaaggcgataaacaccgtacattgtttattctattttatagctttcgctactgacttctatgactgattccctcctgtacttagcctcccacccggcggcacttgtcactcttacggctgtggttcttttcctttacctgtatgctggttgtcgtgcattgtttttagacggtgtgaagttagctagatattgtggaactcctctttgttggggtgttaagtgtctctgttgttttgttagaagaggtaagtcacctcgccaagaag

SEQ ID NO: 2572 - DNA, 994 bp, Sclerotium rolfsii hypovirus 8
  misc_feature 1..994: note = strain BLH-1-3 polyprotein gene,1
  source 1..994: mol_type = genomic DNA
tataggtgctgtaggtctccccgtcgctcaccattacggtgttagcgtacgagctcgtgcgttgtatgcacgagtaccctacagacttcttaggtcttgtcgaccctgctggttgcgccgtcgtcgttagacggactctattcggacgtcatttgttttcgtccaaccccccttccaaaagactgcgtggagcggtcaatctagttacgggctgacagtagtggtgctgtcactaaggaacaccaggctggcctcagaggaaaagctgagtaataacaaacccgttaagtgatcacatagcctcgctagcatgtgacacagcgctatgactctgatgcgtcaggatgcactagcatcccaggaaagagtacgtgagacaatatgaacacagtgcgtgacctttgttcacctgtgcgattttggctccctagctgtatgccgcagcgacttgtcttgggttgatgtcgaataacccacgtagaatcttatccgaaacctctccacacacaaccgtcgacgcagcgacgttaaatacccggctatgcggaagtaccgaaagtcgggcgggcgtcaaatctacgccttaaggtcaaccaaaactttgcaattgcatcgtgtgtcagatgacacgaccatgagtcctcctggacacttctctagcttgctagagttgcccgccaccacagctgttataggcccttcggggatggtgcgactagtgttagcacccgtgtgaaagagagggcgcgttacgccctataaacgcttgttaggatagctttcccctggagaggagggactagtgtcgatgaaaacctcacaactcgaaagagtattgaagagcctcggcgcgtcaatcttaaaccaaacacccagtgccatttaaaacccgaaaagggtggatggtataaccaaagttctcaaaaggagccactgtgtggagtgcgacgtatagttcaccaggtcagccatagggttgtttacaaaacaacaa

SEQ ID NO: 2573 - DNA, 1000 bp, Agaricus bisporus virus 2
  misc_feature 1..1000: note = strain C19-C23-C1, isolate AbV2-003,1
  source 1..1000: mol_type = genomic DNA
tcattccacagtggagtgtttgctgacggtgagttaaaatttttgcctctattcttcttcgcgaagtgtgttgatggtagcatatgcatccattattaaagacaagctgtgccgggtgtttcgttatatgtggacacgaagcgggtaatcctgtggaaaccacccccatcagaagtagcaccaaccggttatcgtggccgatttggtagttagtacctcgcggtagggcttcggcccgcgtaagacactagcattaggcagcgcagagacagtcagaaccatggaggccgtaatagccgttgaagtgtgatgatcctccagtgctcgggcgacgtgcagtacctaggcgaacgcgcgtaaatcttttgaaataagggtataagtgatatgacgaggcgggtagcttgacaaccacctagataagtcgaagaatatggaagaaggacgagaacgagtaagaaaatagaaaagcccaactttggcaagtttgtagaggatggggtgttttaggtcacaaatatggagtagggagcttcggcgaacctgcaaaacctacacatagtgctataagcgctgcccagcgtgaaaggccgtgatcataaccgtacgagggggcatcgagactggacctgtcgttacagcaagggtagacatttggggaaaccggcgatgctcatcgggtgtcgtgtcgctcctacctaaacttagagatgttaagttctggcggggggtcaacctatgtcgtgtcatttcgggtcaatttcactcattggaagtggaatccgctaacagagcatgcacggacgacgtctgtggtcaagcaacctttgtttgggaagaatcctgttatacaacttctacggttccttcgtctctacgaaccaatcgaagtctactgtttacctatctcgatgttactttacgacacacctccacgtgatcagtccgtcaagttaggtcacccatggtgaaaggcgatgtatgctaagaactcgaagcc

SEQ ID NO: 2574 - DNA, 1000 bp, Agaricus bisporus virus 2
  misc_feature 1..1000: note = strain C19-C1, isolate AbV2-003, partial1
  source 1..1000: mol_type = genomic DNA
ggcagcgcagagacagtcagaaccatggaggccgtaatagccgttgaagtgtgatgatcctccagtgctcgggcgacgtgcagtacctaggcgaacgcgcgtaaatcttttgaaataagggtataagtgatatgacgaggcgggtagcttgacaaccacctagataagtcgaagaatatggaagaaggacgagaacgagtaagaaaatagaaaagcccaactttggcaagtttgtagaggatggggtgttttaggtcacaaatatggagtagggagcttcggcgaacctgcaaaacctacacatagtgctataagcgctgcccagcgtgaaaggccgtgatcataaccgtacgagggggcatcgagactggacctgtcgttacagcaagggtagacatttggggaaaccggcgatgctcatcgggtgtcgtgtcgctcctacctaaacttagagatgttaagttctggcggggggtcaacctatgtcgtgtcatttcgggtcaatttcactcattggaagtggaatccgctaacagagcatgcacggacgacgtctgtggtcaagcaacctttgtttgggaagaatcctgttatacaacttctacggttccttcgtctctacgaaccaatcgaagtctactgtttacctatctcgatgttactttacgacacacctccacgtgatcagtccgtcaagttaggtcacccatggtgaaaggcgatgtatgctaagaactcgaagccttggttgattgggccgctaccctctggggtccgtgcacggtctatttagccttggttaggggacaaccctgcagcaaactcaccctctggagaatcctttctttatgtatgaattacgcggatacaaaatctacaaaactacctaaagggccttgcaagcgggaaagccaaaaacgtcgatttcgaggcactcgaacggagagttgggaacagcgtgatctacttctcgactcccgtcgtcgaagtcggcgtgact

SEQ ID NO: 2575 - DNA, 1000 bp, Grapevine leafroll-associated virus Carn
  misc_feature 1..1000: note = isolate Carnelian1
  source 1..1000: mol_type = genomic DNA
ctaaatcgcttcaaactgatggtgaagggtgatgtgaagtttaagggcgactcagaagcgttggaggagtttgctccgggacaaaacattgttttccacagccgactagtttgtgcgcacttcgcaagcgtattttgtgagctagtgaacaggttacgctcaatatgtgctccaaacgtaatattattcaatggcctatccttcgaagactttgcggcacacgtggactcatgtttggatggtgaacccctctataatttcaagagtgacgaaatagacatttcaaaatacgacaagtctcaaagcactttaaccaaagccatagagcttgaggtttacaggagattgggactggatcaacgcattcttgatgtgtggggatcgtcagagttttatggtagagcaaccacgggttcaagaagcttctctgcggagatattcgctcagaggcgtactggtgccgccaacacctggataggtaacacgattataaatatgtgtttattggcccagagcacagacccgagactctttaaggtggcgtgttttgctggagacgatagtctactaatctatcgaaagaaacccaccatacactttgagtactatgagacaaagttcgacttcgacgtgaagtattacgactctgcggcaatgtacttctgtggaaagtttcttatctcagatggggagaaaactcgaattgttccagaccccatgaaactttttgtgaaattgggaaaagagcggccctgtcatgattctgtattgttggagaattggaggtcattttttgacgtcacgaaagcgtatgcaaataacaccgttttggaacgtttggtggagcaatttgcattgaaatatacagaatcaccacaggcttatgcagccttttgtgcagtgaactcaatcagaagcaatccagaacaattcaagagattgtggttttctttgtatagtgggttttcgagcgacatcaagcaaagattgaggtgacttc

SEQ ID NO: 2576 - DNA, 1000 bp, Pterostylis sanguinea virus A
  misc_feature 1..1000: note = isolate Murdoch-7 coat protein gene,1
  source 1..1000: mol_type = genomic DNA
tggtggggggttgggaaaaaataatccaaccccacagttgacaaaccaagcacagcgcaagaccaacaaggaaaattagtgggttattgtaagtgaacccaatcgagtatattgatcgagcgaacgaacaagatgtgatgtggcaaggcgtgtcgatgtttctaccatcctctgaattatagctgtgtgcggagtaattatgatggagctaagtcgtgcacttcccttgtgtggttgactggtggccgaggcgatttatttcgtgggcggtacagttaacctagtggtaatgcagcacggtagaccttttagtacataagttgccgtccggtcctaagcccgggtacatgcagaaggacacgcgttaagctgtaacgcgggttatgtcacagcagactccgacagaatctgcagccatccttcggcccccaatgcgcgggcagatgagtgtgatggatgcgggacactaacggaggttccgggtaatgggtgaaaccgagccgacgcgaaagcgacaggccccccggacatagggagcccactgaccctgaccgccaacacaaaggatgttggccagggaggagtggtaaactatgggtagtgacaacatactagagcaaggtatgttgattgcaagacgcggacggctatttaggggcgaaccctatctaaaacagtctagtgtaaccccatgcaacatgggcgcgctagctgggcaacgggaagggtggttctggaccgtagttcgtcgacatctgacagggcaagccccttgagatgtacacgaggctcgagaggacagaggcgcgcgtcggtctccctgacaaggaggcttaaggtgtaaacagcgtgtttgggagttagtggatattgaattctgtggatgcttacatcgcctaggtattaaattacggacgatggaagtgttcacaaagttccttataccctgcggccacggtcattgaccctaagcccgagctcccttcatgactgacattcg

SEQ ID NO: 2577 - DNA, 1000 bp, Haemorrhagic kidney syndrome virus
  misc_feature 1..1000: note = capsid protein gene, complete1
  source 1..1000: mol_type = genomic DNA
ctcttgacgccagagttgctagtctccgtggtacatccaagaagcactctggggagccaggcaccatgcttttcaacactatttggaacatgaccgctgttttccacaccaccagtttcactagaatgaccctctagctcttcaaaggagatgactccgttgtgtgctgtgactccagcatgcccaccccaattgctaaggagttcatctctcagaacgggctcgtcatgaaacagaagacgtcccacctcggctccttcacatgcagtctcgtcacccgcacaagttatgtcccggacgtctacaggttcgcttgcaggctgaacaacaacgacttcacagataccaagcgcatcgaggatctccagagggccacagacgatttcatcaagagagcgactgtcaccaccaactacgggttccacttgctcgatcaacggcagatactacgtgtccttcggacaccattgagtgtgtcgttggcttcctccaagattttgctctcaccggaaaaatagacctccaaacatcatacaaaccaattttaaaatattaaaataagagaagaaattaaataagttggacattagttatgtgcgcttgagatagatacagtcactatggcagattccaaagcagtcgctccttccgtacaatctaaaccacgtcgcactaggcgtccaaagatggacccttctcagatcccagatacagtcaaaaccttccgtctcacaaccgaccctattatggcacctccacctggtgaagttgattcacttctctacacatcaggcctttcacctgcagttgtcctttccttctccccattcacctcccccgcagttgtcttcgccgccaactatgagaatacaagatcttatctttcaaagctactgtcctctccctagcaccagaagctatttccagttacaacctctctgtcgtctggttcccagatgcatcagaagggcccacctctcttcaagctacaaacttgtcc

SEQ ID NO: 2578 - DNA, 1000 bp, Xinjiang tick associated virus 1
  misc_feature 1..1000: note = strain 16-T2 ORF2 gene, complete1
  source 1..1000: mol_type = genomic DNA
cccgtgcgggtttttctggtgctccttatgcaatgggcaacaaggtttacggtatgcatctgggtgcttcctctgaaaacataggctacgatgctggctacattctcatgaagttgaggggtttgaccgagtcatcaactgactatttcgagaaactcgtggacaacgctagacgccgcgggcgcaagcttgtggtgcgaaacactggtgatcctgacgttgttgaagttttcgtcaagggtcactacgtgcgtcttgaccgcgatctcttggaaggttatggggatgaggttgagtcagccacttactctcaggagagtgttagtcagggaaacggaaaggggccccgtgcggatgcgcggggccctgggcagaagacctctccggtccctgctcccgtcccgagtgggcaaagttctcccttaaccccgaaacagccgcaagctgcgacggaggagaagggtacggagtcccccgcatcgacgcctgtgccatcaagcagtcgttcgccaaccacgtccgcatccgtgaagcccaaggctctgctcgaccagcagggacgattgtcgaaagatgtcttgactgtcttgagcaaactttcggcgaatggaggttccggcctcaactcggccgaattgaaattgctaaggcaatacgcgaactcgactttacctcaacacccggttattgtcagttcagtggctacggcccaaccaacggtgccatcttaggatgggacgggttggactttaagcgtcgggatgtctatgaggcacttgtctctgcggtggagtatcgacttgggcaactcacacaaggaaaactagtctatgatcccatcaagcttttcatcaagcaggagccgcacaaacgggctaagctggaggaaggccggttgcgacttatttctgccatctctttggtggatcaggtcgttgaccgagtgttgtttggccgattggtggagagggttctctccactgttggccgaacaccttgc

SEQ ID NO: 2579 - DNA, 1000 bp, Trichoderma asperellum dsRNA virus 1
  misc_feature 1..1000: note = isolate JLM45-3 hypothetical1
  source 1..1000: mol_type = genomic DNA
gtttctaatataatgcaaaccccgtaagttacgatgactggctcggccgttgtaactgagtatgttgttgaggtgagtgtaatgagcaggaccgcccggagaggatagtatttatccctcattgtagcttccaggatcacgaacgttagtctaagtattgacggttacttgcagtatttagttctggccggaatgacacacatggaccgtcctttatgtggacggagggcgttacctctaaacctagactctgcgctgcgagtcaggatgaggatgctacttcaatgtatcttcagcctgacactactgcagtgtcgggtctaggtttaaattgagccaccttagtgggtttcaccagtatgaaagaatatactggcacccgtgcaggcaccgtttcccttgggctgggagaaaaacgcatccggttcgaaacaccctaattggttaggcttctgcctttccggccactcatccgtcattgagttctattatgtttccttccctcgtagaagccgggggcacatcatgtggcaacgaaactaggcctccgtagcaatctcacggttaagatgattatcgcgcggctgaaaatagggacggggcgccgtacccgcgcattactgttaggcgtctaggcaaatattgggatagaccccagtagtttccacgcgcggtagggctggccgctaaatataaaacacagtcaaagtcatcgcggatagtggcctaaccagccgctagacctgctcaagggttccggaattcgcaagttttctgggtgtgctgtgtagtagctggacagagtagctgcacggtgctaacgtatgcttaggctgtccgccctaagtagaacgtgccgaaaggtggtctatcgtacgtaacgaaggagggacgtactgggtttaatcccgaggtagggagcgcctgtaggtggaacgactgcccctgagttgaatgcacggttgtgcacgcggaacagtctgctgggcatcccccagtg

SEQ ID NO: 2580 - DNA, 1000 bp, Fusarium poae dsRNA virus 2
  misc_feature 1..1000: note = isolate SX63, complete genome.1
  source 1..1000: mol_type = genomic DNA
gcccgtgaacaccccctgtcttcctcactgggacgatcccaccagtataaaaataggtccgtctggctgcatgttaaacagcccaggtcagcgctgtcacgctgggtttatcacctaacaatacgacccctcgcatcacgtcgtaaaactgtgagagctcgtccattgctggcgacgaattaaacagcgtactgcaggcatggggtgtttaaaaggtaggttgcttaggctgtatgttgccgatatgatacagaaacccttcgcgctgatcaaaccactgggctcaaacaaaccagtggatgctgcagtcggtcaaattcacttcgttgaagtgcttcgggtaactcccgaatcatgaggtaactagtggaccgtcaacccctcatttactaccacacttgggacttttgagagcttccttgtgtggatatgttataaaatgagtgttggttcggcgtttgcgcgtcgaatttctaagattaacacctggtgcgcactcctccggcttcggccgggggtgtgcgtagcaggagtttgttttagaaatgcacttattcaattaactcaagtcctaggtatgacttaaaactacctccccccgccctaggtatggcataaaactaccttccttggcaccgtgaagtgtttaaactagcaacctcggtggcgtgggtagatatgctcagccactataagcgtctcgggcgtgacggttattactcaaaaatcgccaaaatccatcgtgtgagcgggagatgaccctgccggacgggaggtaacctagatgtcaactagggtgtgaccacaatgcggccaacgttgtgcgagctatcgtaaccagggacggtctggatgtagcgtacgggtgcaatctctaatgcaccacttctgttgctacccctggggaacgagccatgcttaggtatggtggacagactgacactcctgtcgctaagtttcatagcgcaccaaacagtcggctgggtctacgggcccagtg

SEQ ID NO: 2581 - DNA, 1000 bp, Fusarium poae dsRNA virus 3
  misc_feature 1..1000: note = isolate SX63, complete genome.1
  source 1..1000: mol_type = genomic DNA
aaatctcggacggtgccgcgcgatcctaggcacttttgttcggggcgttgtatctcactcagcgtcctcctcagccctgagaccatagggttatccgacgacttggctataaatataacatcctccctttagtggaatcgcccttacaccaacttagggccttttccagggaaaggaacccgtgccgccgcgcaattcgcggtttaccatggtgcggggttgtcggagtaggtacgtgtgctagcggtagagagtatatgatgcggtttttcgctgatttcctactgagcaccctacgcccgaatttttaggaagaacggccctcaaaaacgagaaagctgttctgccccgaaaatttgaggggtaccaccatttacgtccagcatgacggaaaaaggcataccaaactctggtcactcgcgccctgggcacggcggtaaactgcaccatttgcgtgatctatatggtcgaaatagtcgcacacctcgttaaacctcctactgcacagctctattgatcgagaaccctttagtgggaatgcagagctcacactcggcgtgtggtcaggataggtgaggttggcttccgtttcagcgcatcctgtggtgagccccacacacataagctcaaaaaccagagtcctgccgcctaatacgcgggatataaaggaagcggaggggtcattcgctataataaaattagatcaaaagcatcgcggatagtgggctcaccacccattagacctgctgtagggttccgattcggagtaatccgatagggtgtgctggtagctagctggttagagtaggctatcggtgctaacgtatgcttgggctaaccgacccaggtagaacgtgccgaaaggtggtctctgcgcaagcccgaaggcgcggtttgctaggtttaatccaagcggagggagcgcccgtaggtggaacgactgccccacagttgacgcaaggttttgcacgcggaccagtctgccggacaacctccggtg

SEQ ID NO: 2582 - DNA, 1000 bp, Fusarium virguliforme dsRNA mycovirus 1
  misc_feature 1..1000: note = putative structural/gag1
  source 1..1000: mol_type = genomic DNA
agttatcagtctctcatgttcgtagcgagtacatgagtatcacagctgaccaggtggcaggctaagaggaattcgagggtaaaagcagggtatccaacttcacccatcaagcaactatcttcgtgttcatttctccatcgtgctaaggcgacggtgtgtcatctctaattcttgattgtggtagcgattgtgctaaccatacaagataaaagccctcagttataaaccctgcagcctattacgtacatagccaggggcgctaactttaaattgagcgctgtaactgtagcctgtcaggatgggagcagagtctatatggcggtagtcgtcgtgatctgcgcatagccaacctctgtacatctctattgtgtcgcaacccttcagtgggaacggagagatcgcagcgaccgtgcggagcgtctggtgtggtgaccttcttctacaactatttccatctgtctcgaggaaagccgggacgtcagtaaactaggcccacgcatcaaaggcgtctaacatgaggctactaatgacaaaggcttaatcattagattcgacacgctgcccggccgtgcagccgctgtattcataaatcggcaatcgcttcgtctagtgggaactaaccattcctacgtccggtgtgagggttctccttttggaggtgtccacttcagatatcgcacaggagtttctgatttgggctaacgtatgcgtgtagctgtgcgtctacaagtagaacgtgccgaacggtggtctctgcagtgtctcgaaggcgcagatacttaggatagaatccaagcggagggagcgcctattaggtggaacgactgcccccatttccgatgtacggttgtacagacggaccagtctatcgggcatacccggtgaagcgaattcatatcatctagtggtgtccttaattaacggcgtcactttaatcccaaaaattgttgattagtgaaatttaagttagaagcttattttacgactctcttcacccacc

SEQ ID NO: 2583 - DNA, 1000 bp, Macrophomina phaseolina double-stranded RNA virus 2
  misc_feature 1..1000: note = isolate Mp31
  source 1..1000: mol_type = genomic DNA
aaatatgcacgccccctccctgaagcttaatagtagtgatacccttggacctgtccagggccgcacgctgggcccgaagtagtcttcctgaaggcttaagagtttaggactcacagccgaggtaggtgactgggcttcaacacctctatggttcttttccctcctttggcacaggggggaactgattaaatagaggcatagcggtgacaatcgctatataaatatgacctactcgtagggccgcgagtataaataaggcttgccaagagcatcgcgtattcaggattaccagacctgaagtcctctgtcggggttccgtccctagtcatgctgcatgggttgccatgcggtaggctagcacacgggtgtgtttctaactggctatgcagagtaggttagaaatgctaacgtatgcttaggctgcatgtcctaagtagaacgtgccgaagggtggtctctggggcgagatggtgtcagctgctgggctatgtaaatccggggtgtcttagcttaaccagtatgcgggcgtgtgtagggtagtggcttgtaagtccgggggtagtcgtccaactaacagtgtcggctacatgcttagccttaagctaccttgcatacatctcttaaccggagggagcgccttagtaggtggaacgactgcccctgacggtgacgcttggtagcgacgcggaccagtctgcccggcaccaccgggtgatgctcttatgccatatcgccgagagataacgaacggcgctagcccctagatccgggctggctttctctccgcatatgctagggtggccagacgtcccttgactggtactcacttccgggccgcggcggcctttgtcacttctttgtccttccacggatgccagccccgttcaccacatcctcatcccctaggaaacttggggaaagtagccggtgtatagcaactctcaaggggtagtgggaggagatcggaaaaatcgagtcataaaagcctgcacgaaacatt

SEQ ID NO: 2584 - DNA, 1000 bp, Sclerotinia sclerotiorum
  misc_feature 1..1000: note = dsRNA mycovirus-L,isolate Sunf-M, complete1
  source 1..1000: mol_type = genomic DNA
ttgggcgcgaatccagctagtgtagtagggggcaggaaagaacgaagtacgtgttaactatatgattcatccaacttgggtcatatacagcgtattgctacccaaggtgtcaaggtagtgtgtgcgatttacaacagcagcactactaaaaaacatcacagaccttggggcctactacagagagtacaaccgttagggtaggtaagggcaggagctacaacctcttgatctcttaccaggccagcggctctcagcccctgttttatatttactcctccccggtctagcggtgggggagtggtataaaatgagcggtcgcgctcacttgaattaatcttttacgtttacgcgcataaaatcaggacacatctcttgtatactttagtatatcaatgatgtttttgttttatgcgattaatcgtaagagaacttctttccatccgcctgtatgggcgggataataagttcaccgccttggtcgaggcgcaaacttgtatgtgcaaaggtgagctatatgctcgaaatagtcgtaactaacacacagccactacctgtagagctctattgatccggaatcctttagtgggaatgcagagctcacaccggacctgcgggtatcttcggcgttagggacttctgtttcagccttgaatcatttacctttataccttctctgaggcgcctgggccgggcgcgatattaagtacaagtcaaggacatcgcgggtagtggtctaatcagccgctagtcctgctggagagttccaacttagttgggtgtggtgcatactagctggatagagtaggtatgtattgctaacgtatgccggaggctatccgtcctcggtagaacgtgccgaggagtagtctctgcagacccccgaacgcgtggggtctttacttaaatgtaggcggagggagcgctcgtaggtggaacgactgcctcccagtcgaatgcaagattttgcacgcggaccagtctgcccggcaattcccgggtg

SEQ ID NO: 2585 - DNA, 1000 bp, Bremia lactucae associated fusagravirus 3
  misc_feature 1..1000: note = isolate DML-A_DN432831
  source 1..1000: mol_type = genomic DNA
gcactaaattgataagtgaggtccgcaaatttgcagctacgccagcaatggcgtatgctgaacagcctcccgtcctggtgcgacctaaccaggggagttacaaattgccagatggcaagactgtgcgcagagcgcgggtcgtgtcgtctggtggtaacgccactcggaacagtgaggtttcgagaacttccggcccccgtcggaacgttaaaggtgcagtgatcgggggttccggtggagggggatcgtcctttcgcgcgggtgtggggaaggagagtggttctcacacggacgtgcagggtatcgtaagcggcgcgcttacgatggccaagcacccaagagtgatggcgaagtcactcttggcgattgggcgcgcagccctgaatgctggcagcgaggaggccttggtctcgctagccagatcgatccaagcaaggcaaaaacctggagtaggcttgggtccaaaggagcgggtgggcttatctgatctgatcagagaaggcatcggttctggagaactaagagtgggtgatgcaagaaacctgctcaagatagcgccggaggttgaaccggtgctcccagctgagattaagaatcagctgggaaattacaaatctttgtcgtttggcgaggttgaggtagaagttctatctccccggggcgtcgaggaattggagaaagccagccctgagttgactgatagcgctgcatatgaggcgcaatttgacgcagctgggcaggcgacggattttgctttcgagccaatagcagaaggcaagggccacgcggtgggcgcggcttataaagacgagggtggtgcccgactgggggtgctagatgatgttgaagccgatccggctttaaactaatctggcactcctcgtgcgcaccctttggcgaggcgcgtgcccgattacttttcaaatttgcctgcccactatttttaaaagaaatagttggttttttggagagtctcggttgcgatagaaccattacacgg

SEQ ID NO: 2586 - DNA, 1000 bp, Rhizoctonia solani hypovirus 3
  misc_feature 1..1000: note = isolate BR16 hypothetical protein1
  source 1..1000: mol_type = genomic DNA
agtcttatctagtcaataagacacaagtgcagaaggggagtttatccccgcctgttgttcagctaatcctctcaaaggaggctcaccgctgggaagcgctgaggaattcgcgattaaataccgcgcgttcatgaagatgacggagtaaaccgtcatgctgttcatcataaacattaaatcttttggaacttaaaggtggattcaaccaccgagtgtgatttgagcctaaaagccatcgaggctgaaatggaaagctcagattgtgcgagcccccttagggggattttgttctgttcaaagtcgttaaaacaggagattcaaccgcagagatgattacgcatcgagctcaaggtggggggaacaccggtggtttcaagactacgctctgcggatggttgcctggactagggcagttgacgatgtcctcctagttcacgatgaatgacgatgcttttgactatttggcatatactaaatagtgacgctataccgggatacgaaccggaacccctgctcggagagctcgtttgatccgacccaagttgcctatacgacttccctaatcttaagacaccaacgcgtaccgtgctttgcctgaattctgacgctgagactcttagagtggctgaagataatctggtccaacggccttaattgcgaacggtcattgcttaaagccccccgaaggttcaaccacgtagggatctataaaggcgatgaatgaaatagtgccaggcacctcggtgtttgttggccgttcaatgtttctggtttaattttgtggtccaccattccgtaagtgaagccccaatcggtgggttaatacggtcgcgaatgtccaatgagtgttaaggatagtcatggttataatgctaaggattgaacacggttttatatcgtctggcgccctctccaaggatggcaatttgttttgcgaggaaccctagctataagaattgggagtccctcaaatgtacgcaggccaatcatcgatgcctgt

SEQ ID NO: 2587 - DNA, 1000 bp, Chicken picobirnavirus
  misc_feature 1..1000: note = strain RS/BR/15/5S-1 capsid protein gene,1
  source 1..1000: mol_type = genomic DNA
gtgtagaacaatggttttacacaaaattgaaaacattcaatcaattctgctcctcagccacgcagttacactgtgtgtttgtagcagcagaataagtcagaatgtgttaggaggtgacacttatgactaagaatcaaattgagtatctaaaattattagaaactcaaagatcaaatgttgcaaatgagaagctcacggcaacaagagatcaaactactcgagaattaggatttgctaatctcgcagagactagtagacacaatcgccaaactgagcaacatgccgttaatgttcttggagaaactgcacggcacaatcttgctcaagaagctttaacttcaagatcacttgatgagcaggagaggcataatagagtctcagaggatttgggatatgccactctggacgaaacgtctcggcataatcaagctgtggagttggaaacttctttgcataatagaaacacggaacgtgagcaagtccggtctaacaaggcaaaggagttcgaaacttatcgatcaaacctggctaaagaagttgaaactagaagggcgaacgttgctagagagcaggaaactgcgcggcataacaaagcaacggaaaagcaagcttctgctgaactcgagtattcctatgccaacttggcagaacagcgcaggtatcactcacagtccattggtttgggctactctcaattggaggaacaggctagatctaaccttgccagagaggctgaaacccgtagatctaatatctcccaggaggcactacggggtaagcaactggctgaagaggaaagatccaatcgccaggatgaagccttgacctcataccgaaaccgtgagcaggctaggcacaatcgagagtctgaagagctagaggagatcagaactagaagccaaagggttcgcgatcttacctcaggatacaataatctaatgtctggtgcgatgagcggcatcagaagcgctggtatgctaatacccttattcggactgtc

SEQ ID NO: 2588 - DNA, 1000 bp, Potexvirus sp.
  misc_feature 1..1000: note = complete genome.1
  source 1..1000: mol_type = genomic DNA
aacaaaaagaaaattggtgaaatcctctttgaaaactataagagagccatgcaactcccaaatgacccagtagcattctccagggagctttgggatgtgtgcgccgacgaggtccagaaaacctatctgtccaagcccctccacatgatcaagaatggccagaacaggcagtctcccgactatccaaaaaacttcatcaccttgttcctaaagtcacagtgggttcagaagcttgagaagctcgggctcccaaagattaagcccgggcagacaattgcctcctttcatcagatcacggtgatgctctacggtaccatggctcgctacctccggagaactagagaaacattccagcccgccaacatttttatcaactgcgagagaactccggaggatatgtccaagtgggtccgtgagcactggaacttcaccagaacctcctacgccaatgacttcactgcctttgaccaatcccaagatggcgcgatgctccaatttgaaatcatgaaggcaagattcttcaacatccccgaggaagtcattgaggggtacattgacatcaagtgcaacgccgaggtgttcaccggcgtcctttcaatcatgaggctgacaggagaaggtcccaccttcgacgcaaacactgagtgcaacatcgccttcacacacacaaagtataacataccaaaggaatgtgcacaactctttgcaggagatgactctgccctcgacttctcaccagaagtcaagcccagcttcaggctgattgaaactgaactgtcactgacagccaagcccgtacttaaaatgcaaattcagggacaatgggctgaattttgtgggatgctcattacccctctgggcgtcgtcaaggacccaatcaaactctgggcttcatgggtgagggccaggcaaacaggcaagctcaaagaggttgcggacagttacgagcttgacctttgcctagcataccaacaccgcgatctgttgcaagaggtttttg

SEQ ID NO: 2589 - DNA, 1000 bp, Tomato blistering mosaic virus
  misc_feature 1..1000: note = gene for coat protein, complete cds.1
  source 1..1000: mol_type = genomic DNA
tggaaagcttgccaaactctggccctcatgcatgattacatcatcttaatccttggtccagtcaagaagtatcaacggatcatagatgccagagatcgccctcctcaaatttacatccactgcgggcacactcctcagcaactatcctcttggtcccaatctcatctgaaaggctctgttttccttgccaatgactacacatcttttgaccaatcccagcatggagaagctgtagttttagaattgctgaaaatgcaacgcctttcttttcctcctttcttcctctctctccatcttcatctcaagacttccattgagacgcagttcggccctctgacttgcatgcgcctcacaggtgagccaggcacctacgatgacaactccgactacaatctggctgtcatttattcgaaatactcgatctccaatcatcccatcatgatttctggggatgattccgtaatctgtggttctcctcctctcaatcctcagtggcccaatctccagaaactgctccacctcaagttcaaaactgagcagtcagaccggcctctcttctgtggctattatgtctcccccctcggagcatgtcgcaatcctctggccctcttcgccaagctcatgatttgcgtcgacgacctaaccttgccagacaaggtcctttcttatttgtctgaattctcagtcggccacgctttaggtgactcagtcactgaagtcatcccatcgcacctcatctcctattactccgcttgtcatgacttcttctgtcgcaactgctcaccttcccaaaagctcatgctgagccttgatccaatcccagagtccaagctcatcaagttaatcctcaaagttcgctgggcttcaaaaagtttcttttccatgctcccacaaaaggccagagacatccttgtttccactcattctttccaatccatgccttttgatcctaaagtttcccaactagagtcggaattgcttcccaattacaattgacacg

SEQ ID NO: 2590 - DNA, 1000 bp, Burdock mottle virus
  misc_feature 1..1000: note = genomic RNA, RNA 2, complete sequence.1
  source 1..1000: mol_type = genomic DNA
ctttactgtccattgctgctggtgggagcggcttgtttttcgcgcgggcaaaagtaaaggagttcctgctgaagatgaaaggcaatctgttcaaacgtgatagtgagcctgacaacacaggcggttttaccggcgactggccgtccaggtcgtctggagaaatttctttacaagagttgagtagaccatcaccggagttccaagctccacggcccctatctccgagagtgagggacattttagacgatagacacctggatgtcttatatgccctccgtaatggtttggcgtattgtgccgggttgtatgggttcacagacaaattcttggcgatcagttatgcgttacaaaccgacaagactctaatatctctcctggaggacgatagtcccttggacgcgatcaagccatcagaagatgccatattggcgaaccatgagtctgaaattgcgctgctacagagggagctggagttggaaaaactcaaaaacgagttagcgttggaaagagctagggcagagattgaaacattaaaaatgcggaaagacgtgcaggcccaagaagaactaaatgagttagccataaaggaacagagactgaaagccgaaactgcagagttttcacggaacaaagaggaggctctcacaaaattggctcagatggacgcagactcatatcaagctagacacacgggaataaccagcgttgctagtattaccggtggatatcttatgggtagggccatgcgcgggcctaagatgagtgcgtacactgctggggttcagggggtttccaatttaagttctattgacagcagcagggcacgcgctaattcaggttctgttttaagtgggtctagggcttcagttgctgcttctgttcctattcagcctgtaacagctagtactgcttccagcagtagggcggggtcgaacgtttttaccattaaggatctaggtagtggtagattacatacacctccacccttttcacctgcagg

SEQ ID NO: 2591 - DNA, 1000 bp, Hepatitis E virus rat/R68/DEU/2009
  misc_feature 1..1000: note = complete genome.1
  source 1..1000: mol_type = genomic DNA
aaggtgtgtggaccaaaagaaacatttgtccccggtcggcagctgcagttctatagacagtgtcgggattgggtgtcagcaggtttttatgtggaccttagagagctctgcttcgatcgtgagtacgcctgcccatgcctcccttttgagcgggcagtgcgtaaaggatgttgctgtgtcgcccgtaagttgaaacaggtttgtgggtgctttatgtctgatgttgtggagagtttagaggactcgtgtgaggatctgacagccgacttttaccccaaaccagaggtttacgagcccgctggcttggataattggaccatccgcgctctcacggacgccttccatcaggcctccctgcgcgccgtgaggaccggtgcaaaactggctgggtggccggagatagggttggcattctatatcgcccccgtgggtattgtctttcgcggcgagcccctactaggcccccccggtcgccgattagaggcggggccttattgggctgatgcgccgccgccgcccacgccggatgaagcgccatatcaaacaccggtgagcccggacggccctcccccgcctgcatcttggacgccggggccgatctccccgaggtacgttctccctacacctgttacgtaccgtgggcatctccccgggtctgcaggcttctgggagtcgtcctccgcttccacacttgagggctctctgagtcgtcacacatccctccagagtgtcaacttggaccccccccgtaaccctcgagtccagccggtccagagggtattactggagttgctcccggatggggcggcagtttatgaaggggatcttttcaattcagattgcttctggcttgtcaatgcggccaacgcccaacacaaccccggagggggcgtgtgcggcgcgttttacggacgctttccagaggcctttgaccgaacccaatttgtccaccctaacgggtcggtggccgcctacacagtgacacccaggcccataattc

SEQ ID NO: 2592 - DNA, 1000 bp, Hepatitis E virus rat/R68/DEU/2009
  misc_feature 1..1000: note = complete genome.2
  source 1..1000: mol_type = genomic DNA
actgcggttctcaacttggatttcactgataaggcatgcactaggataacattctttcagaaggactgcaacaagtttaccacggatgagccagtgctacacggcaaggtcgggcagggcatttcagcgtggtcaaagacccttgtggctctgtttggcccttggtttagggccatagagaaggcgattgtggacacactgcctgagtggtgtttttatggggattgtttttcccaggagaaattggaggacgccgtggccggggcgaaagcctgccgcgttttcgaaaatgatttcagcgagtttgacagcacacagaataatttctctttaggccttgagtgcttattgatgaaggaggccggggcgccccagtggatgtggaggttgtaccacctgctccgttcggcgtgggttgtgcaggctcctcaagaaagcttgcggggtcgatggaagaagcattccggtgagcccggtacattgctatggaatacagtctggaacatggcagtcataatgcattgttaccgttttgatgggttagctgtggccgcatttaagggtgacgactccattgtgtgctgccgattctatcagcaagagcctcgagccgcagccctcatcaccggctgcggcctcaaattgaaggttaacttcggggatgttggctcgtacgcaggcctgctagttgcctgtggtcttggggtcacccctgacgttgttaggttcctggggaggctctcggagaagaactggggtccggtgaaagagcggaaggaagaccttgaacagtccgtgcgtgacttcgtggcaaggttgcgcaacgtcactgctctgtcgtgcctgctcgccactcgcttttacaagctggagcccggcctggccctcaatgcagtcgcaggcttgaaggcgatcgctgaaggccgcatggagctgaaagagtatacctggcctgttctccagctggaggggaagaaggaataacactctggcccgtagc

SEQ ID NO: 2593 - DNA, 1000 bp, Tobacco rattle virus
  misc_feature 1..1000: note = RNA-1 complete sequence.1
  source 1..1000: mol_type = genomic DNA
gatgtgaaacctaagactgatttaacaccgcaatttgaatactcagctctacagactgttgtgtatcacgagaagttgatcaactcgttgttcggtccaattttcaaagaaattaatgaacgcaagttggatgctatgcaaccacattttgtgttcaacacgagaatgacatcgagtgatttaaacgatcgagtgaagttcttaaatacggaagcggcttacgactttgttgagatagacatgtctaaattcgacaagtcggcaaatcgcttccatttacaactgcagctggagatttacaggttatttgggctagatgagtgggcggccttcctttgggaggtgtcgcacactcaaactactgtgagagatattcaaaatggtatgatggcgcatatttggtaccaacaaaagagtggagatgctgatacttataatgcaaattcagatagaacactgtgtgcactcttgtctgaattaccattggagaaagcagtcatggttacatatggaggagatgactcactgattgcgtttcctagaggaacgcagtttgttgatccgtgtccaaagttggctactaagtggaatttcgagtgcaagatttttaagtacgatgtcccaatgttttgcgggaagttcttgcttaagacgtcatcgtgttacgagttcgtgccagatccggtaaaagttctgacgaagttggggaaaaagagtataaaggatgtgcaacatttagccgagatctacatctcgctgaatgattccaatagagctcttgggaactacatggtggtatccaaactgtccgagtctgtttcagaccggtatttgtacaaaggtgattctgttcatgcgctttgtgcgctatggaagcatattaagagttttacagctctgtgtacattattccgagacgaaaacgataaggaattgaacccggctaaggttgattggaagaaggcacagagagctgtgtcaaacttttacgactggtaat

SEQ ID NO: 2594 - DNA, 1000 bp, Providence virus
  misc_feature 1..1000: note = isolate 14EPF155, complete genome.1
  source 1..1000: mol_type = genomic DNA
gatctgagcaggtgggacatgcacgtccaagttccgctactcaagcgagtactggaaatatacagtcagcacgtgacgtgcccgctactgctggacatgtgcagcaacctcctcaagaacgtttgctacacaaacaagggtatacgataccacgtcgatggaggaatcatgagtggggatatgacgacgggcctagggaattgtattgcagtacttgttatagttatgtccttccgggacgttataagaaggcttgctaccacgagcgaaagcaacacgctcgacgtgctgggggaactgccctcaagtacggcaacccaagatcaggagttagtccggaccttattagagataagtccccgtcttcgggccgctcagttgacactggggtggctcagcatattagacgatggcgacgaccacgtgataatttgcgagaaacaacatacgtggatttgcgagctagtcctccctctgtggtggacagccatgggtcactccctgagagtggacggcacggcggaagacttcgagagcatagagttctgccaacacaaaccatggaatggtgcaactcggcttaccatggtgcccaacccagcaaaagttttgcccaagtcttgcacggtgacagggaagtacatcagcaaaccccagtcgtatctacgtactgtgtggaccgcccgggctatccttcacgtggatatcccgcttttgggcccatttttccagaacaacgccagacagttgtctggggcccctctaatggaggtcatcagttcggagtttcagcacatcaattcgtccctacattacctaatgagataccacgcgagtggtatgtacctgccagcacagcagaaggtggacgagatggacagggtgctgttttggcgaatgtgggacatttcgccaacggagcaatgtaaatgggaaacgacacttgctcccaaaaacaccaacgtttccgatattgactggccgtcagggtattgagatc

SEQ ID NO: 2595 - DNA, 1000 bp, Erysiphales associated tombus-like virus 1
  misc_feature 1..1000: note = isolate PM-A_DN312481
  source 1..1000: mol_type = genomic DNA
cctgatgtcaaatcactagggcagcagctcgactcgttccgtgctacgaggataaactcgcattggggtcagaggtggccattgatgcctgaccttaaacaaacgccggcttggctcgactggcccccgtagaggggctaacccccactttattacaattatggctacaactacatcgaacccagaaactgcctccgtttattctttcgatgctcctaagcctacaattcgtttgcgccttcccgggaaaggatgtgccacttgtggcatgtccaagcctgtggaagtagcgccagtggtggtacaaaacgacgctcccgtgtcgatggagcatcatgttcaaggggtcaaggctcgtgtgggaccgtggatggcttttaagatgttgttccgtggctatgttagcccggtggcacaactgaaggccaagcacgccctcgagacttacgacaaccctgattatgatgagccctctgatcatttcacggatgtcgtcagcggttgccgcaaccagggtgaggaggcgatccaggcgaagcgcaagcctcgcagggataacacttcctggtggacggtttattctctgcttgcacatgcagagtttaaccgcccctctttcacgcgggcgaacgaaatggtggtgtctacttggattcgcaagcagatggctgccgacggggttaccagggtagactgtgccaaggtgctgggtgccgctactcggatggcatttgtgcctaccgagtcggacatctttgccgcacagatggctcagacccctgcgttccgcaagagagaaggtgaggcaaacaccaaatggtggactgcatggtgggattgcagaccgcgtggctacgaaagtagccaatagggtggcccagttgctgtaccaggaagggaagccggcgtttcgctggcccccaccccttccagtttggtggtacatcgcaaagtgggacatgccaatcgcgttcgacgcacgtacttggtggggcaaggg

SEQ ID NO: 2596 - DNA, 1000 bp, Carnation Italian ringspot virus
  misc_feature 1..1000: note = genomic sequence for ORF1-5.1
  source 1..1000: mol_type = genomic DNA
aagctgttgatggcgtattcggagagacgacgtgcattaagggatacacagccgatgaggtgggtgcaatttttcgggagaagtgggataggtttcataagcctgtcgccattggtctcgatgcatccaggtttgatcaacactgttccgttgaggctttgcagtatgagcatagcttctacagggccatgtaccctggcaacaagctcttgggcaagttgttggactggcaactccacaataaagggaaaggttatgttcctgatggaactataacctaccgcaaggaggggtgccgtatgagtggggatataaacacttcgttgggaaattatctattgatgtgcgctatggtacacgggtacatgcgtcatttggggattaatgagtttagtctggcaaactgtggggatgactgtgttcttatactagaacgcagaaatcttaagcaggtgcagaagaccctaccggagtatttccttaatttgggatacactatgaaggtggagccgcctgtatttcaattggaagaggttgaattttgccaggcacaccccgtacagtttcaaggtggttggaagatggtccgaaatgtccgcactgcgatgagcaaggatgtgcattgtgtcaataatatacgcgatctggcgacgaggagagcatggagtaatgctcaacaccacggtggattagcactcagtgctggtatacctgtggttgagaggttctactccaggttcgcactatatgatgtgcctcgtaagcatcaacgcattgacactgtcactaatgttcacaagtggcgtggatctggtggaagttatgttgtgactcctgaatctagggctagcttttgggctgccttcgggttgacgggggatgagcaactagctttggaggaccgtctggatagatgggagatggatctgtttggagaggagggtgttgacgctcatgagcccagcatcctcgactccgccgtagcttgaccaagcgagac

SEQ ID NO: 2597 - DNA, 1000 bp, White clover mottle virus
  misc_feature 1..1000: note = genomic RNA, complete genome,strain: CD.1
  source 1..1000: mol_type = genomic DNA
gtgagccttgttgatcaactggtagcccgggttttattccaagaacagaacaaactggagattaatctctggaaagctataccaagcaaacccggaatggggctgtctactgactcccaagtgatagagttcatcaattctctgtcccacctcgtgcaaataccagttgaagacttggtatacaattgggaaaagcacgtggtgcccactgactgctctggttttgactggagtgtttctcactggctattgacggacgaaatggaggttcgtaaccgtctgacacgcaacaacaataccctcacaagaaagctgagggattgttggttaaaatgtttatccaatagtgtgttggccttttctgatggaagcctgtatgcacagcgtgttcctggagttcaaaagtctggaagctataatacaagctcgactaactcccgaattcgtgttatgtgtgcttattatgcaggtgcttcctgggccatagcaatgggagatgacgctttggaagcagtggacactgacctatcagtgtataaaaatataggtttaaaagtcgaggtttcaggacaactggaattctgctctcatatctttgagaagcctgacctcgccattccggtaaatgtaggaaaaatgttgtacaaattgatatatggctacaacccggaatgtggatcgattcaggttctcaagaattatatcgacgcttgcacttcagtgttaaatgaattgcgtcatgatcctgaattagttcagcttctctactcgtggcttctccatccagtgttgccacaaaagtaagcgagtaagagaagcagacagatagccggtatcagttgttgcaatagccggagtcttagtcaacgtacaatcgtgaaaattgattataaatttctcgccggatttaccgcgggtttcgtgacatcaattccaatatcagtttttgcgatttatatcatctacctcaagatttctgcccacgttagatcaatagtta

SEQ ID NO: 2598 - DNA, 1000 bp, Apple luteovirus 1
  misc_feature 1..1000: note = isolate PA8, complete genome.1
  source 1..1000: mol_type = genomic DNA
cagcaacggtgctcagtggttacgataattttaaacaggggagattgatcgctggtaagtggaacaaattcaggaatcctgtggctattggagtagacgcctcccgcttcgaccaacatgtgtcgacggaggcgttgaagtgggagcacagcatctacaacaaggtttttggggaccctctgttgcgtgacttgttggactggcaaacagtaaacaagtgcagtctttttgttgaagacaagatgttgcgcttcaaggttaagggccacaggatgtctggtgatattaataccagtatggggaacaagctcatcatgtgcgggatgatgcacaactatttccgtgaacttgtagtgaaagctgaactttgcaacaatggtgacgattgcgtcatcatctgtgaacgcaaagacgaaaagaagttcgacggattagggaaatggttttgggagtacggtttcaacatggctattgaacctcctgtatactccctagccaagcttgaattttgccagtcccgaccggtttgtataaatgggaagtatagaatggttcgtcgtcctgattcaattgctaaggacgccaataccatgctcagtatgcagaatgcagaagatgtgaagagtttcatgtctgctactggtcaatgtggtatgattctaaattctggtgtccccattttagacgcttaccattctaatttgtatagaggttcgggctacaagaaggtatctgagagctttattgatcgagtcatatcttatgggacagatgagcgcctccagggtcgacggacccgtgttgaggaaccagtaactatggaaaatcggttgagttactgggatgcttttggggttgatccgcaaacacaggtccttgttgaacgttatctcaacaatttgcggatcggatgcgaacccctgggagtgaagatagtgactcctcttctcacaagcacgttgcttgaaataccttattttaaacctcttaatttagcacc

SEQ ID NO: 2599 - DNA, 1000 bp, Rose spring dwarf-associated virus
  misc_feature 1..1000: note = complete genome.1
  source 1..1000: mol_type = genomic DNA
aaagtcccacaattctttccggttacgatagttttagagtaggtaggatagtggctgcgaagtggggtaagtttcgtgaccccgttgctattggagtagacgccagtcgtttcgaccagcatgtctctcgacaagctttgaagtttgaacatagtgtttacaatgggatcttctgtgatcctattcttaagaaacttctcaagtggcaactcagaaatgaggttgtcctttttgtcgaagataagatgctacagtttaccatcgatcgaatgcgaatgtctggtgacatcaatacttcaatgggcaacaagataatcatgacaggactcatgcatttgtacttccgagatttgggagtccaggctgagctgtgcaacaatggggatgattgcgtgattatctgtgacaagaaggaccagcgtaaatttgataatcttgccgcttggtttttggattttgggttttccatggctattgaagatccagtttacgaactggagaagcttgagttctgccagggacatccactgtgcatcaacggcagttacaggatggtccgcaaacccgagagcatgtctaaagacgcgcactctatgcttagcatgaaacaccacgaggatgtcaagacattcctcagtgccacggcacaatgtggtctcgttcttaactctggggtaccgatcctggaggcgttccataggtgcttataccgtacttctgggtacaagaaagtctctgagggtttgataaagaaggtgatcagttatggtcaagatgagcgactcggtggcaggcgtgccattcgcgaggaaccagtaactatgggaaataggatgagtttctggaaagcttacggagttgacccgagaacacaggtccttgtcgaacgatatttcgacaatttgacggtcaatatcgaactccgcggtgtaaagaacttgacacctcttttacaaagcattcttgtgggagtccctgacttccctgatttcagccaaat

SEQ ID NO: 2600 - DNA, 1000 bp, Rose spring dwarf-associated virus
  misc_feature 1..1000: note = complete genome.2
  source 1..1000: mol_type = genomic DNA
atgcaaatggcgccacctggaatgtaggtgagtacaacaatgttaaaatcacaaaacttctcaacacctcttcttggaagaaggggcataaagacgttgtgctcaacggttgccattttaatgacggtcaaatcattgaacgcgattcaaccatgtcgttccactgtgaagtgggacatggcggaggtacaatcctcctggttgctccccctgtttgtaaaagtgacaagtacaactatgttgtctcttacggcgagtataccaccaaacacatggagtttgggtccattgctatatgttttgatgagaagaatgatggagcaagagcagggaaattcttgggcgctcctttcccccgtgcaggtcacgtggtgcgtgagcaacaaacagaaattgcccgatttccagcaggtagcgacgtcccgattgtaaagatcagtgacaatgactttgctacctctacacaaccagctgcacatattctccctgttccttcatctgttcaacttcctgacgatcctgtctctaagaaggtgcgatcttggatcgagaattcgagcgaggatttgcgcctggcgcgtgaagctgaacagactgacagcgactgggaaccccttccaccacctgcaccccctcctggacccaggcaattgcccaccgacacctcaggtgccactcaggctatccgcaaccagatcctgcgtgatcatacgcagccctactctggccctggtactccgcccgtcttcgatgatattgaggatacgaggtcaaccacccgtactgaaagttcgcggcggagttttctcagtggtgtcctcagaccccagctcaaaccaaagagtaatttgcgtccgacttcctctctcccgcgtaagctaactgctgaccaggaggcacgagtgaaggctgtgcgcgagtcttttgggtctgccgctgctaaacgtcttagagacgagtttcttgaggggaaggtcagtcccgatcagatctactgacc

SEQ ID NO: 2601 - DNA, 1000 bp, Torilis crimson leaf virus
  misc_feature 1..1000: note = isolate RL5 genome assembly, complete1
  source 1..1000: mol_type = genomic DNA
ttaagtgccggtgtgggggttcctttcatctcgtatgggaaaagaacacaccgtgattggattgaaaaccctaccctcctccccgtcctcgcaaggatgacttttgatcgattacagaagatatcagaagccaactttgaaaatatgacgcctgaggagctggttcagaatgggctctgcgatcctatacggcttttcgtaaaaggtgagccgcacaaacagagcaagcttgatgagggacgctaccgccttatcatgagtgtgtcattattagaccaattggtagcccgggtcttgttccagtctcagaacaagttagaaatagcgctttggagagcagtaccctctaaacccggatttggcctttccacagacgatcaaactgaaaattttgtagattgtctagccaagcaagtgggtgagacggctgatgaagtaataaagaattggccacaatatttaattcccactgattgctcaggcttcgattggtcggtctctgactggctactcgaagatgacatggaggttcgaaaccgcttgacccacaactgcacccccctactaaggaggctccgtgcaggttggctcaaatgcatttccaactctgtcttgtgcctttctgatggcaccctgctggcccaaacaaaacctggggttcaaaagagcggatcttacaataccagctcttctaattctcgaatccgggtgatggctgcttttcatagcggtgcatcttgggctatggcgatgggcgatgacgccctggaaagcgttgacacggacctatccgtgtataaagatttaggctttaaagtcgaggtttcagcacaactggaattttgctctcacattttcaaggagagaaacctcgccattccggttaatgtcaacaagatgttgtacaaattgatttatgggtacgacccggaatgtgggaacgctgaggttttgtcaaattatctcagtgctgtggtctcggttatgaatgaattacgtc

SEQ ID NO: 2602 - DNA, 1000 bp, Culverton virus
  misc_feature 1..1000: note = RNA-dependent RNA polymerase, nucleocapsid, and2R
  source 1..1000: mol_type = genomic DNA
caagtaatcacctataacaaacttgatagacaagattatctaacttatcaccagctctactatactctaaactttgtagctacccgatttgtgagctccactctacaatagatactagagtaggttatctctcaactggatcagagacctcatcgcgtatgcttgtgagtgttctaaattggttagtcacgacaagtgtactagctcctctgtacctctactttactgggttgagatttcaagacctatttgtgtacactccgatacccgtaggtatcgaccaacataccgaactggccacattcggtgcaagtgattgcaccaacaccgccaacacggtagcggctacattttccattactccttcagagatctgctaccttagtgcatccttaatcacttgtgcatcactatactttctatatcaatcttggaacaccatgcataagtcagtagtaagaagcttagaggagatccgccggaaagcagtggagcaggaacagaagttgccccaggtgtccctgactggtctggaagatatttcagctcacctccagggtattaccaaagagctgaaggagatacgcttgcagttagaattattaactgatcaagtcaatcaacctcctactagattggcagcaaccgcaccacctttaccggcatctacaccaccagtaatttcttactatccaaacttaaatgtcccatgaatagtgctgagggataaccctggactgataacacggatttgaccatacaaatatgaattgcttcatccattgcttctctctagttattacttagattttagattctatgctttaccttactccaccacgaagctatactggtttttttagttgctattaatctcccttgtatttgttctctcccctgcttgctttttaaaaacttactatgccaactctaacaacactcagttcaaatccatcagtaacaaatgtgatagacaaattaactattacaaaagatagta

SEQ ID NO: 2603 - DNA, 1000 bp, Human respiratory syncytial virus B
  misc_feature 1..1000: note = isolate HRSV/B/Bern/2019,2
  source 1..1000: mol_type = genomic DNA
caaatcaacttacaacagatacttcaacatcacagcacaggctgaatcatctcctcgcatcatgctacccacacaactaagctagatccttaattcatagttacataaaagcctcaaatatcgcaatcaacactaaatcaacacatcattcacaaaactaacagctggggcaaatatgtcgcgaagaaatccctgcaaatttgagattagaggtcattgcttgaatggtagaagatgccactacagtcataattactttgaatggcctcctcatgcattgctagtgaggcaaaacttcatgttaaacaagatactcaagtcaatggacaagagcatagacactttgtctgaaataagtggagctgctgaacttgatagaacagaagaatatgctcttggtatagttggagtgctagagagttacataggatctataaacaacataacaaaacaatcagcatgtgttgctatgagtaaacttcttattgagatcaatagtgatgacattaaaaagctgagagataatgaagaacccaattcacctaagataagagtgtacaatactgttatatcatacatcgagagcaatagaaaaaacagcaagcaaaccatccatctgcttaaacgattaccagcagacgtgctgaagaagacaataaagaacacattagatatccacaaaagcataaccataagcaacccaaaagagtcaaccataagtgatcaaaatgaccaaaccaaaaataatgatattaccggataaatatccttgtagtatatcatccatattgatctcaagtgaaagcatgattgctacattcaatcataaagacatattacaatttaaccacaaccatttagataaccaccagtgtttattaaatcatatatttgatgaaattcattggacacctaaaaacttattagatgccactcaacaatttctccaacatcttaacatccctgaagatatatatacagtatatatattagtgtcata

SEQ ID NO: 2604 - DNA, 1000 bp, Mapuera virus
  misc_feature 1..1000: note = complete genome.1
  source 1..1000: mol_type = genomic DNA
caaagagtccagccaggccgatggttatgaatatgactcttacttagcacaaaatgcaaaaaccaacattctcaaaaggtggacagatgtaagcggggatgttgagccgatcccgatgaaccccgaagtgtttaagaggggggcagacctcaccaagcccacaaatcccaatccaggtcatcgccgagaatggagcattgggtgggttgggtcaacagtcaaggtcttggagtggtgcaaccccacctgctctccaattacagcaacatcccgatactatgaatgtgtctgtggaatctgccctaagatctgcccccgatgtgtcggagattatggacatgttgagacggctggacgcaaggattggctcagtagaggcgaagatggatcggattctagcagtaggggcgactgtgaatcagatcaagaatgaagtcagttcattaaaatcgatcactgccacaatagaagggatgattacaactgtaaggatcatggaccctggcaccccgagccatatgagtgcaactgaagtaagaagacagttgagtgacgtcccactagttatcagtggacccggtccagtcccccaacttgaccccagaagagacttaattgccttagatgagcttgctaggcctaaggttgtgcagagccccccggttgcttctcccgcaccctccatggcctcccagctaagtgatggcacccgcatcatgatccttcagatgataaaagaatgcgtctctgatccgcttgaacaatccagatttgaaactaaattgagcagctgcacaaccgaggaccaagggaaagcaataaagatggaaatcttacggagagcaacctaaaaactagctgacacactgctcaacatcaaccacccctgcaacccacccacatgcgcaaccgcagcccagagcacacacccaacaccgactcaatcaattaagaaaaaacataggcccgactggctgcaaacccagtcggaaccccggcc

SEQ ID NO: 2605 - DNA, 1000 bp, Bat Paramyxovirus Eid_hel/GH-M74a/GHA/2009
  misc_feature 1..1000: note = complete genome.2
  source 1..1000: mol_type = genomic DNA
agaacaaatcaagaagatccctgcaatggagaagaaactatcagacattgaaaagcttctgcttaaaaccaatactgcactctccaccattgaaggacatatcacatcaatgatgatcatggttcctgggaaaacagtgaacgaaggagagatacaaataaatgagcagttaaagcctgtaattggaagaaaagatggtgtgtacgacaaaatgatactcccacgagtagacaagaaaatctcacttgtgactgatcgtacacctctttgtgatgatttcaaagaagatccttacgtgttaaatgagaagcttatccttgaccccatcaatccaagcgtaaccaatgcctcggcgttcatacccagttacgacaatatatctcctgctgttcttcgatccctcataagaagcaatgtagaagacagagagacacgagtggagttgattgagttagtgaatcaagcaagaaatgattctgaactcaatgagatactcgcattagtcaatgacattatagattcaaatcagtctggtgtgtgattcccaaaatcactcaactaactcaacaaacaacacacaatacccgaagtagaaaacaatgacactagatcgctacataactgtttcgcagtagctgcaatagggacacatgtaaatcaccaccgattacacccaccaatctcaaatcacagctgttcacgcatctttactcactgcttaagcaatgatatatgcaagtataattaaacaaaacttagggatcaagcacgatccaacgccggagagcgacaaagaaaaaccaaaaccagagaaacaccaaccaatctcccaacgaaactaagaggaccccacaacagcgaaacccatccaaaaggaagaagtcaccccaaaacccaaacccgaaaagacaaagaccgtcccaccgctacatcagcagcgcaggagtccaaccagctgaggtcaagaggaggaaggaacagaagtagttctacggacgaa

SEQ ID NO: 2606 - DNA, 1000 bp, Measles morbillivirus
  misc_feature 1..1000: note = IC323-EGFP viral cRNA, complete genome.2
  source 1..1000: mol_type = genomic DNA
agcaatacccgaaaacgacccccctcataatgacagccagaaggcccggacaaaaaagccccctccagaagactccacggaccaagcgagaggccagccagcagccgacagcaagtgtggacaccaggcggcccaagcacagaacagccccgacacaaggccaccaccagccatcccaatctgcgtcctcctcgtgggacccccgaggaccaaccccgaaggtcgctccgaacacagaccaccaaccgcatccccacagctcccgggaaaggaacccccagcaactggaaggcccctccccccctcccccaacgcaagaaccccacaaccgaaccgcacaagcgaccgaggtgacccaaccgcaggcatccgactccttagacagatcctctccccccggcatactaaacaaaacttagggccaaggaacacacacactcgacagaacccagaccccggcccgcggcaccgcgcccccaccccccgaaaaccagagggagcccccaaccaaacccgccggcccccccggtgcccacaggtaggcacaccaacccccgaccagacccagcacccagccaccgacaatccaagacggggggccccccccaaaaaaaggcccccaggggccgacagccagcatcgcgaggaagcacacccaccccacacacgaccacggcaaccgaaccagagtccagaccaccctgggccaccagctcccagactcggccatcaccccgcaaaaaggaaaggccacaacccgcgcaccccagccccgatccggcgggcagccactcaacccgaaccagcacccaagagcgatccctgggggacccccaaaccgcaaaagacatcagtatcccacagcctctccaagtcccccggtctcctcctcttctcgaagggaccaaaagatcaatccaccacatccgacgacactcaattccccacccccaaaggagacaccgggaatcccagaatcaagactcatccagtgtccatc

SEQ ID NO: 2607 - DNA, 1000 bp, Human parainfluenza virus 1
  misc_feature 1..1000: note = complete genome.1
  source 1..1000: mol_type = genomic DNA
aacgaagagtcagcagccactccaaagaacaaccacaaccacagaaaaacaagatacacaacaaacaatgcaaacaacaacacaaaaagtccaccaactcccgaacacgacgcaaccgcaaatgaagaggaaaccagcaacacatcggtcgatgagatggccaagttattagtaagtcttggtgtaatgaaatcacaacatgaatttgaattatctaggagtgcaagtcatgtatttgctaagcgcatgttaaaatctgcaaattacaaagaaatgacatttaatctctgtggtatgcttatatcagttgaaaaatcacttgagaataaagtagaagaaaatagaacattacttaaacaaattcaagaggaaataaattcatccagggatcttcacaaacggttctcggaataccaaaaagaacagaactcactcatgatggccaatctatccacactccatataattacagatagaggcgggaaaacgggaaatcccagtgatactacaaggtcaccatcagtcttcacaaaagggaaagacaataaggtcaaaaagacaaggtttgacccctctatggaagctctaggaggtcaagagttcaagcctgacttgataagagaggatgaactgagagatgacatcaaaaatccggtactagaagaaaacaacaatgagcctcaagcatccaatgcatcacgcctgattccgtccactgaaaaacacactctgcactcactcaaactagttatcgaaaacagtcctctaagcagagtagagaagaaggcttacatcaaatccctttataagtgtcggacaaaccaagaggttaaaaatgtaatggagctattcgaggaagacatagattcactaactaactaaacatgaatctacaatttcaaccagcaatcaaaatcaatatccagagccaactcaaaaagctccctcaaaacaattaagaaaaacttagggtcaaagaaattttgcccggagaaaggaa

SEQ ID NO: 2608 - DNA, 1000 bp, Rice yellow mottle virus
  misc_feature 1..1000: note = from Nigeria, complete genome.1
  source 1..1000: mol_type = genomic DNA
gagctggtagagaaaggtctctgtgaccctgtgcgcttgtttgtcaagaacgagccacacccacggaagaaattgcttgaacgcagattcaggctgatctcttctgtttctctagtcgaccagctggtggagcggatgcttttcgggccccagaacaacaccgagatttcgacttggtggcagtggccctcgaagccgggcatgggtcttctgacccctgaacaaatccgtttggtgtgggacgacgtgttccagaagcaccaggcccaccctgcggctgaggcagacatatcggggtttgactggtccgttcaggactgggagttgtggtcagacctcgcgatccgtataaacagagggaatttccagggaaacctcaggagagcggctatcagccgctactactgttttatgaactctgttttccaactctcagatggaactctcatccagcaggaattgcccggactgatgaagtctggctcttactgcacctcatctacaaactcgcgcattcggtgcctcatgggtgagcttatcggctcgccgtggtgcatagcgatgggcgacgattcagtggaggggtggattgaggggggccagtccaagtacgccgcgctaggtcacacctgcaaggagtactacccatgtaagaccagagggcgcgagctcttggaattcaacttctgttcgcatttgatcaggaggggtcatgctgagctaacttcatggccgaaggcgttgtttcgctttctgtccagcaagcatgaggactttgaggatctgtgggttgagctccacacgtgcggggtgtggggccggatcgaacgatatctgcgtgggatagggcgtgtctcccacaaagatagccaggaagggcaagaaaaccaaccccaaccaggggcagcaaggaaagaagaagagccggcgtccacgtgggcgttcggcggaaccccagcttcaacgggctccagtggctcaggcctcccggatatctggg

SEQ ID NO: 2609 - DNA, 1000 bp, Colobanthus quitensis associated barnavirus 1
  misc_feature 1..1000: note = strain CqABV-UTus4531
  source 1..1000: mol_type = genomic DNA
cgtgcgcaatggcgcgtgtgatccggttaaactattcatcaaaggagaaccacactcgcagaagaaaatcgttcagggttttcttcgaatcattgcaagtgtatccctatgtgatcaacttcttacgcgtacgattagtgcgcgtcaaaataagactgagatcatgaattgggaaacctgcccgtcaaaaccgggtatgggtcttcacgatgaaggtcttgccaaactctccgagaatgctcggagaatactaacggaaggtcgcatcatggcgactgacctatcaagctgggactggacagtccaagaatgggagctggaggtggacgccaagaggcgtatattactggccgggattgatgaagatcacccaatggccaaactcttaatggcgcacgcccacatcgtcgccaactcggtctatgtggattcggcgggtaacatgtttgcccagacaattcctggaggtcaactctctggggattacaatactggatcatcaaactctgcgatgcgtgtaatcgcgactcaagctgctaggcttaaggtaaatcaagaactttaccttgagcgcatttcggctaaggagttgcttgtatgctcaatgggtgacgatacactcgagttggaagtcaccggcgtgccagaggtcttagaggagatcgggcatattgttaaggatgtggaattccatgagacactgcaagatgtagagttctgttcgcaaagatttaatgcggacggttcagcctatccagtggattataacaaaaccctttacagattcctttcgcacgctcccgacgacgtagagtactcctcctacaaggctcagctcatgtacatattccgacacatgaatcaggaggctcgcgataaaattgagcacacagcactagtccgggttgagcgggctagaaaattattctgtgagaaaaacaaattgtaagttaatatacaccatatctactgtgcttcgacatatatttggtagcttgca

SEQ ID NO: 2610 - DNA, 1000 bp, Linepithema humile polycipivirus 1
  misc_feature 1..1000: note = putative capsid, hypothetical2
  source 1..1000: mol_type = genomic DNA
tcagattcgagttatcgtgaagttcagcaaaattcttttattcccgcagatactagcatgttccggcatattgagttgacaatgccatatgaatatcccaccccgtggtatgatcagtttgcctggatgtcccgtagagtaactccctcgcgttatgttagaagtggtgacatttctttcgacacattcgcagccccccttacaaatgagcctcatggtgacaatttcttcgccatgggacttcgtggaaatcttgcagccacccaagaaggagctcagatcgagttcgagttagaatatcgagctgtggaagggtttcagttcgctgatccttaccttccaccagcatattttgcaagtactcatcgtgatctcctcattaatgactttgacaagattaagcgggttccagatccgactttgacttcagatggtcttagtaaaatcactaaaacaggttccaggactgtaagatctgtttcatctcaatctatagctcaaaggagaaaggctgatttgaagctagatctttctggaatagatttaggagaagatactgtagaccccgtgatgcctagtggatatggatctcgcgaacgggaatttactttttagagtttaggtcatttttcattcatgttcattttcagttttaaaatgaaactcttcatgcataaccatgagttggctaattacgtgacggttcctagttatgagcaatctaactccgaatatagaggtgaaactcttgacggccgggaacaagtagcgtgctttagtcgagcccgtaagattgaccaacgcaattcttgtatcagaaaaaggagtttttatccctagactcattgtatgtaatgctgacctagtcaagtcttaggacgcgctgtacaataaacgtctatgcaacgtctcggtgggcgttgcattcagggtgcagtctaacctgcattactcccttgatctgtgtcggagcagtagaattgtgggcggactaattaac

SEQ ID NO: 2611 - DNA, 1000 bp, Polycipiviridae sp.
  misc_feature 1..1000: note = isolate nut158pol1 genomic sequence.1
  source 1..1000: mol_type = genomic DNA
atctaatatggtaggtagtatatttggacccgcaggagttttattctcctcaatcgcttcgccctcggatttcgcatcacaatttaatacaaattatcaagttgaaacaccatctggcgcctttgtaaatgctcaagatggatcaaatattaatgcagatagttatgtcggtagcaccagttagaactccagcacaggcaccattacagcctatgcaaccaaatccccagacagcctgcggaactttggatgacggatgtgtttataacactatggatattcatttaggaggacaacaacctaatgaacagttttgggctgcacgtagtgaatattgtaatcaagtacaatggaccactcagcaggccataggaacgaccctggcaacgattgatgttttacgttattgtggagatgatatgaataaccctgacaaccttaatgcaaatggaggattacaaactagatccagagcatatggtagagtaatatggccaagatggttaattacgaaatcgtcgacttatatctctgtctctgttaaatatgacttctggcttcataaaccagtaggtccagtagtaggaggtaagttgaggatatcgtataatcctggtataagaaagaattggaatactgtgctaaatagcattggaagcactattgattcctatcaagattctctgttcagagaaaatttatgggaatgggatgtaaaagcttctgatacttttagtgtcacacttaatggcaatataccaactaaatacattactagtaccataccaagtacaagattttcagaggttgcagatccacgcgagtgttttccagcatttatgacaagttttggaacgttagagattagtgttttgaacaattatgtagcaggttcagtttttgctgattctgtatttatatctatttataaatcatttccgtctttacaagcttatatagttcgtggccaccgaaatgaccaattcttaactgcaattta

SEQ ID NO: 2612 - DNA, 1000 bp, Sapporo virus
  misc_feature 1..1000: note = isolate Hu/GV/0003/Sollentuna/2016/SWE, complete1
  source 1..1000: mol_type = genomic DNA
aagcaatggaaaatggggcttcaccatcacacctccttccacgcaggctccagagggctcgtggcaacagagctggtggttatgccgtgggtatggtgattgttggttcggcacaccaggtcaaccgccacttcacggcgcttggcacaacttttggctggtccactgctccttatgagccaatgcggtgtgcgtttggtggtgtgcacactggtactgacacctctcccaaaattggctattattgggaagtcgggtccgaccaacgtgggcccatatttccccatatagtcaatcattggccagattttgctgtgaacaacacctactcatggccaggctcggagtttgtccctcaaaacgccattgtcggtacacttgtctcctttgctgacaatggtgatgtgtccgagaacgaggtggtacccgcatttgcggttacaatgaacactccttccaccagcactcgaggcaccgtccgtggctcatttgacccatccaccatgcatttggtgcgtactaacagcactggacaaccatctgggtggccatctggcccaaacaatgggaatggatatttcacaccaatgtggggacatggtcagggcaatgctattaatgataaaatcaccaacatggagggtgtgaattacaccttcggaggctctggccaaaacaacattgtcttgtggattgagaggatcttctccgaccaccccggaaaaacaaccctgtactcatctcagctggacagtactgccacaatatttcaatctggtcctgtcaacatccctgagaacatgatggccgtgtataacgtcaccactaacggagctgacttccaagttggcattcgacgtgatggctatatggtcacttctggagcaattggaacacagcaagagcttgaccccgacacttctttcacttatgttggacttttccccctttctgcctcacttgttggcccacatgggaatgctggacgggcacacattgc

SEQ ID NO: 2613 - DNA, 1000 bp, Nilaparvata lugens honeydew virus-1
  misc_feature 1..1000: note = genomic RNA, complete genome,1
  source 1..1000: mol_type = genomic DNA
tcaaaccttccaacctttcttagttttaagttgtatcgattgtatttgtgtgattattcataataattgcccatcttttctttcgcaaatacatctcttctctaagtgtgaatgtttctgaacgttgtatgaatcagtttttctcttccaatttatcgaacttgtgtatatgtgagtgtgaactaatttttgattctttcttttcgtttcgatgactaggactgattaccctaccattgatcctaacaatagtcacgacgggatagactccgtgcagtgtttttagaaatccggttggactccggtagcacatacgatgacaccacactagccagagtcggcgtagtcgtattgtgttgtgttccctactagagacccaaagcagcgttctcttattcattatattcttgtgattctgaaatgaggtttgttgatttgcttgtggtagtgttgattgagacccgtttccggtaagctgcttggtatcgtgatggcatagtgatgcttgatctgaaatcacagactcgtgttgtcgcccgctacataatttaaacgtattatggaactgctagacatctactggtcaaatgggagaagcaacatgaggtttgtttcttttgtttgggatcacggataaacagcttttaagaagtccctgcgctccctagcttgcagctctatagcgataagtcaagtgaagttagtaaactcttcttagctggtaatgagtatgtgctatatatcctggataagtcccccccagggttgatgctaatggtaggtgcacaacaggcaggtgcacctttgtcgtgggatgtgaattcgttctgcccgggcaccatagaatgactagtgagtagcaatcgatgtagtaccctttcaatccatatagtctcaaaattacctggcagttgttttcaacgtgaacacaactgctttcgttctgcctaatcctatattttaaagtttttttttaaattttgtttgtttgtgttacaat

SEQ ID NO: 2614 - DNA, 1000 bp, Iflaviridae sp.
  misc_feature 1..1000: note = isolate ybb117ifl01 genomic sequence.1
  source 1..1000: mol_type = genomic DNA
aggtttattttgaagcgttttgttcgattccgatcgaccatagaaaaggtatattatgttcgcatctgtatcatcgcttcaaatttaaagttttaaggctttttattattggagaacttttgaaatttatttggtgagcctttagtctttgagttcgatacttagactatttaatttccagatatctatcgtccaagtagaatctgaggggtttaaagcaggagccgtgagtcagcccagacaagcgtagtactgttttattccgaagtttgcgttgagcgaccggcgtcggtgcgtcaaacaaaattccgaatggagttgtggttcgagcgagtatctatacacgcggatcatgtgggaagttttgcttactgaagttttcaatgatatctaacattggccctcggatcaacctaaagactggaagtacccgaccaacgcccagctagtaagagtttaaatactcgcgagcagttagttggcaatgttatttggatttgtttatgaatgtttgagactccgtacctatacgatgcgttgattaccatcagaaaaagctctagtaatgaaataattatagcggtttcctggactatggtgtaatttcagttacatagtgactactttacaatcaaagcctaaacaggcattactataaaagaaccgtcgtgttagcattgtgtttggctaacatcccaacgatagttggcgacattgaactgagagcaacatacgttaccaattcgattatcgttcaaaaagctctgggcaggaatttgaaaaatcaaacttcctgctaaagttaaacacacaaaccttattttattttcctaatttaacgtttacgttattttatgtcagttgttcgtttgatagaagaagttgaagaaaacagtgaagaaatacatccgtttcaacaacgattacaagaagcaagtacaaatttccaattacgtcgatcaaattatccaataggcacaacaagattatacaatcaaca

SEQ ID NO: 2615 - DNA, 1000 bp, Iflaviridae sp.
  misc_feature 1..1000: note = isolate rfb094ifl1 genomic sequence.1
  source 1..1000: mol_type = genomic DNA
aggttatttaatcggtgacagactgtgctctgcacttattatttagcataacttgtacatatataagaatctaattttaaatgaacttacgaaaatcaacagtccacctgaagattgattaggtttagtatagaggttttaaatgatttcgatcatttatataaaagatgtattatattcgtatctgcatcatccttttatttttaggttaaacagccttggtgacggcttgagttctgactatgtacacccacgtagccgtggtaccgcttttcagaatccaccctggcctctctcctttttaagggagtttcctggagagagtaatttgcaccgccagtatcgatcttacgataactcctcccttaaaagcaagacatagtttgagtatatcagacaaacgttatattatctagttgcatcctcaatgaacaaggtattctgcatccttaactcgcaagggttattgaagcctcatatggacgagtccaacccatatgaagtgtccagttactttatttcgcctctcgcaagggaaaagtaaagtaatgcactaatattgaccttcaaggttgttggttattattagtagagcctttgataatataatcgtatttgaattctcctaaatattgtgtatgtaaggcgctcacggtcccgttggggtttatgcatcatgtcggccacgtgagtatgaagtggttctagtttactatgatactgcaaggcaggccggtgtggatacaccaaaaaccaaaacataaatacacctttagccatcttttgccgctttctgcgagttttctgcgagttttattattccccaaagccattattagctaccttttatgtcaacagtgcgattaatagaagaagttgaagaaaactgtgaagaaatacatccgtttcaacaacgtttaagagaagctagtgcgaattttcaactgcgacgatcaaattatcctattggaacagctcaactttatagacaaagagaaca

SEQ ID NO: 2616 - DNA, 1000 bp, Picornavirales sp.
  misc_feature 1..1000: note = isolate H4_Rhizo_43_scaffold_10 hypothetical2R
  source 1..1000: mol_type = genomic DNA
gcagtgagcaaattccattgcagtcgaggtttagcctcgccattcgtcttttaaaattagtttcttttaagatgctagaagataaaacacggtaaaaaattgtatataacgatataggtctggagtatagtaatcaatgttaattcgttgcattggtgataacgacatactgtatactcccaactttcgcgccggacgattccggatatattgtacgtgataataatgtcttcttaattgagactgactttttaagtcaattaaacaactctaccagagcctacgcgttctatctctgacacgggatagttctcagggttgaagattccataggtcttcagcctgccgaaactctgtgctgtaatgtagggtcgactaccatctacctatttaggtttgaatcggtctgagataatttcaatacacgaccggccttaaaatagttcttcagagccaccggatggttagtttagatgtggcatagcgaaaaacgcagcacactgatgatattctttcaaacgaattttgttccctcacgatcggtgaggacctgcttcaagcaggagataatggatttttgcttgcccctgttatattagggcaagctcaagaaactcatgtacatggacctactattgtacgtgattttacagattgggacgcctttaatttgtggcaggtcccagatctttattatgatggtccggaagcagatttagctgaacgagatggttttaataactatcaaaatgaagcaaatttgcgacagactataactaccgtcattgaaaaagatctacctccttatgaggtgttgatttttagtgatgaagaagaaagttctcgaactttcttttcctgtgagtcggataatgaagggtacactccttcgtcttctgattcacaagaacagatgcctgatatcatatatcagatgccctttacagctacttctatacaaaaagaacctgaccaggttcagcagaagttagttaaaagg

SEQ ID NO: 2617 - DNA, 1000 bp, Picornavirales sp.
  misc_feature 1..1000: note = isolate H4_Bulk_Litter_22_scaffold_31
  source 1..1000: mol_type = genomic DNA
ccttcaatagaaaatatgcgtaagttaatttgtatgttttaattttagactaaaaatataaacattctgtactatcaagttagtatatgtaaaatctttatcagacgatcaatctgattataaaagatttgtacatataaaaccttgtgtttgtacacgcttatgacgtgagaaagtgcattgagcgatatcaatgtggatagcttactatagctatccgttagtcttgaacgatcaaattcaggagctataaatggacattagtccaaggtctttaatcatgtaggaccttctttttaagtaaaggaaacatgagaaccacacatgggaagttattgccctcatgtgagtccagctaaatagtttggcattaggtaaagattgcagtgagcaaattccattgcagtcgaggtttagcctcgccattcgtcttttaaaattagtttcttttaagatgctagaagataaaacacggtaaaaaattgtatataacgatataggtctggagtatagtaatcaatgttaattcgttgcattggtgataacgacatactgtatactcccaactttcgcgccggacgattccggatatattgtacgtgataataatgtcttcttaattgagactgactttttaagtcaattaaacaactctaccagagcctacgcgttctatctctgacacgggatagttctcagggttgaagattccataggtctttaacctgccgaaactctgtgctgtactgtagggtcgactaccatctacctatttaggtttgaatcggtctgagataatttcaatacacgaccggccttaaaatagttcttcagagccaccggatggttagttcagatgtggcatagcgaaaaacgcagcacactgatgatattctttcaaacgaattttgttccctcacgatcggtgaggacctgcttcaagcaggagataatggatttttgcttgcccctgttatattagggcaagctcaagaaactc

SEQ ID NO: 2618 - DNA, 1000 bp, Picornavirales sp.
  misc_feature 1..1000: note = isolate H2_Rhizo_32_scaffold_97 hypothetical1
  source 1..1000: mol_type = genomic DNA
acaagatagtggagcttctcaggttagaccgtgtaatgacgttacctgagtgatatgtatcccaactattgtttataacaatgaaccgggttcttggtatggtgtgtgagggtcagcctcaccggagtaatgaaccgtacgaccaagaactgctggaatgctttgttattcacacttaattgtgtgcaattgtgagttgccatacaactcgcgtatattaaattttacttgtttttggataaacatgataacacatatctttcattccgattatcccatgtcggggatatgatagaataaaggagtgtacttgatatctatggcctggagctagtatgtccaggaataaccaactatcaaatacggcaggaggaattattgtctagccgacaatcctctgaagatttaggttaccagccaatttagattgaaagattatgacccagaagtcgctagagctactaagctcgcgcacgtccgtgttttacaacaacaaagagaccagttcctttctcataggaaggagcaggtccaagaatttggagccgattttgtcttggctcagttcttaaataagactgtagaacctatatctacttctccgggcgatataccagaaaagtataggagaggaaactttccaattcgagataattatttgtctttatcgttacatgatgaatataaactcgatagtgactctattcgtcactactccttaaacgaccgaagctcgaggagtcaaaaaagagctaatgataaattacgtgaaaagtatgatcctaaatacttagtagcagtggttcgggtgctcaaaaaacctgaacctaccgaagatcagttacgtcgtcttcgaagattttggaatctccttgagggggttccagaatttgatattgattcactaaaacaatatttctttactgtaaatcatattttgtttaagaacaattggttttccaaagttgaaacttggaagtcaagaagtttctttacattt

SEQ ID NO: 2619 - DNA, 1000 bp, Picornavirales Q_sR_OV_041
  misc_feature 1..1000: note = putative polyprotein (Q_sR_OV_041_gene1)1
  source 1..1000: mol_type = genomic DNA
ataggagatacataacaaagaaaataataaaaattcttttgtacatatcaaaggtattggtttgactgagcacttggcgagcgagtgcaaggttgcaatgtcttaattcacggttttgaacatgttccaccagggatcgtacctgcatgttttgtcgccttaagtggcggactataaatatactatactcaagtggtgtgagtgtatgtttgtagcgcagttcgagagccgaataattcttaatattgaattgtgatgtgttatgttttgtgtagtttgtattttaattgtatgcgtagtaccaaacgctcttttgtgtgtttatgcgatcacacttactttgttggagcgatacgatcaacgaagttaatgtcttaatctaaggcctttgccgcatgtggaagaaccaatccggcatcgtattataccccaaccgctaatgaggttggatgagggcaaaatcgtagctcatctaccttctacccttttaaaatggaggagagatgctatactagggccactacaggggcccgacccccaaacctacgtggtgatgtgtgactttggcgagatggtaacttgccttgtccggtaccatatgagctacttctacattagatatagaatgacgcgtttagctgaagacccttagtacctccggtgaaagttgtgcccggaatgtggttgaatatatcttgtggttttagagtagttatgtatgggctggaactgttgtacacactttgatgagtgctccgcattttccctttgcgaataagagcacaatgattctatacgtgaagctgatacattttcagagacttatcgtgaatgatatacgtttttgtagatttgaagggccctgaaaaggtttaccctagtctgaattcctatgtcttagcggtttgagatggaatgttgttgcctatagtacgtaaggttgaacattgccataggcaatcctcaagggattggcttggcgatgtgggaataaacttca

SEQ ID NO: 2620 - DNA, 1000 bp, Picornavirales sp.
  misc_feature 1..1000: note = isolate H1_Bulk_28_FD_scaffold_4 hypothetical2R
  source 1..1000: mol_type = genomic DNA
tgcagtaaccgctgcagtgaccagtttttaggtccctatagtttgacctagaggtaatctaacagcaaatagggattctccgttaaatcggaggccagctaggaggccaatctttgtggaagccttataggtggcacactggttgactatcggcctatccatgtggaagctatcccggtttcataccggattctatagtggcatatgtgtagactaggctcgtaatatccaaggaggcctgttgcggtcttaaccgtagcagactatcgtttgttgttcttaggctctttgcgttctttgggaagttttttctttgtccatttgacccaaaaacccagttcggcccttatgttatgttgatccggtcctttaggcctttgtgtgtgtaccacgtagtttaatagtgcaccttatcgtatggataccaagtgcgattcgtattttaagattggaattttgcgccacacgtcgtatgttgcttcacgtgtcttgtagtgtttatacttagacattattcgtagtttaataagtagagagtgagcctcgatttattcgtgacactgctctcacaatcattgactaatatacaggtattggaactatcttcttatgtttcagtaggctgatgtctttgaaatccctttttatgggtgtcccccacttttaggctgtcagcgatcttgctgccaggcaaaattatagagggctccgattgggtgaattgtgaattaccccagtatgagtttaaacaaatacccgcacagcaccatctcaaattattgatggagcgcaactcggtcgccttgtaaccgatacccccgaaacaaccgcgaatggtaacaattccctggtaccccccccggcccttatcaagcacaagaagtctgcagaagaaattaaatttgaatctgtagatcctactttatttgatgagtggattcaaaatgttgagattgagcaagaacctccaaaatctattcatagattgcggaaatgtttg

SEQ ID NO: 2621 - DNA, 1000 bp, Barns Ness breadcrumb sponge aquatic picorna-like virus 2
  misc_feature 1..1000: note = isolate1
  source 1..1000: mol_type = genomic DNA
ttgtcctttttaaacataaattagattgattcttctcttttgagatgtagaactatacctggttactaatttaagtcgattttaatttcattattttgcatttgttttagagcgcatgaagctcactgaataaggtttcagtcaattccttttcagctcttatttatataagatataaacattttcattattttggaaaataacgtaataaatttcagtattttatatgtgtgtaggccggtaccgaatggataaatccgatgtcctgatcattatataccttattgcttgtagaacactatatgaccgaatttgaagaatagggttaagaaagttccccgttctatcaataacaataaaccacccttcatgagaaaaaagttacttacagaaaataaacgaattattggtggtaatattgacaacatgggttttattttaaaagaaaaaatggacccatcctccgcaaaggagacgcgacgaattaagtttcgacgcaaaaaaatacaacgagcgcgaagcagctcgcagaccttttaaaaataataaggtttggaaaaattcgcaaaaatggaaactagagtttgaaactcttcctgaactggatatcatttccgaagagtcctatcagccacactttggcttagagactatttcagcagcgtcattttcgattgacgctttggcaaaatttgccaatattgatattccagataaagttttaagagaagtagaaggagttattcttcttctagtaaatctttcacaacaaagtacaccattgggtgtcattacgtcagttttgacttgggctcaaggtcgtaccacaaaatcactttttaaaacagtgaaaggatttgttgaggaacttctcgtttcaccacaatcaagcgcaaccccagattggttggattgtcttcgtgatgtccgccaaaattggcaattgtgtaagactaatagagcattcaaacaagtgtcaaaacttcttggttgtctcgtc

SEQ ID NO: 2622 - DNA, 1000 bp, Picornavirales sp.
  misc_feature 1..1000: note = isolate H1_Bulk_30_scaffold_14 RNA-dependent RNA1
  source 1..1000: mol_type = genomic DNA
gatgatatcctctccttagtgaaagtattctaccgtttgtaattgaaaattgtaaagttggtaaggtatgtcggattcactggtattttaatacctctaccgctgatcgaatggtgtaagatcagggtcatgcggggcagtgccgcaatgctacaccatgttcaacccttttgtttgacgcccccagggcttccgaacacacatggaaaaactaaaccccccctcctctttctcgattgaagttttgaacagagtaagcgctctgccaaatgtggatttgactgttgatggcaaaatgctcccagttgttggttcaactggcggtggtcctcgcaagccaaagttgcctgccaaggacttgtgcctccgtgaatgtgcacgtgaaggagaaaggaaaggtgcagtgaacctgaaagagaaatctagtaaggccttttccaataggggaagcgttgagccggtgggttttactcaatcccgtttgaaagcgaaagcaagtaatagggagcagagtcttcaaaggcattgggatacgtcgggcattactgccccccgtcaacatcgtgaaatgctgcagcgtttagctgcagagagacgcgttgttgaagaatggaagagcaagggaaaagttgaacgtaagcgagagattctgcttaagcgtgataagcgttctggcgttgggattgagttccagagaggtaggtttatgcctgcttcgccggaagatttgttgcctgatgcagaagctcaggcgaggactgatattttacatgcgtgcaccgagaataaaatgccgtttgttcgtgatgttcgtgacattttgcacacatctgcgatggcacacaggatgatgactgagtatggcgaaggtgaggatcacagtgagttatttgagtttttaccaaaacatattagttccaagttgaaaccccgttcttttgagttacttgacgttgaatggcagtctggtaaggttttaccagctgttgcaggagtagcc

SEQ ID NO: 2623 - DNA, 1000 bp, Auricularia heimuer negative-stranded RNA virus 1
  misc_feature 1..1000: note = isolate CCMJ1222,1
  source 1..1000: mol_type = genomic DNA
cagtggcggaagtccgacaccagctcggccaggcaccgacgcaggcggtgatgaatgctcttgcagctcgcggggagaccgcatcccagacggccccgacgccagagtggcagcccgaagagactcgcgaggctgacgacgaggacgacgcgttccaccacccctcatcgaacgcggacatgatggagaggatagagtcgctgtcgcagcagctcgggagcctcaccgagtggaagtcctccatcgaggagaagatgcaggccctccataacgatagcaagagggccgcggacaacgcctcgtcgttcgagagtcgcctcaaggaggtgaacaagggcattcatagccgtctcgaccgcatgtcggaggccttagagagcctcgggaagtttgtcaacacccagcggcagatcctgccgcagcgaccccgcgcgccggaagcacaagcgccagcgtccctacctgaggacgtcaaggtcgaggtcatccacccggacgctggctccctgctggatgcgcctggccgcgcgtcgcaccaggagcagctgctcccgaggtccctacgtcccgcgccgaaagcgcctgagacgtcgaagaggacgacggccgaggacaagaagaagttctcagcagacgctgcggcggctctagcaactcgccaggagtcgtcccctcgcgcccgcgccgcgggagcgaagccgttcgaatccacttcgaggcggaccgcgcttccccccccgcctccccctatcgctttcgacgactcctcggacgaggaggacaaagaggaagtgggtgcggtcgaggggtacgacgaccttgagtgagctacgccctgccttccgtgcgtcagcgccacgatagcagctcgagaatgtacttgtaagattagacgcttgaggatgccggcctggacgcgcctctatcactttgatgatctcgccgcttagaaaaaaccaagagacaaatcgatagatattgtctctggtatctcgccgtg

SEQ ID NO: 2624 - DNA, 1000 bp, Auricularia heimuer negative-stranded RNA virus 1
  misc_feature 1..1000: note = isolate CCMJ1222,2
  source 1..1000: mol_type = genomic DNA
agttgcttgttccctttccgcagatgttaaaaaccaaggagacaaaactgatgattgcgtcttggttgaacgctcagcagccgcgcgccgggataagcatctccggagggaacgagtatgtggagcagtccgacttcgggtccgagcccgctctgaccggccagatagatgacctcagcgcgatctacagcttgtaccagaagcctaacaaggtcatcgtgggggcggacgtactgccgaaattcgcgcactcggtggatcaagacgctcctcaccccgcccctcatctctggaccgaggatatccgtgctggcacctggcatcgtggaggtctaaccctggctcagtgcgacttcccgaatgtcgatgctgttcgacgagagctcgtcaagcaaaactcttccgagatggagcattggaccagaggactgacagcaattcgcctcgtgaaacgcacgcacgctctcgtccggaagattcacaacctgcttaagagcactctctgggccttgatgactcgcgtgtacatgaacagcacgacggacgctgacatccatcgtctgctcgaggagaatcgccttgagtctcactccctggcggagtacacgacggcgatcaaaggatacacggagcatatgcacgagatggtaacgacaacctcagtcgtagtccctcagtctgctcctccgccgtcgtctgtctcctcgttgtcttccctcccgccgcctgatgcgtactcccccctccgaggggctcctctcctccctcacttccaggagcatcgcaaccgggcctcaacccccagcactcctcgagctcgctaagatgatgtgataaggcgttgcgtgctctcgttagaggacgctcgcgtacacatctgatttatgatctgttagaaaaaaccaagaggaacaaaaatgcagctgcttggtctggtaccacacagcgtgagacaaaccgacaagcattatcgcgtctgtcgatcgcgcctccggccact

SEQ ID NO: 2625 - DNA, 1000 bp, Picoa juniperi mycovirus 1
  misc_feature 1..1000: note = isolate ANK_VIR-89, complete genome.1
  source 1..1000: mol_type = genomic DNA
gttctgctccccctgatgagctgggaccgaaataagctggacttatcggggtttagactgttgtccttccacacttcggtgaccaggatcgacatctgcttagatagccagatagtgcatgtgtgttcgagcatcgtttattcgattggctcagatgttcacaatcacttacaaccctatctatttgatcactaattccgtaccacccgtagcactaccgctaggtaagcgcagaacatcgaggttgtcccagttatgggcgtattggtaggggagtcactgttgtctatgacgcatcgaactcgtcccagcgatccattaccctagggaacctaactgcatgcgaaccatcaggttttaagctatacatgggtggtaggttatattaaatagaggtatcagtgctgaccgtctagtcctcagtatgacgttaaactactcaccgtctgtatcttgggacattaaactacaagtaggtattctagcgagcatgctgatccggcactcgtagaaaaggaggttcgcaaccttggaacatatctcgttccttaaccagtattgaataccattccatccgttgaccggggctatacggtccatcagtgtaattagtataatagcgagtaatggacatgcggtttaaacttggatgtagaataagtagataactgctttctattatggacgggctcacctactgtggttacgttgttctgaaacatgttggttctaaatcatgattggttcagtcttcttaagcacttacaaagtgaccgacccttccccataatatgttagatccaaacagttaatcgaagtatctcatcgacataacgattaaaaatcgtgtttaaacttagcataataaagttactttaagttatatgaacgcgcaggtattttgatagtttatcctaaatattaaactatctcggccggcttgttgtttgcggggctagaaatacgaagcaaggatcaccaaaaacttttttactcaatc

SEQ ID NO: 2626 - DNA, 1000 bp, Wenling crustacean virus 5
  misc_feature 1..1000: note = strain WLJQ103138 hypothetical protein 11
  source 1..1000: mol_type = genomic DNA
aggtttgcacatttgcatcaagtcactcttgctctccacttgtgttaatccgattgattgttaggaaaactgaaatcgtccagtattcatccccctttgtaacatatcttgagtctctcttgagttccttagggcatatgtctctgacgtccagatacgggattagtagtgttttccctgaatctgagactaggcccggaatgggtagacctacaccttggtggatctcatatgcttgtcacgctactagctgtcttgccgttgagattggcgttttaaaagagaattcccaacccccaatttatccctacctatttagggcgatgtatttgtgaaagcttgcatcgccaccattttacacacctttttgattagcaaaaagaccacacatgaaatatcatcttgttgcactcctatgggtggttagtcttggactagcaatttgataattttcatcatacactatgtttacacattttactttgttcgtctacacatttatatgtttgttttcgttctgagagacatttagtgcagatttatttgcctctctaatacatgttattaacttttagtctgtatctttctcttctactatttatatttcctttatcttgttttagaattgacgctgtagagtggtctcattccccttcagcaagtcttttaagacatcctcctactatcgatgacgaaaattgtcccccaagagttaactagttaacgacactcttgggtactgaagttccgttcgattgtaagacctagaagcctgttttatgaatactatcttagataagaggcgttagaattagtcattgattagtttacaaataacgttagatgcaagtaggacctacttgtatactattttgttgtgaataatcaaagactctttgctaaaatctctcgactgttagtccatttcgtcgcggacaactaagataagatcatattacaatgctgaaatttaactaggcatgtagagcgcacataccgt

SEQ ID NO: 2627 - DNA, 1000 bp, Beihai picorna-like virus 52
  misc_feature 1..1000: note = strain BHNXC41485 hypothetical protein1
  source 1..1000: mol_type = genomic DNA
taggtacttggaaggaatcagatgattagctagaaatgagtctgaccccgatagatttcgggacccaacacttgcgaacttatgctttaattcgcagcatgtagggaccgtggacttagtcttgtttgttctgagtgaacttacaattctttgctccccctcatgtaggaagaaagcaaaacgtagaggtacagtttctcctattaatgtacagaagaaacgaaaattctcaacgatggtattgactatgtcgaatccatgtccaactggatcaagttgggattttgatgggcttttagtttagccctttagtacagtaaaactacagcaaggtttgattagccttgagaagttcaattaatcacattgtttattagagaattaattattataaaactccagaaaaatatgtgtattattagtgtagagttagcatcactcattagaagatgccagttcgtttactgatcactcatccgaatagaaatagatatgagagaactatgtcctaattaaggatgcgtcaataaggtgctggagatgctggtagatggaaaattgtccgccagcgacggctatgcttgtataagctccctggtaaatcaagtgtagttacctcatctttgcagtacggaagtaaactgccgaatttctttcccagggtcgggaggggccctagcgggcacctcgtctgatctcaggactaaagccgcttgagacgacattctttttcaaatgcggatacccgtatcctcgtgagacctttgtcaattaagttcagttatttaacactgcgcgcattgatgatgaaactcaggaacggattctattcttggatcgtaagaaagtctgttttaaataacaatctcctggttaacggtgattaagcctggggtcgccttgtggttttcacaatccccccttggggtattgtgttccgcaaggctgatctttcaagtatcagccgtggaacattgtaccctcccactttcatgagaat

SEQ ID NO: 2628 - DNA, 1000 bp, Goji berry chlorosis virus
  misc_feature 1..1000: note = isolate CY1, complete genome.1
  source 1..1000: mol_type = genomic DNA
ataataatggccatgttttagcttgtcaattttggttgaattgttgtgttgcaaataagattgccgttggactgtcatctgttcgttttaaaacacaaactgggagagatagtgtttttacgatgctaaagttttctggtgcgttgcagttttcaaagtatgaacgatttccaaatggtgcatcagtgagtcttaatacccctgctatctttgacacgttgtgtgctattgctgctgctgctgcttatagagatagacttttggagaaaacccatgggcataagatggataaaaggaaagataagattgtggaggacttttctactgctaattggtcttataatgattctagtactgcttatcacaagtctgtcgtgctactcaaatcacttttcagacaaaggtgtgttggtagaaataaatttgaacaatcttataatttaaaatgggtaccagctggcacaccaattttaacacttggtgatactcctacccttggttctcttaatcttgctttatctacttcttgtcttggactttggatggagggggcgtttctggttagtcaagacagattgactgatacttttaaatatggtgataacactttaatgtttccagtagatccttgggatactcctgttcactgtgatggatttctatatatccctaggaaaaatggaaattttgatgttgtaccgtataaatataagtgcagacagtttgtatttggagatatagattctaccattcgaggtaccagatctgatatgcttgctttcattgattctgcactacaattttataagtctaaggaaggagatgaaatcgaatgtcctggttggctcgatgttgtaaagaagatacttggtgacaaagccgccgaagaattacatgacacacacgataaggaggataaaactgttaaaccaccgttgggcgataaaacaactgaaattggtgaaacttctggtggtgtggacactgaatcataactgat

SEQ ID NO: 2629 - DNA, 1000 bp, Brejeira virus
  misc_feature 1..1000: note = strain BrMS-MQ10 nonfunctional hypothetical protein1
  source 1..1000: mol_type = genomic DNA
ccgaaaccgaacttgactgtggatgcaaccaaaagttacttggcgttgcagaccattgtttatcacgaaaaacccatcaatgctatgttttgctccattttccgtgagataaaaactcgggtcacattgtccctaaagaaacatgttaagatcttttgtgatatgtcagctgaagattttgagaatgtgttgaacagagacatacgaccgagatcgttgtccccttttctcgagaagttggaaatagacattagcaagtatgacaaaagtcagagagaattggcgctcgaattcgagtgtaaattgatgtcgtattttggtgtcgacgcggatatcgttgaattgtggttcaatgctcacgtgttaaccgaagtgtatgacaaaaccacgaagatgagagctcttattccgtatcagaggaaatcgggtgacgcatcgacattcattgggaacaccttgttcttgatggctgtcgtgtgtgatctggtgcctgtatctgaacttgagcttgcattgttttcgggagacgattctctcctatatggtcacgatatggatgtttatcgtgattcgcaacatttcggtttgaagttcaatcttgaaattaagtttttctcttttgaaatgtcgtatttttgttcgaagtttctgttagttgtcaatgataaatggacgtttacgcccgacccagtcaaattcatgactaagctcggtcgacacgatctggttaatcctctacatgttgaggagtaccgtatctcattcgttgacactgttagaaattatcgcgattatcatgtatgcagaaacgtggcgaaggctttaattgagcgttatggaattgtgactgatcacacatcttttttgatgtctctggacgatatgacttcaagagaaaatttttctctgttgttttattcgttgtcaggtgataaaatcgactactctattactttcaataaagacttctaatctacgagattcgttcatataagttaaa

SEQ ID NO: 2630 - DNA, 1000 bp, Shahe heteroptera virus 2
  misc_feature 1..1000: note = strain SHWC01c3694 hypothetical protein1
  source 1..1000: mol_type = genomic DNA
gcacatttttctgattgccctttctttgggcgtaactcgttggcgccatcgtgaacaaatttcgaccgacgtctgcctgctacgctttgaagagaaggtggcctcaattcaatgcttatattgcttcagcccgaaacgacatactcaggataagccctgtttattagtgggtcgttgtaatttgagatattgagttgtggtgtttaattgtctcaattaaactgtaaatatttttgttttcttttgttttgttcattttattagtacaatagttttatttttcttttgtttcatgccggtacctatccgcgtccgatgtgggaaagcacttcactagttgatcttagctttataaatctatcaagcggtattctagtgggctaggtacgtcttggtagtctcacttttgtgagtgcagtattaagcccggacctcgctcaggtgttgtcagtaaggggattcgtccttctgaaacttcgtaaggcgaaaagggaagtacggtttttgcaatagataggagaaatagcagtgtgcctttaaagtgctgcaaataaaataaaataaaaattttggtttaatacttcccgggactcatttagataaggcggtgtgcaggggtgacctcctatcggatcgaattatctccgactggaaagagagctgtaattgtaaacttcccgagggaacaggattatcgtgatcctggtgtgtaggcccattaacgttcgactgtcccaacttagcggcaggaaataagaaaaattcggcgttagtaaaacctatgatctttgtcccattcgagccaaagcatgtttatgttaggcttgacggttattgttgctataagaacctactgaagagatccccttccatcttttaaataaccagtaggtcgcagtatttcccctgggtgctctttggacttgtctgggggtttgggaaggcaactcatgcgcctccctcactctacgagcatactaataagcatggggccctcttc

SEQ ID NO: 2631 - DNA, 1000 bp, Manly virus
  misc_feature 1..1000: note = segment 1 RNA-dependent RNA polymerase and glycoprotein1R
  source 1..1000: mol_type = genomic DNA
gacctctcttaaatccaaaccaagagatcaaaatttggccatagagaaattgtcgttttgcaatcaggaagtccgcatgaaaggatatgcaagaacctcagtggtcattcgcctttctgaccatggatgtgatccggcggtggctcttcaatatgtgctaaaagagaaagcagaggatttgatgttgggtgacggcctttccatcgataagaaggttcattggttactaacaaaacatgagcccgcacgaaagctccttggggcactttcggcatcagcctacaactagcacatgaaaaaaactaacagacctcactatgaggcgcatttttggtcgcttgctgcccgaagctccgaacatggctgttgttcctgcggcccaagcaggcccggtccgccgggtcaatgaccccctggagggatgggggcgacaattcgtgatggtccctcccgacccacaacccgttcccaacaccgtcaccagcaccacctatgacattgtaggtgagctggtggtgaacacacccctccagtccgacgatctcgtcctcctcggccagatggccatgaatttccctcactactatcaaggggatatcaccatgaaacctttccacaccgctgtgttctgcctgttagtgtcagaactcagatgtcggaccaccctcttccatggccgcattttcgccagtcgtgtggcggaatgtgtgaccttccagggagaacccagagagctcccccatggctcatctgccctgttcagagaaacgttcacctggcccctgcgaggagaaccttacgtctgggccgtgaacatctcttggactagatcctacatgccgggggtcgccctccatgagttcatccgtccccacgtcaaccccctcatgtcagccctaggcgtttccactcgttggaatggagtggataactacctggtcctcgtggcctagggtcccatttgcaatatggaccatgaaaaaaactaacagtcctcacc

SEQ ID NO: 2632 - DNA, 1000 bp, Wenzhou picorna-like virus 6
  misc_feature 1..1000: note = strain WZSBei69574 hypothetical1
  source 1..1000: mol_type = genomic DNA
accactctcttcaacagagtgtactaatcacactttttacgtagtgagatttgaaactgtaatcgacagtcgcatacttataatctcaagtatgtagtaattgagtagtcctagaatttggattcaattttgaagaaaatccgccacgtggccaaggcgaaacttggcaagtgctaagcatggccgcacgttactgatcaaccacacgtggtagatccgcagccgagagagacggcacccggagtatttttgtttgtaattagatagattcattgagaacttatttccttcgcgccctgtaaaaagggaattggaatttactcagagcgtcaactgagtagtacgaccgcggtatggagcagcggtaatttagaccaatgatgttcttttatgaacatttataccagacatttctgatacataattgagagatggatactcaatcttgcagtaatgttccggctagtaggcaataacccaaaggcttgagggtcgcctgactagtataagaaaaatccacgaatggcgctggggagggttaatagcccccctagcatcaaatagcaatgaagttactaaaagcgtaaaaaccggacgaacccctatttccaattggagaaacacgaatcaaagatactgtcctacgtggactttgtccactaggatcagtgaaaaggtggaagatggacgttatgtgtacctcgaggatattctgttttcaaacaaatttttcgaggattcatacacagaaaggtgtattaaagatagtttcttaatcgataagagtgtaaatcgattgaggaagaaagaggcggaaaagcgctctcgtgattatcacagagcgtgtattaacccgtggctcgctgggaagaagcgagtcaagaaaagacacagtgatagtgaaaggcgttatcgtaggattttggaacaagttcgtgaacttacagatgtttcagttggttccaactgcaatgacgattcaattgactggtctgatgat

SEQ ID NO: 2633 - DNA, 1000 bp, Beihai picorna-like virus 41
  misc_feature 1..1000: note = strain BHJJX25957 hypothetical protein1
  source 1..1000: mol_type = genomic DNA
attttctcgtacattttaagtttttgcgcgactttattgtcgcgtctttcacacgcatctagtgtgtgtgtgtgttatttttctaaataattgtttttcagtatgtttttagcatacgcttttcaattattatatgatgtctttgtatgactttattgttgtacatccttttgaatttttagtgcgattttatgttcgcacattgtgaccaggtttatacctggtcattttattcagcacgatctctgatatcgtgcagtaattctttatgtttgttagacataataatgtagtatggaattttgtaaaatttcgctcaaaagattgtttaagtgcattgtttgacatgtgtgagactcgagtactcgatgttatacaaatatgtactaagactttctttaagtgattgttataagatctctagctttctggaaacagttgactacgaagtcgtaataagcacattattcctaatataacatgaagtggggaattttaaccgctatacagtcgaatttactttcgattctgagtggctgaagtgatctttgtgaagctacccttcttgaaatcttacaataacctggaactcattggagttccggatactattggttttcgttgtgaaggatgcaagatcttagaaagaaattcagcagtcgctaacttacctgctcacgacgttgaggaggtagatttgactgtaatatgttaaaaggactaacagcattatacctattatagaaagtatcaataaaatccatttggtatggtaggtatgtgttccgctctaactaagcgtgccgagaggcagtctttgtttgaggaggcgttgttcccaccgtctccaagtatacgcccacgcgggagagtatgcaggtgaaacataattcggggtcttccatgaatatgggagttggaaatcgactgatcggtcgagcttctgtaaaaaacaaaatagatcgctcaacaacaaaaaacaaacaacaacaaacaaaat

SEQ ID NO: 2634 - DNA, 1000 bp, Guinardia delicatula RNA virus 01
  misc_feature 1..1000: note = isolate GdelRNAV-01, complete1
  source 1..1000: mol_type = genomic DNA
agagagaagataaaagactccacacgggtattccccgtgtggagatcaataaacttttatcagtagtaacaatttgttactcaagtctgcgaatgacttttattaggtattcgaaactctttatatacaaccatgtctattaggggttttcccctaatagttatttgtttttctgagtttcaatgaattgttaataaatgttatttaaacatacttgtttaatgtattgaaaattctattgatgtgtttatgatcgaacccaagttttttcatctgtaatcgtttcacttttcgttaagaaatttgtcaagctggcgattacgtagtccttctggacgccaagcttatttatgaaccgaattggattataactggattatatggcattagtcttagttgtaattgttctttaacatttcgattccggtgaaccccggaatttgttcaggccttctggccacctcaaacgcttgcactcatgcatacagaagcgtttttaaaatatgtctgtacgatgtaatactgtaattacagaacttatcaaataaggaagaacctatattgatatttcatctcgttgtaatgcttagcgcttgcaataagagccccctcgtttatacggctgaaaatagtataaacctagtttaatatcacgctaagatcctgtgatattcttaggtaacctatcttatgatatggggaccgacccttagacaagactcattagtcggcgtattgtctaaacttatagttaggaagtaatgaccctaatttcacttgagaattcttgttggaaaactattaagttaaacctttaccaaccgatgtacttagtgtagcgcctctgcctgcggcgaataatacatgcttaaagtacgtaagtaagttcatcctcttaactgagtggtgaagcaaagcttttgtgtcgaagcacaattggattaccaattttgcgggctttcgcgaattggttcctctgtgcttgtcgctttcaaatttt

SEQ ID NO: 2635 - DNA, 1000 bp, Wenling picorna-like virus 1
  misc_feature 1..1000: note = strain WLJQ101464 hypothetical protein1
  source 1..1000: mol_type = genomic DNA
aatcaacagcgatccttcggcatgaagtaaactgaccaaaatagaacctgatctaggtgtttttaagtcatggtaagtccatgagaccaaaaacaggcgttgctaacccgttacgaaaaagcggaaattattatcatagggatgatttgcaattcccaatggttcagactgcatatgtttgcggcatacacaaattcggttgtgtaacagctgtttattttgattctttgtctatagaaaatagacgaacttcctcctgtggcgcccggtaatagggtaggaggtacattgggcgtggaaccccagtgtgagtgtgaacgacttggagctgtgtcccactattgtgggtttagactctatttgttagtcattgaatcaattgaaccagcttgcctatgatcttacctatccacgtaggtattgcatggcaagtgctgtccttgttatagctgatgaaggcttgagtcagcttaacgttcgaggtaagtttgtagctctttaagagctagtgggaagacctggcgctgtcgtggattaatcgtcccttcagcatcaatatagcattgaagttagtaatagccaaaatcttttatccagaccatctttttcttcggatttagaattgcctttatggctttttaattgttggttgctacttaatgtagcaattagtgtgtacactattccccgtgattgtttcatttgggatattgtgtatggtgtgtttttcatttgtgtttttgtattgaccatctatttgtatgtttacagcattttattgatttggaaagctatatttggtccgcggcgtagaacttttgaagaacaacttggattcaggttaccgtcgtttgttacacctgattttgttgcacgggagaccactctgctattagcgttgaaaacgagtgtttcttcgagtcggaataaggcaggtgtcatatcagcgttggtatcttacgcacaagctcacagtcaacgttcccttttgggtcactta

SEQ ID NO: 2636 - DNA, 1000 bp, Wenzhou picorna-like virus 14
  misc_feature 1..1000: note = strain WZSLuoII97619 hypothetical1
  source 1..1000: mol_type = genomic DNA
agggaatttatattccctacataccctatactttttagttgtaatctaaatgatgactctcttttgcagagaccctgtataaagatcgagatctgcgtctcgtgtttcagtcctaggattacactaggaggttagcacgggagcatgaaccatttattttgctcaagaaatttatacttttattcttttgtctggtttgctgaagccgaaatttcagcaccccctttttgcctgttatcaaacaggcccccgctttcgagcgggtgattggagactgtacaatcttgtgctgtctccatgctccggttttccggagccgcgatattatatcgcaaatcctcaaccgaggataatatcggttggtcccaatttttactcatttggataatgagtccctatttttgagtaggtgattgaagtgatagcacttcacctgcgcttccgagcgcactgctccctttgggagctgcagtatttatactgcaaacccccagccgagggttgtttcggctggttccattatattgatgtatctttaataattattttacatttgtttttgaattgcaaacggctcttctataacattcaaaagaaacccttgattcaaatgtttacatttgtaacttatgttttctgataccttatatactggtaaaatagaggattagcgtacctctcctcaagtagtttcagctcactctctttgagagaactgacgtccatattgtgatctagcttgattgatataagcggtaagtcaattaagcccattatgatatgttcggaaaattgtacacataatatacaggaagactatgtcctatggtgtgtacttcagtaagaccttagccggtcgcaattgttacgtgaataataggtagtcacgcgtaacacatttcacttgtggttgactcccacgagtgatcttatctttattgttactaaatttttacaacccgcttttgatcccgtcttcactgattttcgggattcaact

SEQ ID NO: 2637 - DNA, 1000 bp, Changjiang picorna-like virus 4
  misc_feature 1..1000: note = strain CJLX29654 hypothetical1
  source 1..1000: mol_type = genomic DNA
ttttattcgcatcttgtagtgttcgcgagaaagaatctactatttagtgatcacaaacatattgggttgtttgtttgtgttcacccgaggtacgaaatgtaccagtcctgtttattaatactttggggataaaaagcagaattttctgcaccgtatacggtattgaaatgtatagtcgatattttaaggacattattaaatggacgtgaaagtctgttgaaactgctctgttttgaatattgctgtttgagggttgggaaaccctacttttgttgcgatggtagcaaatgcaccgtttagaccttatgacatttcgagtcactattggcttctgggaaggttgattaccagagtacgtgagcctagatctaacatgaggaggattgtgctggagcttgagaacatttggctagttgcgcatgttctgacaaaaacatcaatggggaaaggcgttaggccccacgtataagacagaagacacgttgttatcagaatttctttaaaccacatttatcacgtcaacccactccacattatttgtttagtttcccgtaaaccaatttttataggcgaacagccttttgatgtttattatgcagattttaaatttttaaataaagtagcgtatgtagttgtttcatattgttgtccagtagaaacactaatattgacattaaatgaatatgtaaacaccgaattaatagagttagaagagccattttatggcaattattttatagattgtaaacccattcgaagcggtttgaccgtttgtgcttatggggatattacaggtaagaaaattacaactaacattggccgtttatgcggaggttatcgtgatccttatcgcttgtatcatattattttgcaatgtgagaaacaagtattattagagaccttgaaacttcaaggtgatgaagagttcgcagaacaagttcgtcaagaacaatataaacaggtgcaacaagataaagtttttagaaacatattgcgtttt

SEQ ID NO: 2638 - DNA, 1000 bp, Alternaria tenuissima negative-stranded RNA virus 1
  misc_feature 1..1000: note = isolate1R
  source 1..1000: mol_type = genomic DNA
gatccttccacggaagattacctcttcgccgccaaggttgatccgatggaactcgcagcttatgctggaattcttgcatatgcgattggcaagcagccgactgcggagaacatggatgcgttcaactctcgccggcgcaacgccatctcccaattccttcctgcaggcgatctcaagatcttcgttgatgattccgagttcttgtccatcgacatccttggcaagattcatcgtgcgttcaactccgtcacgatcgatcgagcccttgtcatgagtgcgattgtcgacaaggatgctgctctagttcagggacgcgagaaggtcttttacatcatcttccgtctcggatctggtgcctcgctcaatccattgctgatcatcacgcgctttgcgcgcaagtacccgtacttctattccgagtttcccgatctcgagaccgaataccatgccgcggctcatgcactccagcggttctttgatgttcccgagaagcgtcgcatgtacctcaaggtcatcttcgggagcgcctacgttcctgtcgatcgcacggatgtgaacgaacttctcggcgtctctgtctttgcacttcagcagtcagagccctcgcttgccaattacaacggcggaactctcagtgtcgtccatcgccagaagttgattcgcctcttggaggttgcttcaactaatgacgaagaaatccccgaggagcaacttgctgagtaagtgtttccaccactcatctccttattaaatccaaggatttaataaaacttaggagtaatcaataagatgaagctcgctgatgcacttcgactgtatgtcgaaatgttcgaactgattaccgcactcgtccaacgcgtcatggacgataagacattcgaagatactttcgacattgtctcacttgactaagttcacgtactcagttgcaagagttatttaataaaacttaggaaataacaaacgcatcgtctcgcactcaacctactcattaagaaat

SEQ ID NO: 2639 - DNA, 1000 bp, Ubei picorna-like virus 3
  misc_feature 1..1000: note = strain WHCC101453 hypothetical protein 11
  source 1..1000: mol_type = genomic DNA
tcccagatgccatcgcgcatctcaacttgaatcctctacggtgaaaagccgtaccacatcagcctcgaccgataattaaagtaggtcatccgttttctacgaccaactggctgatgtgatgttcaacgtctacagccggtccatcatgagtatggacgtgcaaaacctgagtcgccacctttcgaagttggtgtgatagtcgtaggccgaccctgcctagcagttaataaataaactagcgtgagcctgcgataagggccaatcctcgggatgatctacaagtgattacccgcactgaagtcaacaaatttgattcgtttccacctgatctggagaaaccgatttgtaatggcttgcgccacggcgaagagtgaataactctgagtggctgccaccttgacattaagtgtgtgttctacacctgtattattaggacatgattatggtcctgtttatgttttctacaacctacgctgctaatcaacgctcatcgagcaccgcgtgcgattggagggactctgtttctctcctcttagtagtttgctatatatttatattgtctcgtatagacgtcaacccgcgtctctaaataaagctggataaaaagatgtattattcatattttcatatcacatcgtaccacatttatgaggggaaactctggaatggcattagccggtcagagtataaagaaccgtcagaggggatgtgcgagtttccagtcacattagtgatactggaccacattaccgcgccctggggacttagaggtacagtggtgtacgagaggtgtgtgttaggcgtagcctgcactcactttctcctctgcccaccgaggcctagtcatctttatacaatgcctagagaacaaccaaatgaattacagaacacgtgaaagtcgagttctaggtcggggcccctgaatgggtccctatcccagcgacggggagaaataatacgtttttaagaccaagtacgacataccatttaccgatttatc

SEQ ID NO: 2640 - DNA, 1000 bp, Thrips tabaci associated dsRNA virus 2
  misc_feature 1..1000: note = isolate THR-E_DN239551
  source 1..1000: mol_type = genomic DNA
cacatcggtggcttgcgagggaactcactgcgctgcaggaaacacccaagtgcgttctcgcaaaagcaaatcaccaagcatccgtcggttgccgattggcaatcgctgggcctttatcccccctccctccttcgagcgggggggtaatgtgtgaatgtgataatgacggcttaggattcttaagccagagtgaatgtgatccgacttacggatttgggaaggcaagtgcgtccactgagcggttagaacgcctctgggcaaaggccgggctagtcccccggtaacacaactgcggttgttgcaaagataggtgcggtgcgcgaactctggctcctgttatacaggagtacagttacactcacgactctccctatcagagcacttgtcggctcaaatccgacatcggatgtatgatggctccccgagctaagcaactcgggttggggtgtgaagccgaaaggtcaccccgggccaatgcgtgggcggcatgaaactgccccatcggcaagtaagctgtgcatcatgccgatgagtgctggtcgaacctggggttggaccaacaaggaagaactccgtatgggcggggtgtggtacgtagaggaacttggagtgctgtactttcaggtaagcctggcaggaggactataaggatttagttcggcctgtggcctttggagggcagggcgtcttagcgcggcgagcaaggggtagtacaactaccgctcgtcgggcgggcgggtctaggtctatggctttaagtatagcaacaagaaatcgcgtgccacccttgttgcttcaatctcagaggcgaggactgcgcatgggcggtgtgggcacagcccacaccaccccacctctcagcggggggagggggcgtaaggggcgccctccctgcctagagcatcggatgcagccccccacttaaggaccagctacgactcattgatttattgattattgagtgtgaatatagtgcgattcagtgcgattattgtcctag

SEQ ID NO: 2641 - DNA, 1000 bp, Shuangao Insect Virus 5
  misc_feature 1..1000: note = strain QSA09 polymerase (L) gene, complete1
  source 1..1000: mol_type = genomic DNA
atatgctatgttctcgcactcaactctatctcgcatcgcaggtgaagaattacctcgggtatgtagattgctccaacagatgatattagatccatactgtgcaatgttatccaatccgatccccgtgcgaacatatgcgaatatagcatacattgcctgtaaactcatatataaatctaatgttgttgccagtgacttgaccatgaaggtcactggatatgtgaacaccttacacacaatgatcacaatcgatcaagggttgttggatacagatgttatcaatatacgcgaatcacagatccaaatcagtggagatagagcttccttagtgaaggtgctggctaagcggcacgggtatcatataagttccgataaaaacaccatttttgagaaaattgaaccagaacctacatcttcagttcaatctacatcgcaatatgacatgctacctattaaaactcatgatatgatgattaatgacaagaagtatagagaaattgatattggagagaagtacaaggacatgaggacaaaagaagacatagcttttttcaacctgtgtcagcaattcaaaaatacaatgatgcaaacagtgattcctgacggcgcttcttatatccccggttccaaattgacacttactgaagatgagcataaatatctacacctcgataagtttaatgaagaaccaacggaatataaaagcactcaacacatcatcaccgataacatacgtaggtcaggttcggttttaatcagtgatattttgtcattagctaagggagttgggttgaattgggctactactgtagcgacgcctgtgatgcctgctgcttcttccacccgagcagttgttagaaccccggctgaagaggaggaaatgggcatttaataagtgtaaacaacgtgtatcaggtttttgatcatagcctcttaaaggatatgtggtgagattgcaagtgttttcctgattattttaaaaccaactctggtgtttacc

SEQ ID NO: 2642 - DNA, 1000 bp, Beihai picorna-like virus 22
  misc_feature 1..1000: note = strain HOU126951 hypothetical protein1
  source 1..1000: mol_type = genomic DNA
attagactacccttcgaccatttgatttccatgctaatgcatgtactactcatatcgtgacaggataagagttaatatcgtaattaacgagaacccatcaatggaaattggccatcctctggtagaggcgtgtaaagaaccacgttagtgaaacggagtcgacattaggtccgtcaaccctgatatttgcgcacatgcttgtgtgcatatagcgaaatatgaatctacaagattgagccgaataaaaatattttgtagtgatccgtgttacggtaattttccgtctaagatttgtatgataccaggtatccgaaagctattgctggaggaccttgatgtaacatttatatgtagaccaacatactatcattccgatattatcgaacattaactataatataaattgtgaaactcgatgagctaggtgacacatttgtgtttaatcatctttgacatttgtcaactctgaggacgagaggagcagcggcacaattcatttgtgtaagaagcaattttgttaatagttattaatggtgtttgatcttgattcccttgggaaaggaattattgcatccacctaggatctatgcgtttggaaagtaaaggttgatattccatatcgtattgcccagtcacaattttgtggcccggtcggaacaggctaataccctgagctcggacttacatctgtaagtgaccggtatacctatcagttacgagtaccttcaaacctagtaaaccgctatattgcaacgaggaatttgttgataatcgtgtcctgagaactgatgctaacatcgttttggagggatacgaccctgagttggagtgccaggtaggcattggaagctttgtgagtattggaactggacttgatgtcctatccaaagcttcagggattgatataccagattggattgtcagtgagatagaatcaattatctgtttgtttatctctcttactggacaaacgactacgcaaggtgctttagccacaatt

SEQ ID NO: 2643 - DNA, 1000 bp, Fuchs virus
  misc_feature 1..1000: note = isolate Antarctic41 non-structural polyprotein and1
  source 1..1000: mol_type = genomic DNA
gcaagcctatttggtactgtttcctcaagaatgaaattctgaaggaaaagaaggtcagtgagaatgacatccgagtgatatcttgtacagatcccgtctttgtgcgtataggagctgcgctggatgaacaccaaaatgctaggatgaaagcaaagacagagacgcatcatgctcaggtcggttggacaccctttaggggtggccttgacaggcgctgcaggcgcctcgcaaagaaggacgtatttgtcgagcttgattggacgcggtttgatggcaccattcctccttggctcttcagaagagtcagaatgatacgctggtatctcatgaatggagaagaccgcgagcgctatggagacctagcacggtggtacaccaagaacctgttgagtcggttcacgctgttcccaactggtgaggtcacactcatcaagaaaggaaatccttcgggtcagtattctaccactgtagacaacaacatggtgaatgaattccttactgctgctgagtttggctacctttataggaaggccaatggccgcctacccactgtcgaggagtaccgggcgagcgttgacatgctctgctacggagatgatagactccttggctttcgcgcggggttcgtcgactacgagccaaaggaagtcattgacttctacaagcgcgtcttcggaatgtgggtgaaagacgagaatatcaaggtggcgccctctcttgagggacttagtttctgtggttttacccttgtaagagtgaacggccggtactatggtacgatgcaggccgataagatcttgcagagcttgaagacccccacgaggtcattgcctgatgtggagtcgctttgggggaagcttatttcccttcgtatacttttacaccatagcgaccctaagcacaaggagtaccttgacaggcagattgccaaggtggaagagtacgcccgtgctgaaggtattgacctacccgaagtcgggcccgacttctataccaccat

SEQ ID NO: 2644 - DNA, 1000 bp, Fusariviridae sp.
  misc_feature 1..1000: note = isolate H3_Rhizo_Litter_15_scaffold_561
  source 1..1000: mol_type = genomic DNA
tggtgctgaagagtgcttttgccgaaacgtcaagtacaccatgtatttattaaatactaggccttttgtatggctatataagttgtttttggtcttgatgttaattttgttattgacctcaggagtctgttttgcgtggcttggcgtaggctttgccgctgtgattttggtttttctcgccagtaatgctagccttgttggcatagcttttattggactgtttggaccttttgcacttatttattgtggcttcatctttgagcaagctgtgcgtcgtgaggcacagttgatcagggacgttggtgctgatacagctctgtgggcttttcttgataagaagcccattggtttcactatcttttcaaagctcacattgacacatgcagttttggcggggcatgataagtcaggccgacttttgtctgccagttttcgtgtcttgggcctaccacaagaaatacaagatatggtggaacctgggattcttactatggcttcaaggctctggtccaatcttgtgttgaatgttgactctttatatgatggcagagcatcatttatcgtgagtcttgctgcttattggtacttgcaacgaaaattttctgtttttctttggcgtaggtttgaaacctttgtcaaagttttgtggattgcatttattgtcttgtggtttgttaaaccacaacacttcctttttgccttaatgcaggtttttagaggtgttgtctttttctcaaaccgtgagcgtgtttctgtcttttcattgtggctcaagtggcgtctcacacatttaattgtgaagttgatagcatattttgagtctttcaatgcctcttttcggaaataccatagtgagcaactagacagtagcagaaagactctctctgcacattttagaaattttgtgatgtctgctgctgtttatatttctgatttgggcctaccttcttatgttcgtggtggtttcgtgccttacaataaggaaactttggaacaatca

SEQ ID NO: 2645 - DNA, 1000 bp, Beihai picorna-like virus 40
  misc_feature 1..1000: note = strain BHNXC39087 hypothetical protein1
  source 1..1000: mol_type = genomic DNA
atggaatttccaaatacagacgacgcgatgttgtttcgttaacgcaatatatgtacttcgcagaggattcgcgtttcctcagcggcaaatacacagtagtgctgtgcgcgtaaccataatgggttacaacacgccgttttagtactgaatttatttgaagaatacaagaacttatacccaggcttgcggctaaaaccgtttgggtattcctcatattatgggtgcgctgaccctaatgaggagagtgatgtacgacttggagcagtattgcaatcatttgattgtatgagactgtattctgacaatattggaagactaatttatccggtctaagattgaaccctcccacatgttcgatgggagtggcgacttagatgcgtggcttgtttaactggtgcgaaagcttgagcaccgacctttcgagcaaagattatagaacgaaaaatggcgcctgaggtttgggttaacaaccccccaggcatcaataaagcatgaagtctctgaaagccaaactttgaatcagatttcactctctcttctccaagagagagctacctttatttcccgtcaaaacattgactctgttaaagagtcctgtcatgactattctttgaaattgaaagatttcttgagcgaaattgctcctggttttgaactaccggaacaattcgctttcttgaaggagcaaactatagcttctctgaacattctactcggtctagtgaaagatttatatgctgtcactaaagaccaccttgccgacattggatcggctctcatccatgttatcaatttttacattggaacacggaattctaccaactggacggatgtgtccattggttttgtgtcgttgtgtttgtccttattcaaattggataccattaaagattcagctaagtacgttcagcaaatcgttggtgtctttgtggacaagcttcgaacttattttgtgaagggcgaatctgccgagaaggagattcgttcgttttggtcggac

SEQ ID NO: 2646 - DNA, 1000 bp, Wenzhou tombus-like virus 6
  misc_feature 1..1000: note = strain WZFSL85189 hypothetical protein2
  source 1..1000: mol_type = genomic DNA
cctcaaagccaatagctcagggacaatcaaattcggaccggatttatcggcatgtccagcgctttcaggcggaatactcaagtcctaccacgattacaagatcacagctcttacggtcgtctacaagtctttcgcgtcctcaaccacgtccggtgctatcagtattgaactcgacaattcgtgcacacaatcaaccctcggttcttatgttaactcattcaccgtctccaagacaggaaccaagaagttctcggcttcccagattaacgggaccaagttcatctcctcgacggtgaatcagttctatctgttgtacaagggttcaagtagttcaactgatacagccgggcaatttgtgatcactattagggttgtcaaccaaaaccctaaataggtagaagaccttccacctcaaccaactccaaccccaacgccgcaaccacagccagaaccacaaccgacaccgacaccagttccatcaaaacagttcttctgctgttacaccggaatccctattgtcaacatatcgactagggaaacgtctgactcaatatctgtaggtaagttatccacacagaccttcagatatacatctgatgaaaaatctgaagacagagacgttagatcttggtggtacagcaataacaatgtctctgcacaagcagctttcatatttcccgtcccaaaaggggagtacagtgctacagttgtttgtgaaggtttacaatctgtagaccacattggaggcacggaagatggacagtggatagggattatcgcttattctgatgattccactgacaactggggtattggtagatatcaagactgcacaatatcaaactaccaaaaccagtcgtcttggcggatagggcataaagacttgcaacttaatggctgtaagttcactggccaggctgttgagagagatgcattttgtacattccacatatcagcaacctccaacgacgccagtttctacattgttgcgcctaggacc

SEQ ID NO: 2647 - DNA, 1000 bp, unidentified
  source 1..1000: mol_type = unassigned DNA; note = Symbiodinium +ssRNA virus TR74740 c13_g1_i1 non-coding RNA gene,1 sequence
gccgagagggagattagaacaccgcgggctcgaacatcagtatagcgagtcattatgggaatgaaggtagtccgaccacggatatatcgcaagttaccgcgaacttcattttcttgtagggtgggcttccccgaaggtgtgaccttatggttcagtaggcgttcactgcactgaacgttgaagagctaggcgatgtactgacatctgcggaggcggttagcggttgtggtagtcgcgccgtccggtgagggccagagcaacatggagtagcgcccatgcgagtttgccagctcggacattttgttttgctcccccagacctgcatgcgcattctgaggcttggatcggcatggtcgaaggtgcgtggtggggtggttgcctgaagcaagtgtggttaagtgattctaggtattattccgtatgaatcttatgggaaggcggactcattgggttgagcctcgattcccatgccacaagcaacccagtgggaacggctacgggtgcgcttaaggtgcagcttggttatgtaagagcgagttaaaggagcggggttgtggcttgtccgtccccagaatccttcatcaagtccgcgacataacctgcaagtagcatgaattttgatgcattagtgcttaagcataaatggggtccactaactatattggtgagatgcgagtgtcattcgtttgggacaacttaacaaaacacttttgttttgatgaatgtgtggctatgcgtgttaatcctaatcaatttacgattattattccaagtgagtatgacttaccagccgatggaacaaccggggctggatatattcattctgttttgtttggtgaaatgcgtttttcatctattagacgattacgatatgcaagaaatcaagccatactaaccgttgacactatacccattcctcgtagtgaggaaagtgcttaaggcacaaattttggagtctagccgctgacaattttgttcatgcattcccaggtcataattt

SEQ ID NO: 2648 - DNA, 1000 bp, Hubei mosquito virus 4
  misc_feature 1..1000: note = strain mosHB232766 hypothetical protein 1,1
  source 1..1000: mol_type = genomic DNA
aggaccccagatgtatccaataccgtaataagcggtatggtttacgtctggccacctacctacacccgcttgaaaaatatgtaatgtcctggacccgcaacggcactcacatctttgccaaggggaggaacatgaggcaacggggtagggatatcgcccacaaatttaacaggtacgaagagtgcgctgtggtctcccttgatcatagcaagtttgactgccatgttaatgaatccctattacgtgctgagcattggttttacaatcaatgctacggttcggaggagctggaatttttgcttgagctgcaggttcgcaacaaaggcatgactaagaatggcactaagtacactactagagccactcgtatgtcaggcgatcaaaacactggtctaggcaactgtttgatcaactatatgatgaccaagcagttgcttagtaagttggggatagggtacgatctgtacattgatggcgacgattttctaatcttcatggagaagagacacgtcccactcatcgacccgagtgcttattccgtcttcggtatgtcaacgaagttggagagtgttgcatacaccattgaacatgtggatttctgccagtgcaggcccgtattcgatggtgtgggttacaccatggtgcgcaaccccgagagaatgttagctagactaccctggatagtaggacctgtcgaggatagtcgagctaacgatattgtattctctactggacagtgtgagatcgctcaaggcttaggtctgcctattggccagtacatcggccagcgaatgtgtgagcgaggtgggaagatggttcgcatcagacatcgggcgtggttggagaaaatgaaacctggaaaactccaacctatagagcccatgggtggtgtgcgtgagagctatgaaagagcttggggtctgtcaatagccgaccaactgctaattgaacagactagtctggtggaacccgaggagcatttcgctccgggtattctaca

SEQ ID NO: 2649 - DNA, 1000 bp, Beihai tombus-like virus 10
  misc_feature 1..1000: note = strain BHZY59908 hypothetical protein1
  source 1..1000: mol_type = genomic DNA
gcgtcgccaaaggccttaaccatagacaacgcgcccaattattaatcgataagttagcccgtttcgaagatccagtcatactttgtctggacgcccacaggtgggatgctcatttgaaaaagaggaagttagaggcagaacatctagtttatgtcctctgctccgctttttatgagctagctgaattgttgagaatgcagttgagcaacaagtgtcgaacccgcaatggcgttaaataccgtaccaaaggtaaacgcatgagcggtgatcttaacacagcacttggcaactgcctgatcaatattctaaccattctttgggtgtttatgggtattattatcgattttatggttgatggagatgatggaatagtcatcatggagcgcaaagattggattaagtttaaagatcaaattaacgaaaggtatggtaagactggattcgtcatgaaaatggaggtcgttgaccgattagaagatgttgaattttgcaaatcaagagttatacgtacacatttaggtcccagatttgtagtctatccaaagcatgtcctcagtgggagcacggttggtgtcaggccacggcatggtacttattgggttaagcgcatgcgagccgacgcgataggtctctacgccctataccaaggtgttccgattttgcaggactatgctctggctacactcgaagccacacagcaagtggtaccagcagaccttacaggagaggatgcatggtttcaatttagattgcatccagcgtataattatatggtaaatttgaaaaagattgacatcagtaagttagaccaattcatctcaccccaatctcgagttgatttcgaaagagcctttggaatatcaataggtcagcaaatgctaattgagcatcaattgagacaggcacataaagggtacctctgtgaggtcgcatatcttaagaaacatccttttctgttcacagtcgaacaaaccaggcatttattactcaaactttggta

SEQ ID NO: 2650 - DNA, 1000 bp, Riboviria sp.
  misc_feature 1..1000: note = isolate bsk136shi04 genomic sequence.1
  source 1..1000: mol_type = genomic DNA
tccacaaagggggccaccctatcggaatccgcagccgggtggctaccagcccgaaaacaactatctgccggctgggcctgatgaccaggacagaccctacaactactatgcgccactgcgcgacatctttatgagaccacgcttacccaacctcttgggccccactatcaccatcgctgcttcggcagccatgaaggccatgccacacaacttggtctcaggggtcgtgaccacctatgccaccaaatatgcttataggagcatctggtccacagcctactatctagccggtaatgccctcattagtgtcagtcgcatagccacaattgctgctgctgtccgtggcttgacaccaacagccatgactgccagcattgcaatgagggcagcagactttggtggcaatctgttgcaacacgcagcgcgggtaactcatcctcgcgcaatgcatgtggcggccattgttgatggtaccatggccgctgccaacagacttgcctacccaatgctctgcatcggggctgtctggggactgtatgtcctggccaggcatgccatagagccaccaccatatgaggcaccacctggctgctatcccaatggtggccccatcgtggagattacgcaggaagaggcccccaatcgtgaaatggtctttacctgtccagcacccctcgcccggctagtccaagagagagtgctgctctgtgagagggacccaacaatcatccagaaggtcaaatcaattgcctcccgctggtgcgatgcagctggcatccaaggaaaccaacgctatgccgccatctgtggcgctgtagcctctgccttgaccgtaccagttaatgaacagctggtcttgcaactctcacagacacatgcagttcaaacacagtactcaagactagcacgctatctctctggcatcaaacacacccatgatgcctggtggactaagtacttctccatcaggcgctaggccaggtggagggatgctgactgc

SEQ ID NO: 2651 - DNA, 1000 bp, Sedov virus
  misc_feature 1..1000: note = isolate Antarctic40 RNA-dependent RNA polymerase gene,1R
  source 1..1000: mol_type = genomic DNA
ttaaagacttctccatgcgaaacatcatatggcttattgaattctgctatactatgctatctaacatttatacaaaaactagaaaaatcatacgccgcttacttaaacgtctcacaacgagcacatgctcatccctcacagcgatactggcctgccttacgttattctgtcgcgaaattcatcagtatgttagcaatttccagcctggtaatacccctacaggtatacttcttaaccctgtcctactctgcattaaacacatggctgaattcatacacaaatctattccagctatattcccgtcggtttatgcctggatcaaccacgatccttatgtcagcgctatacaagattctctcatctccgaccatggaacaactattcaaactcagaactctcagctggatattaagtttgtacaacatcgcattggcgctgtatttcggattactacagaatcagataccaggtatgtatactgcggagatgaagtcacagcggatatccatatggctaagcgaggagcccgctatgctccagttgatggaactagtacctttgaatgcacatccgaccctgatgagacccttagtaaggttgatgagacctacattacgacaattgtaaacattgtggaagaaaaactgaaagacaatgagaaaattgcggaatttaccctagtacactttgtacaaacagtacaatctactggtacccgaattaggaagacacgagcagatatcagtcctgaatttatgagtaatggtgcctcttaccaaaatagtggcaaactttctatagacgttaatgtcgcaagacaaatggtaactcaaagagccactccaaacctggtccaatctcaccattacggttttctctaccttatggcctatgtatcaattaactccgagcaaagcgtaaattttcaaacacaaaaacagtcgattgcatcccggatttaaaaccccgaggcatatccacagtagtagtaaagaaatac

SEQ ID NO: 2652 - DNA, 1000 bp, Beihai weivirus-like virus 20
  misc_feature 1..1000: note = strain BWBFG40173 RNA-dependent RNA1
  source 1..1000: mol_type = genomic DNA
attagcctaatacgtgaagtgtatgagccgggccctccggggtcgcgctcggcggcggtttaggtagaggtgggagcgcacggcccaactccctaggctgccccgagcaacaatacctgttggttttcgacacagagccttcagggtccacgtgtccggtgcgcgcctcggcgggcgcgcactgcaagacaggagtgccgccggcacgtggatgtgagaccgctccgtgcttattgctttgcgcggataggggtggcggcacggcgggcattgaggagcaagggccggtgctcctcattgccgcgtgccggcccgagccataccccgaaggttgccttatgcctgagtagccgagggtagttcggtgaacagcctggaagccgggtagcgccggtgacggtgagggcgccactgtttcccagcgcgtgggttggcctcttgggaggggggccgtaaaatggtggtttcgttgtgtgagtggtggctcgaaggacacaggcctgcgaggccggctctgcagtgttcgctgcgctgcaaccgggatatgtgggtactggtctggatgtttcgttcgcgtagcgcgcgcgggtgaataactgctggatggctgcacggcgggcattttgccgcgtgacggcttgaaggtggcgcacaacgacaaatggcatcgcgggggtgacggcccgcaacaacgcgcgtgcagggggacgccccccccattcgcacttcacgatgcatgtgggtatgtggacttagcgaatccgttgcagacccgttagctggtggcggcaccagctgaattcaccacattacaaaacaaaaatcgcaaaacgaaacttagcgacggggcaagccccggaagataaaaatagcataagtaaaacccaggcgtcctcctcaaggtgcatctgtgtcgcattctgacgcctggtcgttgtctccggctgccgccgggggttgaacgctgcgaagtgatttccgtattgctggtcgtgaaacg

SEQ ID NO: 2653 - DNA, 1000 bp, Beihai tombus-like virus 7
  misc_feature 1..1000: note = strain BHBJDX18773 hypothetical protein1
  source 1..1000: mol_type = genomic DNA
aggaaaaggccttaataatgtgcagcgtgctttccaccttgaagccaaaatggcagacttcacccacccagtcgtctactctatcgacttgtcacgctttgaccaacatgtatcccgtgaactcctcgagattgaacactctgtctatctttcgtgcaatagcaatgactattttcgtaatcttctcaaggagcaattgaacaacttgtgctttacgcgcaatggatggggatataaagtgcgtggatgtcgcatgagtggtgatatgaatactgggttaggtaactgccttctcatgtacctcatgacaacgtcagctatgaggtaccttggcttagcaaagtatgagctctttgttgatggtgatgacacgctaataataattgaggaacatgatgagtggaagctttcgggcctcactcaagagttcctccgttatgggcatgaaatgaaactagaaaaccgtgcgacctcaatctccgaagtcacctggtgtcaggcaaaagtcgtatatgtcgatggcgtaccaaaatttgtggctaatcccactaaagtcctttcgacagctgtagctggggtgcgccattggcatgacaagggacgccaaaacatgggctattcccttggacaatgtcttttgtccttgtacgcgggtgtgcctatcctccaggctttctgtgaatctttaacatcacgaggtaggtggaatgatgaggtcatgtggcgcgactggatttatcggctaaccatcgaacaggcgaagaacgcaaaagttcgcgaggttagtatcgaaacccggttagctttccaacgcacgtggaaaattagccccgaggagcagatggctgtcgagcgccaactcctcgactgggatataactgcagatccagtatggtgccagtcacaagtgcgacagggttggttcatcgaccctgatattcgtgctggcccatgggcgcgcggtgggtatgacaacccactgacaacgttctagtccact

SEQ ID NO: 2654 - DNA, 1000 bp, Riboviria sp.
  misc_feature 1..1000: note = isolate bpk205shi01 genomic sequence.1
  source 1..1000: mol_type = genomic DNA
gggtaggttagcatctgccaccatgatcgtgtgttaggcacgtaaaacctacgttgtcagtacggacatcgttaccaaaatcgtacggagtgacgtctccatctcagtcatccgtggctggacaaatagctaacaccttttcactgttactatggccacaactaccgattcaccgctactgcccgtcgggctcaacactcccaggttgtccacctggaaccgcgcactcattgccactaagaagtggtggcaaaatttgtgcgagaaatcggaagttacacagttgttgtgctgtgttgacgccactgaggccgacaattatcgtcgagacactcgtgtgcgatcagagattcgcgaagctatgcgctcgcagatgggcttttacggtcagcccacatgcattgcagcggtcatgcatgaaacaaagcaggagcataattatgctctgggagctgagcaggaggatgtcattcgtatgactgccgctcaatgggatgcactttttgtgcaataccgcttccatgcgaacacaccttcagcccaaattttggctgtggcgaagaaggtggttgcaccggcgcgtgttgtgccgaagtttgcagccgccgtcacgctccacatcaaggccaaactgggtgtgctcgccaagaccgaggcaaacctgctgcttgttcaacgcaagtatcttgaggtttgccgggaccaccgtgtgcgtgatgttgacgttgtgtcacacatgcagtttgtgcagaacgcatatttcacggaagatgtcctcgagcggctcgccaaaacgcgacttcgcgcacctgcgtggttacgccttttcgaagagaaggagcgtaccgccacgcttgaggtgtgctgagggcgcccggttcgggttcagggccagaacacaagtgtgtcaccacagcttcggttgaagcgtgacaccctgtgtgctggtaagttgtccgttcacaggaacgggctgctcgcaaaaccacgccaatttgtg

SEQ ID NO: 2655 - DNA, 1000 bp, Melipona quadrifasciata virus 2
  misc_feature 1..1000: note = strain MqV2 nonstructural protein1
  source 1..1000: mol_type = genomic DNA
aaccgcaggaagatgatgtgtctgtagctgaattaaatacccacttttccaatatgatcaataagcatggtcggaaaggctacaaactatcattcgacgagggtcagaaacgagtcggattactcaaacgtcccatgaactgtacttggaacaaatttctcagtttgtggagacggcctgtctgcgtgatggataggtggtgttcaaaatactttgacgtatttcgtcttttcaataaacttgttatttttgatgtttatgagaagatagattctgataagtatactgtaatgttgaaacataagatgcgagcgaccaaatattgcagccgcgctgatgttcatgctgtcatcgatttcaaacatttcgaaaagatagtcgattgtcaacattttatctacaaagaatttgacgtagctactaagatgcttagggccgcacaaccaaatatttttgaactccaccaattcatggatgttgaaacagctgaggccgaattgacgatgaaagagagtaagttggaattagaattgttcatccaactcactcatattggtttacttgatagtacgatgacacctgaagatgcgcatagggcgatagtaaggaatgcaaaacgtttatgtactgttaactacaaccgataccgtcatttggtcacaaaccatcttcaagtgatgtcacttcattatgctaaggcatacttcaatcatcagttacttgaagttgtttcaactctggattttcaccgcgcctccccacaaacacgcgattctttgcgcttggttatcgctcacgggaaattagagagctttctgcacctattcaaacgaaaaacgggcttaagtttagaaatgttaggaacatcaactttcgtcctgttcgtggtgtggaaatggtttctacgggtcctcatgttgaggggtattgcttacctcatatcgacacaagagaccctgcttccctgtttgatggcgtgcgtgcacgtatggggaaagtg

SEQ ID NO: 2656 - DNA, 1000 bp, Changjiang tombus-like virus 12
  misc_feature 1..1000: note = strain CJLX27860 hypothetical1
  source 1..1000: mol_type = genomic DNA
tcactactacgctttcgtttgtgtgggaacggttggggtcatattattcagcgaaagttctctgtttgtttaagcgagtttcgctgcatgcctcattacaatgaggtctacgctgtccagctttattccagctgcggccgctacatcatccaccttcgattcaggcttatagtcacgcagcgctcctctttggtagtgagtgttgtgcccatagccattcataccaccagggccacatgagtagtggcgcttctatagcgcttacatttctagtggtcatcctcatatttgcctgcgggtttttcattcagtggtgtctcatcaagcgcaactagtagccatggcaatttcttataagtttgtcgcgccgctggccattattccttgctattatgcgggacgctgggcgctcgtgaggtacggcaactcacatggctggtgggataccaagacagcttgctctgatgctgtcattggcattgccaccgccattgagcagcggtctgccggtagggacccctccgaccttctcagggcgttggagttcgacggggaggtcgctgacaatctgcacgaggagctggccgaggctgcgttctacgagcgaaagtcctacgagagccggcacttctaccgccactggattgcagccgttcgcatggagtttcctcttcggagtgatcgtccatccgataaggcctgcatgacaaagtggttggtgggcaagatgagggcaaagggcattcgcatcactcacattgaggatgctgtgccccggatcgtggcaatggccatcaaccccagccgtgctgaggttgaggctagggagatggccgaggctgccgatgcctggcgaaccccccccgcccttacgtgggtggagtggttgctaggcatgacgccgaagccgacttccgcgtcgaagtgggaatagtggtgccctgtggctgcgcctcagcgtgctggcgatgttggtggcattgcgcgccatctcgccgac

SEQ ID NO: 2657 - DNA, 1000 bp, Linepithema humile C virus 1
  misc_feature 1..1000: note = hypothetical protein genes, complete1
  source 1..1000: mol_type = genomic DNA
tcccgtgtcaggcacccccagttttcggccttgaagcacaactgcatccccacattggatagcgcagacatatggcgaaatgctaagtacccatcgagtccgtttgacagttgcaatggcctggcacaacattgcccagtaaagtcatccttcccaggggctgctttaatacattcagattattatctgagttctgaggacttggcagccgtcatcaggtcgcacactttcatagtcacccacccatttgatggggaggaagggtgtttcaatgacgagttacattggaggaaagagggaccgtacatacgtgcgtggactgatgatggcacgccgtacaagcacttgtaccaccattgggaggctgaggggtgcataattgggagacatggagccgccacttacgtgagggtgcacagggggccgagcatggatgtgtactactgctttccatcaccaggcgtctaccgatcagacgacccgctcaggttgagaaggagtgacgaagtgctgatgcaccgattgcctagcgggaatttttattcagtgactaatggtagtgcgaagatctatgaccccgattttaaagtgttgcaagagataccgcatggcatcttacaacgagtggcagccaggtgtgggacagccgtccgtgatgagaagtttctaccggcgctggttgcttatacaacaacaaggttcacagcagacaaccaagacttgcatgtggtggaggatgtcatatcggtggccctgcggcatagcgacatgtttgccttgaatgtgtcttccaggtacattaccaatttcgatcccatgcgaatcaccaactttcagaggctggtgtgggtgtggaatgacttgcgctccagcttgagagggtattggaggttgcccctgacaactagcaacccactagtcaaccgtgtcactaccccttgggcatttagtcgtatatccgtcaacagttacgttcgtttcacccattatggactggtag

SEQ ID NO: 2658 - DNA, 1000 bp, Beihai mantis shrimp virus 6
  misc_feature 1..1000: note = strain BHXG24422 RNA-dependent RNA1
  source 1..1000: mol_type = genomic DNA
accaaagtgcaagagttcgtttgtgcctcggagcaggtagtcgagggagactactcaaacttcgatggcagcgtgtccgcggatgctcagaagtgcgtgatgaacgccgtttatcacaggtatttccggagtgagttccaagaagaactcaccggctacaccagcatgctcatcacttgtcctgctaggtccaaaaccttcgggttcaagtatgacgctggtgtcggagtcaagagcggctccccaacaacctgtgacgcaaacaccgttctcaacgcctttctgcaatacatagccgtaagacggacactgccagagctctcaccagaagacgccttcctccaaataggattggcgttcggggatgactctctttgcaacagtcagttctccaaggcttggaccaaggcagccacccaactagggttcgcactaaaagtcgaaaagtgcgctcctgacacgggtgtgacattcctggcccgggtctacccagatgcgaaagcaagcctgacctccttccaggaccccgtgcgcacattacgcaaggcacaccttaccgggcgggacccaaatgtcccactcccggatgccgcgtgcgatcgcgccgagggttacctggtgaccgataaggagactccggtactgggtgaatacttccggttcgttttgcgccactatggaccgcaacggaccgcgaaggtgagagccgacagttgcagtgagaagccatactggctgacgcaaggcggaagctggccccaggaggcaaaggacttcgacttgatgctacactgcatggcagcacgcacaagcttcgaggtcgagaccttacgcgccatggaacttcactacaagagcgcgaaggacccctggacccccttaccttgggtgctgggagatgaggacccgacgcgggatacgcttaacgccgagggtctcccaagcacgggggcggtggactcacgtacatatgaaaaggacgtggagagagtaatccgtg

SEQ ID NO: 2659 - DNA, 1000 bp, Barns Ness breadcrumb sponge weivirus-like virus 2
  misc_feature 1..1000: note = isolate H35,1
  source 1..1000: mol_type = genomic DNA
tgagtgtaaaaatgggaggcccgtcccagtccaccgaattaccttctttctcacacttcctcggtgtgggatatgagccaatttgcgggccgctgccgggcggctgaaggtgaaggccacgcccacgccacgacccgtggctattcggggcgcatcctgcatcctatcgggattaaaggttgaaggagcttccaagtaacccaacaggggctctggaacctagatgcagggtgggtgactacggcccgacgatcacggaatgagcacccgtgtgtcactcatttgcacggcaaggtgggcatgccaccgtgtagagtacgtcggttgggaacatgtcaagaggtggcttctcggctaagccgatggccagggttttagagcgcatgtatagaatgttgctagtgtttgctgtagtttttggtgtgttagaaatcttttgggttgcgtttgggtttgggtgtgcactccttcaaattaataggttacccctcgcctactgttgcaatcagcttcgttctcggtgagctcaacagcgactgtcaaccgacgcggtgtggtgagccgtcattggaggagtggtctcctttgattggcacgtactctagccaagaggtgcgactggtagaaggcatcgaacattgttaatcgtcctgtcttgtcattctcgtccatgacaagtttcgcatagaggccgtaatcagttcgattctttcctgggtgagctattcctgcgcttgtcggaataactctttgcggtggaagccacatcggtgagctcaaatgtgttttgggtcgcgacgcgggaagcggaggaggggccgaaaggccactcgtacgaagccaagggtattctgattgttgaggttgggtcgggcagcacccatcgccattcctcaatccacatgatttcacacacacactcacacagccacaacagcggcatgtattttcaagtgtccctcgcgcattgggtcttaggattttcggaacattcttcacc

SEQ ID NO: 2660 - DNA, 1000 bp, Barns Ness breadcrumb sponge weivirus-like virus 3
  misc_feature 1..1000: note = isolate E6,1
  source 1..1000: mol_type = genomic DNA
gggggctggcgtgcgctagcgttgtcaaggacggcaagctggtgcgacagaagttattgcaattggatgagattgcacggggcgtggacatcactgatgaccacctttacgaccccgtgcagtatctgtccatgttcgagttgggcccattggagccgagcttctcgaacgtggcaggacggctctcaaaagctgttgagtacaacaatcgcgcaggcctcccgctcgaggatctgcgacaaaagcttattgagtgcgtgtcgagtgggcagaagtgtgcgaaagctcagggccaacccggtgcacaccattcccaggacaagggaaagggccggggagcgcttggacgcagcggtaagggggggcagacagccgcctcccaccactaggtggtcatagcctcctgttgcaaacacgcagtgcttcggcactcgcagcaggagggcgttggagcgtggggatcgccgtcggtgtgggaatccggcggtgacggcgtcagtcgtggggggttcggcccttatacgacaggctgatgtacgaagtaactggtggcttaggctaccaccagcgaaagaggcccgtggctgcggtcgcctcttttggctgcttggttgttgaccgaagtgagttgcgctactttggatgttgaatttagcctagtgcttcattcgacgccagttttgcgcgatttatcaacaatcgagttccccgaaccgacaccctgtgggtgctcagcttggaagcgggtcgtgatatatgattagcaaatacgcgggctatacttgagccgtccgtgatcactgcaacggataatgtcacgccgtggaaaggtgaaccacctatcacgttggtaagggtaacccggccgggatgggagcacattcaccatgtgcccggccactccatgtagctcaaaggcacagattaaccagctacaagcctaaaggaacctctcctgaacgcaccgctgtcgaacgacagctacaacgactttttcgct

SEQ ID NO: 2661 - DNA, 1000 bp, Filchner virus
  misc_feature 1..1000: note = isolate Antarctic89 RNA-dependent RNA polymerase1R
  source 1..1000: mol_type = genomic DNA
tccttacaggatgggttaaaagcccttgaacctgttaaagctacatttttgcgtacgcgcaaacgtgatagtttcactgatgaggatacaatcataggttccccttacgggtcccatcaattgtctccttgtactgccagctttagtcgtgagactgtggctcgtgcacaagtgtatactattttaacagctgaacaggcaaaaatgaggcgttacttacttggtccagttacaaccgcatgggaacttgttcctttgtcttttgttgttgattgggtcgtacaagtaggcgattttatcgcttcatttcgtatgctccccaaagagtcacagggaataactttttctgtgaaagataaggtggaaattctagcggtcgctagtgcagactctaaactaatcatacgttcggacggttatattgtgtccagaattgatggtagacagagtttgagctactccaagcaacgttacacgcgcggggtaattccaaatgattttaaacatgaaatcccggttggcgttcaaatgaacctgtgtcgtactattgacgcattttctctcgcttataaaatcggactaagccaattaaaaaggagacattaacaatgtcacaatacaaaacgcgtactcgcggagaagccaaaactgtgcttgttaatccgtcaagctataaatcaacgcttgaggttatccacagtttcaaacgagacacagcccttaatcaggaccaagtccgaatcggtgttgcttcggcatatactgatgtagttaaaacctgcaaggactcctgtggcgtgccacgtcgcgagctggttaagcttgaaatgcctgttttattaggcatggacgaagcttattacaccagaaagaaacaacagctgactgacgttttagcgtcgggtcagaaacttctcgaagcattcgatgatgtgcagattggaatcattcctgatctgaacgtcgaagctactgtcgcttaacaataaggaatataatt

SEQ ID NO: 2662 - DNA, 328 bp, Picornaviridae sp.
  misc_feature 1..328: note = isolate ybw202shi02 genomic sequence.1
  source 1..328: mol_type = genomic DNA
ttcgtccgaccactacatccaaccaacctcctcgcttgattggttgaagtatcatactgtccgtggtcccaaaaccttttacatcgagattctctcatcctgtgctagtgcccatttacttctaattactactcgaaaaccttcttacatcagcgagagcgccgactttgagacaccaacttgcgttgagctacccgctcctctagacgtctccattccccttcgagatcgtcttgttccgaagaaagcatatgacaatgcgtttgtctatgttcgtgctgttcgcacccttcgcaagactgatccagccggctttgttcgcacccag

SEQ ID NO: 2663 - DNA, 354 bp, Bat pegivirus
  misc_feature 1..354: note = isolate PDB-694 polyprotein gene, complete cds.1
  source 1..354: mol_type = genomic DNA
acgacgcagtctcaccaatggactggcacggtccacaggagttgtcccttccggtgtgaataaggggccgtcacgagcggtgacgtaaaactgagggagattaggccagggtaacttggcgtgcgtacggccacgtcgcttctagatttcaatgccactcttgtggggcgagttgtcaaggccagcacggcggggcccccatactggttgggggtactcaatcgcctagtccagattatgccatgtttcccccaggcgggcgtagcgctacatgcggccaagaggaaaatccctatgggtgacctcgggggaaccttttcttttttagcggtcatggggtggtgtaccgcaacc

SEQ ID NO: 2664 - DNA, 365 bp, Pasivirus A3
  misc_feature 1..365: note = isolate CS15-4016, complete genome.4R
  source 1..365: mol_type = genomic DNA
ccatcatcaaatatatacggagttttacgacacatacaacgacgcatgcgcaaccccacctacggttgcccgcgcatgcacagttgctgacatgcgcagtaaaaccaggaaatgactttgcattttcaagaaggtcacacgtaagcggatctctccgggtttttaaggctttttaagcatttttaccggatttttgacgtttaattattatctaaatgactcatctcatccctttaaatgtgctaacctgcaaggggacggtagagctgctttcctgcgactggtggaggtctgcgttggtttcacagtgggtaagtgagcctttttctgcctacttttatttctagacagattctgagtggctt

SEQ ID NO: 2665 - DNA, 383 bp, Rodent pestivirus
  misc_feature 1..383: note = isolate RtAp-PestV/JL2014 polyprotein gene,1
  source 1..383: mol_type = genomic DNA
tgtataaggaaggggtgggagccttccctatacttgtttacaaataccatacagtgttacagcagtgtgtagtttactatgcaggtttgaagggcggggatagtctgtgccagcagacgtgtaccagcacttcagaaggaacctgcaactgcgaaccgggagagcatctagagcccctaagctgtgagtacacagcagccgtcagagagtcagctggaaaggatcacccacctggaagctctcgtggacggggtcatagaccaagggcaactctattgaggaggtggggtacctcttcatacaccccagtggtgtgatgtgctgcctgacagggtcccggctgatggcccggctagcagtataaaaatcagttgtaatggcac

SEQ ID NO: 2666 - DNA, 397 bp, Chicken proventriculitis virus
  misc_feature 1..397: note = isolate CPV/Korea/03 polyprotein1
  source 1..397: mol_type = genomic DNA
gtaggttatatggagttcatgctcgttctgaaccgggaatggcacaacccgtagtaggatcttgcctctgccatattaatctgcgcctgttgcttctagactatgggctgctaaggatgatgttggaactcctttttggatattccatatcaagtcaactgtttcacctggtgtacgctggaaatccatgctttaagtcctcatccggaggtggtgctgaaatattgcaagccacggatgactcttgaagcctggtgccgctactaggtgttacaccctttatgggcaaatgttgaaccttagtggacgcgtgagatgggaatccacgcctggccatagactggctgataagctcgcggctgatcgagttgcaacagtaatcagttgatttgccact

SEQ ID NO: 2667 - DNA, 415 bp, Turdivirus 1
  misc_feature 1..415: note = strain 00356, complete genome.1
  source 1..415: mol_type = genomic DNA
tcctcacccatgcttttcctacccccaccacgcccgcatgtttactgctttccttgatgctgcccgtgactacttccatgacctccccaacccaaacctcaaacgccttaagctatcatgggctctctatcaccaatccccttccttcccacccagaacccccccctccctcccctacaacgtgtatgagcaagacgagtttgacaagctcgccgaagccatgctcacccactctcccttccccacatcccattacctcttccaccccctcccgtccaacgcccgcaccatcgtcgagcgtgaggctgactgggatggctgtgatctagaaaagaaatggctcgacctcgtcatagaggacgatgccaagttccttctggagaacggctctctcccgtttggctccacccttgcc

SEQ ID NO: 2668 - DNA, 415 bp, Turdivirus 1
  misc_feature 1..415: note = strain 00805, complete genome.1
  source 1..415: mol_type = genomic DNA
tcctcacccatgcttttcctacccccaccacgctcgcatgttcactgctttccttgatgctgcccgggactacttccatgacctccccaaccccaatctcaagcgtcttaagctgtcctgggccctttatcatcaatccccctccttccctcccaaaacccccccctcccttccctacaatgtgtatgagcaagacgagtttgacaagctcgccgaagccatgctcacccactctcccttccccacttcacactacctcttccaccccctcccctccaacgcccgcgccatcgtcgagcgtgaggccgactgggacggctgtgatctggaaaagaaatggctcgacctcgtcattgaggacgatgccaagttccttctagagaacggctccctcccgtttggttccacccttgcc

SEQ ID NO: 2669 - DNA, 425 bp, Duck picornavirus TW90A
  misc_feature 1..425: note = complete genome.1
  source 1..425: mol_type = genomic DNA
cccccccccataccttttccccctctttaacggcaatggttaatggactaaggataaaggattatggacttatatgatgtgcccgacatggaattcgggaaatctggatctaagggttacctcaaaggtagtgaaattccctcgcaggggtatagtagctagctttgtgccttagtgaagggaccgtgtgttctagacatggtagttgtgtaggtacaagaggacttcatttgaatatcctcgatcccggacctaaattaccttgtggatttccggaggaatttaggaaaccacctccttcgggaggctagtaggagcttacatgactctcggattgggaagtccgagctggaccatgactgggtgatagcctgccggctggcgcagttcacatggtatagtcagttgaaaataaatagaaaatc

SEQ ID NO: 2670 - DNA, 430 bp, Picornaviridae sp.
  misc_feature 1..430: note = isolate cftwhg06pic2 genomic sequence.1
  source 1..430: mol_type = genomic DNA
ccacccccctttcaacggctggcccacgatacgggccacaactttcctatcatcttctcatttcctataggttcggtttaatggttttgacttctgcattaataatggttttgtatgtggatgaccgtactatggatttggtgtgttaagctcacgttaaaaagctaggtggaatggatttgctacctggatggtcccccaggattaatggtaactccctctttcaccgaagtcaggaggaagagtagatgcttctagagttctgtgctctgtattacacagcaccgctcagctggcgtggacttccggccattggttgagttgacactaggagtagccagtactgggataactggcctggtctatactgctgataaggtgggttgcctgaccctctaaacctgactataattcaggctgtcttgatgcg

SEQ ID NO: 2671 - DNA, 461 bp, Turkey hepatitis virus
  misc_feature 1..461: note = 2993D polyprotein gene, complete cds.1
  source 1..461: mol_type = genomic DNA
ggcaagttgatatactggctctgatcacggactattctggtgttggtggacactctctccacaagtaggcgccgtggagttcatgctcgttctgaaccgggaatggcacaacccgtagtaggatcttgcctctgccacgtgcacctgcgcctgttgcttctagactatgggctgctaaggatgatcacagactcctttttggacaatctgtgtcaagtctactgttacatctgatgtacgctggaaatcctcgtactggaggcaatacctggaggtggtgctgaaatattgcaagccacaggtgtgtttctagtcttggtgccgctatcagatgtcgcaccctctacgggcaaatgtagaaccttagtggacgcgtgagatgggaatccacgcctggccatagactggctgataagctcgcggctgatcgagttgcaacagtaatcagttgatttgccact

SEQ ID NO: 2672 - DNA, 493 bp, Foot-and-mouth disease virus
  misc_feature 1..493: note = - type Asia 1, isolate1
  source 1..493: mol_type = genomic DNA
cttgaggaatacttgtacaaacacgatctacgcaggtttccacaactgacacacacaccgtgcaatctgaaactccgcctggtctttccaggtctagaggggtgacactttgtactgtgcttgactccacgctcggtccactagcgagtgttagtaacaggactgttgtttcgtagcggagcatgatggccgtgggaactcccccttggtaacaaggacccacggggccgaaagccacgtcctaacggacccgtcatgtgtgcaaacccagcacggcaacttactgtgaaaaccactttaaggtgacactgatactggtactcaaccactggtgacaggctaaggatgcccttcaggtaccccgaggtaacacgcgacactcgggatctgagaaggggactggggcttctttaaaagcgcctagtttaaaaagcttctacgcctgaataggcgaccggaggccggcgcctttcctttaaactgttttaactta

SEQ ID NO: 2673 - DNA, 502 bp, Simian enterovirus J103
  misc_feature 1..502: note = isolate cg3697 polyprotein gene, complete1
  source 1..502: mol_type = genomic DNA
aaaacgatcgttacccggctatctacttcgagaagcctagtaacaacattgaaactcttgagcgttgcgttcagcacagtaacccctgtgtagctttggctgatgagtctgggcactccccactggcgacagtggcccaggctgcgttggcggccaaccgatccgggcaaccgggtcggacgctcacttgtggacatggtgtgaagagcccattgagctagatagtagtcctccggcccctgaatgcggctaatcctaactccggagcaaacgcacgcaacccagcgtgtagtttgtcgtaacgcgcaagtctggagcggaaccgactactttgggtgtccgtgtttcctgttttaccttatttggctgcttatggtgacaatctagagttgttaccatatagctattggattggccatccggtgaatagatctcgatatattttattgcacagccttttatagcttgaattcataagtctcacttcaactcagaagtaatc

SEQ ID NO: 2674 - DNA, 506 bp, Foot-and-mouth disease virus
  misc_feature 1..506: note = - type SAT 2, isolate Buffalo 10 QE1
  source 1..506: mol_type = genomic DNA
acgaaacgcgccgcctcttttggacttcttgtacaaacacgatcttgaagcaggaatcctcaactggcacacccgtgcaactgtaagtttcgcctggtctttccaggtctagagagatgagcagctgtactgagactaactccacaattggtctactagcgggtattagtaacactcactttgcttcgtagcggagcacatgagcgttgggaactcccccatggtaacatggacccaacgggccaaaagccacgcctcgtgcctcatgtgtgtgcaaccccagcacggcaatttgtttgtgaaacacaccttaaggtaacactgagattggtacttggtttctggaggcaggctaaggatgccctttaggtacccggaggtaacaagagacactctggatctgagaaggggaccggggcttctataaaagtgcccggtttaaaaagcttctacgcctgaacaggtgaccggaggccggcaccttttcccatctacaacttttatct

SEQ ID NO: 2675 - DNA, 507 bp, Foot-and-mouth disease virus
  misc_feature 1..507: note = - type SAT 2, isolate Buffalo 6 QE1
  source 1..507: mol_type = genomic DNA
acgaaacgcgccgcctcttttggacttcttgtacaaacacgatcttgaagcaggaatcctcaactggcaaacccgtgcaactgcaagtttcgcctggtctttccaggtctagagagacaaacagatgtactgagactaactccacgattggtctactagcgggtattagtaacactcactttgcttcgtagcggagcacatgagcgctgggaactcccccatggtaacatggacccagcgggccaaaagccacgccttgtgcctcatgtgtgtgcaaccccagcacggcaacttgtttgtgaaccacaccttaaggtaacactgagactggtacttggtttctggagacaggctaaggatgcccttcaggtacccggaggtaacaagagacactctggatctgagaaggggaccgggacttctataaaagcgcccgttttaaaaagcttctatgcctgaataggtgaccggaggccggcaccttttctttttattaactttaaatct

SEQ ID NO: 2676 - DNA, 507 bp, Foot-and-mouth disease virus
  misc_feature 1..507: note = - type SAT 2, isolate Murchison Falls1
  source 1..507: mol_type = genomic DNA
acgaaacgcgccgtcacttttggaacacttgtacaaacacgatctaatgcaggtttccttaactgacacacccgtgcaatttgaagtttcgcctggtctttccaggtctagagagacaacactttgtactgagactgactccacgattggtctactggcgggtgctagtaatgactttgttgcttcgtagcggagcatgcaagccacgggaactcctccttggtgacaaggacccgtggggccgaaagccacgttctctgaaccttgcatgtgtgcaaccccagcacggcaacactgttgtgaaacacactttaaggtaacactgagactggtacttggtttctggagacaggctaaggatgcccttcaggtacctcgaggtaacaagagacactcgagatctgagaaggggatcggggcttctgtaaaagcgcccggtttaaaaagcttctatgcctgaataggtgaccggaggccggcaccttttcctttaacactacttacttt

SEQ ID NO: 2677 - DNA, 508 bp, Foot-and-mouth disease virus
  misc_feature 1..508: note = - type O, strain O/KHO/IRN/L5/2010,1
  source 1..508: mol_type = genomic DNA
acgaaacgcgccgtcgcttgaggaagatttgtacaaacacgatctatgcagacttccacaactgacacaaaccgtgcaacttgaagctccgcctggtctttccaggtctagaggggcgacactttgtactgtgcttgactccacgctcggtccactggcgagtgttagtaacagcactgttgtttcgtagcggagcatggtggccgtgggaacccctccttggtaacaaggacccacggggccgaaagccacgtcctaacggacccaccatgtgtgcaaccccagcacggcaacatttctgtgaaagctactttaaggtgacactgaaactggtactcaatcactggtgacaggctaaggatgcccttcaggtaccccgaggtaacaagcgacactcgggatctgagaaggggactgggacttctttaaaagtgcctagtttaaaaagcttctatgcctgaataggcgaccggaggccggcgcctttcctttaaactgtttcaactta

SEQ ID NO: 2678 - DNA, 512 bp, Foot-and-mouth disease virus
  misc_feature 1..512: note = - type Asia 1, isolate1
  source 1..512: mol_type = genomic DNA
gcgcacgaaacgcgccgtcgcttgaggaatacctgtacaaacacgactcacgcaggtctccacaactgacacaaaccgtgcaacttgaaactccgcctggtctttccaggtctagaggggtgacactttgtactgtgcttgactccacgctcggtccactagcgagtgttagtaacagcactgttgcttcgtagcggagcatggtggccgtgggaacccctccttggcgacaaggacccacggggccgaaagccacgtccttgtggacccaccatgtgtgcaaccccagcacggcagctctactgtgaaaaccactttaaggtgacactgatactggtactcagacactggtgacaggctaaggatgcccttcaggtaccccgaggtaacacgcgacactcgggatctgagaaggggactgagacttctttaaaagtgcccagtttaaaaagcttctatgcctgaataggcgaccggaggccggcgcctttctccttaactaccacttctta

SEQ ID NO: 2679 - DNA, 514 bp, Foot-and-mouth disease virus
  misc_feature 1..514: note = - type O, isolate AMU_200, complete1
  source 1..514: mol_type = genomic DNA
gcgcacgaaacgcgctgtcgcttgaggagaacttgcacaaacacgactcacgcttgtcttcacaactgacacaaaaccgtgcaacttgaagctccgcctggtctttccaggtctagaggggcaacactttgtactgtgattgactccacgctcggtccactggcgagtgcgagtagtggtgttgttgtttcgtagcggagcatgatggccgcgggaactcctccttggtaacaaggacccgcggggccgaaagccacgtcttaacggacccatcatgtgtgcaaccccagcacggcaaccacaccacgaaaaccacttcaaggtgacactgatactggtactcaaccactggtgacaggctaaggatgcccttcaggtaccccgaggtaacacgcgacactcgggatctgagaaggggactgggacttctttaaaagtgcccagtttaaaaagcttctatgcctgaataggcgaccggaggccggcgccttttccacaatttaatacttctttt

SEQ ID NO: 2680 - DNA, 516 bp, Bat pegivirus
  misc_feature 1..516: note = isolate PDB-303 polyprotein gene, complete cds.1
  source 1..516: mol_type = genomic DNA
tcctttagaattaatggaacgctaggcttccggcccgaaagccgtggatctcccctgacagggttcttcgggtaaatcccggggggagtggtagcggtattagggtaggtcgtaaaaactgccccagtggggctacctagttgttaccggcaggacgaacggcgcgtcctgaaggactggcacggtccacaggtgtggtccctaccggtgtgaataaggggccgactcaagcggagtcgttaaactgaggctctagtgtcaagggtaacttgggcttgtgtacgtccacgtcgcttctagagttcaatgccagcactaggctggggcgagttgtcaagggcaacaggcgcgggggtggattattgttttccaccactcaatcgacactcgggtaatatgccatgctccctcccaggcgggcgtcgcgctgcaggcggcctagaggaaaaatccgaaaggtgacctcgggggggacctctcttctcttagcggtatgggtgtggtgttaccgcaacc

SEQ ID NO: 2681 - DNA, 520 bp, Goose megrivirus
  misc_feature 1..520: note = isolate HN56, complete genome.1
  source 1..520: mol_type = genomic DNA
ttcgggacactggatgggcgactcggtggggctgccaccccgtcttgacttctcgttgttgaccctggaattctagaacattctcttgtcttctgcgtctggtccacggacggactaattggaatgtttattggttaagcctcgttctgaaatgccctagccaatgggctatagtaggatcttggtgtttccagtgaacctcttccgaccatagtagctagagttatggctgtgtaggatgtgggtaagaccgctttttgcgtatctcccacaagacaccggatcatgggtgtgtccgctggataaggctcgaaacctcccaactgacggtggtgctgaaatattgcaagcctaagttgtgtagaggcaagtagatgcccgccgcgacatctgtgatccgcccgtctgggttagtagtgtacctacatggacgtggggttgggaatccccacctagcataacactggttgatagacctgcggctggtcaagttactatggtataaccagttgaaatggct

SEQ ID NO: 2682 - DNA, 522 bp, Foot-and-mouth disease virus
  misc_feature 1..522: note = - type A, isolate 4235 polyprotein1
  source 1..522: mol_type = genomic DNA
gggacgtctgcgcacgaaacgcgccgtcgcttgaggaagacttgtacaaacacgatctacgcaggtttccacaactgacacaaaccgtgcaacttgaagctccgcctggtctttccaggtctagaggggcgacactttgtactgtgcttgactccacgctcggtccactagcgggtgttagtaacagcactgttgcttcgtagcggagcatggtggccgtgggaacccctccttggcaacaaggacccacggggccgaaagccacgtcctaacggacccaccatgtgtgcgaccccagcacggcaactttactgtgaaaaccactttaaggtgacactgatactggtactcaaacactggtggcaggctaaggatgcccttcaggtaccccgaggtaacaagcgacactcgggatctgagaaggggactgggacttctttaaaagtgcccagtttaaaaagcttctatgcctgaataggtgaccggaggccggcacctttcttttaaaccacaactatcctt

SEQ ID NO: 2683 - DNA, 527 bp, Foot-and-mouth disease virus
  misc_feature 1..527: note = - type O, isolate O/K/52/19921
  source 1..527: mol_type = genomic DNA
tttgagaaatgggacgtctgcgcacgaaacgcgccgtcgcttgaggagacttgtacaaacacgatctacgcaggtctccacaactgacacaaaatcgtgcaacttgaaactccgcctggtctttccaggtctagaggggtgacattttgtactgtgcttgactccacgctcggtccactggcgagtgttagtagtagtactgttgcttcgtagcggagcatggtggccgtgggaaccctccttggtaacaaggacccgcggggccgaaagccacgtcctaacggacccaccatgtgtgcaaccccagcacagcaattttactgtgaaaaccacttcaaggtgacactgatactggtactcaaacactggtaacaggctaaggatgcccttcaggtaccccgaggtaacacgcgacactcgggatctgagaaggggactgggacttctataaagtgcctggtttaaaaagcttctatgcctgaataggcgaccggaggccggcgccttttcactaaccactacttttt

SEQ ID NO: 2684 - DNA, 529 bp, Goose picornavirus 1
  misc_feature 1..529: note = strain goose/NLSZK2/HUN/2013, complete genome.1
  source 1..529: mol_type = genomic DNA
ttctttgaaaagggtactgggggggtcgattctagacccccacctagcccttttccccgtcagtggggggcttactcactgggcatctgttaatctggcctaactagattgacaccactcccttggaacgtaactccacgctaactcactggctctacgcacagacacacggtctttctgctatccccggggaagataccagatggcgaccggctgtcccagcggcctagtagctactcgggttgagtacccaccacggttttgacgcctgctaaaattcaagagacagaggtaggggtgcttagtgtgtgggggaagttcccacaagcgaggcaaagcattgctccctcgcgtcaccgggtgcaaggtaaattggctggacttccgctctacccttgctactcgccctcttcggagggttcgaagtgacactaggtatacgcatggttgggaaaccatgcctggcctactactgggtgatagcctggcggcgggtccgtctcttggcttatacccgttgatttgggat

SEQ ID NO: 2685 - DNA, 529 bp, Foot-and-mouth disease virus
  misc_feature 1..529: note = - type O, isolate O/K/109/20001
  source 1..529: mol_type = genomic DNA
tttgagaaatgggacgtctgcgcacgaaacgcgccgtcgcttgaggatgacttgtcaacacgatctacgcaggtatccacaactgacacaaaaccgtgcaatttgaagctccgcctggtctttccaggtctagaggggtaacactttgtactgtggttgactccacgctcggtccactagcgggtgctagtagtggtaccgttgcttcgtagcggagcatggtggccgtgggaattcctccttggtgacaaggacccacggggccgaaagccacgtcctgacggacccaccatgtgtgcaaccccagcacggcaactttaccacgaaaaccactttaaagtgacactgaaactggtactcaaccactggtgacaggctaaggatgcccttcaggtaccccgaggtaacacgcgacactcgggatctgagagggggaatgggactcctttaaagtgctcattttaaaaagcttctatgcctgattaggcgaccggaggtcggcgcctttccattaactatcactcactat

SEQ ID NO: 2686 - DNA, 532 bp, Foot-and-mouth disease virus
  misc_feature 1..532: note = - type O, isolate O/U/25/20061
  source 1..532: mol_type = genomic DNA
ttgagaaaaggggcgtctgcgcacgaaacgcgccgtcgcttgaggatgacttgtacaaacacgatctacgcaggtatccacaactgacacagaaccgtgcaatttgaagctccgcctggtctttccaggtctagaggggtaacactttgtactgtgattgactccacgctcggtccactggctggtgctagtagtggtactgttgtttcgtagcggagcatggtggccgtgggaatccctccttggtgacaaggacccacggggccgaaagccacgtcctaacggacccaccatgtgtgcaaccccagcacggcaactttaccacgaaaaccactttaaggtgacactgaaactggtactcaaccactggtgacagactaaggatgcccttcaggtaccccgaggcaacaagcgacactcgggatctgagaaggggactggggcttctttaaaagcgcccagtttaaaaagcttctatgtctgtgtaggtgaccggaggccggcgcctttccatttaactattacccaccat

SEQ ID NO: 2687 - DNA, 550 bp, Foot-and-mouth disease virus
  misc_feature 1..550: note = SAT2/GHA/Tul/5/2018 gene for1
  source 1..550: mol_type = genomic DNA
ttgtaaccgcacggtttgccttcctgggggaagtaaaacacccacaagcttgacagttttgcccgttttcacgagaaatgggacgtcagcgcacgtaacgcgccgccactttggaatacttgtacaaacacgatcttacgcaggtttcccaactggtacactcgtgcaacttggagtttcgcctggtctttccaggtctagagggacgacactttgtactgaaaccagctccacgattggtctactggcgggtgctagtaatgactgtgttgtttcgtagtggagcatacaagccgcgggaacccctccctggtaacagggacccgcggggccaaaagccacgttctttgaaccttgtatgtgtgcgaccccggcacggcaacactgttgtgaaacacatcttaaggtaacactgagactggtacctggtttctggagacaggctaaggatgccctccaggtaccctgaggtaacaagcgacactcaggatctgaggaggggactgggacttctataaaagtgtccagtttaaaaagcttctatgcctga

SEQ ID NO: 2688 - DNA, 555 bp, Picornaviridae sp.
  misc_feature 1..555: note = isolate zftwig06pic1 genomic sequence.1
  source 1..555: mol_type = genomic DNA
ctgtgccttcctggtcataattggctccggctggttttgacttcggaacactggatgggcgattcggtggggctgccaccccttcttgctttttcggtgtgacattggaattctagacccttctttgtccctcgtgtctggtccacatacggactaaatggaatgtttgccagctaagcctcgttctgaaatgcccttgccactgggctgtagtaggatcttggtgtttctggtgaacctcttccgaccatggtagctagagctatggctgcgtaggatgtgagtaggaccactttttgtgtatccctcacaagacaccgggtagtgggtgtgtccgctggatatggctcgaaacctcccaactgaaggtggtgctgaaatatcgcaagcctaagttgtgtagaggaaagtagatgcttgccgcgacacttgcttcccacccttctctgggctagtagtgtacctgcgtggacgtggagttgggaatctccaccatgcatagcactggttgatagacctgcggctggtcaagttatcatggtataaccagttgta

SEQ ID NO: 2689 - DNA, 562 bp, Simian enterovirus 19
  misc_feature 1..562: note = isolate cg4006 polyprotein gene, partial cds.1
  source 1..562: mol_type = genomic DNA
ccaccaacccaggtgggttttccgtcaagcacttctgtctccccggacttagtaccaataggctgtacccacggccgaaagggaaaacgttcgttacccggctacctacttcgagaagcctagtaacatcattgaatgtctcaagtgttacattcagcacaaccccagtgtagttcaggtcgatgagtcaccgaattccccacgggcgaccgtgtcggtggctgcgttggcggcctgcctgcgggtctcactcgcaggacgcttgattcatgacatggtgcgaagagcctattgagctaggtagtagtcctccggcccctgaatgcggctaatcccaaccacggagccatgcgctacaatccagtggtgttgtggtcgtaacgagtaattctgtggcggaaccgactactttgggtgtccgtgtttcctgttttatttaccttggctgcttatggtgacaatctagagttgtcatcatatagcgattggattggccatccggatatatcttttgtgtgatttacctcttgctaccaagcaattgtcacttgttaataatacc

SEQ ID NO: 2690 - DNA, 566 bp, Bat pegivirus
  misc_feature 1..566: note = isolate PDB-491.2 polyprotein gene, complete cds.1
  source 1..566: mol_type = genomic DNA
cgtaggcgcctgggggttcgggtgcaagccccgaaaccgacccttacttcgaacaaccgttctagaacggctgggtcaactccccctttagtcaaaagcccagtgttgctggggtgccagggttcttagggtaaatcccggccccagtggatctgggaatatgataggaggagcggtgcggttcgaccaccgcacgggaccactgaccggcttgacgaagcggctagtagttgactagggcacggtccacaggtgtggcgtaccggtgtgaataacggcccgtctggagcgacagacgttaaactgaggggggtgtgaggatggcaacgcggcccgtgtacggggacgtcgctaaataccttcgggaacagctatgcgggttgtcaaccccagcggtggcgcggcctacctactgttggcaggtgccagttccctctcaccctcgcgaaagcagcacggggccccccagctggcgcagcgctacatgcggcaagaggaaaatccttcgggtgacctcggggggcatgtcccaaccaaacatgatactaggggtagcaactgccaag

SEQ ID NO: 2691 - DNA, 570 bp, Picornaviridae sp.
  misc_feature 1..570: note = isolate pst217pic01 genomic sequence.1
  source 1..570: mol_type = genomic DNA
agatgtgtataacacacaggcccccttttcccgaccggtttggcacaccgggcggttaccctgattagatgtctgggaattgctggacttcagtggctattgctgctgtcttctggcttttctgaactgggcatctagttgggttctttgccatccacactctaattcccattacgttttctctaccccttgattggtctaactggttaagtgactccttgcctgcttttgactattcttggtgctggtggacactctttccacaagtagatggtatggagttcatgctcgttctgaaccgggaatggcacaacccgtagtaggatcttgcctctgccatactcatctgcgactgttacttctagaccataggctatataggatgatcttggacctctttttgagcatcctggtcaagccaactgtgtcttgcaacatgcacgctggaaatcctcgctagaatgaaatcctgatggaggtggtgctgaaatattgcaagccacatcggctttcattctcttggtgccgctgtgttgctacacaccccatgtgggcaaatgttggacctat

SEQ ID NO: 2692 - DNA, 579 bp, Murine kobuvirus 1
  misc_feature 1..579: note = isolate MKV1/NYC/2014/M014/0146, partial genome.1
  source 1..579: mol_type = genomic DNA
gccaggtcgcatcgcctggttggtgaccaaactgctagatgctcctccctttccctcggggttggcgcaccgccatccctgcatcctccccccagcctgacatgctacaggctgtgcaagaaccccgcgaaagctgccaccgtggcaattgtgggtccccctcttgtcaaggcacagagtctttctcccttaaggctagacccctctgtgaattcagaggcggcaactagttgtgccactacatgcctcagacctcggtcgcggagtgctgttccccaaaccctgacactgccgcgtgagtatgctgcttggcaagcattgcctggatggtcgttccgctggggctgccaggtctggtaacagaccgctccagtgtgcgtagaccatctccagcttcggctggtgctcacaaggtaagactcggtgtaaggttcatgtgccaacaccctggaatgagtgaaaactctactgccctaggaatgctacgcaggtacccctgctcccttgggagccagggatctgagcgtaggctaattgtctgtcgggtagtttcatttcccaccctctagactgttcacc

SEQ ID NO: 2693 - DNA, 581 bp, Human rhinovirus A
  misc_feature 1..581: note = strain HRV-A43_p1224_sR3080_2008 polyprotein1
  source 1..581: mol_type = genomic DNA
ttgtgtttgagtgttgtatactgttattacggtaaccttatacgccagttttatatcccccttaccccaatgtaacttagaagtttgtacataccgaccaacagtaagcaatcatccagattgtttaaggtcaagcacttctgttaccccggtcagcgttgatatgctccaacagggcaaaaacagcaatgatcgttatccgcaagatgcctacacagagcctagtagcactctagaagaattctggttggtcgctcagttgcaaacccagcaatagacctggcagatgaggctggacgttccccactggcgacagtggtccagcctgcgtggctgcctgcacactcctttggagtgtgaagccttaatttggacagggtgcgaagagccgcgtgtgctcatcttgagtcctccggcccctgaatgcggctaaccttaaacctgcagccattgtttgcaatccagcaaatatgtggtcgtaatgagtaattgcgggatgggaccgactactttgggtgtccgtgtttcttttatttccatttgtatgcttatggtgacaatatatgatatatattgacacc

SEQ ID NO: 2694 - DNA, 584 bp, Avihepatovirus A
  misc_feature 1..584: note = strain SH02 polyprotein mRNA, complete cds.1
  source 1..584: mol_type = genomic DNA
ttcagctggtatggcatgcatgcatcgactgcttgggggtgtccctgacccccttaattcaacgtctagcccacgatacgggcaccctatccagtttatatccctttacctcccatggactgacttgtatggatttggatctaaattggattatcatttatttgtggtggttagccaaccatgctctggtgcaatgattccatgtattcatttggctaggtgccgacctaggaggtggtgctgaaatattgcaagccactggtgtcgttacttagcatctggatgcatggggttgattgcattctgtacagaggaaggctagcttatgccttgggctaatagtctttgttgtgaaacggattaccggtagtagcatcttagaccaccaaggttataggtgagtgtgtggtctagagtaggcacacatctgtccaggcacatgtacattgttacaactgctccagactagttcctgagggacagatgttgtggggggcttgggaaaacccccttaacctacactgcctgatcgggtcgcggctggtcgagtcccacacactataataccagtagaccttcatgca

SEQ ID NO: 2695 - DNA, 584 bp, Ljungan virus
  misc_feature 1..584: note = 64-7855 polyprotein mRNA, complete cds.1
  source 1..584: mol_type = genomic DNA
ggtcgaagccgcttggaataagactggtgctgttcacagtgtgttcacgatctatgcaacttctgtcttccatctgtgtctatgcaggtggataagggctgtacccgggcggtcctactctccacaggggcctgcgtaggtggctttcacctctggacagcgcaccccaccccgcctactgagtgaagggcatacggcttttctattgcgaattgtattgaagtttaggattaggtgtagcgaccacatgtgtgccagcggatctcccctggtggtaacaccagcctctgggcccaaaaggcatgtctctgaccacacatgtgcacaaccccagtgataatcctttttagtaaatgcttagtaacagtggattagcagtgctcctcaagctcagtagggcttaggtatggcaggttgaaggatgccctggaggtacccgcaggtaacgataagttcactgtggatctgaccaggggcccaccgggaattccccgggtagaagccttcgggccttgggttaaaaaacgtctagacctgtcccccagagggatctggggtttcccttttaaccccaattattcaat

SEQ ID NO: 2696 - DNA, 587 bp, Leveillula taurica associated picorna-like virus 1
  misc_feature 1..587: note = isolate1
  source 1..587: mol_type = genomic DNA
caatagggtaacctattgtaacttggacttattactttatcatatagtttattgtttaaatcggaactagtgtattatgtttaaataatatgtgttagcctttaaactttattctattatttgataaggttcaataagtttgtatgactagatccagtaactattgctcaattttaaaacaatcttaaaaatctgtatgaaacgcagatcaatttaatattttagaactacccgtatttatataggctcttctaaaatatgaattgttatcgaaagataccttattattggttgattaatttcttaatgtgcatggtggcacctttaataagtagatttccgtcattctctatttagagtacttttggacgttaactaatgctccattcagtctagaatgtatgataattaaactctagattgtataaactatcattatcgcaagtaccacatcaaataaaacttatgaaaaaccgcaattactcgatgataactttgctcctgatgttagtgatattactaatactaactttctcgaggaaagggtagtcgaaactagggaagcatatccatcaacatctcttact

SEQ ID NO: 2697 - DNA, 591 bp, Feline sakobuvirus A
  misc_feature 1..591: note = isolate FFUP1, complete genome.1
  source 1..591: mol_type = genomic DNA
tcacgcgcttttccggtggtcacccaccgttagggagcgccagcgttcgcgcttccgctaccaggtgacacactcctttcccctcccccattcccgttcccatcctctggactggtttctcctcacgattgaccagcagctgggagctgttaccagacgttggacagtaagtcccggatgcactatagggctggtggctagtgcttggtaagcactcaacgccatacctaatgtgtacctcggcttgccctcctggtcgtggtgaccggctgtttctcttcccttggctctagacgggctggtgtcctaccaccaccgttgcatgcagacctccccctgcgcactcgaacgccctgtcccagcagggttagtatgtgctgtgcagatctgcatgtgacaccccatccactggtagagcaggaagttgccctagctaacgcggcaagtattactttccgctacacgtccttgagattcctcggacctctggaactagggtgactgtgggcttgggaaaacccaccttggtcctgtactgcctgatagggtcgcggctggccgaccagtggatgtagccagttgttttgggat

SEQ ID NO: 2698 - DNA, 593 bp, Foot-and-mouth disease virus
  misc_feature 1..593: note = - type O, strain O/KAB/AFG/LI-709/2009,1
  source 1..593: mol_type = genomic DNA
acgaaacgcgccgttgcttggggaaaacttgtacaaacacgatccatgcaggtttccacaactgacacacaacgtgcaacttgaaaccccgcctggtctttccaggtctagaggggtgacactttgtactgtgattgactccacgctcggtccactggcgggtgttagtaacaggactgttgtttcgtagcggagcatgatggccgtgggactccccccttggtaacaaggacccacggggccgaaagccacgtccagacggacccatcatgtgtgcgaccccagcacggcaactttactgtgaaaaccactttaaggtgacactgatactggtactcaaccactggtgacgggctaaggatgcccttcaggtacctcgaggtaacacgcgacactcgggatctgagaaggggactgggacttctttaaaagtgcccagtttaaaaagcttctatgcctggataggcgaccggaggccggcgccttttcttttaccactactaaatttatgaatacaactgactgttttatcgctctactgcacgcttttagagagattaaagcacttttttcgtacacggacacaaggcaag

SEQ ID NO: 2699 - DNA, 593 bp, Pacific black duck megrivirus
  misc_feature 1..593: note = isolate1
  source 1..593: mol_type = genomic DNA
acgatggcgtgacgaaccatcgtgcgtgactctgctaagtcgtctgtgcctctcgggcatgttgtggctccggctgcaacatgcttgggacattggatgggcggcttggtggggcttagtcaccccgtttaggactacccggtttgatttctttattggattttgggactggtccaccgacggactaattggtatctgcaaggactaacagcctcgttctgaaatgccctagccaaagggacgtagtaggatcttggtgttccccttgtagctctgccgaccatattagctagagctaggactgtgtaggatgttctagacctctttttgagcaatctaggacaagactccggatctagatgtgtacgctggataaggctcgaacactcccgcgcgttaggtggtgctgaaatattgcaagccgacgtgtgtgtagagttagtagaagcccgccgctacatcgaaatccgccccttccggggttagtagagtacctgcatggatgtgtggttgggaatccacaccagtgcctagtgctggttgacagacccgcggctggtcgagttaatatggtataaccagttgatttggca

SEQ ID NO: 2700 - DNA, 610 bp, Human rhinovirus C
  misc_feature 1..610: note = isolate LZ269, complete genome.1
  source 1..610: mol_type = genomic DNA
ttaaaactgggcatgggttgaccccacccatgccacccaagtggtgtagtgctcttgtatttcggtacatttgcacgccagtttgccaccccttaccccaagtaacttagaagcatgtaactttgatcaatagggagtggtaagccataccacttgagatcaagcacttctgtttccccggctctagaggaatagaccttgcaaagggttgaagccacgaaagtcgttatccgcacacatactacgcaaagcttagtatttccttgaaagctcgccggttggtcactccgttaataccccattaacagacctggcagatgaggcaggaaactccccactggcgacagtgttcctgcctgcgtggctgcctgcacaccctctcgggtgtgaagccgactagtggacaaggtgagaagagccccgtgtgctatgtgtgagtcctccggcccctgaatgcggctaatccaaccccacatctgtcgcacacaatccagtgtgtaggcagtcgtaacgggcaactgtgggacggaaccgactactttgggtgtccgtgtttcctttatttcttttatgaatgcttatggtgacaatatcgagtaatattgttacc

SEQ ID NO: 2701 - DNA, 611 bp, Rhinovirus C
  misc_feature 1..611: note = isolate 3430-MY-10, complete genome.1
  source 1..611: mol_type = genomic DNA
ttaaaactgggttgtggttgttcccaccacaatcacctacgtggtgttgtagtcttgcatttcggtgcatttctatgccagttttatctccccagcccccgtaacttagaagaaaagaacacagaccaataggaggtggtcacccagaccacttacggtcaagcacttctgtttccccggttgatctagatatgctttacccgaggcaaaaactaaatcaatcgttatccgcaaagtgcctacgggaagcctagtagcactctgaaagcctatggctggtcgctccattgcaaacccagcaatagacctggcagatgaggctagacgtaccccaccagcgatggtggtctagcctgcgtggctgcctgcacaccctcatcgggtgtgaagccagaaagtggacagggtgtgaagagcctactgtgctcactttgagtcctccggcccctgaatgtggctaatcctaaccctgcagctgttgcacacaagccagtgtgtatgcagtcgtaacgagcaattgcgggatggaaccaactactttgggtgtccgtgtttctctttattccttatgttgacctatggtgacaagtgtgcaattcacgtttgtcact

SEQ ID NO: 2702 - DNA, 613 bp, Human rhinovirus A39
  misc_feature 1..613: note = strain ATCC VR-340, complete genome.1
  source 1..613: mol_type = genomic DNA
ttaaaactggatctgggttgttcccacctagatcacctacagggtgtagtacactgttattacggtaactttgtacgccagttttatatcccctccccgatgtaacttagaagcaagcacaaacgtccaataggcggtgattatccaaatcacttacggacaagcacttctgtctccccggcaactgctgatatgctccaacagggcaaaaacagcggaagtcgtcatccgcaaaatgcctacgcaaagcctagtatcactctagaaggtgtgtggttggtcgctcagccgtgaacctgacggtagacctggcagatgaggctagaaataccccactggcgacagtgttctagcctgcgtggctgcctgcacaccctcacgggtgtgaagccattcattggacagggtgagaagagcccagtgtgctcattttgagtcctccggcccctgaatgtggctaaccttaaacctgcagccaatgcacacaacccagtgtgtatttggtcgtaacgagcaattgcgggatgggaccaactactttgggtgtccgtgtttctttttattcttatcatattgcctatggtgacaatatatactgttatatattgttatc

SEQ ID NO: 2703 - DNA, 615 bp, Porcine pegivirus
  misc_feature 1..615: note = strain ND/33/2017 polyprotein gene, complete cds.1
  source 1..615: mol_type = genomic DNA
ccgctacccccccagcccgtgtaccggccctcgggccgcacgggatggggggggtagcgggggccggaggcccccgcgttctagaatggtgtgatcggttgccgctccagcggaaagcgggcgggatctagtggttagggttgttcgcgtaaatcccacactagtggtacgctcgtataacgtgggagcagccgggggggtcggccccccccctggcagctgctgagcaccggacgaagcgcggggggtgaacgctaacccgcagcccgggatgccaacgttaggcacgtcttggctggaagacgttaaacacagggccctccctcaaccccgatccgagaccagagttcaaggtacgccgcccttttaaaggcgttactcgtccaataggtctctccggcgggttgtcaaaccttgctggttccggtgacggttacgaggcagggcggggtggggatttaaacccccatccggcacgggggtaccaagctcggcacgcccagcacgcgtggcgtaggggaaaaatcctgcgggtgacccctggtaccataaagtaattaacatgagcatgccgctagggtgtgctttttccttccttgggaaggcggtggcacc

SEQ ID NO: 2704 - DNA, 615 bp, Human rhinovirus 45
  misc_feature 1..615: note = strain ATCC VR-1155, complete genome.1
  source 1..615: mol_type = genomic DNA
ttaaaactgggtcgtggttgttcccaccacgactatctacggatgtagtgctcttgtattccggtacgcttgcacgccagttttgtcacccccccctacattgtaacttagaagattaacacaaagaccaataggcggcaatgaaccacattgtcaacggtcaagcacttctgtttccccggtcaatctagatatgctttaccaaaggcaaaaactggagcgatcgttatccgcaaggtgcctacgggaaacccagtagcattctttatttgatctggttggttgctcagccgttaaacccaaacggtaaacctggcagatgaggctggaagatccccaccagcgatggtgttccagcctgcgtggctgcctgcacacccgaaagggtgtgaagccttttcaaagacagggtgcgaagagtctactgtgctcaccttgattcctccggcccctgaatgtggctaatcctaaccccgtagctgtggtgtgcaatccagcacattcgcagtcgtaatgggtaactgcgggatggaaccaactactttgggtgtccgtgtttctctttttccttttatatatgcttatggtgacaattatacggatatagttgtcatc

SEQ ID NO: 2705 - DNA, 615 bp, Human rhinovirus C
  misc_feature 1..615: note = strain 024, complete genome.1
  source 1..615: mol_type = genomic DNA
ttaaaactgggctcgggttgtacccacccgagctgcccatgtggcgtggtgctcttgtatcccggtacacttgcacgccagtttgcctctccttaccccgtaacatatctagaagaatgtgcataacggaccaataggtggtggcaacccatgccactgacggtcaagtacttctgtttccccggtgtgatgtggaatagactctctcagggttgaagccataagcatcgttatccgctacgtgcctacgcaaaacctagtagcattttgaagcttacttggttggccgctcagccactaacccgtggtaggcctggcagatgaggctgggcgcaccccactggcgacagtggcccagcctgcgtggctgcctgcccctctttgaggggaagccatttaagtgacaaggtgtgaagagtctcgtgtgctccacgtagaatccttccggcccctgaatgtggctaatcctaaccccgcagctattgcacacaatccagtgtgttgatagtcgtaatgggcaactgtgggatggaaccaactactttgggtgtccgtgtttcctgttttctttaaatacttgcttatggtgacaaatagtgtatactgtttgacacc

SEQ ID NO: 2706 - DNA, 616 bp, Equine pegivirus 1
  misc_feature 1..616: note = isolate C35 polyprotein gene, complete cds.1
  source 1..616: mol_type = genomic DNA
gacgcgcatcccgggtgaaagccccgggcgtacgacctggttcgggatgattcccgttctcagtgcggaggccccgcaaaccgagccgccctgtaggcaacttctagaatggggagttaactcctggcactggcccgaagcatgaactgatcgcggtggcagggttcttcgggtaaatcccggccgcgtgttgtgattgtgttagggcaggtgacagtcggcagggtcgaccccctgcttcaggaccactgtcttcctggacgaccgttgctgaaaaagggccgccacggtctgtagctcgccgacgcttctaattcaggccggaggaccacgctccgtaatcgagcccaagtactcaaaccccagcacccctgggtcacgccctacgccgcccttttaacgcttcggctaatagggtctatccggcgggttgacaaagggcgcagggttacctggtactacgagcttgggtgtccctgggagtaatcccagggtgccatgctgcagcgcaggcgggcgagggtggtgcctcggcctaggggaagagcgcaagtgaccccgtgctgcataaatcccccccctttttttctacatgggtgttccatgtgccgccaag

SEQ ID NO: 2707 - DNA, 617 bp, Pegivirus K
  misc_feature 1..617: note = isolate PPgV_903/Ger/2013 polyprotein gene, complete1
  source 1..617: mol_type = genomic DNA
ggctccccccccacctcgcgcggcccgagggccgatacgcgggttgggggggtagcgggggccggaggcccccgcgttctagaatggtgtgatccgtcgccgctccagcggaaagcgggcgggatctagtggttagggttgttcgcgtaaatcccacactagtggtacgctcgtataacgtgggagcagccgggggggtcgaccccccccctggcggctgctgagcaccggacgaagcgcggggggtgaacgctaacccgcggcccgggctgccaacgttaggcacgtcttggctggaagacgttaaacacagggccccccctcaaccctgatccgaggccagagaccaaggtacgccgcccttttaaaggcgttactcgtccaataggatctctccggcgggttgtcaaaccttgctggccctggtgatggttacgggagggggtggggcggggagtagaagccccgcccggcatgggggtaccaagctcggcacgcccagcacgcgtggcgtaggggaaaaatccttcgggtgacccctggtaccataaagtaattaacatgagcatgccgctagggtgtgctttttcttccttccttgggaaggcggtggcacc

SEQ ID NO: 2708 - DNA, 617 bp, Picornaviridae sp.
  misc_feature 1..617: note = isolate LoPV-1, complete genome.1
  source 1..617: mol_type = genomic DNA
gccccgacgagtcccgtgggatacctggtacgtgccaggaaaatcccacgggactcgtcggggctttacccctaatttcaacgttggtccacgaaacggccgttctttcttttttcttctattttcaatcttgactccgcactgatcttttggttctagacacaggcgcgtttggttatagagtaggatttggatatagttatgagagggttagccaacccattctgaaccactttaagtatgtcaatctgaattcatcagtaatatagcacaggaggtggtgctgaaatattgcaagccactgttttatttatatgaagaattcaagaacctacttaaggtggtgatgaaaaggctaggtttatccatagtaatcccttgttctgaaaaggtaatgcacagtccttagtaggatcttgggctctgcaactggctctaaaccgaccaatctaggtagaggcactaggtgtaggacttgccatattgtattacaatctggtaccgacaaaatgtctggaaactccacactgagggtgataggggggggccccttcacagttgtgctactgcttgatagagttgcggctggtcaacttagattggtataaccagtagaa

SEQ ID NO: 2709 - DNA, 620 bp, Foot mouth disease virus
  misc_feature 1..620: note = A12; L, P2, and P3 polypeptide coding1
  source 1..620: mol_type = genomic DNA
taccgcccatcccggtgttaaagggtgtaaccacaagatgcaccttcgtcccggaagtaaaacggcaatttcacacagttttgcccgttttcacgagaaacgggacgtctgcgcacgaaacgcctgtcgcttgaggaggacttgtacaaacacgatctaagcaggcctccccaactgacacaaaccgtgcaatttggaactccgcctggtctttcctggtctagaggggtgacactttgtactgtgtttggctccacgctcggtccactggcgagtgttagtaacagcaccgttgcttcgtagcggagcatgatggccgtgggaactcctccttggtaacaaggacccacggggccgaaagccacgtccaatcggacccatcatgtgtgcaaccccagcacagcaacttttctgcgaaactcacttcaaggtgacactgatactggtactcaaacactggtgacaggctaaggatgcccttcaggtaccccgaggtaacacgcgtcactcgggatctgagaaggggactggggcttctataaaagcgtccaggttaaaaagcttctatgcctgaataggtgaccggaggccggcaccttttctttacagccactgacttt

SEQ ID NO: 2710 - DNA, 622 bp, Human enterovirus C118
  misc_feature 1..622: note = strain PER161 polyprotein gene, complete1
  source 1..622: mol_type = genomic DNA
ggacgtcagtacaccggcattgcggtgcccttgtatgcctgttttatattccccccctgtaactctagaagaaaatgaactctgagctcaacaggcgttacgtttccagcgtgactacgagcaagcacttctgtttccccggttgcgccctatatgctgtgtgaacggcagaaaggggcaaaatcgttatccgcttgactactgcgggacgcccagtatcaccatggattgatttgagagttgcgctcagcacatccccagtgtagcctgggccgatgaggctccgaattccccacgggcgaccgtgtcggagcctgcgttggcggcctaccctcgcctcacggtgagggacgctcacttcatgacatggtgcgaagagtctactgcgctagttaagattcctccggcccctgaatgtggctaatcctaaccactgatcctgtaagtacacgccagtgcccagcaggtcgtaatgcgcaagtcggtggcggaaccgactactttgggtgtccgtgtttcctttatttccttattgaatgtttatggtgacaattgttgagtacagttgttgccattattgcattctacaaacagtgaacaaaccacacaccaatatagcaca

SEQ ID NO: 2711 - DNA, 625 bp, Eotetranychus kankitus picorna-like virus
  misc_feature 1..625: note = strain EKPLV.abc9,1
  source 1..625: mol_type = genomic DNA
cctattgagaagtgaactttcattttctatacaaagtgctatatttcgagcgacagtgtaaaactaaacaatagtgtacataacttattactcaaaatatagttaagacaaaagtcctctggaccccagtccagaggatctttgtcttaactatattttgagtaataagttatgtacactattgtttagttttacactgtcgctcgaaatatagcactttgtatagaaaatgaaagttcacttctcaataggagtatgtacttagtagattatataacagctgattattattggctgaaataatccgtaataatcgtaagtcgattatataagactacacgctcattttgtggttatttcaaatttaacaacttttgaaaccactttcattttaagatgtgtgttctatttatctagacgcatattcatattcacttgtttagtaatttcaccctactaaactcgtattcacgatacgtattttccagaattagtttactaatgagattatacgcattaacattttcgttagacttttgatacatacaaatctaacccttgtttggtaggcaagtacaacctactggtttcccgagacctatgaggggcccaataaatatgaaag

SEQ ID NO: 2712 - DNA, 625 bp, Coxsackievirus
  misc_feature 1..625: note = A16, strain CVA16/Homo sapiens/VNM/11.1/20141
  source 1..625: mol_type = genomic DNA
gctctgcagatatcaatagcaggcatggcgcgccagtcatgtctagatcaagcacttctgtctccccggatcgagtatcaatagactgctagcgcggttgaaggagaaaacgtccgttacccggctaactacttcgagaaacttagtagcatcattgaagctgcggagtgtttcgctcagcactcccccagtgtagatcaggtcgatgagtcactgcactccccacgggcgaccgtggcagtgactgcgttggcggcctgcctatggggcaacccataggacgctctaaagtggacatggtgcgaagagtctattgagctagttagtagtcctccggcccctgaatgcggctaatcctaactgcggagcacatgccctcaacccagggggtggtgtgtcgtaacgggcaactctgcagcggaaccgactactttgggtgtccgtgtttctttttattcttatattggctgcttatggtgacaattgagagattgttaccatatagctattggattggccatccggtaaccaacagagctattgtttacctgtttgttggatacgtccctctcaatttcaaagtcattaaaactcttgattatatattactcctcaactgtgagaa

SEQ ID NO: 2713 - DNA, 627 bp, Duck hepatitis A virus 1
  misc_feature 1..627: note = isolate JX1405, complete genome.1
  source 1..627: mol_type = genomic DNA
tatgaaagtaactggaaactgggaggatttcagggggaggtaaaaaaggtatgacaagggtgcatcgactgcttgggggtgtgcctgacccccctaattcaacgtctagcccacgatacgggcaccctatccaatttgtatccctttacctcctatggacagacttgtatggatttggatctaaattggattatcctttatttgtggtggttagccaaccatgctctggtgtaatgattccatctgttcatctggttaagtgccgacctaggaggtggtgctgaaatattgcaagccactagtatcgttacgcttggcctctggatacgtgggattaattgcattctgtacagaggaaggctagtctatgccttgggctaatggtctttgttgtgaaacggattaccggtagtagcatctcagactaccaaggttgtaggtgagtgtgtggtctagagtaggcacacatctgtccaggcacatgcacattgttgcgattgctccagactagttcctgagggacagatgttgtggggggcttgggaaaacccccttaacatacactgcctgatagggtcgcggctggtcgagttcccacacactataataccagtagattttcatgca

SEQ ID NO: 2714 - DNA, 630 bp, Duck hepatitis virus 1
  misc_feature 1..630: note = strain GHZ04, complete genome.1
  source 1..630: mol_type = genomic DNA
ttttgaaagccgggtgcatgcatggccattttccagcacaggttcagctggtatggcatgcgtgcatcgactgcttgggggtgtccctgacccccttaattcaacgtctagcccacgatacgggcaccctatccaatttgtgtccctttacctcccatggattgacttgtattggatttggatctaaattggattaccctttgtttgtggtggttagccaaccatgctctggtgcaatggttccatgtgttcattctggccacgtgccaacctaggaggtggtgctgaaatatcgcaagccactagcgttattacacttggcctctggacacgtgggattaattgcattctgtacagaggaaggctagtctatgccttgggctaatggtcttcgttgtgaaacggattaccggtagtagcatcttagactaccaaggttgtaggtgagtgtgtggtctagagtaggcatacatctgtccaggcacatgtacattgctacgattgctccagactagttcctgagggacagatgttgtggggggcttgggaaaacccccttaacctacactgcctgatagggtcgcggctggtcgagtcccacacactataataccagtagattttcatgca

SEQ ID NO: 2715 - DNA, 633 bp, Rhinovirus B
  misc_feature 1..633: note = isolate BCH214, complete genome.1
  source 1..633: mol_type = genomic DNA
ttaaaacagcgggtgggtatcccaccacccgacccactgggtgtggtacactggtactttgtacctttgtatgcctgtttgcatcccttttcccttcacctaacatcctcccccaaagtatattttgcggtaacgttagaagaagtgaactcagtgcaacaggaagtatcaccaccagtgatataacgcacaagcaattcttgttccccggagctggatatagactgctaacgtggtcaaaagtccttaaccgttatccgccagctaactgcgagaagactagtaacatcatgcacatttctagacgttcgatcaggtgaataccccattcactagtttggtcgatgaggctgagagttccccacaggtgactgtgtctcagcctgcgtggcggccaacccgacttatgtcgggacgcctattaatggacatggtgtgaagatcctattgcgcttagctgtgagtcctccggcccctgaatgcggctaaccttaaccccggagccttgtggtgcaaaccagcatttgcaaggtcgtaatgagcaattctgggatgggaccgactactttgggtgtccgtgtttcctttattcttattatttgtgtttcatggttacaagcatagtttgtaatc

SEQ ID NO: 2716 - DNA, 636 bp, Chicken megrivirus
  misc_feature 1..636: note = strain chicken/CHK-IV-CHV/2013/HUN, complete1
  source 1..636: mol_type = genomic DNA
ttcccgaccggtctggcaaaccggacggttatcctggttagatgtctgatggttgctggaacgtggtggctattgctgccaccttctggcttcctttattgggcatctagctgggtcctttgccatattccatctaactctcttcccattttctattacccaggcttgttgtaactggtaagttgactcactggcttcgttttgagactactctggtgctggtggacactctttccacaagtggattgtatggagttcatgctcgttctgaaccgggaatggcacaacccgtagtaggatcttgcctctgccataccaatctgcgcctgttgcttctagactatgggctgctaaggatgatcttggaactcctttttggatattccggttcaagtcaactgtttcatctggtgcacgctggaaatcctcgtttctaggtcttgtctggaggtggtgctgaaatattgcaagccacggatggttcctaggacctggtgccgctatcagatggtacaccctctatgggcaaatgttgaaccttagtggacgcgtgagatgggaatccacgccggccatagactggctgataagctcgcggctgatcgagttgcaacagtaatcagttgatttgccact

SEQ ID NO: 2717 - DNA, 642 bp, Melegrivirus A
  misc_feature 1..642: note = complete genome.1
  source 1..642: mol_type = genomic DNA
ttcccgaccggtctggcaaaccggacggttatcctggttagatgtctgatggttgctggaacgtggtggctattgctgccatcttctggctgcctttattgggcattctagctgggttctttgccaaaattcccatcttattcttattcccattttccttacccaggcttatttacaactggtaagttgacccactggttttgttcttggacttctctggtgttggtggacactctttccacaagtaagtattgtggagttcatgctcgttctgaaccgggaatggcacaacccgtagtaggatcttgcctctgccacatttacttgcgcctgttgcttctagactatgggctgctaaggatgaccgcagacccctttttgggcaatctgtgtcaagtctactgcttcgtctggtgtacgctggaaatccctgttctggatgcctatgcttggaggtggtgctgaaatattgcaagccacaagcatacctctggactcggtgccgctaccaggtgttgcaccccttgtgggcaaacgtagaaccttggtggacgcgtgagatgggaatccacgcctggccatagactggctgataagctcgcggctgatcgagttgcaacagtaatcagttgatttgccact

SEQ ID NO: 2718 - DNA, 643 bp, Turdivirus 3
  misc_feature 1..643: note = strain 00742, complete genome.1
  source 1..643: mol_type = genomic DNA
gaaagggggcccggcggggcaatacccgtcggtccctctttccgtccaagccgcggacgttaaattgtggcacggttgtgcttaggcgcaaccctgctactaatggcggtatccctgcccttagtatgcatgtttgtatgaatggaatctgtagtgatgccccgctttggggtctcagaaacacactacagtgacggctagagttcctctactccggctaccttagtagcgagcattggaagtatattgtgaacagggttccacgcccgataaaggctgatattcccgctcatggagtggacctaggtaactagggccatgagtgtgtgtgaatcagcacccgcaagggataacagtatatggaaggtgctcgtgaaacggcaagtggagttagcagcagctctcagcctcaaggtcagcttctagacatgtgccgcaggtaccccgcaagggatctgagcggtagctaattagtccctggaagttggctgactttcttcttatttctttcttattgtgaattgtgtgcattggcattctttagagtttgggagttgtcttctattggatttatatcttactctgtatcacactcaatcacggctctttggtcagttaagaaaaccatttatagagtaataaa

SEQ ID NO: 2719 - DNA, 646 bp, Turdivirus 3
  misc_feature 1..646: note = strain 10878, complete genome.1
  source 1..646: mol_type = genomic DNA
gaaagggggcccggcggggcaacacccgtcggtccctctttccgtccaagccgcggacgttaaactgtggcacggttgtgcctaggtgcaaccctgctactaatggcggtacccctgcccttagtatgcatgtttgtatgaatggaatctgtagtgatgccctgctttggggtctctaaaacacactacagtgatggctagagctcctctactccggctaccttagtagtgagcattggaagtatattgtgaacagggttccacgcccgataaaggctggtattcccgctcatggagtggacctaggtaactagggccatgagtgtgtgtgaatcagcacccgcaagggatagcagtatatggaaggtgctcgtgaaacggcaagtggagttagtagcagctctcagtctcaaggtcagcttctagacatgtgccgcaggtaccccgtaagggatctgagcggtagctaattagtccctggaggttggctgactttcttcctatttctcttttcactgcgaattgtgtggattggtattctttagagcttgggagttgtctcatattgaattcatatattttactctatactacactcaaacacggctctctggtcagttaagaaaatcatttatagaataataaa

SEQ ID NO: 2720 - DNA, 651 bp, Picornaviridae sp.
  misc_feature 1..651: note = isolate w3chi091pic1 genomic sequence.1
  source 1..651: mol_type = genomic DNA
cggcctcttttcccgaccggtctggcaaaccggacggttatcctggttagatgtctgatgattgctggaacatggtggctatagctgccatcttttggctttctctattgggcatctagctgggttctttgctaatcttccatcttactcttatccccattttctattacccaggattgttcgtaactggtaagttgactaactggctatgttttctggctcttctggtgctggtggacactcttttccacaagtaggttatgtggagttcatgctcgttctgaaccgggaatggcacaacccgtagtaggatcttgcctctgccacatatacttgcgcctgttgcttctagactatgggctgctaaggatggctacggacctctttttgagtaatccgtgccaagtcaactgtttcactctgatgtacgctggaaatccttgttttggatgttatgtccggaggtggtgctgaaatattgcaagccacggacattcttctgaacctggtgccgctatcaggtgttacaccccttgagggcaaatgttgaaccttagtggacgcgtgagatgggaatccacgcctggccatagactggctgataagctcgcggctgatcgagttgcaacagtaatcagttgatttgccact

SEQ ID NO: 2721 - DNA, 652 bp, Duck hepatitis A virus 3
  misc_feature 1..652: note = strain DN2 from Viet Nam, complete genome.1
  source 1..652: mol_type = genomic DNA
tttgaaagccgctgtggtgtagaccattttctggcgcttggctcagccagtatggtctcaccacagtctgcttggggttattcccaaaccccttaattcaacgcctagtcctatcaatataggaccccctatccacttattttacctttaccctccattatatagtctgtttcctggctattgactttggcttttgtttttgacctacgtctaagtctcaatggattttgtagtggttagcctaccaccccttggccactaatttttggctctctgtttggggacccaccacatcttggaggtggtgctgaaatattgcaagccacttgatatgtgtgtgtcctccagacatgaagctttgatgcagtggttttggacaaggaaaggctagtgtttggtctgggcacaaacccttgttgtgaaacggattaccggtagtagcatctagtggttccagtccataacatgagtgtatggtctagagtggacacagcttggatacagacaccttcagtattactgggtgttccagactagttcctgaggtaccaagttgtgaggggctatgggaaaacccctttgatccacactgcctgatagggtcgcggctggtcgagtcccatacactataataccagttgattttcatgca

SEQ ID NO: 2722 - DNA, 653 bp, Duck hepatitis virus 1
  misc_feature 1..653: note = strain 04G, complete genome.1
  source 1..653: mol_type = genomic DNA
gaaagcggccactgtgtagccattttctagcgcttggtacagctagtatggttacacagtgtgcgtcagcttggggccattcccaggccccttaattcaacgcctagctctggcgatacagagccccctatccaattctatgtcccttatcctccacaggttgattgtctttcttgttctgactcaactgcctgttgtattggacttctattggattacccttttgtatggatggttagccaaccatgctctggttactagccattctatggcaggtttggcttgatactggtggatggaggtggtgctgaaatattgcaagccacgtctcccattgtcaatccaacccatcatggaatgtagttggtaattcctgtacagaggaaggttagtgtataagagtgggtctaataccattgttgtgaaacggattaccggtagtagcatccttggtatccattcttatcatgagtgtgtggtctagagtagacatgtattctcacaggtgcatgcagcattgctgagcactccagactagttcctgaggtgggaaatacatggggggcactgggaaaacccccttgatctacactgcctgatagggtcgcggctggtcgagtcccacacactataaaccagttgatttgcatgca

SEQ ID NO: 2723 - DNA, 654 bp, Sicinivirus sp.
  misc_feature 1..654: note = strain RS/BR/2015/7S polyprotein gene, complete1
  source 1..654: mol_type = genomic DNA
tgcaacccccactagtactcgtgcacatccaatggtgattctgccctggcagcatctaagtgcccagggagctcaactggtaacagttgccctggggcccaaaaggctaggtggcaaggacctggtcaagtaaggggttcccaccccgagctgaacccgcggtcctgaagctaccctttagatggaggtttcgcacccgattgccattctttttgcctgaagaacctggctggaaacatttagcccacggatttgctggtttgtggtgattagtagaccccctggaggtacccgttttggatctgaccagggacccgtgactatgccgttccggtaatccgggtttaaaaccatgaacgtcaccacctatcttcttttccttgctttgaattcttttatctgagagtagtgaacgagtgttgatgttccctgacttttgcatttggtctgcattctcagttatacggtttgactgggctgggttgtttatttagatgtttctagagtctctgttggtagctattacacttgttatagtagttgcttcccccagtgagcttcatcagttatttactatttgtgtttataatttcgccttaatcttcctctggctggttgaaatcctagagcttcctaattaccctgccatccaac

SEQ ID NO: 2724 - DNA, 654 bp, Tupaia hepatovirus A
  misc_feature 1..654: note = isolate TN1, complete genome.1
  source 1..654: mol_type = genomic DNA
gtttttcccggacccctctttggacaaccttggtggggggttgtaaattaccccaccctcgtttgcctagagtttaggctaaattccctatagtaccctttatatgtaaatatcaattcctgcaggttcaggtttcttgaatgtgtctctctttaagagcactcattttactctcagaatttctctagagtccagacacttgagggctctttttctcctgcactatcatctcgattccgggctctcgtggtgccaatggaacgaccgatgcgcacgtcggggttaacccacagattagctgtgggctgtagttgctaaaagccacgatctctgaatgccctctttgaatgggggtggtattaactgaacacatgaaaccacattgatcttgctgggagggtaggctacgggtgaaaccctccatattaatactcatattgagagatatatctggtaggctaatgttggcggataaggctgagtttcacgacaaaaagccttcaacgcctgtggaacaggtctcaccagcagcatgccttgtggcgtagtgtgctagggccatcttcatttcaggtgggagctaggagactctccccgtaagggttggaggggtagttcaggtgcatttaggtttttccacattcaataaaaaca

SEQ ID NO: 2725 - DNA, 657 bp, Chicken megrivirus
  misc_feature 1..657: note = strain RS/BR/2015/2R polyprotein gene, complete1
  source 1..657: mol_type = genomic DNA
tttctgaaggcctcttttcccgaccggtttggcgcaccggacggtcatcctggttagatgtctgatggttgctggaacgtggtggctattgctgccaccttctggcttcctctattgggcatctagctgggtcctttgccacattccatctcactctttacccattttctattacccaggcttgattgtaactggtaagtttgacccactggcaatgttcttaagaccattctggtgttggtggacactctttccacaagtaggttacgtggagttcatgctcgttctgaaccgggaatggcacaacccgtagtaggatcttgcctctgccatgctaatctgcgcctgttgcttctagactatgggctgctaaggatgatgttgggactcctttttggatatctcatatcaagtcaactgtttcatctaatgtacgctggaaatccttgtctcagggttctatctggaggtggtgctgaaatattgcaagccacagatgaatcttgcggcatggtgccgctattggatgttacaccctttattgggcaaatgttgaaccttagtggacgcgtgagatgggaatccacgcctggccatagactggctgataagctcgcggctgatcgagttgcaacagtaatcagttgacttgccacc

SEQ ID NO: 2726 - DNA, 662 bp, Chicken megrivirus
  misc_feature 1..662: note = strain RS/BR/2015/3R polyprotein gene, complete1
  source 1..662: mol_type = genomic DNA
gtgtgtttctgaagggcctcttttcccgaccggtttggcacaccggacggttatcctggttagatgtctgatggttgctggaacgtggtggctgttgctgccaccttttggcttcctctattgggcatctagctgggtcctttgccacatcccatcttattctttacccattttctactacccaggcttgcctgaaactggtaagttgacctattgaccatgtttttggactactcttggtgctggtggacactctttccacaagtaggttgcatggagttcatgctcgttctgaaccgggaatggcacaacccgtagtaggatcttgcctctgccatgttgatctgcgcctgttgcttctagactatgggctgctaaggatgatgttgagactcctttttggatatctcatatcaagtcaactgtttcatctggtgtacgctggagatccttgtcgtgaggctgtatctggaggtggtgctgaaatattgcaagccacagatcagtcttgtaacatggtgccgctatcaggtgttacaccctctactgggcaaatgttgaaccttagtggacgcgtgagatgggaatccacgcctggccatagactggctgataagctcgcggctgatcgagttgcaacagtaatcagttgatttgccact

SEQ ID NO: 2727 - DNA, 663 bp, Chicken picornavirus 4
  misc_feature 1..663: note = isolate 5C, complete genome.1
  source 1..663: mol_type = genomic DNA
gggggctctcccccacggcctcttttcccgaccggtctggcaaaccggacggttatcctggttaggtgtccgatggatgctggaacggggtggctatagctgcctccttctggcttcctttattgggcattctagctgggccctttgccaaaattccatcttaatcttaaacccattttctatacccaggcttgcttgtaactggtaagttgacccactggcttgtcttaagactattctggtgttggtggacactccttccacaagtaagtattgtggagttcatgctcgttctgaaccgggaatggcacaccccgtagtaggatcttgcctctgccacatatacttgcgcctgttgcttctagactatgggctactaaggatgactacggacccctttttgggtaatctgtgtcaagtctactgtatcatctggtgtacgctggaaatccttgttctggaaactgcgtctggaggtggtgctgaaatattgcaagccacagatgcatttctggtcttggtgccgctactaggtgttacaccccctgtgggcaaatgtagaaccttggtggacgcgtgagatgggaatccacgcctggccatagactggctgataagctcgcggctgatcgagttgcaacagtaatcagttgatttgccact

SEQ ID NO: 2728 - DNA, 663 bp, Chicken megrivirus
  misc_feature 1..663: note = strain RS/BR/2015/5R polyprotein gene, complete1
  source 1..663: mol_type = genomic DNA
gtgtgtttctgaaggcctcttttcccgaccggtttggcacaccggacggttatcctggttagatgtctgatggttgctggaacgtggtggctattgctgccaccttttggcttcctatattgggcatctagctgggtcctttgccacattccatcttactcttttacccactattctattacccaggcttgatcgtaaccggcaagtttgacccaccggctatgttctaagactattctggtgttggtggacactctctccacaagtagattgcatggagttcatgctcgttctgaaccgggaatggcacaacccgtagtaggatcttgcctctgccatgttgatctgcgcctgttgcttctagactatgggctgctaaggatgatgttgggactcctttttggatatctcatatcaagtcaactgttccatctgatgtacgctggaaatccttgtcccagggttgtatctggaggtggtgctgaaatattgcaagccacggattaaccttgcgacatggtgccgctatcaggtgttacaccctctatcgggcaaatgttgaaccttagtggacgcgtgagatgggaatccacgcctggccatagactggctgataagctcgcggctgatcgagttgcaacagtaatcagttgatttgccact

SEQ ID NO: 2729 - DNA, 664 bp, Picornaviridae sp.
  misc_feature 1..664: note = isolate phe068pic1 genomic sequence.1
  source 1..664: mol_type = genomic DNA
agatgtagacatctaaccaggataaccgtccggtgtgccacaccggacggttatcctggttagatgtctgggaactgctggacttcagtggctattgctgctgacttctggctcttctgaactgggcatctagctgggtcctttgccacccataccctatctcccgttatattctctttgcccttggactgttgtaactggttaagagaccctccgcatgttttgtctatgactattctggtgctggtggacactctttccacaagtggatgatgtggagttcatgctcgttctgaaccgggaatggcacaacccgtagtaggatcttgcctctgccatactcatctgcgactgttacttctagaccataggctgtgtaggatgactatggacctctttttgagtatcctggtcaagccaactgtgtttataacacgtacgctggatatccttgttagggtggaatttcagtggaggtggtgctgaaatattgcaagccacattggattttaccctcttggtgccgctgtgttattacgcaccccttgtgggcaaatgttggacctacatggacacgtgtgatgggaatccacgtctctgctatggactggctgataagctcgcggctgatcgagttgtaacagtaatcagttgaaaagccact

SEQ ID NO: 2730 - DNA, 668 bp, Canine picornavirus
  misc_feature 1..668: note = strain 325F, complete genome.1
  source 1..668: mol_type = genomic DNA
ttatttttcaaaatgccactggcattacaccatattcgtatggtgtaatgtcagtggttggatgcccagtcctgagggactgtgcatccagtggttaagagccacactctttatttatcaactattgatctttgtaactaagaaatgtaccagagttctattatggctccaaacccattggggtctagaacaagcacttctgttaccccggtcattattggctgttaggatgtacccacgtctgaaggccaagaagatcgttacccggctgttgtctacgggaagactagtaacttttgttgaaaggtaatctcattgatccgggtggcaaccccagtcacccagaaactagtgatgagtgtccacattcctcctatggtaacatagggtggtcgctgcgctggcactagggccttaaggcatgagagaaccaagacacaactgtgaagatccgactgtgcacttcagtattcctccggcccctgaatgcggctaatcctaacccacttgcacacgctcgcaacccagtgagtggtgtgtcgtaatgcgcaagaagtggacggaaccgactactttgggtgtccgtgtttctttttttatttaccaagtctcttatggtcacaagcattagaaacaagatgcctgtgatcactcgcgagacctccaac

SEQ ID NO: 2731 - DNA, 670 bp, Human rhinovirus A
  misc_feature 1..670: note = strain HRV-A76_p1194_sR844_2008 polyprotein1
  source 1..670: mol_type = genomic DNA
cttcacacccgttaaggtgtgcaggcagccacgcaggctaggacactgttaccagtggggaactcctagcctcatcccacctggatctcctacaaggagttgtactctattattgcggtaattttgtacgccagttttatctcccctccccaatatgtaacttagaagctgaacacaaagaccaataggcgacatttaatccaaaatgtcaaaggtcaagcacttctgtttccccggctaaagctgatatgctccaacagggcaaaaacagttgcggtcgttatccgcaaagcaactacgcaaagcctagtatcaccttctagagcatatgactggtcgctccactataaacccaatagtagacctggcagatgaggctaggagttccccactggtaacagtgtcctagcctgcgtggctgcctgcacaccttaacgggtgtgaagccatatgtttgacaaggtgtgtgagccccgtgtgcttgctttgagtcctccggcccctgaatgtggctaaccttaaccctgcagctagtgcacacaatccagtgtgtggctagtcgtaatgagcaattgcgggacgggaccaactactttgggtgtccgtgtttcttgtttttccttatatttgcttatggtgacaatatatatataacatatatattggcatc

SEQ ID NO: 2732 - DNA, 671 bp, Picornaviridae sp.
  misc_feature 1..671: note = isolate wbp226pic1 genomic sequence.1
  source 1..671: mol_type = genomic DNA
gccgcaggggataacccctgcggaccccttttcccgaccggcttggcaaaccggacggttatcctggttagatgtctgggatttgctggactttagtggctatcgctgctatcttctggcttctctaaactgggcatctagctgggtcctttgccatccaattctttattcccatctatttttccacccatggactgatgtaactggctaagaaatcctctggttctcactttggccacgcacttgtgttggcggacactctttccgcaagtgaacagtgtggagttcatgctcgttctgaaccgggaatggcacaacccgtagtaggatcttgcctctgccacatcctgtttgcgactgttacttctagaccataggctgtgtaggatgactttggacctctttttgagtatccttgtcaagctaactgcaattacaacatgtacgctggaaatccttgtctgaaagtagatcctagtggaggtggtgctgaaatattgcaagccacactagattctctttccttggtgccgctgtgttgctttgcacccctagtgggcaaatgttagacctacatggacacgtgtgatgggaatccacgtcttggctatggactggctgataagcccgcggctgatcgagttgtaacagtaatcagttgaattgccacc

SEQ ID NO: 2733 - DNA, 672 bp, Foot-and-mouth disease virus
  misc_feature 1..672: note = A gene for L, VP4, VP2, VP3, VP1, 2A,1
  source 1..672: mol_type = genomic DNA
ccccccctaagttctaccgtcgttcccgacgtaaagggatgtaaccacaagcttaccgcctttcccggcgttaaagggatgtaaccacaacgacttaccttcacccggaagtaaaacggcaacttcacacagttttgcccgttttcatgagaaacgggacgtctgcgcacgaaacgcgccgtcgcttgaggacttgtacaaacacgatctaagcaggtttccccaactgacacaaaccgtgcaatttgaaactccgcctgggctttccaggtctagaggggtgacactttgtactgtgtttgactccacgctcgatccactggcgagtgttagtaacaacactgctgcttcgtagcggagcatgacggccgtgggaccccccccttggtaacaaggacccacggggccaaaagccacgtccgaatggacccgtcatgtgtgcaaacccagcacagtacctttgttgtgaaactcactttaaagtgacattgatactggtactcaagcactggtgacaggctaaggatgcccttcaggtaccccgaggtaacacgtgacactcgggatctgagaaggggaccggggcttctataaaagcgcccggtttaaaaagcttctatgtctgaataggtgaccggaggcaggcacctttcttttaattacactggactt

SEQ ID NO: 2734 - DNA, 673 bp, Rhinovirus C
  misc_feature 1..673: note = strain 20692_39_HRV-C polyprotein gene, complete cds.1
  source 1..673: mol_type = genomic DNA
ggcgcacaggtttccaagcagagtgtgggagcacatgaaaccatggtacaggaataaaaggaaacacggacacccaaagtagttgttcccactataaccacccacgtggtgttgtggacttgtatttcggtacacttccatgccagttttatctccccccctgcaacctttagaagacacgtactttcagaccaataggtggcggccatccaggtcgtcgacggtcaagcacttctgtctccccggtggtactggatacgctttacccaaggcgaaaaccgggcccatcgttatccgcaaagtgcctacgagaagcctattagcactctagaagcctatggttggtcgctccgctgcaaccccagcagtagacctggcagatggggctagacataccccaccagcgatggtggtctagcccgcgtggctgcctgcacaccctatgggtgtgaagccagaaagtggacagggtgtgaagagcctattgtgctcactttgagtcctccggcccctgaatgtggctaatcctaaccctgcagccgttgcacacagcccagtgtgtatgcggtcgtaacgagtaattgcgggatggaaccaactactttgggtgtccgtgtttccttttattcctttacttgcttatggtgacactgtatagttatacattgtcact

SEQ ID NO: 2735 - DNA, 675 bp, Foot-and-mouth disease virus
  misc_feature 1..675: note = - type O, strain HLJOC12/03 polyprotein1
  source 1..675: mol_type = genomic DNA
aaccacaagtcttgcaccttcttgtccgaagttaaaggactgtaaccgcaagctttgaaccgcctttcccggcgttaaagggctgtgaccgcaagatagaccttcacccggaagtaaaacggcaactcccacagttttgcccgttttcatgagaaatgggacgtcagcgcgcgaaacgcgcagtcgcttgaggaggacttgtacaaacacgattcacgcaggttcccacaaccgacacaaaacgtgcaacttggaatcccgcctggtctttccaggtctagaggggtgacactttgtactgtgattgacaccacgctcggtccactggcgagtgttagtagtagtattgttgtttcgtagcggagcatggtggccgtgggaccccctccttggtaacaaggacccacggggccgaaagccacgtctcaggacccaccatgtgtgcaaccccagcacggcaaccttaccacgaaaaccactttaaggtgacactgaaactggtactcaaccactggtgacaggctaaggatgcccttcaggtaccccgaggtaacacgcgacactcgggatctgagaaggggactggggcctctgtaaaagcgcccagtttaaaaagcttctatgcctgaataggcgaccggaggccggcgcctttccttaactaccactgtttac

SEQ ID NO: 2736 - DNA, 675 bp, Parechovirus A
  misc_feature 1..675: note = isolate HPeV-16/CMRHP2/CMR/2014 polyprotein gene,1
  source 1..675: mol_type = genomic DNA
cgtcgggccttataccccgacttgctgagcttctctaggagagtccctttcccagccctgaggcggctggtcaataaaagcctcaattgtaacaaacatctaagcttattacatataaccacaaccctggtccccaccagcttaaggcatcttgcaatacagtgggtggactcaggacgcttaaaggttgtagtacataatcttttctaatccaactatgttggagtggtggacagcgcaccataactctatcagtgagataccatgcttgtggaccttatgctcacacagctgtcctctagtcactaagtgtggaaactaatgaaatgtgggaacttagttgaagtacacacttgcttatgcaccaattagccagcggatcaacacccggcaacgggtgcccctggggccaaaagccaaggtttaacagaccctaattggttggttttaaaacctgagcgtgtacggatgctacttagtacctgtggatttggtaactgtgcttatactagttgtaaggccctcgaaggatgcccagaaggtacctgtaggtaacaagtgacactatagatctgatctggggccccatacttctctaaagtgatggggttaaaaaacgtctagagggccaaacccaggggggaccctggattccttttattttatttagacaat

SEQ ID NO: 2737 - DNA, 678 bp, Foot-and-mouth disease virus
  misc_feature 1..678: note = polyprotein precursor, mRNA, complete1
  source 1..678: mol_type = genomic DNA
actagtgattttaccgtcgttccccgacgtttgaagggaggaaaccacacgcttgcagcaccactcccggtgtcaacgggatgcaaccgcaagatggaccttcgcccggaagtaaaacggcagctttacacagttttgcccgttttcgtgagaaacgggacgtccgcgcacgaaacgcgccgtcgcttgaggaacacttgtacaaacacgatttaagcaggtttccacaactgataaaactcgtgcaacttgaaaccccgcctggtctttccaggtctagaggggtgacactttgtactgtgctcgactccacgcccggtccactggcgggtgttagtagcagcactgttgtttcgtagcggagcatggtggccgtgggaactcctccttggtgacaagggcccacggggccgaaagccacgtccagacggacccaccatgtgtgcaaccccagcacggcaacttttactgcgaacaccaccttaaggtgacactggtactggtactcggtcactggtgacaggctaaggatgcccttcaggtaccccgaggtaacacgggacactcgggatctgagaaggggattgggacttctttaaaagtgcccagtttaaaaagcttctacgcctgaataggcgaccggaggccggcgcctttccattacccactactaaatcc

SEQ ID NO: 2738 - DNA, 679 bp, Chicken picornavirus 5
  misc_feature 1..679: note = isolate 27C, complete genome.1
  source 1..679: mol_type = genomic DNA
aaaaggggtccgtgggggttctcccccacggctccttttcccgaccggtctggcgaaccggacggttatcctggttagatgtctgatggttgctggaacgtggtggctatagctgccaccttctggcttcctctattgggcattctagctgggttctttgccaaaattccatcttactctttacccattttctctacccaggcttgcttgtaactggtaagttgacccactggctttagttcatgattattctggtgttggtggacactctttccacaagtaggtagtgtggagttcatgctcgttctgaaccgggaatggcacaacccgtagtaggatcttgcctctgccacacttacttgcgcctgttgcttctagactatgggctgctaaggatgactacggacctctttttgagcaatccgtgtcaagtcaactgtttcatctgatgtacgctggaaatccttgtttctggatgattgtatcctggaggtggtgctgaaatatctcaagccacaggtacgcttctggacttggtgccgctgtcaggtgttacaccccttgtgggcaaatgttgaaccttagtggacgcgtgagatgggaatccatgcctggccatagactggctgataagctcgcggctgatcgagttgcaacagtaatcagttgatttgccact

SEQ ID NO: 2739 - DNA, 682 bp, Foot-and-mouth disease virus
  misc_feature 1..682: note = - type O O/JPN/2010-1/14c (CV_d1)1
  source 1..682: mol_type = genomic DNA
gggaggtaaccacaagatttgcgccttcttgtccgaagttagagggctgtaaccgcaaactttgaaccgcctttcccagcgttaacgggatgtaatcacaagatggaccttcatccggaagtaaaacggcaacttacacagttttgcccgttttcatgagaaatgggacgtcagcgcacgaaacgcgcagtcgcttgaggaggacttgtacaaacacgtctcacacaggtacccacaaccgacacaaaacgtgcaacttgaaatcccgcctggtctttccaggtctagaggggtgacactttgtactgtgattgactccacgctcggcccactggcgagtgttagtagtagtactgttgcttcgtagcggagcatggtggccgtgggactccctccttggtaacaaggacccacggggccgaaagccacgtctcaggacccaccatgtgtgcaaccccagcacggcaactttaccacgaaaaccactttaaggtgacactgaaactggtactcaaccactggtgacaggctaaggatgcccttcaggtaccccgaggtaacacgcgacactcaggatctgagaaggggattggggcttctgtaaaagcgcccagtttaaaaagcttctatgcctgaataggcgaccggaggccggcgcctttccttaactattactgcttac

SEQ ID NO: 2740 - DNA, 682 bp, Enterovirus B88
  misc_feature 1..682: note = strain NIV-17-3150-2, complete genome.1
  source 1..682: mol_type = genomic DNA
cctgtgggttgttcccacccacagggcccactgggcgctagcacactggtatcacggtacccttgtgcgcctgttttaacccccctcccctcagaagtaacttagaagcataaatcaaacggtcaacaggtggcctagcgcaccagctgggtctagaccaagcacttctgtcaccccggactgagtatcaataggctgcttgcgcggctgaaggagaaaacgttcgttatccgaccagttacttcgggaaacctagtaccaccatggaagttgcgcagcgtttcgctccgcacacccccagtgtagatcaggtcgatgagtcaccgtatcccccacgggcgaccgtgacggtggctgcgttggcggcctgcccatggggtaacccatgggacgcttcaatactgacatggtgtgaagagtctactgagctaattggtagtcctccggcccctgaatgcggctaatcctaactgcggagcagacacccacaagccagtgggcggtctgtcgtaacgggtaactctgcagcggaaccgactactttgggtgtccgtgtttccttttattcttatactggctgcttatggtgacaattgaaaggttgttgccatatagctattggattggccatccggtgactaatagagcgattgtttacttgtttgttggtttcataccaaaa

SEQ ID NO: 2741 - DNA, 683 bp, Chicken megrivirus
  misc_feature 1..683: note = strain Chicken/MG9567/Brazil/2012 polyprotein1
  source 1..683: mol_type = genomic DNA
gaaaagaggccgtgggggataacccccacggaccccttttcccgaccggtttggcaaaccggacggttatcctgattagatgtctgatggttgctggaatgtggtggctactgctgccaccttttggcttcctctattgggcatctagttgggtcctttgccattttcccatcttactctttttaacccatcttctaccccaggcatgcttgtaactggtaagttgacccacttggctctgattcatgattctgtttggtgctggtggacactctttccacaagtagattgtgtggagtccatgctcgttctgaaccgggaatggcacaacccgtagtaggatcttgcctctgccacattacatctgcgcctgttgcttctagactatgggctgctaaggatggtttggacccctttttgggtaatccaaatcaagtcaactgtttcatccaatgtacgctggaaatccttgttactgggtgtttacaactggaggtggtgctgaaatattgcaagccacagttgtgcacctagtcctggtgccgctattgggtgttacaccctttgatgggcaaatgttgaaccttagtggacgcgtgagatgggaatccacgcctggccatagactggctgataagctcgcggctgatcgagttgcaacagtaatcagttgatttgccact

SEQ ID NO: 2742 - DNA, 687 bp, Enterovirus A
  misc_feature 1..687: note = strain CHN/BJ/2018-1A, complete genome.1
  source 1..687: mol_type = genomic DNA
gggttgttcccacccacagggcccaagcggcgttagtactctggtatcacggtacctttgtatgcctgttttacatcccttcccccgtaacgttagaagaaagcacaaacgacaaatagcaagtccaccaaaccaggtgggtttttgtcaagcacttctgtttccccggacatagtaccaataagctgtacccacggctgaaagggaaaacgttcgttacccggctacttacttcgagaagcctagtaccatcatgaattgtttcaagtgttacgttcagcacaatcccagtgtagttcaggctgatgagtcaccgaattccccacgggcgaccgtgtcggtggctgcgttggcggcctgcctgcgggtattactcgcaggacgcttgattcatgacatggtgcgaagagcctattgagctaggtagtagtcctccggcccctgaatgcggctaatcccaaccacggagccatgcgttgcaatccagcaatgttgtggtcgtaatgagcaattctgtggcggaaccgactactttgggtgtccgtgtttcctgttttatttaccttggctgcttatggtgacaatctagagttgtcatcatatagcgattggattggccatccggatattatctttgtgtgactcattcctagtccataagcattccttgtaatttacacattcatc

SEQ ID NO: 2743 - DNA, 696 bp, Foot-and-mouth disease virus
  misc_feature 1..696: note = - type O,strain O/VIT/8338/20171
  source 1..696: mol_type = genomic DNA
acgttaaaggggtgtaaccacaagcttgaaaccgtcttgcccgacgttaatgggttgtaaccacacgcttgtaccacctttcccggcgttatcgggatgcaaccaaaagatgaaccttcacccggaagtaaaacggcaaccacacccagttttgcccgttttcatgagaaatgggacgtcagcgcacgaaacgcgccgtcgcttgaggaagatttgtacaaacacgatttatgcaggcttccacaactgacacgaaccgtgcaatttgaagctccgcctggtctttccaggtctagaggggcaacactttgtactgtgcttgactccacgctcggtccactagcgggtgttagtaacagcactgttgtttcgtagcggagcatgatggccgcgggaactcccccttggtgacaaggacccgcggggccgaaagccacgtcttaacggacccatcatgtgtgcaaccccagcacggcaactttactgtgaaaaccactttaaggtgacactgatactggtactcaaccactggtgacaggctaaggatgcccttcaggtaccccgaggtaacaagtgacactcgagatctgagaaggggacaggggcttctttaaaagcgctctgtttaaaaagcttctatgcctgaataggcgaccggaggccggcgccttttcccactaaaccactactaacttt

SEQ ID NO: 2744 - DNA, 697 bp, Foot-and-mouth disease virus
  misc_feature 1..697: note = - type Asia 1,isolate1
  source 1..697: mol_type = genomic DNA
ttcccgacgttaaagggatgtaaccacaagcttaacaccttcgtgtccgaagtcaaaggactgaaaccacatgcttgcaccgccttttccggcgttaatggactgtaaccacaagatggaccttcacccggaagtaaaacggcaacttacacagttttgcccgttttcactagaaacgggacgtctgcgcacgaaacgcgccgccgcttgaggaggacttgtacaaacacgatctacgcaggttcccacaactggcttaaaacgtgcaatttgaaaccccgcctggtctttccaggtctagaggggtgacaccttgtactgtgcttgactccacgctcggtccactggcgagtgttagtagtagcactgttgcttcgtagcggagcatgatggccgcgggagtccctccttggtgacaaggacccgcggggccgaaagccacgtcctacggacccatcatgtgtgcaaccccagcacggcaactttgacacgaaaaccactttaaggtgacactgatactggtactcaaacactggtgacaggctaaggatgcccttcaggtaccccgaggtaacacgcggcactcgggatctgagaaggggactggggcttctgtaaaagcgcccagtttaaaaagcttctatgcctgaataggcgaccggaggccggcgcctttcctttaattgccactaactac

SEQ ID NO: 2745 - DNA, 701 bp, Foot-and-mouth disease virus
  misc_feature 1..701: note = partial polyprotein, P1 region,strain1
  source 1..701: mol_type = genomic DNA
ttcccgacgttaatggggaaacaaccacaagcttaacaccgtcttgcccgacgtaaaagggctgcaaccaaaaagcttgtgccgcctttcccggcgttaatgggaggtaaccacaagacaaaccttcacccggaagtaaaacggcaacttcacacagttttgcccgttttcgtgagaaatgggccgtcaacgcacgaaacgcgccgtcgcttgaggaggacttgtacaaacacgatctatgcaggtttccacaactgacacaaaccgtgcaacttgaaaccccgcctggtctttccaggtctagaggggcgacattttgtactgtgcttgactccacgctcggtccactagcgagtgttagtagtagcactgttgcttcgtagcggagcatgatggccgtgggagctcccccttggtgacaaggacccacggggccaaaagccacgtcctaccggacccatcatgtgtgcaaacccagcacggcaactttactgcgaaaaccactttaaggtgacactgatactggtactcaatcactggtgacaggctaaggatgcccttcaggtaccccgaggtaacacgcgacactcgggatctgagaaggggactggggcttctttaaaagtgcccagtttaaaaagcttctatgcctgaataggcgaccggaggccggcgccttttcactgttttactactgtttc

SEQ ID NO: 2746 - DNA, 702 bp, Human enterovirus 92
  misc_feature 1..702: note = strain RJG7, complete genome.1
  source 1..702: mol_type = genomic DNA
tttaaaacagcctgtgggttgtacccacccacagggcccacgcggcgttagtactctggtatcacggtacctttgtatgcctgttttatctcccttcccccgtaacgttagaagaatgaacaaaagacaattagcaaatccaccaacccaggtgggttttcgtcaagcacttctgtttccccggacctagtaccaataagctgtgcccacggctgaaggggaaaacgttcgttatccggctacctacttcgagaagcctagtaccaccaatgattgtctcaagtgttacgctcagcacaaccccagtgtagttcaggtcgatgagtcaccgaattccccacgggcgaccgtgtcggtggctgcgttggcggcctgcctgcgagtttcactcgcaggacgcttgattcatgacatggtgcgaagagcctattgagctaggcagtagtcctccggcccctgaatgcggctaatcctaaccacggagccatgcgtcacaaaccagtggcgtcatggtcgtaacgagcaattctgtggcggaaccgactactttgggtgtccgtgtttcctgttttatttaccttggctgcttatggtgacaatctagagttgtcatcatatagcgattggattggccatccggatattactttgtgtgatttatctcttgctcgtaagcaattttaaatagtttatagcatcatt

SEQ ID NO: 2747 - DNA, 708 bp, Coxsackievirus A14
  misc_feature 1..708: note = isolate SEN-14-254, complete genome.1
  source 1..708: mol_type = genomic DNA
ggggccggagctctggtgatacgttacctttgtgcgcctgttttatttccctaccccggaacaatctagaagcaacgcgctactggccaatagaaagtgtagcaaaccagctacatcccggtcaagcacttctgtctccccggaccgagtatcaataaactgctaacgcggttgaaggagaaaaggttcgttacccggccaactacttcgaaaagcccagtaacaccatgaaagttgcagagtgtttcgctcagcacttcccccgtgtagatcaggtcgatgagtcaccgcgatccccacgggcgaccgtggcggtggctgcgttggcggcctgcctatggggcaacccataggacgctctaatacagacatggtgcgaagagcctattgagctagttggtagtcctccggcccctgaatgcggctaatcctaactgcggagcttatgctcgcgaaccagcgagtagtgagtcgtaacgggtaactctgcagcggaaccgactactttgggtgtccgtgtttccttttattctcatattggctgcttatggtgacaatcaaagaattgttaccatatagctattggattggccatccggtgtgcaacagagctattgtctactcttttgttggatttgttccattgtcctctttcaccacactaaatactctacagtatatactttcccttaattcaaggaaacgatc

SEQ ID NO: 2748 - DNA, 709 bp, Foot-and-mouth disease virus
  misc_feature 1..709: note = - type O,isolate O/VN/SL21/20061
  source 1..709: mol_type = genomic DNA
aagttttgccgtcgttcccgacgttaaagggagataaccacaagctttgcaccttcttgcccgaagtaaaagggctgcaaccgcaagctttaaaccgcctttcccggcgttaacgggatgcaaccataagatggaccttcgcccggaagtaaaacggcaactcacacagttttgcccgttttcacgagaaatgggacgtcagcgcacgaaacgcgccgtcgcttgaggaggacttgtacaaacacgatctacgcaggttcccacaaccgacacaaaccgtgcaatttgaaatcccgcctggtctttccaggtctagaggggtaacactttgtactgtgattgactccacgctcggtccactggcgagtgtaagtagtagtactgttgcttcgtagcggaacatggtggccgtgggactccctccttggtaacaaggacccacggggccgaaagccacgtcttggacccaccatgtgtgcaaccccagcacggcaaccatactacgaaaaccactttaaactggcactgatactggtactcaaccactggtgacaggctaaggatgcccttcaggtaccccgaggtaacacgcgacactcgggatctgagaagggggctggggcttctataaaagcgcccagtttaaaaagcttctatgcctgaataggcgaccggaggccggcgcctttctctacttactactgtttac

SEQ ID NO: 2749 - DNA, 712 bp, Foot and Mouth Disease Virus
  misc_feature 1..712: note = A L-fragment of RNA genome.1
  source 1..712: mol_type = genomic DNA
taagtgttaccgtcgtgcccgacgttaaagggaagtaaccacaagcttgacaccgtcttgtccgacgttaaagggctgtagccacaagcttgcaccgcctttcccggcgtaaatgggatgtaaccacaagacacaccttcagccggaagtaaacggcaacaccacacagttttgcccgttttcatgagaaatgggacgtctgcgcacgaaacgcgccgtcgcttgaggagaacttgtacaaacacgatctacgcaggtttccacaactgacacgaaccgtgcaacttgaaactccgcctggtctttccaggtctagaggggtaacactttgtactgtgtttgactccacgcttggtccactagcgagtgttagtagcagcactgttgcttcgtcgcggagcatgatggctgtgggaactcccccttggtaacaaggacccacggggccaaaagccacgtcctcacggacccatcatgcgtgcaaccccagcacagcaactttactgcgaaagccactttaaggtgacactgatactggtactcaaccactggtgacaggctaaggatgcccttcaggtaccccgaggtaacatgcgacactcgggatctgagaagggggctgaggcttctttaaaagcgctcagcttaaaaagcttctatgcctgaataggcgaccggaggccggcgcctttccacttaccaatactgtttt

SEQ ID NO: 2750 - DNA, 713 bp, Coxsackievirus
  misc_feature 1..713: note = A2,strain USA/2014-19510, complete genome.1
  source 1..713: mol_type = genomic DNA
ccacagggcccacggggcgctagcacactggtgttacggcacctttgtgcgcctgttttactcccctttcccctgtaatttagaagtatcgcaccacggatcaatagcaggtgtgtcgcaccaggcacatctagatcaggcacttctgtctccccggaccgagtatcaataggctgctagcgcggctgaaggagaaaacgttcgttacccggccaactacttcgagaagcttagtaccaccatgaacgttgcagagtgtttcactcagcacaaccccagtgtagatcaggtcgatgagtcaccgcattccccacgggcgaccgtggcggtggctgcgttggcggcctgcctatggggcaacccatgggacgctctaatactgacatggtgcgaagagcctattgagctagttggtagtcctccggcccctgaatgcggctaatcctaaccgcggagcatgtactcacaacccagtgggcagcatgtcgtaacgggtaactctgcggcggaaccgactactttgggtgtccgtgtttccttttattcttacattggctgcttatggtgacaactgaaggattgttaccatatagctattggattggccatccggtgtccaacagagctctgatttatcagtttgttggctttgtgcctttatcacctacagcctactcaaccttagtgtttttgatacaccttaacaataggaa

SEQ ID NO: 2751 - DNA, 715 bp, Ljungan virus
  misc_feature 1..715: note = strain 340 polyprotein gene, complete cds.1
  source 1..715: mol_type = genomic DNA
ggtggggtgggtacgtttctcgctcattgagtgggggcgtggctcaccaaccacacctggttggttcccaggttcatacaataaccacctctttgtaacaactacacctaagcttaatttgcccgcttgaactggacgaaaccgcttggaataagtttggttctcttttgagtgtgttttgtgttagcataatttctgtctctagagtgctttacgctctagtaggggctgtacccgggcggtcccactcttcacaggaatctgcacaggtggctttcacctctggacagtgcattccacacccgctccacaatagaagataatgtatgtctttgtttgtgaaatgcttatgaaacgagtgtgtaggcgtagcggctacttggatgccagcggaactcccctagtggtaacactagcctctgggcccaaaaggcatgtctttgaccattcaagtacacaaccccagtgatgcacacacctagtaatggcttagtaatggacattgattgattatcagacaattgctaggaggcttaggtatgacgggctgaaggatgccctggaggtacccgcaggcaaccttaggagactgtggatctgaccaggggcccaccatggaagcatgggtagaagtcttcggaccttgggttaaaaaacgtctaggcccgccccccacagggatgtggggtttcccttataaccccaatactacact

SEQ ID NO: 2752 - DNA, 717 bp, Echovirus E6
  misc_feature 1..717: note = strain GHA:CEN:ASE/2017 polyprotein gene, complete1
  source 1..717: mol_type = genomic DNA
acccacagggcccactgggcgctagcacactggtatcacggtacctttgtgcgcctgttttatccaccttaccccactgtaacttagaagttaaccaaacacggtcactaggtggctcagtataccaactgagtctagaccaagcacttctgttaccccggactgagtatcaataggctgctcgcgcggctgaaggagaaaacgttcgttacccggccaattacttcgagaaacctagtaccaccatgaaggttgcgcagcgtttcgctccgcacttccccagtgtagatcaggccgatgagtcaccgcgtacctcacgggcgaccgtggcggtggctgcgctggcggcctgcccatggggcaacccatgggacgcttcaaaactgacatggtgcgaagagtctattgagctaattggtagtcctccggcccctgaatgcggctaatcccaactgcggagcagatacccacactccagtgggcagtctgtcgtaatgggcaactctgcagcggaaccgactactttgggtgtccgtgtttccttttattcttatactggctgcttatggtgacaattgagagattgttaccatattgctattggattggccatccggtgacaaacagagcaataatctacttatttgttggtttcgtaccattgaactttagagtactgaagacccttaactttatactaattctcaacacagcaaa

SEQ ID NO: 2753 - DNA, 719 bp, Foot-and-mouth disease virus
  misc_feature 1..719: note = - type Asia 1,isolate1
  source 1..719: mol_type = genomic DNA
cccataaaggttttaccgtcattcccgacgttaaagggaggtaaccacacgcttgagaccgtcttgtccgacgttaacggactggaaccacaagcttataccgcctttcccggcgttaacggaatgtaaccacaagatggaccttcacccggaagtaaaacggcacacacacacaattttgcccgttttcacgagaaacgggacgtctgcgcacgaaacgcgccatcgcttgaggaggacttgtacaaacacgatctacgcaggtttcccaaccgacacaacccgtgcaacttgaaactccgcctggtctttccaggtctagaggggtgacattttgtactgtaattgactccacgctcggtccactagcgggtgtttagtagctgtattgttgcttcgtagcggagcataatggccgcgggagctcccccttggtaacaaggacccacggggccgaaagccacgtcctaacggacccattatgtgtgcaaccccagcacggcaacttactgtgaaaaccactttaaggtgacactgatactggtactcaactactggtggcaggctaaggatgcccttcaggtaccccgaggtaacatgcgacactcgggatctgagaaggggaccgggacttctttaaaagtgcccggtttaaaaagcttctatgcctgaataggcgaccggaggccggcgcctttcttttgattactactgctttt

SEQ ID NO: 2754 - DNA, 719 bp, Coxsackievirus
  misc_feature 1..719: note = A16,isolate C138/CHW/AUS/2016 polyprotein gene,1
  source 1..719: mol_type = genomic DNA
ccacccacagggcccacggggcgctagcacactggtgtcacggcacctttgtgcgcctgttttatttcccctcccccccgcaatttagaagttttgcactacagatcaatagcaggtgtgtcgcaccaggcacatctagatcaagcacttctgtttccccggactgagtatcaataggctgctcacgcggctgaaagagaaagcgttcgttatccggccaactacttcgagaagcttagtaccaccatgaacgttgcagagtgtttcgctcagcacatccccagtgtagatcaggtcgatgagtcaccgcactccccacgggcgaccgtggcggtggctgcgttggcggcctgcctatggggcaacccataggacgctctaataccgacatggtgcgaagagcctattgagctagttggtagtcctccggcccctgaatgcggctaatcctaactgcggagcatgtactcacaatccagtgggcagcatgtcgtaacgggcaactctgcagcggaaccgactactttgggtgtccgtgtttcctttttattcttatattggctgcttatggtgacaattgaagaattgttaccatatagctattggattggccatccggtgtctaacagagctattgtttacctgtttgttggatacgtccctctcaatttcaaggtcattaaaactcttaattatatactacttctcaactgtgagaa

SEQ ID NO: 2755 - DNA, 719 bp, Swine vesicular disease virus
  misc_feature 1..719: note = strain SVDV Itl. 1-92 polyprotein1
  source 1..719: mol_type = genomic DNA
cacccacagggcccactgggcgctagtacactggtatcacggtacctttgtgcgcctgtttgaccgacccaccccgaatgcaacttagaagcacaacttggatggtcaataggcggctcggtatgccaactgagtctagaccaagcacttctgttaccccggactgagtaccaataggctgctcgcgcggctgaaggggaaaccgttcgttacccgactaactacttcgagaaacctagtaccaccatgaaagttgcgcagcgtttcgttccacacaaccccagtgttgatcaggtcgatgagtcaccgcaaaccccacgggcgaccgtggcggtggctgcgctggcggcctgcccatgaggcaactcatgggacgcttcaatactgacatggtgcgaagagtctattgagctagttggtagtcctccggcccctgaatgcggctaatcctaactgcggagcagatacccacacaccagtgggcagtctgtcgtaatgggcaactctgcagcggaaccgactactttgggtgtccgtgtttccttttgttcttattctaaccacttatggtgacaattgagaggctgtgaccatattgccactgagttgaccacccggtgacgagcagaacagttgcttacctgtctgttggtcacgtatcattaaaccacaaatccttgaacgctctcctattttgtcataacgcccaacacgtcaaa

SEQ ID NO: 2756 - DNA, 720 bp, Foot-and-mouth disease virus
  misc_feature 1..720: note = - type A,isolate TUR_004/20031
  source 1..720: mol_type = genomic DNA
ccccccctaagttttaccgtcgttcccgacgttaaagggatgtaaccacaagctagaaaccgtcttgcccggcgttatagggctgtaaccacatgcttgtaccgcctttcccggcgacaacgggatgtaaccacacgattgaccttcacccggaagtaaaacggcaacttcacacatttttgcccgttttcacgagaaacgggacgtctgcgcacgaaacgcgccgccgcttgaggaagacttgtacaaacacgatctaagcaggtctccacaactgacacaaaccgtgcaacttgaaactccgcctggtctttccaggtctagaggggtgacactttgtactgtgcttgacaccacgctcggtccactagcgggtatgagtagcagaactgttgcttcgtagcggagcatggtggccgtgggaactcctccttggtaacaaggacccacggggccaaaagccacgtcctgtggacccaccatgtgtgcaaccccagcacggcaatttttctgtgaaaactaccttaaggtgacactgatactggtactcaaccactggtgacaggctaaggatgcccttcaggtaccccgaggtaacacgcgacactcgggatctgagaaggggactgggacttctttaaaagtgcccagtttaaaaagcttctatgcctgaataggcgaccggaggccggcgcctttcttttaaacactactagacta

SEQ ID NO: 2757 - DNA, 726 bp, Enterovirus B84
  misc_feature 1..726: note = strain GHA:BAR:TES/2017 polyprotein gene, complete1
  source 1..726: mol_type = genomic DNA
ggttgttcccacccacagggcccattgggcgctagcacactggtatcacggtacccttgtgcgcctgttttatacacccttccccaacgaaacttagaagtaaagcaacaaggtcaataggtagctcagtgagccaactgagttatgaccaagcacttctgtcaccccggactgagtatcaataggctgctcacgcggctgaaggagaaagcgttcgttatccggctaactacttcgagaaacctagtaccaccatgaaggttgcgtagcgtttcgatcagcacaaccccggtgtagatcaggccgatgagtctccgcattcctcacgggcgaccgtggcggtggctgcgctggcggcctgcccatggggcaacccatgggacgcttcaatactgacatggtgcgaagagtctattgagctagttagtagtcctccggcccctgaatgcggctaatcctaactgcggagcacacacccccaacccaggaggcagtgtgtcgtaacgggtaactctgcagcggaaccgactactttgggtgtccgtgtttccttttattcttatactggctgcttatggtgacaattgagagattgttaccatatagctattggattggccatccggtgactaacagagctattgtatacctgtttgttggttttataccattaaattgcaaagttctagagaccctcaattttatcctattactaaacgcagcaaa

SEQ ID NO: 2758 - DNA, 726 bp, Enterovirus J
  misc_feature 1..726: note = strain CHN/BJ/2018-8J, complete genome.1
  source 1..726: mol_type = genomic DNA
acatgggcacccagagggcccacgtggcgtagaactcacgtggcgtagaactccggtattacggtacccttgttcgcctattttaccaccccttccccagaaacttagaagtcatgatcacaaggctcaatagatacttgggcaaaccagcccaaggacgagcaagcacttctgtctccccgggaggcaacgctgttaggctgtccccacggccgaaggcaacgctaccgttaaccggcgtggtactgcgggaagtctagtaacatcattgaatttctttgacgttacgttcagcacacaaacccagtgtgtagttttggctgatgagtgcctgcattccccactggcgacagtggcaggcgctgcgttggcggccaactctcagggcaacctgagagacgtcaaattaaggacatggtgtgaagaacctactgcgctactgcgtagtcctccggcccctgaatgcggctaatcctaactcgggagcatctgcacacaatccagtgtgaagggtgtcgtaacgggcaactcctgagcggaaccgactactttgggtgtccgtgtttcctgttttatttaccttggctgcttatggtgacaatctagattgttaccatatagcaattgggttggccacctggttttgtaagcttgtgacttttagtacgctaaaacacttactataatacaacacagacattactataaaaccacttgaaagagagg

SEQ ID NO: 2759 - DNA, 727 bp, Hepatovirus A
  misc_feature 1..727: note = isolate KSA215 polyprotein gene, complete cds.1
  source 1..727: mol_type = genomic DNA
tcccctctttgggctactctggctgggggtagtaaaatacccagccctcgtttgcctagagtttaggctaaaacccctttccctttgtaaatacgttcatttgtaaatattgattcctgcaggttcaggctttcttgaatcatgttgtgctttaacacacacttactattttgccataagtgcgatggatggaaacttccatcaaaccttttaacacaggatgttattagggcagtttctcttaatatatctctgggacattcttcggtcccattgtttctcctttctatcttcttgttttccgggttctcaggataccaatggagcgaccactgcgcccggtggggttaaccagaagattagcttctggctgtagctgctaaaagtcctgacgttatagagcgccgtcacggagttagtgattaaactcaggtgtttggaaattcattgatcttctagaaagggtaggctacgggtgaaaccctttacactaatacctatattaggagatgtgttgcataggtgaagggtactggtaaaggggattttcacgatgaacctttcaacagttgtggacccacctcatgcactagatgctttgatttgaagaacacttggggtcacttcccgagtgatcgcgccactaggcgccctcctctatgagttgtaggggtaatcaggggcatttaggtttccacatttaaaagatttatatgattgattcaaa

SEQ ID NO: 2760 - DNA, 729 bp, Echovirus E9
  misc_feature 1..729: note = strain 11-2042-1, complete genome.1
  source 1..729: mol_type = genomic DNA
gggttgttcccacccacagggcccacggggcgctagcactctggtatcacggtacctttgtgcgcctgttttatccaccctcccccaaatgtaacctagaagtacaatactaacggtcaataggcggcacagcacaccagctgggtctagaccaagcactcctgttgccccggactgagtatcaataggctgcctccgcggctgaaggagaaaacgttcgttatccggccaattacttcgagaaacccagtaccaccatggaagttgcgcagcgtttcgttccgcacaaccccagtgtagatcaggtcgatgagtcaccgcattccccacgggcgaccgtggcggtggctgcgttggcggcctgcccatggggtgacccatgggacgcttcaatactgacatggtgtgaagagtctattgagctaattggtagtcctccggcccctgaatgcggctaatcctaactgcggagcagacactcacaagccagtgagcagtctgtcgtaacgggtaactctgcagcggaaccgactactttgggtgtccgtgtttccttttattcttacattggctgcttatggtgacaattgagaaattgttaccatatagctattggattggccatccggtgactaacagagcaattgtctatctgtttgttggatttgtaccactgaactataaggtattgaacacacttaactttatcatatcactaaactcagcaaa

SEQ ID NO: 2761 - DNA, 730 bp, Echovirus E11
  misc_feature 1..730: note = strain HAI/2016-23057 polyprotein gene, complete cds.1
  source 1..730: mol_type = genomic DNA
gttgttcccacccacagggcccactgggcgctagcacactggtatcacggtacctttgtgcgcctgttttatgcttcctcccccactatagtaatctagaagcttgaactacatggccaacagacaacccggtacaccaaccgggccccggccaagcacttctgtatccccggactgagtatcagtaagctgctcgcgcggctgaaggagaaaacgttcgttacccggccacttacttcgagaaacctagtaacgccatgaaagttgcgcagcgtttcgctccgcacaaacccagtgtagatcaggtcgatgagtcaccgcatcccccacgggcgaccgtggcggtggctgcgttggcggcctgcccatggggtaacccatgggacgcttcaatactgacatggtgcgaagagtctattgagctaagtggtagtcctccggcccctgaatgcggctaatcctaactgcggagcagatacccacactccagtgggcagtctgtcgtaacgggcaactctgcagcggaaccgactactttgggtgtccgtgtttccttttgtcttttacactggctgcttatggtgacaattgaaagattgttaccatatagctattggattggccatccggtatcaaacagagcaattatttacttgtttgttggttatatacctctcgataccaaggttctaaaaacactcaactacatcttgttattgaatacgttgaa

SEQ ID NO: 2762 - DNA, 740 bp, Rattus tanezumi parechovirus
  misc_feature 1..740: note = strain Wencheng-Rt386-3 polyprotein1
  source 1..740: mol_type = genomic DNA
cccgtggcttatgccacgggacccgtgcccccgtccagggggttttacttatgctcaggcgtttgcattatcgcctggatctggctctgggcaccctttcagcccctgggcatgggtttaaactgcctacctgtaacacttaacatctaagaaactgatttgtaaccaaccctggccagatgttgccagcccaagccacttggaataaggtgggcaatgtcacattggtgcttaaaggttgcgtccaaatttttcttttccaaccactcatgtggacggtgtgcaaactccaccgtaacacttctaggtgacttccacacttgtggggctaaagcaccagagtctttgcttcaaccatattgtggtgacagcaaagcatcctgaaattagttagtaatgattctagatccacttctgtggtgctgcatgcctgcggagcaatggggggtgaccctcacctcaggggccgaaagccacggtgtttaaagcacccatgcagtatgcttgtctgtttaggattgtgaacactgaaagtaaggatgatgagtggtcactgtggtcactggttgtcgtacgggggctgaaggatgcccagaaggtacccgtaggtaaccttaagagactatggatctgatctggggccagggagtgatgtactctatacacctgccttggttaaaaaacgtctaggcccccccaacctgggggaccaggttttcctggtcattttgcaaaggaat

SEQ ID NO: 2763 - DNA, 741 bp, WUHARV Sapelovirus 2
  misc_feature 1..741: note = polyprotein gene, complete cds.1
  source 1..741: mol_type = genomic DNA
tcacactcatttcgccccctcaccctactcaggcaacccccaccccttctcttacgggagttagggccaaggatctagtgtagtggtgttgtatccccttaccttaaacccatcccatccaagcggactggtattatggctttagattgaataatggttgatgaatccaaacctgttactcattcaggggaaaaatgaagacattctctatggatttgacttgttacgaccaagagttagcgcttcgcgcgctggccgtatggactgtttaatggttactctatggattatgatttcagggttggccgcccaggataaaaggcaattgtggtaagtgatgttagtcattggcagttgaaacctgcctagaacatctaaggtctacgctgtgcgggccgaagtaagtctaggaacaacagggagtatgctgttttttgctttcacccaacacgaccgtacacgaaagagctagaggcatctggaggcaaagggaaaagaatttcttagcccgaatgttcattagagtccttgacgaatgcgtcccctctgtcccgagggtgaggcgtatggcgcatgctcatggcattactccaaggtgtatctagaggggggggccccctctacttagtctagtgctacctgacagggccgcggctggtcgtttgtgtatggtataaccagtagtaatcccccatggattgctttaactccccctcctcccttcacaagacattctctaag

SEQ ID NO: 2764 - DNA, 741 bp, Human echovirus 2
  misc_feature 1..741: note = strain Cornelis, complete genome.1
  source 1..741: mol_type = genomic DNA
ttaaaacagcctgtgggttgatcccacccacagggcccattgggcgctagcactctggtattacggtacccttgtgcgcctgttttacacgcccctccccaagcaacttagaagtctgtcacaaatggtcaatagacagctcaacacgccagttgagtctagaccaagcacttctgtcgccccggaccgagtatcaatagactgctagcgcggttgaaagagaaaacgttcgttacccggccaactacttcgggaaacctagtaccaccatgaaagttgcgcagtgtttcgctccgcacaaccccagtgtagatcaggtcgatgagccaccgcattccccacaggcgactgtggcggtggctgcgttggcggcctgcccatggtacaacccatgggacgcttcaatactgacatggtgcgaagagtctactgagctagttggtagtcctccggcccctgaatgcggctaatcctaactgcggagcaggtacccacgagccagtgggcagcctgtcgtaatgggcaactctgcagcggaaccgactactttgggtgtccgtgtttccatttactcttatactggctgcttatggtgacaatcacggaattgttaccatatagctattggattggccatccagtgactaacagagcgattatattcctttgtgttggttttgtaccactcaccgtcacgagctttacaacgctaaactacattttgtcattgaacacggcaag

SEQ ID NO: 2765 - DNA, 741 bp, Human echovirus 25
  misc_feature 1..741: note = strain JV-4 complete genome.1
  source 1..741: mol_type = genomic DNA
ttaaaacagcctgtgggttgtacccacccacagggcccactgggcgctagcactctggtactacggtacctttgtgtgcctgttttatacccctccccctactgaaacttagaagcaattcataccgatcaatagtgggcgtggcacaccagccgtgtctagatcaagcactcctgtttccccggaccgagtatcaatagactgctcacgcggttgaaggagaaaacgttcgttatccggctaactacttcgaaaaacctagtaacaccatgaaagttgcggagtgtttcactcagcacttccccagtgtagatcaggtcgatgagtcaccgcattcctcacgggcgaccgtggcggtggctgcgctggcggcctgcctatggggtgacccataggacgctctaatacagacatggtgcgaagagtctattgagctagttagtagtcctccggcccctgaatgcggataatcctaactgtggagcagatacccacgaaccagtgggcagtctgtcgtaacgggcaactccgcagcggaaccgactactttgggtgtccgtgtttccttttattccaaatctggctgcttatggtgacaattgagagattgttgccatatagctattggattggccatccggtgaataatagagcgataatatatttgtttgttggattcgtgccacttagtctgaaagttttgagaacactcaactacgttttattgctgaatagtgcaag

SEQ ID NO: 2766 - DNA, 745 bp, unidentified
  source 1..745: mol_type = unassigned DNA; note = Human coxsackievirus A6 strain Gdula, complete genome.1 sequence
ttaaaacagcctgtgggttgcacccactcacagggcccactgggcgctagcacactgatttcccggaatccttgtgcgcctgttttatatcccctcccccatgcgcaacttagaagcaatctacaccttcgatcaatagcaggcgtggcgcgccagccatgtctagatcaagcacttctgtttccccggactgagtatcaataaactgctcacgcggttgaaggagaaaatgttcgttacccggctaactacttcgagaaacctagtagcaccatgaaaattgcagagcgtttcgctcagcgcttcccccgcgtagatcaggctgatgagtcactgcattcctcacgggcgaccgtggcagtggctgcgttggcggcctgcccatggggtaacccatgggacgctctaatatggacatggtgtgaagagtctattgagctagttagtagtcctccggcccctgaatgcggctaatcctaactgcggagcacatacccccaaaccagggggcggtgtgtcgtaacgggcaactctgcagcggaaccgactactttgggtgtccgtgtttccttttattcttatattggctgcttatggtgacaattgaaagattgttaccatatagctattggattggccatccggtgaataacagagccttgatatacctttttgtagggtttataccacttactcttcgcgttgttgagactctaaagtacattctaatcttgaacactagaaa

SEQ ID NO: 2767 - DNA, 746 bp, Coxsackievirus
  misc_feature 1..746: note = A6,strain CVA6 -310167012-FRA-2010, complete genome.1
  source 1..746: mol_type = genomic DNA
ttaaaacagcctgtgggttgcacccacccacagggcccactgggcgttagcacactgattccacggaatccttgtgcgcctgttttacaaccccttcccaaactcgtaacttagaagaatagcacgctaccgatcaatagcaggcatggcgcaccagccatgtctagatcaagcactcctgtctccccggaccgagtatcaatagactgctaacgcggttgaaggagaaaacgttcgtcacccggctaactacttcgagaaacctagtaacaccattgaagctgcggagcgtttcgctcagcactacccccgtgtagatcaggtcgatgagtcactgcaacccccacgggcgaccgtggcagtggctgcgttggcggcctgcctatggggtaacccataggacgctctaaagtggacatggtgcgaagagtctattgagctagttagtagtcctccggcccctgaatgcggctaatcctaactgcggagcgcataccctcaacccagggggtggtgcgtcgtaacgggcaactctgcagcggaaccgactactttgggtgtccgtgtttccttttattcttatactggctgcttatggtgacaattgaaagattgttaccatatagctattggattggccatccagtgactaatagagctttgatatacctgtttgtgggttttgttccactcaccaatcgtgcagtttacactctgaagtacattttaatcttgaataatagaaa

SEQ ID NO: 2768 - DNA, 746 bp, Coxsackievirus
  misc_feature 1..746: note = A7 gene for polyprotein, polyprotein region,strain1
  source 1..746: mol_type = genomic DNA
tttaaaacagcctgtgggttgcacccacccgcagggcccactgggcgccagcactctggtttcgtggaacctttgtgcgcctgttttatcaccctcttcccaaactcgcaacttagaagtaacactttactgatcaatagcaggcgtggcgcaccagccatgtctagatcaagcacttctgtctccccggaccgagtatcaataggctgctcacgcggctgaaagagaaaacgttcgttatccggctaactacttcgagaaacttagtagcaccgttgaaactgcagggtgtttcgctcagcacttcccccgtgtagatcaggtcgatgagtcactgcaatccccacgggcgaccgtggcagtggctgcgttggcggcctgcctatggggtaacccataggacgctctaatgtggacacggtgcgaagagtctattgagctagttagtagtcctccggcccctgaatgcggctaatcctaactgcggagcgcatgcccccgaaccaggaggtggtgcgtcgtaatgggtaactctgcagcggaaccgactactttgggtgaccgtgtttctttttattcctattatggctgcttatggtgacaattaaagaattgttaccatatagctattggattggccatccggtgtctaacagagctattatatatctgtttgttgggtttgttccattatcacacacatcactcaatacattgtatttcattgtgggattgaacacaagaaa

SEQ ID NO: 2769 - DNA, 746 bp, Coxsackievirus
  misc_feature 1..746: note = A8,isolate 18-38/TJ/CHN/2018 polyprotein gene,1
  source 1..746: mol_type = genomic DNA
ttaaaacagcctgtgggttgtacccactcacagggcccactgggcgttagcactctgattccgcggaatccttgtgcgcctgttttaaaacccctccccacacttgtaatctagaagtaatgcactcttatgatcaatagcaggcgtggcgcaccagccatgtcttgatcaagcacttctgtctccccgggctgagtatcaatagactgctcacgcggttgaaggagaaaatgctcgttatccggctaactacttcgagaaacctagtagcaccagtgaagctgcggggcgtttcgttcagcacttcccccgtgtagatcaggtcgatgagtcactgcgttccccacgggcgaccgtggcagtggctgcgttggcggcctgcctatggggcaacccataggacgctctaatgtggacatggtgcgaagagtctattgagctagttagtagtcctccggcccctgaatgcggctaatcctaactgcggagcacatgccctcaagccagagggtggtgtgtcgtaatgggcaactctgcagcggaaccgactactttgggtgtccgtgtttccttttattcttatactggctgcttatggtgacaatcacagaattgttgccatatagctattggattggccatccggtgcacaacagagcaattatctatttatttgttggatttacccctttgacacttacatctcttaacacattgcactacatcctatttttgaatacgaggaa

SEQ ID NO: 2770 - DNA, 747 bp, Coxsackievirus
  misc_feature 1..747: note = A6,strain CVA6 -3141760671-FRA-2014, complete1
  source 1..747: mol_type = genomic DNA
ttaaaacagcctgtgggttgtacccacccacagggcccactgggcgctagcacactgattctatggaatctttgtgcgcctgttttataatccctttcccaaaattgcaacttagaagaacagtactttatcgatcaatagcaggcatgacgcaccagttatgtctagatcaagcactcctgtttccccggaccgagtatcaatagactgctaacgcggttgaaggagaaaacgtccgttacccggctaactacttcgagaaacctagtagcaccattgaagctgcagagcgtttcgctcagcacttccccagtgtagatcaggttgatgagccactgcactccccacgggcgaccgtggcagtggctgcgttggcggcctgcctatgggacaacccataggacgctctaaagtggacatggtgcgaagagtctattgagctagttagtagtcctccggcccctgaatgcggctaatcctaactgcagagcacatgccctcaacccagggggtggtgtgtcgtaacgggcaactctgcagcggaaccgactactttgggtgtccgtgtttccttttattcttatattggctgcttatggtgacaattgagagattgttaccatatagctattggattggccatccggtgaccaacagagctttgatatacctgtttgcgggttttattccactctccagtcgttcagtccatactataaagtgcattttgattctgaacaatagaaa

SEQ ID NO: 2771 - DNA, 747 bp, Human enterovirus sp.
  misc_feature 1..747: note = 89 polyprotein gene, complete cds.1
  source 1..747: mol_type = genomic DNA
ttaaaacagcctctgggttgcacccacccacagggcccactgggcgctagcacactggtatcacggtacctttgtgcgcctgttttatacaccctccccccttgtaacttagaagaaacaaacaaacgatcaatagtaggcttagcactccagctaagtctcgatcaagcacttctgttaccccggaccgagtatcaataggctgtacccacggctgaaagagaaaacgttcgttacccggctatctacttcgggaaacccagtaccatcatgaagattgcaaagcgtttcgctcagcacaaccccagtgtagatcaggtcgatgagtcactgcattccccacaggcgactgtggcagtggctgcgttggcggcctgcctatggggaaacccataggacgctttaatattgacatggtgcgaagagtctactgagctaggtagtagtcctccggcccctgaatgcggctaatcccaaccacggagcaggcgctcacactccagtgagtagcttgtcgtaatgcgaaagtctgtggcggaaccgactactttgggtgtccgtgtttccttttatttttatcatggctgcttatggtgacaatctaagattgttatcatatagctattggattggccatccggtgaattctagagatattatttacttgtttgttggttttaccacattaaacattaccaattacagaactctcctctacatcctgttattgaataatagaaagagaaa

SEQ ID NO: 2772 - DNA, 748 bp, unidentified
  source 1..748: mol_type = unassigned DNA; note = Human coxsackievirus A6isolate TW/273/09, complete genome.1 sequence
ttaaaacagcctgtgggttgcacccacccacagggcccactgggcgccagcacactgattctacggaacctttgtgcgcctgttttacaaccccttccccgaaactcgcaacttagaagaacagcacgctatcgatcaatagcaggcatggcgcgccagtcatgtctagatcaagcacttctgtctccccggactgagtatcgatagactgctaacgcggttgaaggagaaaacgtccgttacccggctaactacttcgagaagcctagtaacaccattgaaactgcagagtgtttcgctcagcactaccccagtgtagatcaggtcgatgagtcactgcactccccacgggtgaccgtggcagtggctgcgttggcggcctgcctatggggtaacccataggacgctctaaagtggacatggtgcgaagagcctattgagctagttagtagtcctccggcccctgaatgcggctaatcctaactgcggagcgcatgccctcaatccagggggtggtgcgtcgtaatgggcaactctgcagcggaaccgactactttgggtgtccgtgtttccttttattcttatgttggctgcttatggtgacaattgagagattgttgccatatagctattggattggccatccagtgactaacagagctttgatatacctgtttgtgggttttgttccactcaccaattgtacagttcaaactttgaagtacattttaattctgaataatagaaa

SEQ ID NO: 2773 - DNA, 749 bp, Coxsackievirus
  misc_feature 1..749: note = A6,strain FH233/SX/CHN/2013, complete genome.1
  source 1..749: mol_type = genomic DNA
ttaaaacagcctgtgggttgcacccacccacagggcccattgggcgctagcacactgattctatggaatctttgtgcgcctgttttagtatccctccccctcaaacacgtaacttagaagaatagcacgctatcgatcaatagcaggcgtggcgcaccagccatgtctagatcaagcacttctgtctccccggattgagtatcaatagactgctaacgtggttgaaggagaaaacgtccgttacccggctaactacttcgagaaacctagtaacaccattgaaactgcagagcgtttcactcagcactaccccagtgtagatcaggtcgatgagtcactgcattccccacgggcgaccgtggcagtggctgcgttggcggcctgcctatggggtgacccataggacgctctaaagtggacatggtgtgaagagtctattgagctagttagtagtcctccggcccctgaatgcggataatcctaactgcggagcgcatgccctcaatccagggggtggtgcgtcgtaacgggcaactctgcagcggaaccgactactttgggtgtccgtgtttccttttatctttatactggctgcttatggtgacaattgagagattgttaccatatagctattggattggccatccagtgaccaacagagctttgatttacctgtttgtgggttttgttccactcaccagttgtacagttcatactttgaagtatattttaatcctgaataatagaaa

SEQ ID NO: 2774 - DNA, 750 bp, Coxsackievirus
  misc_feature 1..750: note = A6,isolate HK418670/2012, complete genome.1
  source 1..750: mol_type = genomic DNA
acttaaaacaaacctgtgggttgcacccacccacagggcccactgggcgctagcacactgattctatggaatctttgtgcgcctgttttataaccccttccccaaaactgtaacttagaagaatagcactctatcgatcaatagcaggcatggtgcgccaatcatgtctagatcaagcacttctgtctccccggatcgagtatcaatagactgctagcgcggttgaaggagaaaacgtccgttacccggctaactacttcgagaaacttagtagcaccattgaagccgcagagtgtttcgctcagcactcccccagtgtagatcaggtcgatgagtcactgcactccccacgggcgaccgtggcagtgactgcgttggcggcctgcctatggggcaacccataggacgctctaaagtggacatggtgcgaagagtctattgagctagttagtagtcctccggcccctgaatgcggctaatcctaactgcggagcgcatgccctcaatccagggggtggtgtgtcgtaacgggcaactctgcagcggaaccgactactttgggtgaccgtgtttccttttattcttatactggctgcttatggtgacaattgagagattgttaccatatagctattggattggccatccagtaaccaacagagctttgatatacttgtttgtgggtttcgttccactcaccaatcgtacaatccatactctaaagcacattttgattctgaacaatagaaa

SEQ ID NO: 2775 - DNA, 750 bp, Coxsackievirus
  misc_feature 1..750: note = A6,isolate 12/GD/CHN/2018, complete genome.1
  source 1..750: mol_type = genomic DNA
ttaaaacagcctgtgggttgcacccacccacagggcccactgggcgctagcacactgattctacggaatctttgtgcgcctgttttataacccccttccccccaaaactgtaacttagaagaatattacactactgatcaatagcaggcatggcgcgccagtcatgtctagatcaagcacctctgtctccccggactgagtatcaatagactgctagcgcggttgaaggagaaaacgtccgttacccggctaactacttcgagaaacctagtagcaccattgaagctgcggagtgtttcgctcagcactcccccagtgtagatcaggtcgatgagtcactgcactccccacgggcgaccgtggcagtggctgcgttggcggcctgcctatggggcaacccataggacgctctaaagtggacatggtgtgaagagtttattgagctagttagtagtcctccggcccctgaatgcggctaatcccaactgcggagcacatgctctcaatccagagggtggtgtgtcgtaacgggcaactctgcagcggaaccgactactttgggtgtccgtgtttccttttattattatattggctgcttatggtgacaattgagagattgttgccatatagctattggattggccatccagtgacaaacagagctttgatatacttgttcgtgggttttgttccactcaccagtcgtacagttcatactctaaagtacattctgattctgaacaatagaaa

SEQ ID NO: 2776 - DNA, 750 bp, Echovirus
  misc_feature 1..750: note = 30,strain Bastianni, complete genome.1
  source 1..750: mol_type = genomic DNA
ttaaaacagcctgtgggttgatcccacccacagggcccactgggcgccagcacactggtatcgtggtacctttgtgcgcctgttttataccccctacccccacatgtactctagaagcaaggcaaacctgaccaatagtaggtgtggcacaccagccgcattttggtcaagcacttctgtttccccggaccgagtatcaataagctgctcacgcggctgaaggagaaaccgttcgttacccgaccagctacttcgagaaacctagtaacactatgaacgttgcggagtgtttcgttcagcacttcccccgtgtagatcaggtcgatgagtcaccgcattcctcacgggtgaccgtggcggtggctgcgttggcggcctgcctacgggttcgcccgtaggacgctctaataccgacatggtgtgaagagtccattgagctagctggtagtcctccggcccctgaatgcggctaatcctaactgcggagcaggtgctcacagaccagtgagtagcctgtcgtaacgggcaactctgcagcggaaccgactactttgggtgtttttccttttttcttctcttatattggctgcttatggtgacaattaaagaattgttaccatatagctattggattggccatccggtgacgagcagagccattgtttacctctttgttggatttgtacctttgaaccacaaagtcttgaataccattcatctcattttaaagttcaactcagctaaaagaaa

SEQ ID NO: 2777 - DNA, 751 bp, Human enterovirus sp.
  misc_feature 1..751: note = 76, strain 04360/SD/CHN/2004/EV76, complete1
  source 1..751: mol_type = genomic DNA
tttaaaacagcctgtgggttgtacccacccacagggctcactgggcgctagcacactggtatcacggtacccttgtgcgcctgttttatacaccctcccccctttttgtaacttagaagaaacaaacacacgatcaatagcaggcttagcgcaccagctaagtcttgatcaagcacttctgttaccccggactgagtatcaataagctgtgcccacggctgaaagagaaaacgttcgttacccggctgtctacttcgggaaacctagtaccatcatgaagactgcaaagcgtttcgctcagcacaaccccagtgtagatcaggtcgatgagtcactgcattcctcacaggcgactgtggcagtggctgcgttggcggcctgcctatggggaaacccataggacgctttaatgttgacatggtgcgaagagtctactgagctaggtagtagtcctccggcccctgaatgcggctaatcccaaccacggagcaggcgctcacactccagtgagtagcctgtcgtaatgcgcaagtctgtggcggaaccgactactttgggtgtccgtgtttccttttattcttatcatggctgcttatggtgacaatctaagattgttatcatatagctattggattggccatccggtgaactctagagatattatctatttgtttgttggttttaccaagttaaacatcaccagctacaccactcttctttatatcatattattgaacagtaaaaagagaaa

SEQ ID NO: 2778 - DNA, 751 bp, unidentified
  source 1..751: mol_type = unassigned DNA; note = Human coxsackievirus A16strain FY18 from China, complete genome.1 sequence
ttaaaacagcctgtgggttgtgacccacccacagggcccactgggcgctagcactctgattctacggaatccttgtgcgcctgttttatgtcccttcccccaatcagtaacttagaagcattgcacctctttcgaccgttagcaggcgtggcgcaccagccatgtcttggtcaagcacttctgtttccccggaccgagtatcaatagactgctcacgcggttgagggagaaaacgtccgttacccggctaactacttcgagaagcctagtagcaccatgaaagttgcagagtgtttcgctcagcacttcccccgtgtagatcaggtcgatgagtcactgcgatccccacgggcgaccgtggcagtggctgcgttggcggcctgcctgtggggtaacccacaggacgctctaatatggacatggtgcaaagagtctattgagctagttagtactcctccggcccctgaatgcggctaatcctaactgcggagcacataccctcgacccagggggcagtgtgtcgtaacgggcaactctgcagcggaaccgactactttgggtgtccgtgtttccttttattcttatactggctgcttatggtgacaattgaaagattgttaccatatagctattggattggccatccggtgtgcaacagagctattatttacctatttgttgggtatataccactcacatccagaaaaaccctcgacacactagtatacattctttacttgaattctagaaa

SEQ ID NO: 2779 - DNA, 752 bp, Enterovirus sp.
  misc_feature 1..752: note = C99, strain K292/YN/CHN/2013, complete genome.1
  source 1..752: mol_type = genomic DNA
ttaaaacagctctggggttgttcccaccccagaggcccacgtggcggctagtactctggtatcacggtacccttgtacgcctgacatcccattccctactgaaggagaagcaaattgcacgatatcaaaaaaagggggtacaaaccagaaccaccacgaacaagcacttctgttaccccggtgatattgcatagactgttcccacggtcaaaagcgattgatccgttatccgctcaagtacttcgagaagccttagtatctccttggaatcttccgatgcgttgcgctcaacactcgaccccggagtgtagcttaggtcgatgagtctggacgatcctcactggcgacagtggtccaggctgcgttggcggcctacctatggcccaaagccataggacgctagttgtgaacaaggtgtgaagagcctattgagctactcgagagtcctccggcccgtgaatgcggctaatcccaaccacggatcaggtgattgcaatccagcagttggcctgtcgtaacgcgcaagtctgtggcggaaccgactactttgggtgaccgtgtttccttttatttttattactggctgcttatggtgacaatcgaggattgttatcataaagcgaattggattggccatccggtgaaagtaaaacacattatttacctttttgttggatttactacattatccacgttcactctagatttaattcgcatagttcttttgactagaagattttaccaacataaca

SEQ ID NO: 2780 - DNA, 756 bp, Enterovirus sp.
  misc_feature 1..756: note = A76, strain 10-3291-2, complete genome.1
  source 1..756: mol_type = genomic DNA
cagacgtgtgctcttcccgatgtgggttgtacccacccacagggcccaatgggcgctagcacaccggtatcacggtacccttgtgcgcctgttttatgcaccctccccctatgtaacttagaagaaacaaacacacgatcaatagtaggcttggcgcgccagctaagtcttgatcaagcacttctgttaccccggactgagtatcaataggctgtacccacggctgaaagagaaaacgttcgttacccggctatctacttcgggaaacctagtaccatcatgaagactgcaaagcgtttcgctcagcacaaccccagtgtagatcaggtcgatgagtcactgcattcctcacaggcgactgtggcagtggctgcgttggcggcctgcctatggggaaacccataggacgctttaatgttgacatggtgcgaagagtctactgagctaggtagtagtcctccggcccctgaatgcggctaatcccaaccacggagcaagcgctcacaatccagtgagtagcttgtcgtaatgcgaaagtctgtggcggaaccgactactttgggtgtccgtgtttccttttatttttatcatggctgcttatggtgacaatctaagattgttatcatatagctattggattggccatccggtgaactctagagatattatctatttgtttgttggttttaccaagttaaacatcactagttacaccaccttactttatattatactactgaataatagaaaaagaaa

SEQ ID NO: 2781 - DNA, 759 bp, Ljungan virus
  misc_feature 1..759: note = strain 145SL,isolate 145SLG, complete genome.1
  source 1..759: mol_type = genomic DNA
ttgaaaggggggccctgcagccgatataggctgcagggttcccctggtggggtgggtacgtctctcgctcattgagtgggggcgtggctcaccaaccacacctggttggtccccaggttcatgcaataaccactttttgtaatctttacatctaagcttaattcacccactagaactggacgaaaccgcttggaataagtttggttctctcttgagtgtgttttgtgttagcataatttctgtctctagagtgctttacactctagtaggggctgtacccgggcggtcccactcttcacaggaatctgcacaggtggctttcacctctggacagtgcattccatacccgctccacaatagaagatgatgtatatctttgtttgtgaaatgctcatgaaacgtgtgtgtaggcgtagcggctacttgaatgccagcggaacccccctagtggtaacactagcctctgggcccaaaaggcatgtctctgaccattcaagtacacaaccccagtgatacacacatttagtaatggctcagtaatggacattgattgatcatcagacaattgttaggaggcctaggtatgacgggctgaaggatgccctggaggtacccgcaggtaaccttaagagactgtggatctgaccaggggcccaccatggaaacatgggtagaagtcttcggaccttgggttaaaaaacgtctaggcccgccccccacagggatgtggggtttcccttataaccccaatatcacatt

SEQ ID NO: 2782 - DNA, 788 bp, Antarctic picorna-like virus 2
  misc_feature 1..788: note = nonstructural protein and structural1
  source 1..788: mol_type = genomic DNA
cgataaaccggttatggagaccttctttggagaataatattttaaccgttattagctctttagaacttaaaaggatgattaatttctttgcacttctcccgtgctttatagattttacctatatgtgagttaaccctctcactccaatttgccctgagtgggcataaataactgaacgacggtatgtactttgtacgattccgtgaccagatgaatatagctgatgagtatcttagactcagcttgtatcttcattattggttaaccaaccttaccctcattaataaactgaatcccatatgggtccgtttcttgtttcttttgaattattattaaatctgaaaaggtaacatgtagttgtgaggcatgaggtactaccttagaaaggaatagaatttttggtttctctccgtctagaacaatgacggagtctcgcttgaaccctttgttattattgatcgtcacacaccagtgacattccgagtaagcatttatattgactactttgggcttgcacgatcagtccccaggctgatctctccccatcttatatcttgaatatgactatactcattgatctctaatacttagttattacacagcgtttctcttgattggtttcgaaaacgtgcgagagttttatacgcctgttaacccaggtaccatttcgttgatgcgattatctcgcaaaagaaactttttacggccaacatgaatggttagcccccttatagcctagcgatattatttatttaattttcagttaggcatcacaaataattcccacc

SEQ ID NO: 2783 - DNA, 807 bp, Passerivirus sp.
  misc_feature 1..807: note = strain waxbill/DB01/HUN/2014, complete genome.1
  source 1..807: mol_type = genomic DNA
ttgaaagccccacctggggggctttccctgtgctgcgacctgtcgctaaccaagaggcatgacctcaagattggacccacagtcgccacaggtgtccgttgatacgctccggacctaacccggataatgtaacatcaaattatttaagatttatgagcttatatactgttatgaacaccagtaaacatgttagattaagagcaaaacacccccctcgtcaattctagaagtccgcgagggatttagggtagcaaactaggaatctagatgcatattcttgttttaaaacccacgctgcaagtgatctgttcactctcatccaccctcagggtggtcagtgtggtgagtcatagcgacacctaacagaggctaacctagtaactcttgtgaagttcaacacgctgacaggattccacgtccgtttactgctagcattcccgctcagagggtggcccaagtaattggtgctctgagtgtgcgtgagctagtatcccgcgagggataggtgtgttgtaatgacacaagttggtgaaaggtaaagtgctttaggctagctactggcccattggctacgagtagacatgtgcaggaggtacccgctcatcttagcggatgtgacctgtagctaattagtcaatgctcgctgtagaaatcttttccccttttttcttttatatacagagtgattcgcatttgtattgaagattgtgtgcctagtgtatcttggtattatcagaggaagcaatttaaactggattttcaattaggaggattaaaaccttgttaactttttataagcattataaa

SEQ ID NO: 2784 - DNA, 833 bp, Cardiovirus Hu/SIDS-347/DEU/2010
  misc_feature 1..833: note = polyprotein gene, partial cds.1
  source 1..833: mol_type = genomic DNA
tttccggcccaggctaagagaaacatataagttagatttgatccaaatttcttgacgaattcggaacgagatgttctccctcccttgccgcttgttcacacccataactctgattcggccctttgtgacaagccccttggtgaaagaacctctctccttccgacgtggttggaattaacatcacttccgacgaaagtgctatcatgcctccccgattgtgtggtgttttctgccctgctgggcggagcattttcgggttgagaaaccttgaatcctttcttttggaaccttggttcccccggtctaagccgcttggaatatgacagggttattttctttattcttatttctacttttatgggttctatccatgaaaagggtatgtgctgccccttccttctttggagaattcacacggcggtctttccgtctctcaacaagtgtgaatgcagcatgccggaaacggtgaagaaaacagtcttctgtggaagtctagagtgcacatcgaaacagctgtagcgacctcacggtagcagcggaatcccctcttggcgacaagagcctctgcggccaaaagccccgtggataagatccactgctgtgagcggtgcaaccccagcaccctgattcgatggttactctctacggaatcaaaagatggttttctcaagccctccggtagagaagccaagaatgtcctgaaggtaccccgcgtgcgggatctgatcaggagaccaattgacagtgctttacactgtcactttggtttaaaaactgtcacagcttctccaaaccaagtggtcttggttttccactttttattgaatggtaat

SEQ ID NO: 2785 - DNA, 963 bp, Saffold virus
  misc_feature 1..963: note = isolate SAFV-3_NL2007-2690, complete genome.1
  source 1..963: mol_type = genomic DNA
tttgaacgcgggacctgcgatagtgccaacccacgtcttttcccactcctaacccggttcccacctcgggtccattgtaaggaccagatatatcatcccttgaatgctggctaatcagaggaaagtcagcattttccggcccaggctaagagaaacatataagttagaaatgattctaatcccttgacgaaatcagaacgagatgttctccctcccttgccgcttgttcacacccactttattgattcggccttttgtgacaagccccttggtgaaaggacctctctctttctggcgtggttggaattaacatcctttccgacgaaagtgctaacatgcctccccgattatgtgatgttttctgccctgctgggcggagcattctcgggttgagaaatctcagaacttttcctttggaactttggttcccccggtctaagccgcttggaatatgacagggttattttcttaatcttatttctacttttatgggttctatccataaaaagggtatgtgctgccccttccttctttggagaattcacacggcggtctttccgtctctcagcaagtgtgaatgcagcatgccggaaacggtgaagaaagcagttttctgtggaagtctagagtgcacatcgaaacagctgtagcgacctcacagtagcagcggactcccctcttggtgacaagagcctctgcggccaaaagccccgtggataagatccactgctgtgagcggtgcaaccccagcaccctgattcgatggtcattctctacggaaccagagaatggttttcctaagccctccggtagagaagccaagaatgtcctgaaggtaccccgcgtgcgggatctgatcaggagaccaattgacagtgctttacactgccactttggtttaaaaattgtcacagcttctccaaaccaagtggtcttggtttttcaactttattgaatggcaat

SEQ ID NO: 2786 - DNA, 992 bp, Foot-and-mouth disease virus
  misc_feature 1..992: note = - type A,isolate IND 64/2004, complete1
  source 1..992: mol_type = genomic DNA
ttgaaagggggcgctagggtctcacccctagcatgccaacgactgctcctacgtcgcactccacacttatgtgtgcgcgcgcgggaatcgatggactatcgttcacccacctacagctggactcacggcaccgcgtggccattttagctggactgtgcggacgaacaccacttgcgcacctcgcgtgactggttagtactcttaccactctccgcctacttggtcgttagcgctgtcttgggcactcctgttgggggccgttcgacgctccacggtttcccccgtgccgcacactacggtgttggggccgtttcgtgcgagtcgatcgcctggtgtgcctcggctgtcacccggcgcccgcctttcatttttaccgtcgttcccggcgttaacgggatgtaatcgcaagatttgccttcgcccggaagtgaaacggcaacttcacacacttttgcccgttttcatgagaaacgggacgtcagcgcacgaaacgcgccgtcacttgaggaacacttgtacaaacacgtttcacgcaggtctccacgactgacataaatcgtgcaacttgaagctccgcctggtctttccaggtctagaggggtgacattttgtactgtgtttgactccacgcttggtccaccggcgagagttagtagcagcactgttgcttcgtagcggagcatgatggccgtgggaacccctccttggtaacaaggacccacggggccgaaagccacgtcctaacggacccatcatgtgtgcaaccccagcacggcaactttactgtgaaagccactttaaggtgacactgacactggtactcaaccactggtgacaggctaaggatgcccttcaggtaccccgaggtaacacgcgacactcgggatctgagaaggggactgggacttctttaaagtgcccagtttaaaaagcttctatgcctgaataggtgaccggaggccggcaccttttctcaattaacactgtaatct

SEQ ID NO: 2787 - DNA, 1000 bp, Watson virus
  misc_feature 1..1000: note = polyprotein gene, complete cds.1
  source 1..1000: mol_type = genomic DNA
tacccccctgcatctcttgtctgaagcgtccaatatatttggtcaccgttttggacagattgtaacggttctacctgcatctcttttcaatgactggcaaagtgcccggattagatatattaagtctttcgtagttagcttaggcgtggtgaaaattgactttttatatgctaatcaatccaaaacaaatttgcttgcatttttgtcccaccttcgggtgggttctttttagaacaggtttatcaatgtgacaagttgtgcgacctctagagaaaaatgtcaaaatactcggttcagaccggggttttaataactacatatattgatcgattattgaattgtagtcctcgccagttactaccagatgacggaggatgcatctaatatcatcccaaattaggtgtctcccaactttttggtaattaatgatatatatgtgtgtgttaaaatgtataaacacttttaagtaagaaagtgtagcactttcaaggttgtactcgttttgatactggttattttaactttatatataatttcccttttccctcataagtacacccacgtaatcgtggtaccgctatgacatcatacgggggtgaaaagtgtggctgacagtcccggcaacgttaattcggcggcggtttcctgcagtgtattctgcctcgggctccggtatgtgttatctaagataacagtagggaaattatttgatagctggtaatccttatcttaattagtgcagcgacggagtctttagtgagactaccaaacacggctagcttaatgctaacggtccgatgaaaggctggcggtcggaggatcacatatctctaagatatggtcgtgcagtatccgcccggggtttaaggcaacgggtcccctaatgtccgaatggaatccttttcttttatggtgacaccagtactttatttcgataaagtgctttatatgtgttattcctttataatatttttttcaatttattatataaatatctatc

SEQ ID NO: 2788 - DNA, 1000 bp, Foot-and-mouth disease virus
  misc_feature 1..1000: note = - type A,strain IND17/77, complete1
  source 1..1000: mol_type = genomic DNA
cgttagactgtcgttcaaccacctccagttggactcacggcaccgcgtggccattttagctggattgtgcggacgaacaccgcttgcgcaactcgcgtgaccggttagtactcttaccaccttccgcctacttggtcgttagcgctgtcttgggcacacctgttggggttagttcgacgctctgcggtatcccccgcgtgacggactacggtgctggggccgcctcgtgcgagccgatcgcctggtgtgcttcggctgtcacccggcgcccgcctttcatcccccctaagttttaccgtcgttcccgacgttaaagggaggtaaccacaagcttgataccgtcttgtccgacgttaaagggctgtaaccaaaagcttgtaccgcctttccccggcgttaatgggatgtaaccacaagatgaaccttcacccggaagtaaaacggcaacttcacacagttttgcccgttttcgtgagaaatgggacgtctgcgcacgaaacgcgccgtcgcttgaggaggacttgtacaaacacgatctacgcaggtctccacaactgacacaaaccgtgcaacttgaaactccgcctggtctttccaggtctagaggggtgacattttgtactgtgcttgactccacgctcggtccactagcgagtgtcagtagtagcactgttgcttcgtagcggaacatgatggccgtgggaacccccccttggtaacaaggacccacggggccgaaagccacgcctaacggacccatcatgtgtgcgatcccggcacggcaactttactatgaacatcactttaaggtgacgctgaaactggtactcaaacactggtgacagactaaggatgcccttcaggtaccccgaggtaacaagcgacactcgggatctgagaaggggactgggacttctttaaaagtgcccagtttaaaaagcttctatgtctgaataggcgaccggaggccggtgcctttcctttaactactactactttt

SEQ ID NO: 2789 - DNA, 1000 bp, Foot-and-mouth disease virus
  misc_feature 1..1000: note = - type A,strain IND258/99, complete1
  source 1..1000: mol_type = genomic DNA
cggtggactgttgttcacccacctacagctgaactcacagcaccgcgtggccattttagctggcttgtgcggacgaacaccgcttgcgcatctcgcgtgaccggttagtactcttaccacttgccgcctacttggtcgttcgcgctgttttgggtactcctgttgggggccgttcaacgctctacggtctcccctgcgtaacagactacggtgatggggccgcttcgtgcgagttactcgcctggtgtgcttcggctgtcacccggcgcccgcctttcatcccccctaagttttaccgtcgttcccgacgttaaagggatgtaaccacaagcttgaaccgccttgcccgacgttaataggctgtaaccacatgcttgtaccgcctttcccggcgttaacgggatgcaaccacaagatggaccctcactcgggaagtaaaacgacaaacacactcagttttgcccgttttcacgagaaatgggacgtctgcgcacgaaacgcgccgtcgcttgaggaagacttgtacaaacacgatctatgcaggtttccacaactgacacacatcgtgcaacttgaagctccgcctggtctttccaggtctagaggggtgacactttgtactgtgcttgactccacgctcggtccactggcgggagtgagtagcagaactgttgcttcgtagcggagcatggtggccgtgggaacccccccctggtgacagggacccacgggccgaaagccacgtcctaacggacccaccatgtgtgcaaccccagcacggtaactttactgtgaaaaccactttaaggtgacactgatactggtactcaaccactggtgacaggctaaggatgcccttcaggtaccccgaggtaacacgcgacactcgggatctgagaaggggactgggacttctttaaaagtgctcagtttaaaaagcttctatgcctgaataggcgaccggaggccggcgcctttctcttaaaccactactacatta

SEQ ID NO: 2790 - DNA, 1000 bp, Foot-and-mouth disease virus
  misc_feature 1..1000: note = - type A,isolate PD68/2011, complete1
  source 1..1000: mol_type = genomic DNA
gatggactgtcgttcacccacctacagctggactcaaggcaccgtgtggccattttagctggattgtgtggacgaacaccgcttgcgcacctcgcgtgaccggttagtactctcgacaccttccgcctacttggtcgtcagcgctgtcctgggcactcctgttgggggcgctccgacgctctacggtctcccccgtttgacgggctacggtgatagggccgcctcgtgcgagttggtcgtctggtgtgcttcggctgtcacccggcgcccgcctttcatccccccctaagttttaccgtcgttcccgacgttaaagggatgtaaccacaagctttggaccgtcttgtccgacgttaacgggctgtaaccacatgcttgtaccgcctttcccggcgttaacgggatgtaaccacaagatataccttcacccggaagtaaaacggcaaacccattcagttttgcccgttttcatgagaaatgggacgtcagcgcacgaaacgcgccgtcgcttgaggaagacttgtacaaacatgatctatgcaggtttccacaactgacacacatcgttcaacttgaaactccgcctggtctttccaggtctagaggggtgacactttgtactgtgattgactccacgctcggtccactggcgggtgctagtaacagggactgttgtttcgtagcggagcatgatggctgtgggactccctccttggtaacaaggacccacggggccaaaagccacgtcctaacggacccatcatgtgtgcaaccccagcacggcaactttactgtgaaaaacactttaaggtgacactgatactggtactcaaccactggtgacaggctaaggatgcccttcaggtaccccgaggtaacacgcgacactcgggatctgagaaggggactggggcttctttaaaagcgcccagtttaaaaagcgtctatgcctgaatgggcgaccggaggccggcgcctttcttttactactacttaactg

SEQ ID NO: 2791 - DNA, 1000 bp, Foot-and-mouth disease virus
  misc_feature 1..1000: note = - type O,isolate ETH/4/2015, complete1
  source 1..1000: mol_type = genomic DNA
gttggactgtcgttcacccacctacgactggactcactgcaccgcgtggctaccctagttggatagtgcggacgaacaccacttgcgcacctcgcgtgactggttagtactcttaccactctccgcctgcttagtcgttagcgctgttttgggcactcttgttgggggccgttctacgctccacgttctctcccgtgcaacggactacggcgttggggccgctccgtgcgagcagctcgcttggtgtgtttcggttgtcactcggagcccacctttcacccccctccccctaagtaatgccgtctttcccgacgttaaagggaggttaccgcaagctcagtaccgccttgcccggcgttaagggcctgtaaccacacgcttacaccgcttttcccggcgttacgggatgcaaccgtaagatgatccttcaaccggaagtaaaacggaaacacgcacattttgcccgttttctgagaaacgggacgtcggcgcacgaaacgcgcagtcgctcgcgggacacttgtacaaacacgactcacgcaagattccacgactgacacaactcgtgcaacttgaaactccgcctggtctttccaggtctagaggggtgacactttgtactatgactgactccacgctcggtccactggcgggtgttagtaatggcattgttgtttcgtagcggagcgtagtggccgtgggaactcctccttggcaacaaggacccacggggccaaaagccacgtcctagcggacccactacgtgtgcgacccaggcacaacaaccttgctgtgaaaaccaccttaaagtgacactgatactggtactcagccattggtgacaggctaaggatgcccttcaggtaccccgaggtaacatgagacactcgggatctgagaaggggactggggcttctttaaaagcgcccagtttaaaaagcttctatgcctgaataggcgaccggaggccggcgcctttccattacctaccactacttga

SEQ ID NO: 2792 - DNA, 1000 bp, Foot-and-mouth disease virus
  misc_feature 1..1000: note = - type A,isolate IND 43/2006, complete1
  source 1..1000: mol_type = genomic DNA
gcgcgtggggaccgctggactaccgttcacccacctacggctggactcacggcaccgcgtggccattttagctggaatgtgcggacgaacgccacttgcgcacctcgcgtgactggttaatactcttaccactttccgcctacttggtcgttagcgctgtcttgggcactcccgttgggggccgttcggcgctccacggtttcccacacacggcaaactacggtgatggggccgctccgtgcgagttgatcgcctggtgtgctcggcgtcacccggcgcccgcctttcatttttaccgtcgttcccgacgtttaaagggaggtaaccacaagcttacaaccgtcttgtccgacgttaaagggctgtaaccacaagcttgtaccgcctttcccggcgtcaaagggatgtaaccgcaagatacgccttcacccggaagtaaaacggcaacttaacacagttttgcccgttttcacgagaaacgggacgtttgcgcacgaaacgcgccgtcacttgaggaagacttgtacaaacacgatccacgcaggtttccgcaactgacaagaaccgtgcaacttgaagctccgcctggtctctccaggtctagaggggtgacactttgtactgtgcttgactccacgctcggtccactggcgagtgttagtaacagcactgttgcttcgtagcggagcatggtggccgcgggaactcctccttggtgacaaggacccgcggggccgaaagccacgtcctaaccgacccaccatgtgtgcgaccctggcacggcaactttactgtgaaacccacttcaaggtgacactgatactggtactcaaccactggtgacaggctaaggatgcccttcaggtaccccgaggtaacacgcgacactcgggatctgagaaggggactggggcttctttaaaagcgcccggtttaaaaagcttctacgcctgaataggtgaccggagccggcacctttccttttgaactaccaatttta

SEQ ID NO: 2793 - DNA, 1000 bp, Foot-and-mouth disease virus
  misc_feature 1..1000: note = - type A,isolate IND 245/2007,1
  source 1..1000: mol_type = genomic DNA
tcgcgggaaccgatggactgtcgttcacccacctacagctggactcacggcaccgcgtggccattttagctggattgtgcggacgaacaccgcttgcgcatcttgcgtgaccggtcagtactcttaccaccttccgcctacttggtcgttagcgctgttctgggcactcctgttgggggccgttcgacgctccacggtctcccccgtctgacggactacggtgatggggccgcctcgtgcgggttggtcgtttggtgtgcttcggctgtcacccggcgcccgcctttcatttttaccgtcgttcccgacgttaaagggatgaaaccacaagcttgaaaccgtcttgcccgacgttaatgggttgtaccacacgcttgtaccgcctttcccggcgtcaacgggatgtaaccacaagataaaccttcatccggaagtaaaacggcaaccacactcagttttgcccgttttcatgagaaatgggacgtctgcgcacgaaacgcgccgtcgcttgaggaagacttgtacaaacacgatctatgcaggtttccacaactgacacaaaccgtgcaatttgaaactccgcctggtctttccaggtctagaggggtaacactttgtactgtgtttgactccacgctcggtccaccagcgagtgttagtaacagcactgttgcttcgtagcggagcatgatggccgcgggaattcccccttggtgacaaggacctgcggggccgaaagccacgtcctaatggacccatcatgtgtgcaaccccagcacggcagctttgctgagaaaaccactttaaggtgacactgatactggtactcaatcactggtgacaggctaaggatgcccttcaggtaccccgaggtaacaagtgacactcgggatctgagaaggggacaggggcttctttaaaagcgccctgtttaaaaaacttctatgcctggataagcgaccggaggccggcgcttttctaccaaaccactactgacttg

SEQ ID NO: 2794 - DNA, 1000 bp, Foot-and-mouth disease virus
  misc_feature 1..1000: note = - type A,isolate IND 447/2005,1
  source 1..1000: mol_type = genomic DNA
cgcgggaatcgatggactatcgttcacccacctacagttggactcacggcaccgcgtggccattttagctggactgtgcggacgaacaccacttgcgcacctcgcgtgactggttagtactcttaccactttccgcctacttggtcgttagcgctgtcttgggcactcctgttgggggccgttcgacgctccacggtttcccccgtgccgcacactatggtgttggggccgcttcgtgcgagacgatcgcctggtgtgcttcggctgtcacccggcgcccgcctttcatttttaccgtcgttcccgacgttaaagggagataaccacaagctcaacgccgtcttgcccgacgttaaaggactgtaaccgtaagcttgtaccgcctttcccggcgttaacgggatgtaaccgcaagatttgccttcacccgggaagtaaaacggcaatttcacacagttttgcccgttttcatgagaaatgggacgtcagcgcacgaaacgcgccgtcacttgaggaagacttgtacaaacacgcttcacgcaggtctccacaactgacacaaatcgtgcaacttgaaactccgcctggtctttccaggtctagagggtgacattttgtactgtgtttgactccacgcttggtccaccggcgagagttagtaacagcactgttgcttcgtagcggagcatgatggccgtgggaacccctccttggtaacaaggacccacgggccgaaagccacgtcctaacggacccatcatgtgtgcaaccccagcacggcaactttactgtgaaagccgctttaaggtgacactgatactggtactcaaccactggtgacagctaaggatgcccttcaggtaccccgaggtaacacgcgacacttgggatctgagaaggggacagggacttctttaaaagtgccccagtttaaaaagcttctatgcctgaataggtgaccggaggccggcaccttttctcaattaacactgaaatctta

SEQ ID NO: 2795 - DNA, 1000 bp, Foot-and-mouth disease virus
  misc_feature 1..1000: note = - type Asia 1,strain IND 491/97,1
  source 1..1000: mol_type = genomic DNA
acgcgggaaccgatggactgttgttcacccacctacggctggactcacggcaccgtgtggctatgatagctgaattgtgcgaacgaacgccgcttgcgcatcttgcgtaaccggttagtacctttataactctccgcctacatggtcgtcagcgctgtcctgggcacacccgttggggaccgttcgacgttctacggtttcccccgtataacaaactacggtaatggggccgcttcgcgcgagccgatcgcctggtgtgcagcggctgtcacccggcgcccgcctttcatttttaccgtcgttcccgacgttaaagggttgtaaccacaagcttggaaccgtcttgcccgacgttaacgggctgcaaccacacgcttgtaccgctttcccctgcgttaaaggggtgtaaccacaagatgtaccttcgcccggaagtaaaacggcaatcacactcagttttgcccgttttcatgagaaacgggacgtcagcgcacgaaacgcgccgtcgcttgaggaagacttgtacaaacacgatccacgtaggtttccacaactgacacaaaccgtgcaatttgaagctccgcctggtctttccaggtctagaggggtgacactttgtactgtgcttgactccacgctcggtccactagcgagtgttagtagcaacactgttgtttcgtagcggagcatgatggccgtgggaactcccccttggtaacaaggacccacggggccgaaagccacgtcctaacggacccatcatgtgtgcaaccccggcacggcaactttgttgtgaaagccactttaaggtgacactgatactggtacccaaccactggtgacaggctaaggatgcccttcaggtacacccaagtaacaagcgacactcgggatctgagaaggggactgggacttctgtaaaagtgcccagtttaaaaagcttctatgcctggataggcgaccggaggccggcgcctttcctttacctattactgttttc

SEQ ID NO: 2796 - DNA, 1000 bp, Foot-and-mouth disease virus
  misc_feature 1..1000: note = - type A,isolate IND 88/2006, complete1
  source 1..1000: mol_type = genomic DNA
cgtgcactgccgggaaccgatggactgtcgttcacccacctacagctggactcacagcaccgcgtggccattttagctggactgtgcggacgaacaacgcgtgcgcatctcgcgtgaccgtttagtactcttaccactttccgcctacttggtcgctagcgctgcttttgggcactcctgttgggggccgtccgacgctccacggtctcccctgtgacggactacggtgatggggccgcctcgtgcgagttggtcgtttggtgtgctttggctgtcacccggcgcccgcctttcatttttaccgtcgttccggcgtaaaggggaggtagccataagcttgcaacgtctgcccgacgtaaaggctgtaaccgcaagattgtaccgcctgcccggcgttaaacgggctgcagccacaagatgaaccttcacccggaagttaaacggcaaacttgctcagttttgcccgttttcaggagaaatgggacgtctgcgcacgaaacgcgccgtcgcttgaggaggacttgtacaaacgcgattcattcaggttcccacaaccgacacaaaccgtgcaacttgaaacctcgcctggtctttccaggtctagaggggtgacattttgtactgtgtttgactccacgctcggtccactggcgagtgttagtaacagcactgttgcttcgtagcggagcatggtggccgcgggaattcctccttggtaacaaggacccgcggggccgaaagccacgtcctcacggacccaccatgtgtgcaaccccagcacggcaactttactgtgaaaaccactttaaggtgacgctgatactggtactcaaccactggtgacaggctaaggatgcccttcaggtaccccgaggtaacctgcgacactcgggatctgagaaggggactggggcttctttaaaagcgcctagtttaaaaagcttctatgcctgaataggtgaccggaggccggcacctttcctttaaacaactactttca

SEQ ID NO: 2797 - DNA, 1000 bp, Foot-and-mouth disease virus
  misc_feature 1..1000: note = O,strain China/1/99(Tibet), complete1
  source 1..1000: mol_type = genomic DNA
tgtggggaccgctggactaccgtccacccacctacggctggactcacggcaccgcgtagccattttagctggactgtgcggacgaacgccacttgcgcaccccgcgtgactggttaatactcttaccactttccgcctacttggtcgttagcgctgccctgggcactcccgttgggggccgtccggtgctccacggttcccacgcatgacaaactacggtgatggggccgcttcgtgcgagttgatcgcctggtgtgtttcggctgtcacccgaagcccgcctttcacaagttttaccgtcgttcccggcgttaaagggaggtaaccacaagcttgcaactgtcttgctcgacgataaagggctgtgaccgcaagatgataccgcctttcccggcgttaattggatgcaaccacaagatgaaccttcacccggaagtaaaacggcaaattcgcctagttttgcccgttttcaggagaaatgggacgtctgcgcacgaaacgcgccgtcgcttgaggaggacttgtacaaacacgatctattcaggttcccacaaccgacacaaaccgtgcaacttgaaactccgcctggtctttccaggtctagaggggtgacattttgtactgtgcttgactccacgctcggtccactggcgagtgctagtaacagcactgttgcttcgtagcggagcatggtggccgcgggaactcctccttggtaacagggacccgcggggccgaaagccacgtcctcacggacccaccatgtgtgcaaccccagcacggcaactttactgtgaaaaccactttaaggtgacactgatactggtactcaaccactggtgacaggctaaggatgcccttcaggtaccctgaggtaacacgcgacactcgggatctgagaaggggactggggcttctttaaaagcgcctagtttaaaaagcttctacgcctgaataggtgaccggaggccggcacctttcttttaaacaactactttta

SEQ ID NO: 2798 - DNA, 1000 bp, Foot-and-mouth disease virus
  misc_feature 1..1000: note = O genomic RNA,isolate O1Campos,1
  source 1..1000: mol_type = genomic DNA
gcgggacccgatggactttcgttcacccacctacagctggactcacggcaccgcgtggccattttagctggattgtgcggacgaacaccgcttgcgcacctcgcgtgaccggttagtactcttaccactctccgcctacttggtcgttagcgctgtcttgggcactcctgttgggggccgttcgacgctccacgggctctcctgtgtgacatctacggtgatggggccgtttcgcgcgggctggtcgtctggactgcttcggctgtcacccgacgcccgcctttcataggttttaccgtcattcccgacgtaaaagggaggtaaccacaagcttgaaaccgtccggcccgacgtaaaagggtggtaaccacaagcttactgccgtctttcccgacgttaaagggatgaaaccacaagacttaccttcgctcggaagtaaaacgacaaacacacacagttttgcccgttttcatgagaaatgggacgtctgcgcacgaaacgcgccgtcgcttgaggaggacttgtacaaacacgatctatgcaggtttccccaactgacacaaaccgtgcaacttgaaactccgcctggtctttccaggtctagaggggtaacactttgtactgagtttgactccacgctcgatccactagcgagtgttagtagcggtactgctgtctcgtagcggagcatgttggccgtgggaacacctccttggtaacaaggacccacggggccgaaagccacgtcctaacggacccaacatgtgtgcaaccccagcacggcagctttactgtgaaacccacttcaaggtgacattgatactggtactcaaacactggtgacaggctaaggatgcccttcaggtaccccgaggtaacaagcgacactcgggatctgagaaggggactgggacttctttaaagtgcccagtttaaaaagcttctatgcctgaataggtgaccggaggccggcacctttccttttataaccactgaatac

SEQ ID NO: 2799 - DNA, 1000 bp, Foot-and-mouth disease virus
  misc_feature 1..1000: note = Asia1,strain YNBS/58, complete genome.1
  source 1..1000: mol_type = genomic DNA
ccacacttacctttgcgtacgcgcaggaaccgatggactttcgttcacctacctacagctggactcacggcaccgcgtggccattttagctggattgtgcggacgaacaccacttgcgcatttcgcgtgaccggttattactcttaccactttccgcctacttggtcgtcagcgctgtcctgggcacgcctgttgggggctgttcgacgctctacggtctcctccgcgtggcagactacggtgttggggccgcttcgtgcgagtcgctcgcctggtgtgctttggttgtcacccgaagcccgcctttcacaagttttaccgtcgttcccgacgttaaagggaggtaaccacaagcttgataccgtcttgcccgacgttaaaggctgtaaccataagcttgtaccgcctttcccggcgttaacgggatgcaaccacaagataaaccttcacccggaagtaaaacggtaacttcacacagttttgcccgcttttaccagaaacgggacgtctgcgcacgaaacgcgccgtcgcttgaggaagacttgtacaaacacgatctatgcaggtttccacaactgacacaaatcgtgcaacttgaaactccgcctggtctttccaggtctagaggggtgacattttgtactgtgctcgactccacgctcggtccactagcgggtgttagtaacagcactgttgcttcgtagcggagcatggtggccgcgggaactcctccttggtaacaaggacccacggggccaaaagccacgtcctaacggacccaccatgtgtgcaaccccagcacggcaactttactgcgaaaaccactttaaggtgacactgatactggtactcgaccactggtgacaggctaaggatgcccttcaggtaccccgaggtaacatgtgacactcgggatctgagggggactgggacttctttaaaagtgcccggtttaaaaagcttctatgcctgaataggcgaccggaggccggcgcctttc

SEQ ID NO: 2800 - DNA, 1000 bp, Foot-and-mouth disease virus
  misc_feature 1..1000: note = - type A,strain IND17/82, complete1
  source 1..1000: mol_type = genomic DNA
gtccctgcgttgcactccacacttacgtttgtgaacgcacgggaaccgatggactttcgttcacccacctacagctggactcacggcaccgcgtggccatttagctggattgtgcggacgaacaccgcttgcgcttttcgcgtgaccggttagtactcttaccaccttccgcctacttggtcgttagcgctgtcttgggcactcctgttgggggctgttcgacgctctacggtctcccctgcgtgacagactacggtgtttggggccacctcgtgcgagccgctcgcctggtgtgtttcggctgtcacccggcgcccggctttcatcccccctaagttttaccgtcgttcccgacgttaaaggactgtaaccacatgcttgtaccgcctttcccggcgttaacgggatgtaaccacaagataaaccttcacccggaagtaaaacggcaacttcactcagttttgcccgttttcgagaaatgggacgtctgcgcacgaaacgcgccgtcgcttgaggaagacttgtacaaacacgatatatgcaggtttccacaactgacacacatcgtgcaacttgaagcctcgcctggtctttccaggtctagaggggtgacattttgtactgtgtttgactccacgctcggtccactggcgagtgttagtaacagcactgttgcttcgtagcggagcatgatggccgcgggaatccctccttggtaacaaggacccgcggggccgaaagccacgtcctgacggacccatcatgtgtgcaaccccagcacggcaactttactgtgaaactcactttaaggtgacactgatactggtactcatccactggtgacaggctaaggatgcccttcaggtaccccgaggtaacacgcgacactcgggatctgagaaggggactgggacttctttaaaagtgcctagtttaaaaagcttctatgcctgaataggcgaccggaggccggcgcctttctctaaccactaattaattg

SEQ ID NO: 2801 - DNA, 1000 bp, Foot-and-mouth disease virus
  misc_feature 1..1000: note = - type O,isolate O/KEN/K60/20141
  source 1..1000: mol_type = genomic DNA
caactggactttcgttcacccacccacggctggactcacggcaccgtgtggccacttttctggactgtgcggacgaacgccgcttgcgcatctcgcgtgaccggttagtactcttaccaccttccgccaacttggtcgtcagcgctgtcttgggcactcccgtcgggggccgttcgacgctccactgtttctcttgtgtgctagactacggtgatggggctgtttcgcgcgggctgatcgcctggcgtctaggcgaacgcccgaagcctgcctttcacccccatcaccgtaagtaataccgtcttttccgacgttaaaggatagcaaccgcaagcttgctgccgtcttggccgacgttaaagggctgtaaccacaagcttgcaccgccttccccggcgtaaaatggatgtaaccgcaagaagaaccttcacccggaagtaaaacggcaacgttcacacttttgcccgttttgaagaaatgggacgtcagcgcacgaaacgcgccgtcgcttgaggatgacttgtacaaacacgatctacgcaggtatccacaactgacacaaaaccgtgcaatttgaagttccgcctggtctttccaggtctagaggggcgacactttgtactgtgattgactccacgctcggtccactagcgagtgctagtagtggtatcgtcgtttcgtagcggagcatggcggccgtgggatctcctccttggtgacaaggacccacggggccgaaagccacgccctaacgggcccgccatgtgtgcaaccccagcacggcaactttaccacgaagaccactttaaggtgacactgaaactggtactcaaccactggtgacaggctaaggatgcccttcaggtaccccgaggtaacacgcgacactcgggatctgagaaggggactgggacttctttaaagtgcccagtttaaaaagcttctatgcctgaataggcgaccggaggccggcgcctttccattaaccactactcaccac

SEQ ID NO: 2802 - DNA, 1000 bp, Foot-and-mouth disease virus
  misc_feature 1..1000: note = - type SAT 2,isolate1
  source 1..1000: mol_type = genomic DNA
acgcgacactagggtgtcgccctagtgtcgcgtaccgaccgtcaccggttgaaacgctactgctcagacctctggctgtcgtacctctattaggcaggcaggaaccacccttttggggcccacgcgttttcgcccttttggggcccgcggtcaccacaccgcgcctccactaggctgacaaccgtgcctcctctaggctgacaactgtcgcccttttagggcctacgaccttcaagttacggctttagcgtccctcccgctgccgactcgcctacgtgaacgctagctcgtcacccgacggcctacctttcacccgggccgtcttaaagaacgtctccgtcttttccgacgttaatggattgtaaccaaacgctcttgccgtcgtgtccgacgttaaaggactgtaaccataagaaacaccttcccgcaggaagtaaaacatgcacaaagtaaccagttttgcccgttttcatgagaaatgggacgtccgcgcacgaaacgcgccgttgctctttgcattcttgtacaaacacgatctcacgcaggaatctcagaccaactcaacccgtgcatctgcaagtttcgcccggtctttccgggtctagagagacaaacagttgtactgagaccgactccacgattagtctactggcgggtattagtaacactcactttgcttcgtagcggagcacttgagcggtgggagtccccccatggtaacatggacccaccgggccaaaagccacgcttcatgcctcaagtgtgtgcaaccccagcacggcaatttgattgtgaaacctatcttaaggtaacactgagactggtacttggtttctggagacaggctaaggatgtccttcaggtaccccgaggtaacatgcgacactcgggatctgagaaggagactgggagttctgtaaaactgcccggtttaaaaagcttctatgcctgaataggtgaccggaggccggcaccttttccttttaccacaactaatttt

SEQ ID NO: 2803 - DNA, 1000 bp, Foot-and-mouth disease virus
  misc_feature 1..1000: note = - type A,isolate IND 109/2006,1
  source 1..1000: mol_type = genomic DNA
atcggcagctcttgcgttgcactccacacttacgcccgtgcactgacgggaaccgatggactgtcgttcagccacccacagctggactcacagcaccgcgtggccattttagctggactgtccggacgaacaacgcttgcgcacttcacgtgaccgtttagtactcttaccactttccgcctacttggtcgttagcgctgcttttgggcactcctgttgggggccgtccgacgctccacggtctcccctctgtgacggactacggtgatggggccgcctcgtgcgagttagtcgtttggtgtgctttggctgccacccggcgcccgcctttcatttttaccgtcgttcccgacgttaacgggttgtaaccacacgcttgtaccgcctttcccggcgttaacgggatgtaaccataagatagaccttcacccggaagtaaaacggcaactacactcagttttgcccgttttcatgagaaatgggacgtctgcgcacgaaacgcgccgtcgcttgaggaagacttgtacaaacacgatctatgcaggtttccacaactgacacacaccgtacaatttgaagctccgcctggtctttccaggtctagaggggcgacactttgtactgtggctgactccacgctcggtccactggcgggtgtgagtaacaggactgttgcttcgtagcggagcatgttggccgtgggattccccccttggtaacaagggcccacggggccgaaagccacgtcttaacggacccaacatgtgtgcaaccccagcacggcaactttactgtgaaaaccactttaaggtgacactgatactggtactcaaccactggtgacaggctaaggatgcccttcaggtaccccgaggtaacatgcgacactcgggatctgagaaggggactggggcttctttcaaagcgcccagtttaaaaagcttctatgcctgaataggcgaccggaggccggcgcctttcttttaccattactaaacca

SEQ ID NO: 2804 - DNA, 1000 bp, Foot-and-mouth disease virus
  misc_feature 1..1000: note = - type A,isolate IND 17/2009, complete1
  source 1..1000: mol_type = genomic DNA
ggcagctcctgcgttgcactccacacttacgcccgtgcactcgcgggaaccgatggactgtcgttcacccacctacagctggactcacggcaccgcgtggccattttagctggattgtactcttaccaccttccgcctacttggtcgttagcgctgtcctgggcactcctgttgggggccgttcgacgctccacggtctcccccgcctgacggactacggtgatggagccgcctcgtgcgggttggtcgtttggtgtgcttcggttgtcacccggcgcccgcctttcatttttaccgtcgttcccgacgttaaagggatgaaaacacaagcttgaaaccgtcttgcccgacgttaatgggttgtaaccacacgcttgtaccgcctttcccggcgttaacgggatgtaaccacaagacaaaccttcacccggaagcaaaacggcaaccacattcagttttgcccgttttcatgagaaacgggacgtctgcgcacgaaacgcgccgtcgcttgaggaagacttgtacaaacacgatctatgcaggtttccacaactgacacaaaccgtgcaatttgaaactccgcctggtctttccaggtctagaggggtaacactttgtactgtgtttgactccacgctcggtccaccagcgagtgttagtaacagcactgttgcttcgtagcggagcatgacggccgcgggaatccccccttggtgacaaggacccgcggggccgaaagccacgtcctgatggacccgtcatgtgtgcaaccccagcacggcagctttgctgagaaaaccactttaaggtgacactgatactggtactcaatcactggtgacaggctaaggatgcccttcaggtaccccgaggtaacaagtgacactcgggatctgagaaggggacaggggcttctttaaaagcgccctgtttaaaaagcttctatgcctggataagcgaccggaggccggcgcttttctactaaaccactactgacttg

SEQ ID NO: 2805 - DNA, 1000 bp, Foot-and-mouth disease virus
  misc_feature 1..1000: note = - type SAT 1,isolate SAT1/KEN/K29/20141
  source 1..1000: mol_type = genomic DNA
agggggcactagggcgagaccctagtgtcgcgtaacgaccgtcaccggttgaaacgctactgctcagacctctggctgtcgtacctctattaggcagacaggaaccacccttttggggcctacgcgttctcgcccttttggggcccgcggctgtacgccgcgcctccactaggctgacaaccgtgcctcctctaggctgacaactgtcgcccttttagggcctacgaccttcaagttacggctttagcgtccctcccgctgccgactcgcctacgtgaacgctagctcgtcacccgacggcctacctttcacccccctccccctaaagaacgtttccgtcttttccgacgttaatggattgtaaccaaacgctcttgccgtcttgtccgacgttaaaggattgtaaccataagattcaccttcccgcaagaagtaaaacatgcacaaagtaaccagttttgcccgttttcatgagaaatgggacgtctgcgcacgaaacgcgctgttgctctttgcattcttgtacaaacacgatcttacgcaggaatcttagaccaacccaaaccgtgcaactgcaagtttcgcccggtctttccgggtctagagagacaaacagctgtactgaagccaactccacgtttggtccactagcgggtgctagtaacactcactttgcttcgtagcggagcacatgagcggtgggaactcccccatggcaacatggacccaccgggccaaaagccacgcctcgtgcctcatgtgtgtgcaaccccagcacggcaacttgtttgtgaaacacaccttaaggtgacactgatactggtacttgacttctggagacaggctaaggatgtccttcaggtaccccgaggtaacaagcgacactcgggatctgagaaggagactgggagttctataaaactgcccggtttaaaaagcttctatgcctgaataggtgaccggaggccggcaccttttcctttttaaaccactaaattct

SEQ ID NO: 2806 - DNA, 1000 bp, Foot-and-mouth disease virus
  misc_feature 1..1000: note = (FMDV),strain C,isolate c-s8c1,1
  source 1..1000: mol_type = genomic DNA
acgacagtccctgcattgcactccacacttacgttgtgcgtacgcggggcccgatggaccatcgttcacccacctacagctggactcacgacaccgcgtggccattttagctggattgtgcggacgaacaccgcttgcgcttctcgcgtgaccggttagtactcttaccaccttccgcctacttggttgttagcgctgtcctgggcacccctgttgggggccgttcgacgctccacgggttcccccgtgcggcaactacggtgatggggccgtttcgcgcgggctgatcgcctggtttgcttcggctgtcacccgaaacccgcctttcataagttttaccgtctgtcccgacgttaaagggaggtaaccacaagcatactgccgccttccccggcgttaacgggatgcaaccgtaagacacaccttcatccggaagtgaaacggctgcgtcacatagttttgcccgttttcacgagaaatgggacgtctgcgcacgaaacgcgccgtcgcttgaggaagacttgtacaaacacgatctaagcaggtttccccaactgacacaaaacgtgcaacttgaaactccgcctggtctttccaggtctagaggggtaacactttgtactgtgtttggctccacgctcgatccactggcgagtgttagtaacagcactgttgcttcgtagcggagcatgacggccgtgggaactcctccttggtaacaaggacccacggggccaaaagccacgcccacacgggcccgtcatgtgtgcaaccccagcacggcgactttactgcgaaacccactttaaagtgacattgaaactggtacccacacactggtgacaggctaaggatgcccttcaggtaccccgaggtaacacgcgacactcgggatctgagaaggggactggggcttctataaaagcgctcggtttaaaaagcttctatgcctgaataggtgaccggaggtcggcacctttcctttacaattaatgaccct

SEQ ID NO: 2807 - DNA, 1000 bp, Saffold virus 1
  misc_feature 1..1000: note = complete genome.1
  source 1..1000: mol_type = genomic DNA
tagcatcttcgcggtaaagaacaccccaggggtaacccctttgaacgcgggactgcgatagtgccaccccacgtctttcccactcctaacccgactcccacctcgggtccaatgaaaggaccaaataattcatcccttgaatgttggctaatcagaggaaagtcagcattttccggcccaggctaagagaaacatataagttagatttgattcaaatcccttgacgaattcgaaacgagatgttctccctcccttgccgcttgttcacacccatacatttaattcggcctcctgtgacaagcccctcggtgaaagaacctctctcttttcgacgtggttggaattaacatcatttccgacgaaagtgctatcatgcctccccgattatgtgatgttttctgccctgctgggcggagcattctcgggttgagaaaccttgaatcttttcctttggaaccttggttcccccggtctaagccgcttggaatatgacagggttattttctttatcttatttctactttcacgggttctatccgtgaaaagggtacgtgttgccccttccttcttcggagaattcacacggcggtctttccgtctctcgacaagtgtgaatgcaacatgccggaaacggtgaagaaaacagttttctgcggaagtctagagtgcgcatcgaaacagctgtagcgacctcacagtagcagcggactcccctcttggcgacaagagcctctgcggccaaaagccccgtggataagatccactgctgtgagcggtgcaaccccagcaccctgattcgatgaacgttctttacggaaccagaggatggttttcctaagccctccggtagagaagccaagaatgtcctgaaggtaccccgcgtgcgggatctgatcaggagaccaattgactgtgctttacaccgtcactttggtttaaaaactgtcacagcttctccaaaccaagtggtcttggttttccaattttattaactggcaat

SEQ ID NO: 2808 - DNA, 1000 bp, Foot-and-mouth disease virus
  misc_feature 1..1000: note = - type A,strain IND81/00, complete1
  source 1..1000: mol_type = genomic DNA
aaagggggcgctagggtcgcacccctagcatgccatcggcagctcctgcgttgcactccacacttacgctcgtgcactcgcggggactgatggactgtcgttcacccacctacagctggactcacagcaccgcgtggccattttagctggattgtgcggacgaacaacgcttgcgcacctcgcgtgaccgtttagtactcttaccattttccgcctacttggtcgttagcgctgccttgggcactcctgttgggggccgtccgacgcttcacggtctcccccgtgtgacggactacggtgatggggccgcctcgtgcgagttggtcgtttggtgtactttggctgtaacccggcgccctcctttcatcccccctaagttttaccgtcgttcccggcgttaaagggatgtaaccacaagataacccttcacccggaagtaaaacggcaaccacactcagttttgcccgttttcatgagaaatgggacgtctgcgcacgaaacgcgccgtcgcttgaggatgacttgtacaaacacgatctaagcaggtttccacaactgacacacaccgtgcaatttgaaactccgcctggtctttccaggtctagaggggcgacactttgtactgtgattgactccacgctcggtccactggcgggtgcgagtaacaggactgttgcttcgtagcggagcatgttggccgtgggattccctccttggtaacaaggacccacggggccgaaagccacgtcctaacggacccaacatgtgtgcaaccccagcacggcaactttactgtgaaaaccactttaaggtgacactgatactggtactcaaccactggtgacaggctaaggatgcccttcaggtaccccgaggtaacacgcgacactcgggatctgagaaggggactggggcttctttaaagcgcccagtttaaaaagcttctatgtctgaataggcgaccggaggccggcgcctttcttttaccattactaaactg

SEQ ID NO: 2809 - DNA, 1000 bp, Foot-and-mouth disease virus HKN/2002
  misc_feature 1..1000: note = complete genome.1
  source 1..1000: mol_type = genomic DNA
cgactcccgcgtcgcactccacacttacgtctctgcaagtgtaggaaccgacggactgtcgctcacccacctacagctgaacccacaacaccgcgtggccattttagctggattgtgcggacgaacgccgctcacgcatgtttcgcgtgaccggtcaatactcttaccactttccgcctacttggtcgtcagcgctgttgtagggcactcctgttgggggctgttcgacgctccgcggtctcccccgtactgagactacggtgttggggccgccacgtgcgggccgctcgcctggtgtgcttcgactgtcacccgaagcctacctttcaaagtaacaccgtcgctcccgacgttcaaagggaggaaaccacaagcttgcaccaccactcccggtgtcaacgggatgtaaccgcaagatgaaccttcacccggaagtaaaacggcaacttcacacagttttgcccgttttcatgagaaacgggacgtttgcgcacgaaacgcgccgtcgcttgaggaagacttgtacaaacacgatttaagcaggtttccacaactgataaaactcgtgcattttgaaaccccgcctggtctttccaggtctagaggggtgacactttgtactgtgctcgactccacgctcggtccactggcgggtgttagtagcagcactgttgcttcgtagcggagcatggtggccgtgggaactcctccttggtgacaaggacccacggggccaaaagccacgtccagatggacccaccatgtgtgcaaccccagcacggcaaccttactgcgaacaccaccttaacgtgacactgatactggtactcggtcactggtgacagactaaggatgcccttcaggtaccccgaggtaacacgggacactcgggatctgagaaggggattgggacttctttaaaagtgtccaatttaaaaagcttctatgtctgaataggcgaccggaggccggcgcctttccattacctactactaaatcc

SEQ ID NO: 2810 - DNA, 1000 bp, Foot-and-mouth disease virus
  misc_feature 1..1000: note = - type A,isolate A/HY/CHA/2013,1
  source 1..1000: mol_type = genomic DNA
agggggcgttagggtctcagccctaacatgccaacgacagctcctgcgtcgcactccacacttacgtctgtgtgcgtgcgggaaccgatggactttcgttcacccacctacagctgggctcacggcaccgcgtggccattttagctggtttgagcggacgaacgtcgcttgcgcgcctcgcgtgaccggctagtactcttaacactccgcctacttggtcgttagcgctgtcctgggcactcctgttgggggccgttcgacgctctacggtctcccccccgcagcagtctacggtgatggggccgcttcgtgcgagccgatcgtttggtgtgcctcggttgtgaccttctcgtccgagtaaaggacggtaaccgcgagctttaaaccgcctttcccggtgttaacgggatgtaaccacaagatggaccttcgcccggaagtaaaacggcaacacacacagttttgcccgttttcatgagaaacgggacgtcagcgcacgaaacgcgccgttgcttgaggaggacttgtacaaacacgatttacgcaggttcccacaaccaacacaaaccgtgcaatttgaaatcccgcctggtcattccaggtctagaggggtgacactttgtactgtggttgactccacgctcggtccactggcgagtgtgagtagtagcactgttgcttcgtagcggagcatggtggccgcgggactccctccttggcaacaaggacccgcggggccgaaagccacgtctttgacccaccatgtgtgcaaccccagcacggcaaccttactacgaaaaccactttaaagtgacactgatactggtactcaaccactggtgacaggctaaggatgcccttcaggtaccccgaggtaacacgcgacactcgggatctgagaaggggactggggcttctgtaaaagcgcccagtttaaaaagcttctatgcctgaataggcgaccggaggccggcgcctttccctatctaccattacttac

SEQ ID NO: 2811 - DNA, 1000 bp, Saffold virus
  misc_feature 1..1000: note = gene for polyprotein, partial cds,isolate: Pak-2325.1
  source 1..1000: mol_type = genomic DNA
agcatcttcgcggtaaagaacaccccaggggcaccccctttgaacgcgggacctgcgaaagtgccaacccacgtctttcccactcttatcccgattcccacctcgggtccaaagaaaggaccaattatttcatccctcgaatgctggctaatcagaggaaagtcagcattttccggcccaggctaagagaaacatataagttagatttggttcaaatcccttgacgaatttggaacgagatgttctccctcccttgccgcttgttcacacccacacatttaattcggcctattgtgacaagccccttggtgaaagaacctctctctttccaacgtggttggaattaacatcatttccgacgaaagtgttatcatgcctccccgattatgtgatgctttctgccctgctgggcggagcattctcgggtcgagaaaccttgaatcttttctcatggaaccttggttcccccggtctaagccgcttggaataagacagggttattttctttatcttgtttctacttttatgggttctatccataaaaagggtatgtgctgccccttccttcttcggagaattcacacggcggtctttccgtctctcgacaggtgtgaatgcagcatgccggaaacggtgaagaaaacagttttctgtggaagtctagagtgtacatcgaaacagctgtagcgacctcacagtagcagcggactcccctcttggtaacaagagcctctgcggccaaaagccccgtggatcagatccactgctgtgagcggtgcaaccccggcaccctgattcgatggacattctctacggaaccagagaatggttttctcaagccctccggtagagaagccaggaatgtcctgaaggtaccccgcgtgcgggatctgatcaggagaccaaatagcagtgctttacgctgttactttggtttaaaaattgtcacagcttctccaaaccaagtggtcttggttttctaattttattgaatggcaat

SEQ ID NO: 2812 - DNA, 1000 bp, Saffold virus
  misc_feature 1..1000: note = gene for polyprotein, partial cds,isolate: Pak-3486.1
  source 1..1000: mol_type = genomic DNA
gcatcttcgcggcgaagaacaccccaggggtaccccctttgaacgcgggacctgcgacagtgccaacccacgtcttttcctactcccatcccggctcccacctcgagtccatagaaaggaccaagtacatcatcccttggatgctggctaatcagaggaaagtcagcattttccggcccaggctaagagaaacatataagttagaaatgatcacaatcccttgacgaaatcagaacgagatgttctccctcccttgccgcttgttcacacccacttcattaattcggccttttgtgacaagccccttggtgaaaggacctctctctttctgacgtggttggaattgacatcttttccgacgaaagtgctatcgtgcctccccgattatgtgatgttttctgccctgctgggcagagcattctcgggttgagaaaccttgaacctcttcctttggaaccttggttcccccggtctaagccgcttggaatatgacagggttattttccttatcttatttctactttcatgggttctatccatgaaaagggtatgtgttgccccttccttcttcggagaattcacacggcggtctttccgtctctcgacaagtgtgaatgcaacatgccggaaacggtgaagaaaacagttctctgtggaagtctagagcgcgcatcgaaacagctgtagcgacctcacagtagcagcggactcccctcttggcgacaagagcccctgcggccaaaagccccgtggataagatccactgctgtgagcggtgcaaccccagcaccctgattcgatgaacgttctttacggaaccagaggatggttttctcaagccctccggtagagaagccaagaatgtcctgaaggtaccccgcgtgcgggatctgatcaggagaccaattgacggtgctttacaccgtcactttggtttaaaaactgtcacagcttctccaaaccaagtggtcttggttttctacttttattgactggcaat

SEQ ID NO: 2813 - DNA, 1000 bp, Saffold virus
  misc_feature 1..1000: note = partial gene for polyprotein,strain Finland 2008,1
  source 1..1000: mol_type = genomic DNA
cattttcgcggtgaagaacaccccaggggtaccccctttgaacgcgggacctgcgagagtgccaacccacgtcttttccctcttttaccccgattcccacctcgggtccaatgaaaggaccaaacatttcatcccttgaatgctggctaatcagaggaaagtcagcattttccggcccaggctaagagaaacatataagttagatttgatttgaatcccttgacgaattcggaatgagatgttctccctcccttgccgcttgttcacacccactgttttgattcggccccttgtgacaggccccttggtgaaagaacctctctcttttcgacgtggttggaattaacatcacttccgacgaaagtgctatcatgcctccccgattatgtaatgttttctgccctgctgggcggagcattctcgggttgagaaaccttgactcttttcttttggaaccttggttcccccggtctaagccgcttggaatatgacagggttattttctttattcttgattctacttttatgggttctatccataaaaagggtacgtgctgccccttccttctttggagaattcgcacgacggtctttccgtctctcaacaagtgtgaatgcagcatgccggaaacggtgaagaaaacagttttctgtggaagtctagagtgcacatcgaaacagctgtagcgacctcacagtagcagcggaaccccctcttggcgacaagagcctctgcggccaaaagccccgtggataagatccactgctgtgagcggtgcaatcccagcaccctggttcgatggtcattctctacagaaccagagaatggttttcttaagccctccggtagagaagccaagaatgtcctgaaggtaccccgcgtgcgggatctgatcaggagaccaattgacagtgctttacactgtcactttggtttaaaaactgtcgcagcttctccaaaccaactggtcttggttttccaattttattttatggcagt

SEQ ID NO: 2814 - DNA, 1000 bp, Saffold virus
  misc_feature 1..1000: note = gene for polyprotein, partial cds, isolate: Pak-3164.1
  source 1..1000: mol_type = genomic DNA
caccttcgcggcgaagaacaccccaggggtaccccctttgaacgcgggacctgcgagagtgccaacccacgtcttttcccacttttaccccggttcccacctcgggtccaatgaaaggaccaagcaattcatcccctgaatgttggctaatcagaggaaagtcaacattttccggcccaggctaagagaaacatataagttagatttgattcaaatcccttgacgaattcggaacgagatgttctccctcccttgccgcttgttcacacccatgttttagattcggcctcttgtgacaagccccttggtgaaagaacctctctcttttcgacgtggttggaattaacatcatttccgacgaaagtgctatcatgcctccccgattgtgtgatgttttctgccctgctgggcggaacattctcgggttgagaaaccttgaatcttttcctttggaaccttggttcccccggtctaagccgcttggaatatgacagggttattttctaaatcttatttccacttttgtgggttctatccacaaaaagggtacgtgctgccccttccttctttggagaactcgcacggcggtctttccgtctctcaacaagtgtgagtgcagcatgccggaaacggtgaagaaaacagtttcttgtggaagtctagagtgcacatcgaaacagctgtagcgacctcacagtagcagcggactcccctcttggcgacaagagcctctgcggccaaaagccccgtggataagatccactgctgtgagcggtgcaaccccagcaccctgattcgatggtcattctctacggaaccaggaaatggttttcttaagccctccggcagagaagccaagaatgtcctgaaggtaccccgcgtgcgggatctgatcaggagaccaatcgacagtgctttacactgtcgctttggtttaaaaactgtcacagcttctccaaaccaagtggtcttggttttctaatttttgttgaatggcaat

SEQ ID NO: 2815 - DNA, 1000 bp, Human cosavirus
  misc_feature 1..1000: note = isolate Cosavirus_Amsterdam_1994, complete genome.1
  source 1..1000: mol_type = genomic DNA
gctcactcctgtacaccgtgagtccgcgcagtgctgacttaacacttaagtaatgtttaggccgagaattacaccgctcggctcccacctttcaccaccgtgggattaacaggtggtcaatctgtattcctgtctttggttatgtcaaagcaatacggcatgtgcaatggcgcacaggcccaaggcggagatctagacctcacagattgtgttacagattaagaccatgctggatggtcacgttggagactgcatgtggcagtcttgaaacgtgtggtttgacgtctaaccattatagcagtgggtggagtactgcaaagatgtcaccgtgctttacacggtttttgaaccccacaccggctgtttggcacttgcaggacagtaggtttattttctttcagatctcttttctagtcgtgcatgttctgtatgcacgagcggagtgatactcccgctccttcttggacaggcggcctccacgtcctttgtggaactcaaggttgccaagtcactggtgtttgaagtgaagattagagaaacactagggagtttcatgtggctttgccagggattgtagcgatgctgtgtgtgtgtgcggaatccccctcgtggcgacacgagcctcacaggccaaaagccctgtccgaaaggacccacacagtggggcacccccagcccctccctacaaagctttgtgcaaatgaacttttgtttggcttttcttaagcttctctcacatcaggccccaaagatgtcctgaaggtaccccgtgtatctgaggatgagcaccatcgactacccggacttgtgagccttttcacagacgcatgtggtacccaagccccttccctacggggaaggggctttgctcactcagcacaggatctgatcaggagatctgtctccggtgctttacaccggggcacagatttaaaaatttcccaaggcctggcacacaacctaggggactaggttttccttttatcacaaagatgtcaat

SEQ ID NO: 2816 - DNA, 301 bp, Thrips tabaci associated dimarhabdovirus 1
  misc_feature 1..301: note = isolate Tamono1 RNA2R
  source 1..301: mol_type = genomic DNA
acagaggaatcaaaatcgctgaatactcttctcacgcttacactattgctcattattgcatctcctaaggacttatacatttgactcattttctactctagatgcactttccctccctctccatttattcacttgcactgaaaaaaactaacagacttaacaagcctttccgtctctcttgtctggatgtttgcgtctgtgctcttggggttcagcgtcctgggtatattattaacaggagccctattcccactagtccaccgactgacaagccaagtcgaccccaaggagattgaacatc

SEQ ID NO: 2817 - DNA, 304 bp, Clitocybe odora virus
  misc_feature 1..304: note = complete genome, isolate C-Holm.1
  source 1..304: mol_type = genomic DNA
ctgtaccttcacaggttcagttaagacgaaatctcgtctttctctcctcaattggagttctatctttagttcttcttctgagagggtcccccagtcttgggtaattaggtagttacatcctaattacttcggccgggagttaggtcaagtcttttgatttgatattgcctcctaaaccgagtgacacccgccatccttccaaaggtagccgcagcccccacctaggggaaactgtaggatagtctctagagggaagtgacgaatggtcgtcggcctggtttagtaacatacaaatcagagtccc

SEQ ID NO: 2818 - DNA, 304 bp, Plasmopara viticola lesion associated mononega virus 2
  misc_feature 1..304: note = isolate1R
  source 1..304: mol_type = genomic DNA
tcaagcttcgcatgaccggtaagtagttattttcattatttaataaaacttaggattaaaaaataatctagactacaatatgaaagatatcgcagttaatcttagtgtgttagttcattctttggaattattatcgaaaattctttctcggatcgaggaactaaataagtcagaaaatgagctagatgcaattggaacagaagaaacatggaccttagtataaccatgcattaggtttattttataaaacttaggagcaaatcacaattatccttaagtctttttttgtaattgaagtgaaatc

SEQ ID NO: 2819 - DNA, 305 bp, Wenzhou pesti-like virus 1
  misc_feature 1..305: note = strain WZSS31331 polyprotein gene,1
  source 1..305: mol_type = genomic DNA
caagtacgctcatagttctcgagccaaccacacgaaagctagttggggcctttaaatatggaaacttctagtcgtaaggtggggtatctcccctatgggtggtgaacgcttgttcgctgcaataatggtgagtagtctctagactaatgctacctagtgagacaacgattatctgtctcatgtaagatagcattagtttggcgagccaggttgtttgggagcaaccctctgtcgataaactacacagtctgataggacgcacgaccttgcccattatgtaggataaagaatggtctgtcaacaca

SEQ ID NO: 2820 - DNA, 308 bp, Vespa velutina associated menton virus
  misc_feature 1..308: note = isolate VVAMV/144I, complete1
  source 1..308: mol_type = genomic DNA
gcgattggttcaatcgccaatttgagaaagctttaattgatctcgacgtcgcttctgtacccggtataacggccctttctaagtatggcactaccttaggagaaatcctagggtttgatggcaaggcttttgatgcagagcgcatcaacatatttagaatttatgttctagatagattcaaaactttactccgaggagaagaatatgcagatccaattaagttattcataaaacaggaaccgcacaagattaagaaaatagaagacaatcgtcttcgcttgattagtgctgtctctgtggtggatacg

SEQ ID NO: 2821 - DNA, 308 bp, Beihai tombus-like virus 4
  misc_feature 1..308: note = strain BHZY58951 hypothetical protein 1,1
  source 1..308: mol_type = genomic DNA
actcagcgacaactcggaccataccgagagatagaaaaggagccagagtcggcttggtagacccccagaaggaaaactgggagtactgggaaacccggcaacccaccgtgaagaggtagattagccagataggaagacgtttggaccttacgaggttgagcgcacatgggcattaatgtcccggtgttagtgattacggagagatggacgcaatgtacccttagcgacatctagacgcctaatacgagaggcggagcgctatttagcgcagggggccagcccgagtgccgccttcaagttatcgagag

SEQ ID NO: 2822 - DNA, 309 bp, Hubei picorna-like virus 36
  misc_feature 1..309: note = strain SCM50248 hypothetical protein1
  source 1..309: mol_type = genomic DNA
taaaacttcttaccccaaaggtaggatttgcaatcgcagtgaccctagcagcaaagttttataatttctatcccaaagatagacgaggtgagcgtactcgataacgtctcagccaatgttaacttggctacgtaataaagtcaatttgatgataattagcgtgttacaacgcgtaaacacaataataaaccaacaaatcgcagagcggcagttagctagcaatcaagtatccacagtgtgatatatgtcaaatcaaccaagatattttcctctagagatttccaccacagaagagatagcagagcaatc

SEQ ID NO: 2823 - DNA, 314 bp, Soybean leaf-associated negative-stranded RNA virus 1
  misc_feature 1..314: note = isolate1R
  source 1..314: mol_type = genomic DNA
tcatccccaaattccccagactccccacacactgactgcgacagaggtatttaataaaacttaggagtaaactctagatgcgcacaatgacgacctgccaaaaagcattggaggatttggcgaatgtgctcgacattctaacgagatgtctctccgaggctactcaagagaagtctgatttcgaggagattcatactccttctgacgacgtgatttctatttcttctgctgagcaaagtgcattataaagggcaacgttggtattagattatataagtcgtgtattaaataaaacttaggagataaccgcaatc

SEQ ID NO: 2824 - DNA, 314 bp, Changjiang crawfish virus 4
  misc_feature 1..314: note = strain CLX8819 hypothetical protein1
  source 1..314: mol_type = genomic DNA
tatcacattttatttaataggcttaatatatgtaactatttagtttacagcttattgaatacaatttccatttacctaatttataatcatattcgtattaaagtattcacatttttcatagaagatcttttgaattccgctctagatatttaagttttgaagtattagttttgaaagtaataattatcacgattagtaattccagtcttttcgactataagaaaccttcgaccgttcggtaatctctaaccaaagaagtcctgattgtatttaattttagggggtgtatttattcattcgtcaccatagtacaa

SEQ ID NO: 2825 - DNA, 317 bp, Thrips tabaci associated dsRNA virus 1
  misc_feature 1..317: note = isolate THR-E_DN240952
  source 1..317: mol_type = genomic DNA
ccccagcaaagtctagatgctggataattgacatccgctgggcgaatgtcgtagtagctgagagcaggcaggctcgttttattaatgattttaagccagtcgtttttgcttggcacttgcaggttctattgaaccgccggcccctattggccaactccgctggtcggagcattttagaaattgtttttgattttcctgtcggctggtccgatgagagcggtcttttggccgattttgaatcatctgttttggatattatacgtatccgtattttaaatgactctgaggtcgatgacgagattaccgcgcagcagctg

SEQ ID NO: 2826 - DNA, 318 bp, Alternaria longipes dsRNA virus 1
  misc_feature 1..318: note = strain HN28, complete genome.1
  source 1..318: mol_type = genomic DNA
ttttggaaaattatacgcctctgtttctagagtttcttttccaatgcccatagagtttggtacccatgctcctaagggtttgagccaattcggtaccgggggtaggtttaagcagcgggtttctactccctcccgcactgagttctaccggtattgtaggaccaggctggcaatccggaccagcctgtaggatggatatctcaaggcgatatagttgtcttttcgtggctatggggttagaacggcgctccctactcgatccgagggagcagccccattcgctgtacgcgagactagcacattagctgcctatatctc

SEQ ID NO: 2827 - DNA, 319 bp, Picornavirales sp.
  misc_feature 1..319: note = isolate H1_Bulk_28_FD_scaffold_4 hypothetical1R
  source 1..319: mol_type = genomic DNA
aagtgttaacactcccctcctgtagcttactccacggttatacaggtagtattatagtgggtgcgtctgtgtgagtggtatgtagcagactaagattctttaccaattttgaggaaatggcctcgatcctaacccgattgtgttaccgcctccatcactttgccccatattacaggttatgcattgagtaccgcttcttgatgtatgatgactggaaggctttgtgagatctcgttctcctgacaaacaggttgttatagagttgggcgtccccccgaaaacaaaaacggcaactggtgagctgactgatctagaaagc

SEQ ID NO: 2828 - DNA, 322 bp, Beihai sipunculid worm virus 5
  misc_feature 1..322: note = strain BHNXC41492 hypothetical1
  source 1..322: mol_type = genomic DNA
atgggcagctatatattagctgcacggtagatacttttcaagcaagaggccagtgcagaccccttggtcgtatccagattttgcctagtgcgttaaaagagtccatcctcgccgggtatccagattaccggaggacctcatcagcacgtctgaagcggaatatatacgatagatcactagagacaagtctagacggatcagttagttggatttctctgcagtctgtaacgacgagagtgccagcagagctgagcgacctctattgatcgctgtgcacacccccgaactgacaacacgagatagaatcacttttcggcccatc

SEQ ID NO: 2829 - DNA, 323 bp, Wuhan insect virus 20
  misc_feature 1..323: note = strain WHCCII13322 hypothetical protein 1,1
  source 1..323: mol_type = genomic DNA
acgggctctgctccgactctggttttgaatccccgttttcaattttggggttaccagagattgtggtgcgcagtggggctatccctaggaaaactagctctagaattagtttcttgaatcagtttagtttaggattagattttagatctcctaacccttctttacacaacgctttagtagcagtcgagagacgtgtctttactgtaggcaaaggcacggagattattcttcccccgcaacctgaggaaaacatttttcacagcttagattactttagagatgctgtggtgagggaagtcggcttttgtaagacctacaccccc

SEQ ID NO: 2830 - DNA, 327 bp, Blattodean nairo-related virus
  misc_feature 1..327: note = OKIAV321 segment M cRNA sequence.1
  source 1..327: mol_type = genomic DNA
cacaaagaaacttacggctcagcaaccaaaactgtgctactggatcattgtttgtgtattaagtgcttcatattcatatttggtaatgtggtgtatctgcatacgtcactttatctccatttgcattatattatctttcattattgtcttctcttagatataggtatagttagtaataagctgtgaaattctagatagttgaactatagtaaactagtagacattaagaattaaatcactgacaagtagcagataaatcattttttcttaaactggaaagtaagtaaatacccacaagcaactgctgacagaatttgatgagtgaag

SEQ ID NO: 2831 - DNA, 336 bp, Cragig virus 1
  misc_feature 1..336: note = replicative protein and structural protein genes,1
  source 1..336: mol_type = genomic DNA
aataaattaattggtcctaatttattttctttttctgtgtccgaccagcacaaatgattttgtcgttttgacaataattaaacaacagttactctagaacgtcatctaggaggagttctatgttctaacggttctcattatgaggcgcttgaattttggaataacctttgttacagttctctgagtttttgcacgttttttccattaaaaacgtgcagcctgtgttaggtttataaacactagggaaacgccccgaaagtgcgacttgcagataattgttgtcatgctgcattgtatttttacaacacggcttatatagccttaaccgaagattcc

SEQ ID NO: 2832 - DNA, 342 bp, Avian avulavirus 20
  misc_feature 1..342: note = isolate AAvV-20/great black headed2
  source 1..342: mol_type = genomic DNA
tcacaatatcttcagaagattataacggcttaacaacaagaccatctaaatactatattacatgcatctatacgattcctttaaaataattaaattaatgacagtgacacaatattacaaaataatcttctagataatcctaaattgccaccctggaccaatttctcattctgatttaacagtgataccttcaccatttgtttttgtaatgatctagtatcagattctattggttttgagctttccaataataaagattttgaaccatcagttctaaaaaaaaccttttgggtgggtgaaatggaacttgggggcgacccctagcctgagaatatcccaaca

SEQ ID NO: 2833 - DNA, 344 bp, Dicistroviridae sp.
  misc_feature 1..344: note = isolate sru103dic1 genomic sequence.2
  source 1..344: mol_type = genomic DNA
tcttgctatcttaggtaaaatgagaggttaaaataagttagtagtgctatttcggataagatgttagttatttaactttactgcttaggatgcatcgtggcagccccataaaaatccagagcccctccctcgtttctagaagattaagtcgtcaatagaaattaaataatagacttgcgtcaaaatataatgataataatcctagtaatagatctgataatacatataatggtagtttaagtaatgaagatgctccccctactccccaaaatgcacaagaacaggtacaaataacaacttttgaagctgatcttgctgtattacccgagcatgtcccaggagaa

SEQ ID NO: 2834 - DNA, 356 bp, Avocet picornavirus B
  misc_feature 1..356: note = isolate MW14 genomic sequence.1
  source 1..356: mol_type = genomic DNA
cgcatatcctctccctcttttctcccttccccctccccgacctttttcccctctacggcctcggattgcggactgatatgacgcgcctgacgtggaattcaggaattctggaactgggggacttcgcccaagctgtgaaccggattaccgatgtagctccttgggtgcctcagggaagggaccagtagttctagagcacatgtgaagcactgacaaggggactgcgttgcatatccccgaccccggactctgtgtgatgatgctggattgccgctagcacagagaaaccacccttttagggctcgcagggcagtgtgtagcacctagtttgggaaagctaggctggtgtgtactgg

SEQ ID NO: 2835 - DNA, 357 bp, Hubei tombus-like virus 6
  misc_feature 1..357: note = strain WGML12775 hypothetical protein 1,1
  source 1..357: mol_type = genomic DNA
gggtgcccaacagatgccacaggtcaggggtgtgaatggtctaaagctattgaagagttcaattgtgttcttatcaatgggggtcatagggtgacctttgaccccattgagaggaagcagttgaataaaagctcggaattcccccctgatcgtttgcagtgggaaaccactgttgggatacccaaggaacgtaggtatgttagagtgtctagaataggtcgcgatgtaaatattattccatttaataatgatatacgaactttgcaacgggcggtcgttgaacgagtcttcactgtgaaaagtgatggtgagttttgtcggccaccccgtccagctaaggatcatttccaaaacgta

SEQ ID NO: 2836 - DNA, 367 bp, Hubei sobemo-like virus 38
  misc_feature 1..367: note = strain QTM27202 hypothetical protein 1,1
  source 1..367: mol_type = genomic DNA
agagatcgagcgaaacgggtttcgatatatcggaaaaaccgatccaatcagtagaaatgtcggtgcttatggaacaaattcttacattgcgcaaagatttcctgattttgacagaatcgataagctcgaagagtactgcccgccagagttccacacacagcggcaaaacaacacagcagaactccgaagtttcgcagtccattcaaaaataagacgcgaattgttagataggatacaaccgttgacgacccagcaattcaattcggttttggatcgaagcgaggacgtgttttcaaaaattagagttgagatttctgatgactttctagattttgataaggttttaaaaattgtgctatctcttaat

SEQ ID NO: 2837 - DNA, 382 bp, Apodemus agrarius picornavirus
  misc_feature 1..382: note = strain Longquan-Rl32 polyprotein1
  source 1..382: mol_type = genomic DNA
tgatgagggtcgccatcccggttgtggtgacacaacgggcgtccctgcgctggcatgaggcctctttgaggctggagaatcgggatcggtaaccgaagagccccgtgagctagggttgactcctccgcctccctgaatgcggctaatcccaacccatgagcatccggtggcaatcccgccacaagggtgtcgtaacgcgtaagtcgtgggcggaaccgactactttgggaaggcgtgtttccattttatccattctactgtggttatggtgacaagttataaatctagatctatagcgtttgttgagagatatccaacaattgaacaaactcgcacagttcttttctttggaaggcttttctttggaaggcaaacagtgaaa

SEQ ID NO: 2838 - DNA, 384 bp, Salem virus
  misc_feature 1..384: note = complete genome.1
  source 1..384: mol_type = genomic DNA
acgcttctagaaggtctccaatcactactgttatctttcaatcagtctaatcaccgaacttgattgatttgcttttatcattaaataactcttaaaatcactaaaaaaaacctaggactcaagagaacgagacccaagacagtccgacaagcccggaaccctcccaagagaggaacgaaagccgacaccccgagaacccaccaagatccaacaacaaccgagccacacccaccacaccgccagaaatccagacaaagccccgaaacaatcacactcctagccatccacagcggcctccttcccaacgaattggaaacgccacccaccacgtgtcatccctgacacttgggcataggcaatcaactcactccataagtagtaaat

SEQ ID NO: 2839 - DNA, 384 bp, Wenzhou picorna-like virus 35
  misc_feature 1..384: note = strain WZRBX39547 hypothetical2
  source 1..384: mol_type = genomic DNA
ataaaattcagtattgaacgtatgggtgtcctcaagccaccgttgtgacaggcgcctacttggctgaactgaatgagtgcctaaaattgtgttgtttacgcaaaccaactagggtattggtggcgagccaattacctgaaagctctagatgatgttgagcgttgttcatttgaggagtacccaaatctttgtgtacgagccgttcctaggaacgttgtcgagcacacattgatgtagggcccgattacaggacatgccattgactaatcagagtgagtacaattttaggggagtccactgtaagttcttttcggcccagtccccgtgtagacgcaactcacaaaacatgttgacaatgctgctttttatttgccctcccttctt

SEQ ID NO: 2840 - DNA, 388 bp, Hubei levi-like virus 11
  misc_feature 1..388: note = strain WHWN53995 hypothetical protein1
  source 1..388: mol_type = genomic DNA
gccgttaaggccccgctgcgctgcttcttcggacgctgcgtactgctttgcagatcccggcctacacccttctcggaggtatgtatgccgtatagtcaccgctgcaggttctctgctacgggccgtttactcggcggtgtatttcttttacacttgacttgaggtcacatatgtccaaggacgagctcctccagctgctttatagtcagcgcgaatctattcagcttatatctcctaacgggggtcgtcaagacctttctgtcggggatatcggtgatgcttcgcgctattctgtttcgcaactgcagggctttactttggcttatgcgagcgtgctttatgaacacgctgacgaactcgtcgcctctagacttcttaaggaatcgtg

SEQ ID NO: 2841 - DNA, 391 bp, Avian metaavulavirus 21
  misc_feature 1..391: note = isolate APMV/dove/Taiwan/AHRI33/2009,4
  source 1..391: mol_type = genomic DNA
cttgtttagttaagttgaacggtgatggttacattcctcattgcacattgactcataactggcgttggtacaattaatctagttgacgaaagaggtcaactagcgtactctaacactaatattaatataaacacttaagcttaggctcacatctagatgtgaagaagcagtcactttaaattcattcaattaaattatcaattgatactgtactgaggcataaccacttacaacttagtgcacagccttattgctttacaatctgcagatagtggtaacttaggtcgaaatttagatttaaatgcataagtgctatactgttgatttaataaaaaaatgggggagaccaccaataaaacagcaactgccgctgctagaagtagacctaatc

SEQ ID NO: 2842 - DNA, 399 bp, Marine RNA virus
  misc_feature 1..399: note = BC-3 non-structural polyprotein and structural1
  source 1..399: mol_type = genomic DNA
ttctagaatagctagattttaacctatgtattattattgttttatgtttatatatctgaccatcatgtccttaaactgttcggaggcgcactcatgtgtcaacgtgacttatgtgaaaccaaaaatgagctgtacatactgattacggcagtcgaccttagtgtctaccccttaaatagactgacgcttgtgtatatctgggaagcataatgcttgtggctatttagctgcggaggtcctaccactccaccaatgtagagacaggacatcgctctgaggtgagctttgtacccgtgtaaataaaaataccttaccaactttactctaaaacaaaagtctgtggaggactataaactctacacttatgtgccccaatctggagaggttgggatttcacaa

SEQ ID NO: 2843 - DNA, 399 bp, Hubei picorna-like virus 14
  misc_feature 1..399: note = strain QTM26191 hypothetical protein 11
  source 1..399: mol_type = genomic DNA
acttgcaactaatcttcgagagtctaagaataagacactaatggctggtcaatccgctaataacggtctacagtacggtgaaactttttctacatcactattctggtaagaatgtaaatatacaatttgtcttatagacacctcaatgtgaaatgacgaacgaaaataacattgttgtattaaagcggctctttttagagttactaatcaagaacgcttgttggcagccccaatgaattctagatgttcaaatttgctaacgattaggctgttgttagtgaataaattaagcctgcgaattttataactgaaactttaaagcaagaacaacgacaaattttaactttcgcatcagaaggtgattccaaccacactaatgtgatagcaaaaagtttgcaa

SEQ ID NO: 2844 - DNA, 403 bp, Botrytis porri RNA virus 1
  misc_feature 1..403: note = RNA 1, complete genome.1
  source 1..403: mol_type = genomic DNA
gcaaataaaagagctgccttttgaagccttttatttgtaaggaaaatttatattgatcgtcattcaacgatccccgctcgggttagaaagcaccacaagcgcagtgacgatcgcttgtgagtagtagtcacactagatggtaaattctatttggaacctcggacactctcaaaccgccttgtcaggatatcagcggatgtgaatagacgtgtggaacacaacgtgcccaccacatcttcaactgctcctgttagtgtataaatcagaaggataggtaaaccgagatctctagagaagaggctacctggcactgctgacgggccgtagtatactacgatatcgggaggaattgaagccttctgtaatcccccagtacccaggctctctagggtaaagtgagaga

SEQ ID NO: 2845 - DNA, 411 bp, Hubei tombus-like virus 15
  misc_feature 1..411: note = strain WHYY21098 hypothetical protein 1,1
  source 1..411: mol_type = genomic DNA
gaatgccgcaccttgactgctgtctgtacgtccggaagacctggacccaacaaaaccttgccaggtagcagtgttaacgccaaggaatgcgtttgtcattgtaaacgcagaaccaccaaattattcaactacagcattccagagttgaacgacagctatgtttggacgcacaaagggtgtgtgtgtaacgaactggtggctctaaaacaacggcaccaactcgatgatggtctcagatatgtttcaaagtctaacttgtctagacatctcagaccgttcatcaagacggttagtccctgctcggaagatactgtgattgcccacagtgcaggcgctaagcgtaaactccttctctcggccaaattaagccttgaagtctatcctattcaacctgaggatggcgcggtgaaa

SEQ ID NO: 2846 - DNA, 416 bp, Riboviria sp.
  misc_feature 1..416: note = isolate plw155urn1 genomic sequence.1
  source 1..416: mol_type = genomic DNA
ccccgcaattgtcccaaagattgcggggagcgagcctcggtaatatatttggattagcatatacggattatatttatgtgcatatagaaggagataaattgactgacttaatatttcaaaatgctttactagacattccggattttacaacagtatcattatttcaacacgaaatatcatctaccgagagtggatacacattccaattctgtactgttggttatgcttcctattaccagcatagtagctatttcgtgctatttcaatctaattccgataatttccttccattaattaaagattataaaagtagttcagagtttgcagatgtatctcgcacaatttatgattggtacaaccctacatacgatgatctagactactgtagcttttataaagttgaccaaattaataaa

SEQ ID NO: 2847 - DNA, 422 bp, Achimota virus 1
  misc_feature 1..422: note = complete genome.2
  source 1..422: mol_type = genomic DNA
atgagtgctggccagagcattctcaagactcctccaccaggtccacagaacacagaaccccgaatgacaaagaagaggatttgcatcaccccactggacagaaggaaccaactcagatctgctacagcatccacaatcatcacaaagtcagcaatcgcatccttctctaaaaacaaactctctagcttgctcaaaattgcccaacagttaatcaatcatcccgtagatagatagatttccatgctaatacgcttaatgcatttaagaaaaaacttgaggatatatagtctgtatgattgaataaatgagatgggatgatcatcttagaagaaaagaagaatgggcccggaccccataaatgtccggacactctagattccaacatggctctatcaactcatcttagacaagcctattctgtg

SEQ ID NO: 2848 - DNA, 428 bp, Tesano Aedes virus
  misc_feature 1..428: note = 16GH47 RNA, complete genome.1
  source 1..428: mol_type = genomic DNA
ccacctctgatatacaggtgaaagttgtatatcaaaagaaatttttattttagttttaatatctagttcacagggctataacctaccccttattagtaacaaaatataaaaactcggtacagaccggggtattgatttgatgactttaagatggaattttgtttagtttacggaaggcccgtagctcttatcaatccccctaagagttacccctattctagaattccattttaattttatcaataggtatggataaatattagatagtaaggcaaggtacgtatcttatagaaatgttagtaagtacggagaagtacgcgactctagttgaacgataaatagcatctcgagcttaccagtagccctggcgttaacaatagaatagctaaaggcttctcctgaaagcaaccgctactataagatagcgt

SEQ ID NO: 2849 - DNA, 436 bp, Hubei diptera virus 11
  misc_feature 1..436: note = strain SCM51501 hypothetical protein 1,3
  source 1..436: mol_type = genomic DNA
atctaacaacattcaatttactaaccatagatataagatacatttaaagaaaaccgtagtaaaagtcaaatacagtatacatcgaaatggacccagtatattttactaccacttgtcccagatgtggtgaaggaattaaatatataagggttgaaaaaccacttccaactacacaaaatcaacccaaacagacaggttaaatcattacaaatttttcattttgatattaatcccaatttatttttacagaagcttttacatttctaattatttattatttattgaaacatatatgtctgttcttatcccatctcttatttctttatacatctacttttggacataattaaattattattcagttatttatcattttaacacagagattatgttctagaccctttaatatttaaacaaaaccgtagtaaaagtcata

SEQ ID NO: 2850 - DNA, 440 bp, Salari virus
  misc_feature 1..440: note = isolate OTU77 RNA-dependent RNA polymerase gene,1
  source 1..440: mol_type = genomic DNA
agaacaatcccaaaagctgtactgcctgtgccttttgtattggctccgaagtctgaattgcatgaccaaacatttgtacctttccctatgtcaactgctggtggtaaatgcgaccctgtcatgagactttggcaagcagcatctagaaattacaatcacagacctgcagactatctagcgtcaaagagagaaaggtttgacgagatgtatgaagatgaccctgaagagcagcggaagatacaggaaaagaataaagagaagaggggccttgcccatcgggctaacatcaaaggagaattagctgaagaggacctcaggctgctagcactagatggtgtgtttgggaagaagtttatgagcgatatggaaaagcaagtgaaatatgaagatagcaaaagaccttggaattggaacactgactgcactgatatagatgcttt

SEQ ID NO: 2851 - DNA, 445 bp, Blechomonas wendygibsoni Leishmaniavirus-like RNA virus 1
  misc_feature 1..445: note = strain1
  source 1..445: mol_type = genomic DNA
gtagcctatagccttgctcctcttaaggagggctagtatcatgagcgtcaattcatgacctgatatagctttatgcgaaaatatcggggtcaacaatggtgtattctgtgtgacggtagctccggtttccgtaattctagatagttaataactctagttcccttgtggttagtcgttgtaagcgctggcatagatgcactcaaacgatcagacgccgagtcggtgcaaaaggagtggtttggcagccacactctatagaccgattcattctgactcgcctattgttgactatctactactaccaatcgctattgctctcgtcatcctatcagttcgacttgttagtgtctactctcgctctagactaacaaggcttctagttgtttcaactagattcatataagaactgatctgtgacatccaactttcgttattcatcatcaaa

SEQ ID NO: 2852 - DNA, 448 bp, Culex mosquito virus 2
  misc_feature 1..448: note = strain CMosV2/Santa Cruz, complete genome.1
  source 1..448: mol_type = genomic DNA
atcaacacaaatcgagaaaaaaacttttataatggcttctaattcagtactaaaaattagcactcatctggagatgaagtttagagaacctcctagaactagtaaagatgtattaagagccttagaactcattaaagacaattataatgggtttccggagaatttagaaattataatggtgttttatgtattgtcgggattcacatgtaaatatttaggaaaattaggtcaattctatatttataaaagtacattatctggagtatttaatggtaggtgatgggatacgattattcataattatttatcctccgggaaatgtctagataaatttttctgcactagatacagtagctgcaaccattagattttaacaagatgagcgtgaaaaaaacagataacacaaatcatattatatcatcttattataattcgaatctatctgaac

SEQ ID NO: 2853 - DNA, 455 bp, Hubei permutotetra-like virus 3
  misc_feature 1..455: note = strain spider127212 RdRp and1
  source 1..455: mol_type = genomic DNA
ctagaaatactgccgtactcttgctgactgttagtagaagtgttttatgtgtgacggacggatgtcaaacaaaggttgacatctctctcggcacattccaatacttcgctaaaccccctcctacaacacaatgtattgagcttgttacatctaccgctctagggaaaacagagtgttcccttcctccacactgtggagaagctcaatatgctgaggtcgacagtggatggttttctagagtcggagtctgtcaaggacttggactgacgaaaactactttgcaaggagcaccaactctaattggcaactggctttctgtatataatgttaccattactcgtattcccccagtcatagctgatgaacttgtagtcctttttgaccagaaatccaacgtgtactctttagtaccgcatttctatgttgagacatttttcattaaaacccaagatgga

SEQ ID NO: 2854 - DNA, 458 bp, Picornavirales sp.
  misc_feature 1..458: note = isolate ltt163shi1 genomic sequence.2
  source 1..458: mol_type = genomic DNA
aataaaatataaccgttatgtagttgaaattgaggaaacgatagtaggctgtggtcttgtccaactaagatcgggtagcaattttattgtccgattatgttgtccaaggctccttacgccgattactcataacactatattttattataattttaaggtttaatgtgatcttgcacgataaatgttgatgtgaaaacgtcgtgtattgctattaaacttgcgtacctatttaggtttactcatcaagatcgcggagtgcagcccactcgaaatctagatacatcaactattctattagattaggtagtcaatagtttagtataatattacctgcaaattttgaacaaaatactataacaaaaacgcaacaacaaatattgtctttttcctctgaaggagaatgtaacaggtctggagtattaccagatagagttagtattccacgccaatttctgtcg

SEQ ID NO: 2855 - DNA, 459 bp, Culverton virus
  misc_feature 1..459: note = RNA-dependent RNA polymerase, nucleocapsid, and1R
  source 1..459: mol_type = genomic DNA
atcttcacaggttgcccctaacatatgacgactggcatgattaatgacaagagataccttagttttaagagtttttagagttagaccaaatgtaaccacattccatgaagtactattaacattaaccttagacataagttatgtattatttttctatttgtagttcttaattgctttttaaaaactcacagataaaaaaactcggttaatcaaagaaaacccacctgaaagacaaacaatctacttagattatgtctgctatttttcccaagaattcgaaatttgtatgcatattaccctaatcaggtttttacactagtgacgagtataaaagctctagactaataagaggaccagcccgatacatagatagttttaacagaggttgatggtcgagggagtatgatataataattcagctctcaatctatatcgtagtgatgatatgatccattcaca

SEQ ID NO: 2856 - DNA, 463 bp, Darwin bee virus 8
  misc_feature 1..463: note = isolate NT-7 nonstructural polyprotein and1
  source 1..463: mol_type = genomic DNA
aaaggactgttgtaatacagttgaatcaataagttgtgaatttgcagattgttgagtattcgttgtctcaatcttgtttgaggtgcttctgtggtggtcgcacttctagagtagctaagggtttgacacacatttaaatttcaagatcatgctagtagctgtcgagtcatttttccaaagaaagtccatgggatttacgtgatggacatgggtatgactccggagacggtgtaacgaggcagtaaagatcttgagatggcgtgtgtgaatgactccgccttgcattaatcacatgaaaagaccgttcggatagcggagctgacagtaggcacgtgatgattaatgtgactgtggaaacttagcgcgagattacttgtattctcaatctgctttaaagcaatgatgtgattcaggtgttaaaccaacgattgcatcgtgtgtaattagctagattggaagtggt

SEQ ID NO: 2857 - DNA, 464 bp, Plasmopara viticola lesion associated tombus-like virus 1
  misc_feature 1..464: note = isolate1
  source 1..464: mol_type = genomic DNA
agagcccgtgagatattttcactcctaatagtagccatgaaaccttgattggtggattggcgaagctaggggcagagatcgctgcacgtagcccatgagtgacacatgggcgcggactggtaatatgcagaactattctagagaggggggagcatacctaacagtgcccaccctggtccttggtaagtttgatggacccgggaaggagcccgaaatactccggagttgcgagactcccgcggccggcgtaatggcgaacatgggaaggtaaggcgcaccctaaatgcgcaagggacggaaaacctaattacaaaccacaactagggcagcagcccgactcgttgcgtgctacgaggataaactcgcattgcggtcagaggtggtcattgatacctgaccttaaacaatgtcggtttggcccgactggcccccgtagaggggctatcccactacaattttcaatt

SEQ ID NO: 2858 - DNA, 476 bp, Beihai tombus-like virus 16
  misc_feature 1..476: note = strain BHWZXX15284 hypothetical protein1
  source 1..476: mol_type = genomic DNA
ggggctgttagataatattagggaatttccaatggccttattggataaactttttaatgcacttattaaatacaagctagaaagtctacttttctcaggatgaatgttcaatactcagcacgagctaaaactgcaccacaaattgacctccgtttctatgtagtggaacgtaatggggaaattctagaagccttcgcaagataccatcacctaccacagcagcaaattgcctattttcatctggcaacacaagaattaggatctactggtggtatcttgcctaatcaacgcttcgcctcatatcgttactccgttccaccaggcttccaattacatccagaattgaataagtggttcaatgccacacccgctattataaaacgtgaagtgctgaagaaacctaacgtcgtcatgacgccaatttgtgctatactagatgctgagctggtgagtccttaccttagataatcaaacgt

SEQ ID NO: 2859 - DNA, 484 bp, Hubei picorna-like virus 16
  misc_feature 1..484: note = strain SCM51353 hypothetical protein 12
  source 1..484: mol_type = genomic DNA
aacatgatgtgatcttatattttagaataaattagtgatgtaaaatttgaaatatattgctatcatgttaacagagttacctatttaggtttacttccaagatgctctagaagcagcccttccaaaatctaggaaccatcactcgattatatagtttaagttgactatatagtttaaattataacttgctacaaatcaaaatacaattcaaaatacaacagatgacgatgctagtcgtgaaataagtcaagtacaaaacgtaacatttcttaatcaaggacaagaagttgaagataaagcactccctagcattgttgatattaacccttcatatttaaatgaaacattatacgatgtttctcatgatataccagattttttggaaagaccaataagagtgtggaatggattttttgataatacacaaacaccaaatacatcattggcaactttacgatttccagatgtattattacaaaacaga

SEQ ID NO: 2860 - DNA, 489 bp, Weivirus-like virus sp.
  misc_feature 1..489: note = isolate plw156pic2 genomic sequence.1
  source 1..489: mol_type = genomic DNA
gtatatatcatcattatcatcatttcattatcattatcattatcatcatcacgtacgtactacattctaagttctgaccagcttagtcttatttgtcacatgagcaacattttagtgagtgtcggagcacaatcgagaataaagtatcgttatagcgcctcacgaagagtgtggatcacagttcaagtcaaaccgttattgttgtagggtatatgggtaacctcacactacaaacaaccgcggcattctatatttggatgaatatagtaattactagacctcaatgcttgaaacccgttgaactagtatagacaccaattcgttagtgatctagagttttgtaaattgacttaataatttaccgtcggagcccgcaagcccacctggaataattttctaattttcaagaaattagacgttcagccacgtacggctaccagatctaaaagagctcgtaatgcttaattacaccccaaacagattgaagaa

SEQ ID NO: 2861 - DNA, 493 bp, Shahe picorna-like virus 11
  misc_feature 1..493: note = strain SHWC13613 hypothetical protein 12
  source 1..493: mol_type = genomic DNA
ggaagcaatgtccttactatgactttaaactagtaaaggtagtgacttacactcgtctcgtctagacgtaagtagccgagggtggtgaccaacaccacgtgattactgcggtataaggaatgtgacactttatgggaagaccaaaagtgtagagaaatcaaggattctatgtgatcttgcattcatgatatatggagtaaaatcatgattgtattgctatagaattgtcaaggtgctatttagtttcggtgtcctttggagcagtcctcctaaacaccaatcctccaaatttcaagcgttgtacagacgtcgtttgatcttaatattctggcctacaaatacaaacacaacacccgaagagagcgggaataatttctctcaaactaatgtagaagcatctgctacttctgaagtgcaagctactactatatttaatgatgatgccggtattaccaccagttctatcgacaatcctgcgtccatctatcaaaag

SEQ ID NO: 2862 - DNA, 495 bp, Laverivirus
  misc_feature 1..495: note = UC1 gp1 and gp2 genes, complete cds.1
  source 1..495: mol_type = genomic DNA
gtacggcatcattcaccggagagagtgatctcacaacgaataagaaagacgttaagagcgttaacgacacggaaacggacgttttgcggttacctattcaggtcggcttccccgcgatagcagccctatcaaatggagcagtttccaacttcctaagcacttggtcgtgcgaacggattttacatcagaccagcacaaacatttgacaatataccagaaaacacccccaccccctatcttgctgataattcatcatcagtaacagacaacacaggtctatttggaaacacaacacatgagcaaactggaaccactggctttactgatcaatcagtcgaagtagtcgtcaatggcggagacttaacagcaggtctctttgaagatgtagttgcaacagatactactaataccatcgttgattatctatctagatatcgaaaagtttttgactatcacttcggttctaccattggttaccatcctattgcagatttc

SEQ ID NO: 2863 - DNA, 500 bp, Erigeron annuus picorna-like virus
  misc_feature 1..500: note = strain pt013-pic-1-NW genomic1
  source 1..500: mol_type = genomic DNA
aagaacatattgattaagttctttatattattacgcggatgatggcttgcgtgagggcctaccattcaaacggataatatacatagatcacttttatatgttttgtttttgtctttacatgtattcctttcaagaatatatggtgatgaagtcctgtaatgccattataggttaagaggcaaggtgtcttaatactaggtgaaacatgcaggcaggtctatttaagaattgattgataacgagactattaatgctgtgagttatttcgtgcaaaccgatcggataaacatttggcgacaaatgcctttgggcagagctgattaatttgcaggttaacattaatacgtattgtgcgtcgagcttcttttatagatatcggttgctagtattgacgaaatctagagtttgttttatgggactgctctgcggctaaagtaatagtgagttcctgactttaggcgtttcaagatgaaatcgtcgtttaaattttaaatctcatt

SEQ ID NO: 2864 - DNA, 501 bp, PNG bee virus 7
  misc_feature 1..501: note = isolate PNGBV/7 non-structural polyprotein gene,1
  source 1..501: mol_type = genomic DNA
tgagccccaactcatggaattcttgttatagatactaagtcaaaagatgtgacgttaatatcgtagtttactgtggtaaaacgctttaaatgtcgattggtattgacggtgaaatctttgtatataacgtgacgttaggtacagcatcatactccggtgaaacgttttatgtataagtcgatacactaacggtaaagttatattctatagttttctcttcaagttttaaaaatgggaatccccctttattttaattgcatttatattcgcgtaagatctcttcttacatgcgtcttattttgtgttcaacgacattatcaaccgcttatctgggatagcaacccgttaggatgtcgtcatggtgtactacctctagatagttaaaagctagcatgatccttaagcaggagatgattgtatctagagaaggataatagttcttctacggaagcaactattttattttattttatttttaagtcttatcttcaatgtgacctt

SEQ ID NO: 2865 - DNA, 502 bp, Sunshine virus
  misc_feature 1..502: note = complete genome.2
  source 1..502: mol_type = genomic DNA
aaacggaaatgaatgactttgttaagatttgatgatcaagttcttcactaaaatatacactactcagaaagagtagattgtggactttgtattcaaagagttaaacccacgagtcatccttcaacagagtacgagagaactccacactcttcccaattaaaaaatagggagagggagagagattaggcatacctagatctagaagttcagattctcctatctttgagcgtgttgaacaactcccaaaaacctagtcattgaaggcttgagaagaaggcaaagaacacaaatcacttgtttttgaatacttactgtctctaagtatatggacaaagaccccctcatcacaaacattacctcttaattggatgattaaatgccaggttgagatactctaaaaatgaaagaattgaagttagggctgtagttatctatcaggatcacagggtggcttatttttcaaatatattgggttttaataagaaaattgaagggcattaaa

SEQ ID NO: 2866 - DNA, 506 bp, Hubei odonate virus 6
  misc_feature 1..506: note = strain QTM11719 hypothetical protein 1,1
  source 1..506: mol_type = genomic DNA
ccctagggggtggaattaaaattccaccttctagagatttttacccttaataaatgggttaacgatgataaatatttgagtaacactctcgtcaatgctcctagagttaacgaagatccaagtattttattactctcgtcaatgcttatttaatattgtatttagttttaagtttttatgtgtcgtggtgacctaaaaaccaaccaatttttaattcataatatcattttaattatatgataacccgtttaggctgtatattttatatgcgtgttatataatatcatttcattaaatttcatatattcattttaatttttgttaggtcattttcatccctaacaaattcctttggttcattttgagtttatgattttattattttgattagatgttttcgatcccctctttttattttaaaaattaaattacaaataaaagataataagacttctaccagagagagcagttctaaccctgcgcaggtagttgatacgtgtgttagg

SEQ ID NO: 2867 - DNA, 513 bp, Victoria bee virus 2
  misc_feature 1..513: note = isolate VN2-6 polyprotein gene, complete cds.1
  source 1..513: mol_type = genomic DNA
gctactcacaaccttgttttctttctttgattgaatcaagccactgtgtttctccccacacacaaccactgtgtcttcttcggttgatatagtgccgctgtgctcccatcccacccattgcccttcttgatgtcggttctgttatttataacagcatgtctctggtttttttctttcggtgatctctcgcactagcatagattgcgagaacgatgcccttgaatcggtttcttcggactaacgaattcacataagtcacatatctttaaatgtccctctagacatgttaattagagggaaggtatgtatcagagtgtgtctacggtaccctgtatgtcaatggttagatgtacaaattagggatacggttatggcccaggaaacgttggtttacctgggttatacataacacaaatgctcattttgagcttctcttcttatgaatttattcatgcggcgaatggaacgcgcgtcttcggaccgtaagtactaatagccaaccacacatttgaa

SEQ ID NO: 2868 - DNA, 513 bp, Sanxia picorna-like virus 5
  misc_feature 1..513: note = strain SXXX34146 hypothetical protein2
  source 1..513: mol_type = genomic DNA
ttactctacaggagttgacgttttctgtagtgctttagtttggagtagtcgaatctttcgaccccgggttatgagtaaatcctggggtttaaaattttactcgaaactaaatttaataatgaaaaccgagggagtagtaaaccctttacaaattcaaatggtggtattccacaaggactggatggtccgaatcacaaaagagttaactttgctctagaggatacactacatgattatagtgtagcttctgaagaaagtagtgacattacctcacttaggcaacgccaatttctttttgaaattggcgattgtggtaatatttctcagttttgccgtgctcgtcgcgctgctcgttctcttgttcgcttgaagtatgaggctcaatctttgttagagtctattgctgattccaacgttcaagccaatatagttggatttaccgatcacgatgctgggtatgaagcgggtttaatatcagcccgtgatgacagttattatgttagtgatgaaccc

SEQ ID NO: 2869 - DNA, 517 bp, Hepacivirus sp.
  misc_feature 1..517: note = polyprotein gene, complete cds.1
  source 1..517: mol_type = genomic DNA
cccactagaaacgatcttctagaatggggaaccgcgacaagtgaatcacgatggactaagcgaccaagagtttaagtgacagggttgttcgcgtaaatcccggcttaaattcaaagttgaatatgtccgtacggagcactctagcaccggacgaaggatcgtggacggtgggcgtagggtacacagggtcagctgtgtataaactcagtactgaagcaggatttgggagcattgcagtcacactcaagtggagtactccgcctttaatacccgtatggggcaatactccgaggagggcgggttttcaaacgaaacttgagtaatactttatatggtctcaatatacacttgtggatgtagggaaaccagccatgggcggacccaaggcggcgcacctgacacatgcggcaagagaaaaaatccttcgggtgatctctgggtccattccaaaactatgaattgcgatttgtgcttacctcgtgttggttggctttgaacactaaatacaaacactaca

SEQ ID NO: 2870 - DNA, 519 bp, Wenzhou picorna-like virus 34
  misc_feature 1..519: note = strain WZFSL80163 hypothetical2
  source 1..519: mol_type = genomic DNA
ttcgtgtttaattgagtttccggtctccataagaaaccggcctacttcctagggattagggagccacgtgtggtacacgctatgcagtggtgcgcaataaaacaccgggtttgatctcctttataatgatccatttgtcgatatatgataatcgtcgcaagttaatatgttcaattgtttattgtttctaggctgtatacacttgtgtttttacttgtaatcccttggctatttagccttactaatcaaggtggggagggtaattccaatacctagattctagatagcctctgaccttgagttaaaatcggaggtgaattattgtgactcgctattactaatacttctcaagaaggtgtcccttgtgagacaccaacaaatacctcgggtccttctgctcccgaggtgccttctcaggcagttaagcagaattgtttgtcaaagctagaaggtgcatcgtccactgcctttcaggaagatggtgctgtagtatctggaacaactagatctgttccatca

SEQ ID NO: 2871 - DNA, 527 bp, Anthurium mosaic-associated virus
  misc_feature 1..527: note = strain PHA segment dsRNA3,2R
  source 1..527: mol_type = genomic DNA
gactaagatccagtccaccttctagtgtgaccagtctcttattctattggttaatgtctcagcattgtctgccgatacattaaccatatgttactaatcttgtctctctctgttccatttactaagaaaacttgcttccattaccatccaaatctgctcacgttctcacatattcttgttgttatatccacactcgcactcggtacccgtgtacctccatgcttcatactctcgtcttcctctactgcacttctttgttctacatacttcggtatttcctcatccaccatctcattttccaaccggctctccctcctctctggttaatgaatagctcttctagaagcactctgacgtctcccatactggactcactctttaatttacccatcggcaccaactcatctgccactgcacttcttgttaacgcatcgcagtgtataccgtcataggttattcctattatcttatcatgttccactccttttgtaccaatcccatatgcttcatttattcttttatcatat

SEQ ID NO: 2872 - DNA, 527 bp, Salem virus
  misc_feature 1..527: note = complete genome.2
  source 1..527: mol_type = genomic DNA
ttatttatattaaagatcatgttgctcctcagtcagtatatataatttagctgattgacccgaattactacaacccacctttaaagctactagtctttgctcggccaacttttctaattagaataaagtcgctttccttgcagctaataatcctaaggctacagccaattgcttgactcctggaggttacacatgggtaatcatttgagcttgttcagataattacaagctgagattgagacaaaataataagaggaatttacctgtcctaatttaggtttagaagtgctctaagacagttaatcaattaataaaaaacttaggaatcacgtcaaatgaggcacacactgctctagaaccacacccaagcaccccggtttcctcttacacacccagcctgcatccccacaaaaacccaaggctttagcaagcccaagccaagcaagacgaaacccaaaaatcacggttcgactcttacctcattctccaccggttgcaattcagcctcagcatagcctaagggaaat

SEQ ID NO: 2873 - DNA, 549 bp, Beihai picorna-like virus 72
  misc_feature 1..549: note = strain BHHK126587 hypothetical protein1
  source 1..549: mol_type = genomic DNA
gcaaaaacctacgcacaatatggccttagtggtgtttggccttaatttatagcctttggttaatcgacgccctctttgaggagttaacggacggccagctatggtcaccagaaaaatagcactttagacaaatacatttaaaaattctatattttcttgaattaagattgaagttcttgaactgaaagtcttcaatgaattgtgcaatgtacgtgtaaacagttccccgcgagggtgtcccacgttcttagcgtttcgccattgcattttgaagttgttgcattagtatgtgatagaaccaatttctctatgacctggactgtttttaactagatggttatggcagtaatctagtagttttgtaccaggcattaactcaactttagtgatattgtctacttgatacgtcgcgttttaaaatttaaggacaataggcgaggcccgcgagttgtcaaatcttaagtctatacccagatggtaaatagtatcactctagatgaggctaactaaagacttcttaaaacttctgcctttctttttccaaaattt

SEQ ID NO: 2874 - DNA, 553 bp, Blattodean arli-related virus
  misc_feature 1..553: note = OKIAV101 cRNA sequence.1
  source 1..553: mol_type = genomic DNA
tagtaattaagaaaaaccaagacgctcaggtctttcatctcttacaagaaaatagaatggcatctacaagctcatcaaaaacccataataccattgaatctgtaaatctggtatatgatttacgtgataataaaagtggattcaattatcgcggtatcataaaattggggagatctagaactgcggaattttcagaacaaacgagaaaaacaacaataaagaaatggataactaaaatgaagattgttcaagggaatcctgtagaacttttaatacaatggagcattcctacaaatcaagatcttgttgaattgtgcttctccacggagatcactagcactgatttgagtatcaatttgggagtccctcgatatgaaataaatattgctgatttggagatcataaagtatgaaattggactgagttcgactcctgctaccaaaactgaactgaactattagggattatttacacatagtatttggcttaattaattgattaagaaaaaccaagaccactcacgtcttattttcctccgtattcctatataaac

SEQ ID NO: 2875 - DNA, 555 bp, Beihai levi-like virus 28
  misc_feature 1..555: note = strain BHXG26591 hypothetical protein1
  source 1..555: mol_type = genomic DNA
ccccctagccgggggcaagaacgcaagttcacctctagaatcacctgtacaggtgcgtatcagtgattggtacgttcttgtgcggctaggggtccaatacaactgctacttgcagtcggacacatttcagtgccggcatgtacgtggcatttcgcgacgcactcagcctaaaggaggattaacattgtgcgtatttcacacaaatataatcaacctacctggttagagtgtcggtccgataaaaacggcccgttaaggtacgaggaaattactgttgaaggtaattccagtactccagatcgacaaataccctataaggctgcaaagccgtatacaagggcagatgtctttctagatagcagtgtaccatctggcgtcccggctggagttagtcttttagacttgcctacagccgacgacgttgttgcatcgttgttatctgacgagcccacgttggcatcatctgtgtttcaaccctttgttgatacgtcggatatccagaatcaggcacttcaaaatgccattgagtatggaaatatcttactccttgtctct

SEQ ID NO: 2876 - DNA, 562 bp, Hubei tombus-like virus 2
  misc_feature 1..562: note = strain WHSFII19265 hypothetical protein1
  source 1..562: mol_type = genomic DNA
tctaggccgatgacggaatttcgctccttcgggggcatgcacggggaacgtaccttcggggcgtgctggtaatactcccaacaattctagatgcgtactgcgctcagcgccgggcacaccgttaagtgcttcaccctggtccttggtaaggttgatggaccctgaagaaacagtaaatcaccgggagagtgaactctcgttacatcatggttcgcccagttgcaaacgcgtctagagacaactaggcagagcggcagagggaagtgagacactctctgaagcgattaaatccgcgtgctgtccgtgactatagctgccgccagcggggattggcgatcgttaagagaataaacccgcccacgcatttgggaccacattagtggtatagcaacaacaaccagtacggaatctggtcacgtaactttccggccagcccattggtttaccactaccacttcggtgttcttgtggcattgggacgtacgctaccgcgagggggccccgctctgggtgatgagacggttgatggtcccgtagaccacacttccccccctacgacatc

SEQ ID NO: 2877 - DNA, 566 bp, Sigmodontinae hepacivirus
  misc_feature 1..566: note = strain On/2012 polyprotein gene, complete1
  source 1..566: mol_type = genomic DNA
gggggcccggcggaggaccaacgattgacgttcttcctggtgacgggaagtctctcgttggcagctccgaaaccgagcgctgcgttaacccgagttctagaatgctacgcgatcagctattcatggacgaagactcgagcggcactagggtaagggttcttcgggtaaatccctcctaatgcttaacgtttaataagttgttgaatactggtttgctacgcggacgaagctcggcagctccggcgccacggtcactggttgtgggttatccgggaacaaaccctccggttgggtaccgtaatataggaaccccataacccgggcctcccgaaaggagctcccggggtaccctaaccctgcaacgggcaaggacatcccactacgccgcccttcaaaggagttactcttccaatatattcttaggcgggttgtcaaagtgggccgcggccgtgcaggtcatcgggcttggggtagccatggggccaccaaggcggggagtccccctactcccctagaccaaaaatcctacgggtgaggtctggtggcactttttccttatattaacc

SEQ ID NO: 2878 - DNA, 572 bp, Hubei myriapoda virus 8
  misc_feature 1..572: note = strain WGML66308 putative glycoprotein,2
  source 1..572: mol_type = genomic DNA
gtccttcgcttggtaattcaatgttaattgtcctttctgtcctcatgttacatgtgattttcactatctttccttaatttatcaatcgataattcaaaaaattggcagaccgtgttacttgccttattctagaatattttatttgtatataaaagtctgataatgttagtcttgtaattctttttatatattttaattactattcacattccgattttgactaagctgtcacaaagttaattaattaagacaacacaaatgaaattttttctatgtatattatatattcgtgttttaatgtttcaacatgtacaatttacaatgcatttttacaaacatacattaatcaactatttttcgaagagcttatcggtaagctctcaatattgaagtgcagttttacactcatgtacttaatggataccatttttaacaactatttttggcacattctcgtatgacactctatttagtattataaactttattaataaacaccctcggtctcataccaacctgttttaaaagcggttaattactgagtaattttagatttaacagctttgttcaca

SEQ ID NO: 2879 - DNA, 573 bp, Beihai blue swimmer crab virus 2
  misc_feature 1..573: note = strain YYSZX17850 RNA-dependent1
  source 1..573: mol_type = genomic DNA
caacaatgggagaattacacgtcaatttccgcacacagctccaagttgtcaaagtcaaaagctcagaaccaggcgcaggctattccaaaacaaagcgcaggctattccagctttgatgaaaatggatctgatgaaggggaaggaagacaatgtgaagatgctgtagatggtttcgaagactcaatagttaagaggatcaagaagagtgttgacaatcaatataaggttggaaaggaagagtttctgaatctaggggaaagaaaagaaacacttcaaaaggaacctaagactgaatgtgaacatctcaaatttgagaataaagtgatcaaaaagattataaaagaaataacttatactaagactaagcgtgtggatatcacatactcggatgaagcaactactagtgaactggaagaatatctcaagattcacgccaatgaattgaatgaagctggaaaccaatggtataatattaatccaacatctaatttatctaaatccttacctgagaaagtgaggaagctttatgatgaactgaactttgaacttctagagaagctggattcaaatgaa

SEQ ID NO: 2880 - DNA, 577 bp, Bald eagle hepacivirus
  misc_feature 1..577: note = isolate NA03-001, complete genome.1
  source 1..577: mol_type = genomic DNA
aacaggggcgagagttcctgttggtgtgtggtggccccacggaccatgcgaagtcgaatcctacgcattctagaatggatgattcccgtaactatccacggaatggcctaccctttggtcaagtctgacagcttcgcggggcttgagacttaggggtggagattccgagaggcctgtacgggtattccggacgaagtgcgataggtaacacggcgcatgtagaccgcgtggagcggcagaacagctcccgtgacaaggtcggttgtcacgttaataaactcagtaacttgttattagctactaggcttgctgtctacggaagatgttgagggaacgtcgcgtctaaagataacaataggctacggcccgcgagttgtcaatcctccctgggaacaggctcatcatctctccaaaaccagttttggctagtatgtgatgtaacatgttaggagaaatccaaccatgggcggacccaaggtggcggccccgacacagccggcaagaggaataaccttcgggtgacctctgggtccatttctcaaagctagagtgggtgtgtgtgtcgtcgtttgcaaag

SEQ ID NO: 2881 - DNA, 578 bp, Bipolaris oryzae hypovirus 1
  misc_feature 1..578: note = isolate ES35, complete genome.1
  source 1..578: mol_type = genomic DNA
gtcttaggggtccctacttaagatcacccattgggtgtttaaaagggatgtgatcaggtttcatgaccaatcataacgtaaccttttggggtctacaatgattccttttggtggagatcgtaatctccgtgagcatagctcgtgtgtttcgtttaaaacacgtgacttgatagtcgtggttagctaccgtgcacctaggtgcgtgccttgctcaggcgtgacctaacggtctaccctatggggcctcaacagtggtgtctgaagacaaactgtcggtattgtgggtggacttgcgttccacgcgtggtattgcttcggctcttattctggctactgtattcgggttttgaagcgtaagctcgttcatgggattgggcccccatgtctggttgatggtcacacatacgtgtgtcggtactggtatctaatttcctttgttatctagaacctggtttgacagcaaacactctaagctttatttgtttctcttcctagaaacatcagccacgctcttgtcagaacggtgtccttttccaagcggggagtagtgacctttagcttgatccgttaaggatgac

SEQ ID NO: 2882 - DNA, 578 bp, Duck hepacivirus
  misc_feature 1..578: note = strain HCL-1 polyprotein gene, complete cds.1
  source 1..578: mol_type = genomic DNA
gagcccatccccgaaagggggtgggtcagccttatggctgtgtggtgtccccacaaaccgactcctaaacctcgctggttctagaatggtttgatgtgttggttgaccactggtcgaagctaactagcatatggtgttagggttcttcgggtaaatcccagccacatgcgaaattagaataagaccggtgtgcaccaatgcctctcttccggacgaagccggtcaggcatggagcacggtatgccgagaggcccgccgcatcagttatcgcggtggcgacagggcacgctgtcgttaaactcagtcctgatacagttgctgctgtgggcattgtctacgacactggtttgcggtggaacgccgcgcttttaaatacacagtagggtctgtcccgcgggttgtcaatccgtaacccagaaggggccgtaacctagtgtcaaaaccaatagccggcaacagcgttctgtggaaggagcgtaagcaaccatgggggtaccaaggtggcgtcccgtgcacaggcggcaaggggaaaatccgtatggtgacccctggtaccatttttttcttagtagaatgtt

SEQ ID NO: 2883 - DNA, 582 bp, Wuhan sharpbelly picornavirus 3
  misc_feature 1..582: note = strain DSYC47507 polyprotein gene,1
  source 1..582: mol_type = genomic DNA
ccgtggggtttaccccacgggatgttttcgacgcagctactgcgagagtgtagcctagtttacacagctagaaatctgtgtgcccttttgtgctcattttgggtgaataaatgatcacgatgcccatatcgttaaatgtgtgctgagggaaactttcgcactgtggcactcttttcggacggatctaggttatgactattgcttgaataaggaaatccccgttctagcggtgtagtgattggcactaaaccttgtgtggagcagtctagaccaacacataatagcatagtgaagttaatggtacgagttatggagtagtcgccttctatatattaggttggccctggtaacaggtctaatatgtaatgggttaatgccatatgtttgacgaatgccatgatgagttaaaggaagataactatgtgaaaggtgtgttggatgtatccctctaaggagcgtggcttacttaagagctaaccctgttttgaatagtacaccagcaaagaagcaagacgtacttatttgaggcagacttttaccaagtttcatattgtgagtagttggaaggttccagaaagcaat

SEQ ID NO: 2884 - DNA, 596 bp, Lassa mammarenavirus
  misc_feature 1..596: note = isolate LASV/H.sapiens-wt/NGA/2018/IRR_077 Z1R
  source 1..596: mol_type = genomic DNA
aatgcaagatcatctcaaagtaccttgcagataatgagaagctatcaaggcagaagttagcttttggtccagaccgaacccagaatgttgctcatggagggactgaaactactatccctttgcattgagattgactctgcaaggccaatggatgtgagcataacactgaagacaaaacggttgaatccattctaagtgatcatgggattctcactccagctttatgctttgtggtcctgacggctacaaactcactggtaatgttctaatcttgcttgagtgctttgttagatcatctcccgccaattttgaacagaagtatttagaagatcacaagaaactagaacaattaagatgacttggagtctagacgcaggacaacattttacaatgaacagatacctgattgggtgaatgacaaactcagggacacttattcactttgttaaatactcacaagaagtaatgcactataagatagatatagaggattttaaagctaggaacaaattaaggcaagggaacatagaaagtcaatttgttaagactgataagatgagattattagaggattttgaaagctaggaacaataagg

SEQ ID NO: 2885 - DNA, 604 bp, Shayang Fly Virus 1
  misc_feature 1..604: note = strain SYY3-1 glycoprotein (G), putative1
  source 1..604: mol_type = genomic DNA
attgatgaacagaaacctctaattggtaatttttttcttaaatcgctgtgtctcgcagtggtttaaaactgactaatcgggcattatcccctaaactgacctaattataccgatttctgacttgattcaatataatctcgaagcatgaacaacatgttaccctcaacgtctcgacgaaccggacagccggtggctgttaatcagttgaggcaaaccgccgtaatggctactaaccctgacattaagggtgcaaatgatacagcacgacaactagagtgtatcaatatgcgtctaactaaaattgagaagactctagaatctatccaaaataccatggagattttgagggcagctgcaggttcacctgcaccaatatatccctctgctccctcattagtcactgaggtacgaggactaccggggttagcaactccggtttattccagcatggacgctagacggtttgtataaagccaaataaacgggctcgtcccataaaaccgttaacagctactcaaaaccttttcaagtgttttaaaatcccttgtttcaggctctctatactcgtgatttcctcgtacaaattcctcgaatctatcaatct

SEQ ID NO: 2886 - DNA, 613 bp, Picornavirales sp.
  misc_feature 1..613: note = isolate tom099shi2 genomic sequence.1
  source 1..613: mol_type = genomic DNA
aatcttcagtgctgtaaagtcaatctaaaatggcagccgcaacagcagtagcagcattaggtaatacagcctcatcatcttcaacagcaggtttacaaattttaggaaattatttaggtaatgctcaaaatttagctaatcaacaaactttaatgagccatgttgagaatacttttaaagagtctggtcttcctcgttatatggcctacactggcactggtgatatgccacagaacaggtatcaggtcagcggtggtaatttctactctgctggtccagttaattctaatttgcctacatttacaactcaggcacaacaagatacacattcaggcagaccaggaagaccgtatgaagcagttccaccttttaatcaattaggtcccaacaatgaaatgcgagttttaggccaaaatgatcgtcaaggtttaggtttcggtcgatataatattcaaaataattttgtagctgggggagtaatgacagcagccacccccaggaatgcagccgctcatcaagcagctgctaggattcttcagtaaaaactttcatccttaaaaacttcggagacccggttagataattgttatatttgtttaagtctagaattaca

SEQ ID NO: 2887 - DNA, 616 bp, Wuhan spider virus 3
  misc_feature 1..616: note = strain spider133889 hypothetical protein gene,1
  source 1..616: mol_type = genomic DNA
aggggccccttcccctacctctcttttcggccagcggcctgctggtcctatgtgtgctacggacttattttcggataccagatacaagttatctccggacttattttcggaatcaccatagataggcaaccaaaaaaccttcgtgtcgtcattatgtgttaatgttacaagcaagtgtttctcccccttgcttggcgaagaaagtctaataacttccttaacaaagaaccctgagtgaagagccggtgtcaaaaccggaattggcggaaattggcttatgtcgaaactgatcagtatttgttaagaaatagtgttagcaaggctatagtattattgcgcaaacgagaattctaaatgagagtttattctgcccaaactgtgttgggagttcacatcgagaggtgtgcccttcgcgagatctgaagcagatattctcactaatcatggatgattcttgtaagcgtggtgtgctataatatcgatttactcaggttagatgaaatctgagcgtttgttataatagtcttctagagaccttgcgacgaaagtaaaggtaagctgaagtgacttccgagccgtgtgaagagaaaacggtcgtttttcccagtacttgatt

SEQ ID NO: 2888 - DNA, 628 bp, Beihai picorna-like virus 64
  misc_feature 1..628: note = strain BHJP54755 hypothetical protein1
  source 1..628: mol_type = genomic DNA
tccaggggtgatccccctggactactttgaagtattgtgaaatttttcgagaaggattgtacacatgtgaccgtgaagcgcggtctgtttaacgagcgtccttttcgaaggacgcggattgcatcgttacacgctattgagtaccgacttgatgtgcaatgaatctgttctattaagcttatttcaaacttttgctgttttacagatatttaattattctattaacctcgaccttcatatgtaaaggtggaggcgttggttttgaatatttaatattctgtattgttgaggttatcactatacattattggaagtgaaaatttcctcaatcgaggagagtttggcgttttcaattaaaaacgcattttctagataagtgtcaagaggctctaacgaacttgatattgatacttattttgcactatacacttgtattgttctgaatgccatataggcccaacggaacaaattggtgtctggatgaatttccagctagaccactctagatctgtgattttgtgctttttaggaaaagtaatatctaaagtttttcatggtttttcccagagataggggagctgtgtgaagtttccacagttcactttaaataaaccttgttttctcaaga

SEQ ID NO: 2889 - DNA, 631 bp, Cryphonectria nitschkei chrysovirus 1
  misc_feature 1..631: note = Cys-Pro gene for cysteine1
  source 1..631: mol_type = genomic DNA
tgataaaaaacaaaaaacctcttcagccagtatctgatcacattttgggcaaccaccgtcgtgttaaatgttgttggaaatatatctggttgattgtggtggcgaggcagatgtgtggtctgggggtacagcctcaggcagtgtcatctgcgatcgtaaatgtctgtttcgcgtgacggcagaacaggctaaaatcgtaatcggtaggcagttactggtggtaatatccgatgataattcttgtgaagtattattctgcccgctgtgtggattgggcgtctacactaacactaggaacatgcatactagcgaagtttacgttgagcacagcgaacttccagtgcctagacagtggtcgcacctgatgtcggcacataagacatgttctaacgcatatgacttgctgttatcgcgtggaaagttgaggacacggcgtaaggcagtcaccggtactcaggtaggtacagtattgtatcgccgagggtcggtatatctagacaacattgggccaattggcgttgaccattagctgaggggcctgatgagtacctctcaggaggacgaaacgccaatgcgtcgccccggggcaagataacagtaccaaaagttaacgtaaggaatcaacaacaca

SEQ ID NO: 2890 - DNA, 633 bp, Marburg marburgvirus
  misc_feature 1..633: note = isolate Marburg2
  source 1..633: mol_type = genomic DNA
ttcttattgttcaaagttgcaagggaagttatcttcccgagttgatacaaagacactaaacatttcaaaagcatgtatgtgggcaaaacgtaactagaccatcttgattgaagtagtaatttatttctgtcttaaatgtgattttcacttcaaaagagttaaatggtgatagatcaatctttgaaattacccatttatacattatagagaaactaatattactaacaaaaggggtctacctaacgggtatgatcgagtgatcagtctatcttataaaccaaacaattgacttcttactttttaagaatcaactaacagcatagaaaccacatttatccttacgtaatctttggcttagttggaattaacttttgttgtaattcaatacgtttagtcatagtatattgtaggattttttataagtttagaataccttaaatcatacccacaaaaaatactgttttaattaagaaaaactatgaagaacattaagaagatctttctctcgtagtgttcttttactggaagaagtattccaatcttaacttgttggatcagttgtcacttaagttgttatttttaaaattgattcacacaaagtagtttaaatttgtatctagaataaattttaat

SEQ ID NO: 2891 - DNA, 635 bp, Chinese broad-headed pond turtle picornavirus 1
  misc_feature 1..635: note = strain WHWGC1513141
  source 1..635: mol_type = genomic DNA
tctcggggcagtcggtcggggcggttagtgccatgtgtagggcgtttaaagacgcaatactattggtgcggccgttactgacttcctgtctcgcaggtcccactcccctttcccttttcatgtcgctatcttctctcccccaacttttaaactggactgattttaacgtgtaacagatgatttgtggattatggatgtctagagatatgatctccgaaacctagcttgtttcgctgttattgacgcatttgtcattcgatggtggctaagtgcccacaaccctaaacttgggtgtggtcaacacatgagtcaattcgtctgcctaattcgccatgaggacagtaacgtaattgctagttagtagaaatcgcattcttgtgtcataggaaacctgtggccgatagttggtaaccactccagcgtttaggactcagagaattttatctttctatgatttaacacaaggactagtgaggagagagtagaggctgtagaccggtttgggacctcattgagtatcccttgcctagtagcaccggctatggactccgggttggaatcccggacttggctctatacttcctgatagggacgcggctggccgcttctcactagtatagtcagttgactttcac

SEQ ID NO: 2892 - DNA, 648 bp, Solenopsis invicta virus 5
  misc_feature 1..648: note = isolate formosa, complete genome.1
  source 1..648: mol_type = genomic DNA
ttaaaattgtacgtagggaacaaccctacgtacaatggcctgagccaatcagaccctggttttacaccagacaataattggcaaacaaaaacattgggcgctatagcttaacggtgcgtcctgcccccgtatggagtggttgaatataagtgctataccctgaggagggaataatacctaagtctatgagaaacacattatttatcgacgaaaccatttaagctaaatgattatgatttttctataacgacaaacagcgtaaactgtataaacttacaacaacccaacggattacgaaccttaaagtaactgttctagatgaagtctagtagtctccaaatattcccgtgaaacggatgatggacggaacagctctattttaagacgtgaggctttaaatattgataattacattacctgagagccctctttatgaggtttgattattaataaaattagtaccaattcttgatagaatttaagtatgttaacaatgctgaagacatgtatttcgattgttaacctctacatttctatgaaaaggatatgcgagtctcggtggatatcgcattatggtcgcagtcaacctgcagttttattaatcccgtgtcggagcggtggtaatggagccggactactttgccaaaa

SEQ ID NO: 2893 - DNA, 650 bp, Riboviria sp.
  misc_feature 1..650: note = isolate wwb174shi05 genomic sequence.1
  source 1..650: mol_type = genomic DNA
cttgttcttacactctagaacaaacatttctggattctccaaatagaacttcttgaaaacttcgggccctccctttatggcatcaaccagggcgggcactccgtattccaacacatcgggcaggcattcccctttggacctccaatagggtgctcctgctgaggcatttttacttgttgtaacatctgccagcaattccgacaggtcttcagcgtgccagcttttaacctcacccaccggcaacagcttctttagagtggctactttcgcgggtaccactcctgtcgggtccacttttatatcgacgcacttacggcttgtcatcaaactaagcctattaacaaatccatcaacggttccactcgagtatatggtgctgttcattgactcggcgacctcctccggagagtacacccgaacaagcccactcactgttgccggtgggtgaggttaaaagctggcacgctgaagacctgtcggaattgctggcagatgttacaacaagtaaaaatgcctcagcaggagcaccctattggaggtccaaaggggaatgcctgcccgatgtgttggaatacggagtgcccgccctggttgatgccataaagggagggcccgaagttttcaagaagttctatttggagaatccagaa

SEQ ID NO: 2894 - DNA, 651 bp, Umea virus
  misc_feature 1..651: note = isolate OTU2.IU18 RNA-dependent RNA polymerase,1
  source 1..651: mol_type = genomic DNA
tgaggtcctgatcgcctacccctagcccccttgagcagaatctcataatcccttgtgtaatccccgtctgatgcctcctcctcttgaggcagctgttttaaaacctctaccatgggaatgagatacaatgtttagcactaaacctagacgatcaggacacgatgatgacgatgacgacgaggtgccttatgtgcacacccctagtacttcaggtgtcgtcactaggagggtaatgtccttggacgaggtgattcttgccaagctgaataagctcgaggcagcagtggccaagataagccagacccaggatgtcatggcggcagagatgaccaaaatctcgacggtgctggctactgttcaagcaatcggaggacgcgagagtgcatttagaatcagcaagatgtctgatggccctcaggactctaaacggaacagaccgtagctcgtctagaagacctgtggttccacaaaaaccaccataaacaatattaacaaaatgctgttttaagtagatgatcggtccgatctcgtgcaccctgttaagggttagctgtgtctgttttaaaactccttttcttctgaagagaaaatggaaaatataactactatcctttttatcataggagcacgattgctggacaaagcgataaa

SEQ ID NO: 2895 - DNA, 652 bp, Linepithema humile virus 1
  misc_feature 1..652: note = putative capsid and putative RdRp genes,2R
  source 1..652: mol_type = genomic DNA
gtgcagtttttatactgcacgcacaatgacccgctaatatatcggattctagtatttctagacaattatatattagacctaatttgttttgttaatattactttcatggtctttaaatgaggcgaaaagtaaatttaaccatcctaattgtttgttagtatatttcatggatgtaaaatgaggcgaatcaaactaacaactattttaatcaattccgaatactatgacgaaaccatttgaatactattcttgacctgattatgatataacgacaaacagcaattattataaactgtataaacttttaataacaacaatggactacgaacctatatgtaaccaagatatcgatgagcaatctcgatcccaatataagagtgaaatctttgagggccgttttggcaatgtatatagacgtggggttttaatggctagtaaccacattacttgtgatgaaactcaataactagtactaattcttaaataatttaatcatgatataaatgctgaagacaagtatttcgatttatatcctctgaatttattaaagaatatataattactcggtggtaattatattttagtcgcagttaacctgcagttatagagcatcctgtgtcggagcagtagtaatgcaacctatcaacgaaac

SEQ ID NO: 2896 - DNA, 653 bp, Changjiang picorna-like virus 6
  misc_feature 1..653: note = strain CJLX30470 hypothetical1
  source 1..653: mol_type = genomic DNA
gatatacacttattagtgtatactttatttgcctgaaccgatgtgagcagtatctcccggagtgcggtaaccatttagcggtcccagacacagctgtctctgtgtaaaacgggtaatttcgggtagggtttattcatccggtcattttattccgtccattatggacttcatccatcattgacattttatttttgtggttggagagctgttagaagaagctctcgtttgcaaggtaggctttattttaagctgaggttgacagatcatatctatacgacactttggtgttaagtgtttagtcctcaggtctagctatgcgattcgtagtctagaccttaatggcagtgaatcgtacagtagctggtggcaatatacgtaagaccaccatactggcattccagcagtggaatgtgacgcatccttagatagttgatgctttcatcctatcttccgctatggggcatacccattcatgattcacaggtttcccgttatagtgcattttgaaaacgtttctattgaacacgactgacaagcatgttgggggaatcctaataggccccaacggaacactcgcagagccgttaacaattcattagagtaaatcgttagtagagtgtaccggtagggcactgtcattgaaaatatttcgc

SEQ ID NO: 2897 - DNA, 656 bp, Ranunculus white mottle virus
  misc_feature 1..656: note = isolate E_Meta-contig815 polyprotein1
  source 1..656: mol_type = genomic DNA
ataaaacaagcctataatacaaatctcctgaaaacatacaaacttttgagataaaatttcaaatacaaaatagtcaaaacatgaatagtgctgattctagaattattccgatgaataaacacaaggaatttgagaaggataagctaagcttgcaaaaaatagtgattaatcctcaattgcaagaaagaaacaatcatttccttgatatattatcacgatacaaaactagttattgctcaaaagaacgttttttgtttggatcatggttaattaacaataacttagtcacttctccttttagtcctaaagcgtttataataattaaaacgtcaaatgagctaattgattatgatttgtttgaaggattggaaatctatttgatcacttctcttgaatttgcaataagttcgtatgctttacatctgttcaaagaagattttattatgcaagaaaaaagaggagaaacctcattgatcctcaattcttataaaattcctaagtactccctaaaacttgagaaatcacaagagaatatcctcaagaaaatcaaagaagactatagttatatcattaaaatgaataaatttaaatgaggagttaaaacaaatcaaccaataaatttgcatgaaaaatacaaaagaatcttgcggcttgat

SEQ ID NO: 2898 - DNA, 664 bp, Hubei picorna-like virus 47
  misc_feature 1..664: note = strain WHYY21982 hypothetical protein1
  source 1..664: mol_type = genomic DNA
cccccttttcaacggcgctggcaaattcgccgtattgactattatgccatcctatatcagtcatccgtggcctttatatcgattcatattagtcaaatatttgccaaaactttactttcagtttagtttttcagtgtattttctttttgtgtatgtacgttgtattttctatgtaagcgtttgtcgcgagtgttgaaaattctctacaattacaatgtgtgaaaatttgaattatgctttataactctaccctgtattgtttatctaagtagtttcggttgaatctaaattggtgaatttcgtagatcatgaccaagcattttctctgaccctatgtatgttaaatttacgcaggttaaaagttattttagtgtttttcgagtgagtatcagttgtgttgatgaggcttcaaattttcggttttgacttgacacgtgaaaacccattatttgattctaagtgcttaactgaattctaggctctgtacgattgcttgttaaatccatgctgtcaacatgtgctacgcggctgtagcggtacaatttcctagtgtaaagaatggctggttagaacagtccccctcctaaagggaacctccctggtcgccggagtatgtaaatgcgacaaatgtctagacgacaagtttctttttctacgtatcact

SEQ ID NO: 2899 - DNA, 669 bp, Oryctes rhinoceros picorna-like virus 1
  misc_feature 1..669: note = complete genome.1
  source 1..669: mol_type = genomic DNA
agagacccccttttcaagttttgtgtgtgattacattgcactttggattacaaaagttttccaagtttgatcacatgaaactgacaaaactcgacttttcgttttgttttgtcttgtattttgtttgcatgtgtaatgcaaatatgtagtactgttatgtacttatatatcgaagctataggtatttaccgaaacctattccatctgatggctatggttgtggttaagtctcataaacttaatcaccattaggtgagcgtctgttgacttaaggaatgatacagcgtttaatctcctagtgtcgctttgatgttgtgtgacatttcaagttctcatacttgtgttatgtattgcggtttggtagttgtcacgtacacaactactgggtttgtttttgcgttcagatgtctagacggttagtttgtcttgttgtatagacccgctttctcactttagtgactttgcgttagtggacattgcgcatcgtgttccctcaaaagcacaaatgaatttcatcgtttcggcagtgtgctgcaaatgttagaccaagttgtcacattgcagtttccggatatttatatccaccgagcgcggacgtgaaaaataatccgacacattatctcttacgcgtataaggggatgctaggattcatttaaatcttacttatc

SEQ ID NO: 2900 - DNA, 670 bp, Soft-shelled turtle systemic septicemia spherical virus
  misc_feature 1..670: note = strain NBEC1
  source 1..670: mol_type = genomic DNA
aggtggggggggcgcttatgcgtcccccccttcttttcccttcctgtccgatgtcggtctgtctcctgcggtgcgtcgctctatttagagtggtaatccgtgggttcagtactggttgaggatgggttgggtcccattccccctccctttaacgtcgctatcaacttctttgtaaccccacactttacatggactgatttaatggcttttgatgtttttgaggattatggatgtctagagacatgatctccgaaacctaacctgctttgctattattaacaaatttgttatatggtggtggctaaacgcccatgctcctaaacttggagatggtcaccgtatgagccaagctgtctacctaatttgttatgaggatagtagcgtaagtgttagttagtagaaatcgcattcttatgtcatagggaacctgtggccgatagctggtaaccaacccggtgtgtaggacatggagcaagtcaacactctatggtaaacataaggactgatgcgagaagagcagaagctgtagactcgtttgggacccaatttggtatcccttgcctagtagcgcgagctatggactccgggctggactcccggacttggttctgtacttcctgatagggacgcggatggccgtctcgcattagtatagtcatttgcaactcac

SEQ ID NO: 2901 - DNA, 678 bp, Cragig virus 9
  misc_feature 1..678: note = complete genome.1
  source 1..678: mol_type = genomic DNA
cgcgtgcacgttcacacgtgcacgcggatatgtagatttagatctatagcaatactatagttgatactttttgatggatgatatccaatttatgagagtttcgactactcatttttggattatcacatccatacttaaagattgattgttattgagatacatttacttcttcagtacttattaggtttgaatagccttaaataaactacttttctaagaaatagacacttaatgcttatagttgtaagctgcaaatactgtcttgaacagtacaactaccccccttttttctattaatcatcatttttctcgtagaaaatgaagatttgattgtcataattgacatctcagatgcatggcttgccctgtctgttataccggataatatccgttgacgtcttttgtgttttgatgtaaatataacgaaaacaccacacatacacacccgtctcgaaatcactttgtgttactagaggcggggaaccgtagagtctagagttatgtcattttgaaggagcttgctcctagatggtaactatacattttcttagattttgagtttcgccacttattatccttgatagagaactaaaactagtctcgtttgttgaacaattttcttttgactttgtcagaagtttatttgttcactcggttcatgtattttaatttaataac

SEQ ID NO: 2902 - DNA, 681 bp, Rhizoctonia solani ourmia-like virus 4
  misc_feature 1..681: note = putative RNA-dependent RNA1
  source 1..681: mol_type = genomic DNA
caaaccgattttagtcggtctgtgtcgtgctcatcaaactggaaactgagaaattagaatctggtagcgtgaggtgaatggatagctcgtccgttcattgcgaggccccccctgagatgacgaagggagagggtactgtgcacgggtaaaagaagaaaacactctatgatccgagttgagtgaaatcctgttgtgacagacgccggttgaggcagtcgcgcagagaggaagcgattcctggatatagaggtatcggcaatactgatcagaggcgtgaagacgcaacatcagatcaaacccaacaaaccggcacaggcgttatgaccctgtgttacgacagaggccctactgtccgggacctgagggaagcgcgttcggctgagcgctgccggctttatgcccgcagaggagtcgtcagaggttgctgtggagtgaccgccgtgcggggtggtggcaatgagtgccgccgccgtcagcgaggggaggagtgagcccaacccccataccaaatcgcgaacccggtgcgtattaacgcggaagacgccggggcctgtagatccagaaacgcggggaaccaaatcccgcacaagaggacgcaggaaaaattctgcctcgttttggctagagcagattgaagtctagactgacactgacccgggcttggaattgccggaccagtgg

SEQ ID NO: 2903 - DNA, 683 bp, Hubei picorna-like virus 17
  misc_feature 1..683: note = strain horsefly124179 hypothetical1
  source 1..683: mol_type = genomic DNA
atgggccttaacccatgcaccttctttcgcggaatctatccgcgtcgctttaatgcgagcaatatagacgtgaatatatacgataattatatacatatatagttttagtttggtgtccatttgacattattatctttttatatatgattttgaacaatacatgattcaagcattatcttgccagagttgcgaagatttagttctgtaggactttgtagtgacttaagcacctaatagttgtggtagaagattgtagtagtttgtttcgaagctagatgaaattgtaggctgagttcagagtgagctagaggactgccatcctcgttgtagctattctaactgtactgtttctagttaactagtgatgagaacaaattagtactatgcttttatgtattctgatgaacggtggttttgtgaattatctgttgtgtgttgtgatattgattgtgtaaattgtgcgttttgtcgatgaagatgagggttttggtgtaagcagcaaaacttagtttgatacctcattgtagactgcaagcgttcgaaatcgtgaatggtcgatcggttttctttttatgactgttttatagagtttctagagtgattacaagtttatttgctggcaggcaatttttgatttaaaaggtaaaatattgagagttatttgttaaataataaattacaca

SEQ ID NO: 2904 - DNA, 695 bp, unidentified
  source 1..695: mol_type = unassigned DNA; note = Potato virus Sisolate 18-1113-2, complete genome.1 sequence
cagcttaggtaatcagcttagtagtattgaataaatggatgtgtttttgcaagttttgaataaatacaagtttgagcgtgttagtagtgctttgaataaaccaatagttgtacatagcgttccaggtgctggtaaaagttccgcaatcagggaactactgaagttagatagtaggtttgagtgcatcacccgcggccggccagatattcccaatctagagggtgctttcatcaagagcgaacgtagtggtgaggataagctgttgctggttgacgagtacatagaggggcccgttccagaagacgcttttgcaatctttgcagatccgctgcagagcacagctgttagcccatatagagcgcatttcatcaaaacactaagccatcgctttggcaagtgtactgcttcgctcttaagggatttgggttgggacgtgcaagctgagggtcaggattcagtacaaattgccgatatcttcacggttgaccctaaagaaacagttgtttactttgagccggaagtcggggagttgttgaggaaccacggcgttgaggcgaattgcattggtgaggtgcgaggagctacttttgagcacgtgacgttcgtcacttctgaaaacagcccactagttgataaggccgccgccttccagtgcttaacgaggcacaccaagagcttgctcatactgtgcccag

SEQ ID NO: 2905 - DNA, 697 bp, Hubei picorna-like virus 5
  misc_feature 1..697: note = strain WHBL70549 hypothetical protein 11
  source 1..697: mol_type = genomic DNA
cgtatatgagctgatcactcatatacgcacttacgtttctaggggatgctatttagcattcctaggatggtatccagaccaatccgagttctataacacatttggacctaactaaaaggcctaaatggtactagggagacatggaattatgtgtgaacgcacaaagacagagctacacgggctgcgtcttttggcgtatgcagcgagtttataacgtgtctttgatgcaatctggattagggaggggacatttatgtcaccctccagtcaacgatcacaaagagttattttgcttccgaactctataaataaaggaatataccagacccgaggctaccgcctcacctttattgtctattggcaatatttaccctactgttggtgaataaccaaccttattgtatttttatatacagtatgacacccactcaatcattataatcgaattgatgaaaaattggacaagcatgctgtgatgatgttttatgaaatattagtaaatgttttagcttttctactttaggaattgaagacgataagactaggcgcacttctctagaatctagatgggcaaaccccaaaactagactgatgtgattgcgttggttgccgagtccgcggagaatatccgttgctcctttagcgaaatctattatgttgaaattatgaattgattcattattggtacgaaatctca

SEQ ID NO: 2906 - DNA, 698 bp, Beihai picorna-like virus 61
  misc_feature 1..698: note = strain BHBei76813 hypothetical protein1
  source 1..698: mol_type = genomic DNA
tggggagaccccccagtcaacattggtagtttctatcaatgccttcgccaggatttcttaactatgataaggtttaatcaccggttcatgcattatatgatagtgcaaaatttttgagtaagatcaacatcggtctcatagatttttctctatcagttaatgttacagttacgtgaattgaagattgcgggtggcgcccgcttttgggagcatctatgctcccgcccctttttgagttttagtgttcacttttgtggacgtcactcaattatgtctctctatctagagatagctctagatataatcatttgtcagagagaggaagaacaaatgctaagtgtatagttacctgtagctccgccaagcctacctggataccttagaaatcgcggttttaaccgcattattggtctggcaaaccttctttgtttgttaaccggaggcaccaaggttaatgaacgttaaagtttttacgtgtcgcaaaccccctttatcgaagcgtaggcttcaacctttttgatgatactcctgatgagagtggattgtttgatgttgaagaaacagaatttgatcgttgcgatgatgatcgcattgatgttgccgaattgcaggcattttttgatgaggaggatatcggtcgaagagccgatgagaaaactgttgaagagacagttgaggtgaagcggcgtaaaggcaag

SEQ ID NO: 2907 - DNA, 699 bp, Human parainfluenza virus 4b
  misc_feature 1..699: note = strain HPIV4b/Seattle/USA/SC0496/2019,4
  source 1..699: mol_type = genomic DNA
ttgcaaccaagaggcacattttgcaaatcttacctagatgcatctagacaaatcgcccacaaagaaaaacaaattcccaattcaccaaaagaaatccaaaatcaacggagctacagctatcctgaaacaacactgcgaccacaatgacattcctcaagaaataaaggacaaatccaggaacagaaaaaaacagcccagaacaaactaacagacagagaaagggagaggcaaacccgtctcagcaaaatctcccatcaacatcactcgaccaagaccgaaccaacagcacaaacgcagaaacccactaccgcaaaactacagaaattctcccacaatcccccaccaacattcaccaacaaaccagaaaatcattcaaccaggcaacctccacatttcaagtttaagaaaaaaactattataggggggaacgcacttctcagctctaaccacacgaggccttgtcttgtaaaacaagatcaatctcacacagttcaaaacaaaatctgactacaagtagaacctccacaattcaaagttagaccaacgatctaacaacaactcatcaactagcaactatcattgaactaaacaatccagaaggacattacatcaactcattcgtgaatctccaaaagaaataacccaagtaaatttacaatctactctttaattataaataaactgaagtaggtcacaagg

SEQ ID NO: 2908 - DNA, 702 bp, Human rubulavirus 4
  misc_feature 1..702: note = strain t146a296_HPIV4, complete genome.3
  source 1..702: mol_type = genomic DNA
caaccaaggttcatactttatgaaattcatctagatgctccaggaaaagccatccacagtgatgcaccgaccctcatctcattgaaagaaactcaaaatcaacaggatcacaaccatcccacgacaacaccacgcccacaacaacgccctccaaaaaatgaaagacaaagccaagaaaagggaaaaatggaaaagaacacaacaacagacagagaaaaagaagaagaagggcaacattgccctggcaacatcactcacaaacatctcccaaccaagaccgaaccgactgcacaggcacagaaactcaacatcacaaaaccagaaatggccctccacaatcctcccccaacaatcaccaacaaaacaaaacgacacccaatcaaacaatctccacatttcaattttaagaaaaaaactattataggggggaacacacttctcagccctaactgtacaaggccttgccctgtgcaactgagacacccccacgagcaccggaacaagacccgacaacaagtgcagcctccacgaccaaaaaccgaatcaaagatccagaaacagcccatcgcccagccatcatcatagaatctaacaatccagaaagacgctacatcaacccagccacgaatctccaaagggaacatctcagacaaaaacacagcccactctccaattacgaataaactaaaataaatcataaga

SEQ ID NO: 2909 - DNA, 702 bp, Big Sioux River virus
  misc_feature 1..702: note = isolate S28 nonstructural polyprotein (GP1)1
  source 1..702: mol_type = genomic DNA
gtcatctgggctacaactgacgcttttgagtgattaacccgcctttatatattattgccgattaaatactcatgattcttgtgtgtgtttattttggacaaggaaactagttctgaaaagactttgaagagcgcgataacgtcgaacttttagtttgtataaccaggagctctgggaactgtcgttgacaggaaattgagaccgttgtgtatgctttgtgatcttcaccgtctcacccacctacctggacgattgtcgtccttggatttgagcctttagaaaaggaagtccttgaattatagaggtacattagtgcgttgtctgccaaaacaggtacgtacggattacactataaggacgtctagagttgttcattttgcccccttaaccggattcggcgaacactctattttatatacccacccatttatagttaaagctttataacttaaaagtaagccgactggaaatcgttaatccaattttattttattttattttatttaatttatttcaatatagattattttagatatataagaccagtatttagctgccttaagcaactattatacttattttttgttattcttaaatttttaggagctaaggtagcgttattagctattgcacttttatttattttaggaatattgtccccgaggaattatttgttaataacactttgtttgtcattatata

SEQ ID NO: 2910 - DNA, 708 bp, Haartman Institute snake virus 1
  misc_feature 1..708: note = isolate KS111230Crimig20111
  source 1..708: mol_type = genomic DNA
ttcaaaagagggtggggagttttctccccacccccttttggatacccatggtgcgggggtataaattaccgcaccccctttgctgtgcccagggtatgggcacctttctgtctgttttgtttcgtttgtctgctttatgtgtgctcgtcccctatagggcactcatttcagctttctttcattctttcttttccccggttctcaccttaccggaggcactggccgttgcgcccggcggggtcaacctagtgattagcactaggctgtaggtgtctaaagtggtgacacaaagaggtgtttcctgattccagcactgttaactgatacagatgaaacctgattgatcttctagaaggggtaggctacgggtgaaaccccttatcttaatactactatgtagagatagatccagtaggttaagggcagtggataaggttgagttcaaatggacaataaatcttcaacactggtggacccaatctcactggctagttgccttcagtgtggattctgtggaggggtgtttcttctggatagggaaccatcacactggtgcctgagactcagggtgtctggccttaaatcacagaagccgtatggtttttgtggcctagcttctgcctctaaacagactctggggcccaatgacaccctgagcccttcggggtactcaggggcatttaggttttccacatttcaaaatagtca

SEQ ID NO: 2911 - DNA, 710 bp, Sanxia picorna-like virus 12
  misc_feature 1..710: note = strain SXXX24153 hypothetical protein1
  source 1..710: mol_type = genomic DNA
actgcatctattttgccacgctccacattggcccgtgtatatggctatgtgctctggattcgtgactaattcgcgaacggtttcccgacgccgcctgtcgagcgctttgacgttatcgtagagggtttttaaaagtcgatgagtggtacctactaagtgacacaattgatatccgtttctgttcgcagtactaatttagagtagtttcgatttattttcagcattgtgtccttttcctttagtttagtctccatgtcatcgccgttagtacacggggtgccgtttgcggaggcaagactaaccacttttcaggtcaatgagctatgattgactgaggatagcaagtacggaccacgttatgaatttaacgtgatttacccgaaggttcgctccaacggggttttaggcttgtgaataggctgccaagccgttctttggaacgttgtttacgatttgattttgaagcttgggaatggcgccttttgaaggccaaccactgcttgtttcttcttatggtctgatggggcgtttttatcaccccttgtctagaagcctatttggctttgcacgacttcgattacatgcaacttcataccatgcggcttttgcctcaaacccacttgggggggaacgccccgagcatcatggtggctctgatgtcataaccactatacaaaacaacaactatcatacaacacaacttaaccaat

SEQ ID NO: 2912 - DNA, 715 bp, Picornavirales sp.
  misc_feature 1..715: note = isolate rfb200shi2 genomic sequence.1
  source 1..715: mol_type = genomic DNA
taaatcgtgagattgagaataaaggtaagcgagatgtagccgatcaaaatataaaaggtaattggttaatacaagatactaaaaatcgcggtctattagaattacaaaaattaatcggcagtcaaaaagaaaacataacgactaaagaaataaatggccaattagaattgttgagagagaaactgggcaatcaagataagtggaccgaagctggacgtgatgcattcactaaagctggcctcccggaatttactttctgggaccggggatctagaggaccactcgatatcggatcaacgcgatcatacatcggaggcaacaattttgtcaattcctatggaggacctgacaccaaactgcctaaaaccggtgagtcgccgttcgcagatatgaatggactatcccgcccgtactaatcttgttgctcataacatcgatcaacaatctaagctgtcttaagtggtttgtcgggtgtcgcaggctactgttccactcggggtcatggtgccgcgcttaagcgtttcactgtaaaaccatttcattcagcatcaaaaagaaaaatacctaggtgagcttaactcaccgtcatttaagctaaagttacaaaatttaaattaacttacgttctgttttcttaacctcaactttcaaaattaaagtaaagaattctagtaaagtaaatttcaaaatttgtcatccaaaaaaatcatggatc

SEQ ID NO: 2913 - DNA, 727 bp, Beihai picorna-like virus 87
  misc_feature 1..727: note = strain BHJJX25970 hypothetical protein1
  source 1..727: mol_type = genomic DNA
ccatggacgcccctttgtaattcgtcgttgcatgtatttagtatgccgttatacgtattcccccgtgagaaacggtcgttgcgtgtattcctcatgctattatatgtattccccgttgaaggaatcctgaacccttattttacccatttacaaaattttctaaattttatatatttaattaggatcataccttttacatcgatttgccatacacaaggtgtaattgctatgataaccggaatgataccttccggacagtggaatctgttactttcccatctttaatcttcagatgtaaaatatagctagactgataccgtctagacagtggaatctgtatctttcccatccttaaactttggatgtaaactaaagccgccctgatatggcgtacctcgtggtgattcgctcccataaggataaaactatcaaggttctattttggacattttaacctaaagaaaaatgttctattggccagatcaatctcacttactcaacatttgtgagaggctatttgcctgtgcgttgtccagacccagatgttaatactgcatgacccactacactgtggaataagcaaaggaaatactttggtataaatacctccttattcttgaacgcaaccaggatttcgttccctggcagtgatatgctcatgtaagatctcatcaactgtcgcaaaggacttaaagttattatctctacgctgtggcttaatacaact

SEQ ID NO: 2914 - DNA, 730 bp, Apis rhabdovirus 1
  misc_feature 1..730: note = strain Apis/USA/A, complete genome.3
  source 1..730: mol_type = genomic DNA
ggccctaagaacattgaccctgaaaacaatagacctactcatccatccatatccttctgaccggttttagccaaaaggagcctttaagaacaaatcatccaatccaagcaaaacctcactctagaccaaaaaacccaattcttctcctcaaccacctatgccattgtagtaatcttcccttctttccgcaatagagaccagcaataatctgataatgcttttctctctgatttccttaatatcacgaaaaacctctatgtaacggagaaaattacaaacttctaacagcaataattttttagatctcatttttcaaaaatttgtgtcaaatacaaacattcgataggtctcttactcaaaataaaataacaatgtctattaaagaaattgattaataaacactaattattaaaaaagaatgtttagaaccgatagtggtaaaaaaccattgctcacgaaagtatagaaaatttgagagagctgaaaaactgcattaacttttcgggtctattcaatacaacagtccaaaccaacctcagataaagcaagccttaacaatcaacaactgcgtcatagtgattcgaaaccgtagatccagcaatacagctcggcccggtaggaatttaaatccgagttactctaaaaatctagtcaacgacacatcaaggaaccatttgtccaaaatcagagtccccgaacgcataccacattccattaccaaaacgcaacg

SEQ ID NO: 2915 - DNA, 730 bp, Piura virus
  misc_feature 1..730: note = strain P60 hypothetical protein 1, hypothetical protein1
  source 1..730: mol_type = genomic DNA
ataaaactatactaacgtattggcttatcaggtttgtatccaggtacagatcatagtcggtttccatccaggtgggaactgtataccggcggctcgtaaggcgagttgctgtaaactggtacgtagccagactacgtactgtaataactggagtcccgaattacgcgactctgtaaaccccggtgttccgctagacggatcactgtataattgctgctcatctaggtgaggagtgtaaactgaataacgttaagcgctattctcaaacaccacgacgttctttcgggagcgtcgtttaactgctgactttctagaaagtcagtgtaaaaattccgcaagttcgcttgtggatctaaaataggagaaactttcgaggtttctcccgtctgtcttgtgctcagcttgcttttgacggacagtgttgcacacgcgttgttacagaagaccgaattttgctcttctacgcctcgcctacgcttcacatctctgtctctcgcagccgcactgtcttcgtgctttgcgacttgatagaacaactgcacttccatcatttggaactgctgaggaccggacttgctcctcacgcacccaactcgttgttggtgcatcgttcttctttcgggaagcactgtctcactgtctccggatttcactttccggggtctgtctagcgctctactgagcccttctctcttcgtctcttggccaaggacgattatacactttcatc

SEQ ID NO: 2916 - DNA, 736 bp, Wenzhou picorna-like virus 20
  misc_feature 1..736: note = strain WZSBei68985 hypothetical1
  source 1..736: mol_type = genomic DNA
ctgggcagtattgcccagcaatctcttaaggagtttctcctttaacaatatcgcaacaattttatgcaagtttggtgatgtctaaaaatcacccgatcctttctatcttgttctttacgacttttctataatattattttattaatcatattataggcgagtaatataatatggatttcacgaaaaatattatagttctgattatggtcattttagttaggatgtgccttatcttgttgtcaggcttggtctagccttgatagaccattttaaggtttagtctaacctctaaatggactactcaattgttttagagttttgttggtgttgctagccataaatagcacactcggattgttatccagcgtcattgagtggattaacttaagcaattctctctatataattttattaatttaattatacttactgtaaatgtctagacgtgtacttgatgttttgccttttcggaaagcgagtataatgtaatcttttgaaattaggtaaacctgtaatccagagagactgatcagtagatatttcgaatgtaacctttatggtgattagtagaaagacctttcattatgagggtcctgattaggtaaattattaagttcacggtacaactccatctgttttactattaaacatccagattgtaatcctgtttttactttaataattttattttcatctgacttaagtaaattaagacgttttaaattacttttattca

SEQ ID NO: 2917 - DNA, 745 bp, Plasmopara viticola lesion associated tombus-like virus 2
  misc_feature 1..745: note = isolate1
  source 1..745: mol_type = genomic DNA
ggtttctagaaccgcttgaagaaatttcggccggctagcatggtatcctcccctcgaggataattctgcgaaccggtcagaaaggtggacctaccgcatatgcacaaacatgtgcgggggggctggtaatatccaccacaattctagatgaggccgtgtcccgcggtgcaagtaggcttggctccggcttcagcggcttgcaagggcgtatacgggtccgctcgtgtacgctaaatgggatcgcattggcatgtgcaaggtacatgccaccgcttatagggacagattgctgagtcccagttcacggaattgaacttcttccccgagaccggttgcaagtctcaaagggtcaaggttacgtgcgccttgtgtcccctcctaatcgcactactgcaaccctcatacggttgtgggagctcgaactggcacccacggtggtggaccggcattaagttggttcgagcaagtccggtcccagacgtgtgtggtatccacacgggtgtagcaaacacctaaacagtgccgcggaccgtgaaaccgaggacaacacgggttggcaacaccagccgccctggcagagggtagaaactctgctgtcacgcatctgacgatcacttcagtgatgccggtaagctaaggccgtaagccagccgttactccaagcccacaattcgcgtttgtgggtcataacgtgaggaggtcgcggaggcggttataactcaaccacccccccaacacaacaatc

SEQ ID NO: 2918 - DNA, 746 bp, Wenling sharpspine skate picornavirus
  misc_feature 1..746: note = strain DHBYCGS187421
  source 1..746: mol_type = genomic DNA
tccgttataggattatttggacctctatattgattgacgagaggttaaacaatgtgcgtttgcttcatgatttattatgttgtgatcgttggtcttcttaacacattgatgtcaatcacccttttactttactttgtaactaagtttcatacatttctttgaaattctcatttacaatattgtcgagctgattcacatgtttcatttacttttactacaaatctaaatgttccacaatcatattttgtttattcataatcaaggttgtaagtattatgcagggcaacccacgcagtcaattggtcactcatgaagtggctgtggattaacgcctgaatgtatttgcttattaatatcttgttttacgaatagataaattatgtggtctttttaaactacccttgttgttaattgggtcgaatcatcgcacacataatgctattttagacaaacgttgttcgcgagtatgcacggtattggaccattattgcttgtcattagcaccattggtaacaatgatgacaatccccggttttcacttaagacagctccgcgcttcgtgctgtgtttgagccttgagtgttgacgtctgggatgggtggttgtgctccactttatctagactgtgtatataagttagcaagctgttgctttcttagcattatgtggtgggcccgaccacaaagggcggtgggatgtgccaccgtaaataatcatatcaaaaccctttattttaatatgtagac

SEQ ID NO: 2919 - DNA, 748 bp, Beihai mantis shrimp virus 4
  misc_feature 1..748: note = strain BHXG23944 hypothetical protein1
  source 1..748: mol_type = genomic DNA
catggtagtacccatgcagcgaatctacgtaaagtgtaattaactgacacacagtgcccatcttttgcacactgtctcttagtttttacatgtagttttaatcaaagtacaatttctattagtttcttctactatccttttagttttagatcaaaaccctaaaaactattataattttaaaatccaaaaatattctagttttaagtgttgagctctaattgtgatacttaaatggaaattgattgcgttggtgatgattttgatgacggatgtacctctattaggatcaagtatggcgacatactccttttggcacgggaaccctgagaatgactctagacaatattaatagaagtttttgttgatctcttatctcacctctagcgaggttaaagttagtaacacggttttatgatgtgaagctcttctttctcttttctcatctacgagattcttttattttacttcacattatttatcgtagttacggcaatacgttacttctccgggtgttatggcgtccggtaagttaggtatatgtccacgtagtaatgcgtggagtccgccttgtattctgactgtggtgagtataaggtgcctaatgtggagactaaagcttattgcaactccaatccacggagcactttacttaacgtatcgtctgttgctacataacttgatacttcacgtgtagtaataaatttcttgaaagtatcgccccttttctttcttatatggtgacaattat

SEQ ID NO: 2920 - DNA, 752 bp, Rhizoctonia solani hypovirus 1
  misc_feature 1..752: note = isolate BR20 polyprotein gene,1
  source 1..752: mol_type = genomic DNA
gctggctagaattttaaaagaaaacttgcgtaggtatgaccgcccaccatcgcgttagcaacgtaagcggcacgctccttccttggaaaagaaggattctaagcgtccagagctggcacctaaggaggtgggcagtcggaattcggtgtgtcccggaactgacccttgggcaaggcgtgagcttcactggacctgtagacgccccggtgtctccatctctagacgaattttcctgacttaaagtcaactgtatgctacccgagatgttggaaggggaagctagaaccggggactcccggcatgttgtatacgctgaaaccgtaacgggttggggccgtccgcgcctttagctgttaacacaacatgttgggtttgccaaccgtaatgggaaggcagcctagcgggcctttaggggcgatgctttggtcctcccgggtgatgaactgtcttctgattggctgcgaaagctgtaccacagatgttcaggggattcatcgggggttaaataccggattcttccttctctcgtttcgggctgaaaccccgcagggaatgctttatggactttcaagaaaagtaccaccgtgatggaccggagatccaggttaccagatgtggcagagcttcctaaaagcggcgcccacgcccagagtacaacgactattacacgtataactcgacggtgctctcagtaaagacgggacactaggcattgaattcaagatttccgacttcccaattctcccttcgcc

SEQ ID NO: 2921 - DNA, 761 bp, Beihai picorna-like virus 100
  misc_feature 1..761: note = strain BHNXC41148 hypothetical1
  source 1..761: mol_type = genomic DNA
cttctcacgctaaacgtatgattcttttgactttggaaacccatcctggtacccgcagtgctatgctgttcagtcattacatgccaaccatgcactgctgcactttgatgcagatgcccatggttgagatgcaattgatcaaagcagatgcccactgatgatattcagtcgtgtttccatcgtactcacgagttatcctggtgcccacaacattatgttattcagtcctcttgtgccaactatgctatgttgcacggagatgcaaatgcccatagttgagacattaggatcaaaataaatgcgtgttggtgacattcagtcaacaatctcacattctcaaaaatttcacaaatcacaaataattgctggtatcaataaatttgacactggtgcgttataatctaagtatgacttctggattccgaatgaaggcctaaaacctgatgtgcttgaaggaagtctagacataaaccggcgtagattcggcttgtgttggctgcacgagtaacgattacaaaggtgtaaggtcaaatacttattttatagtgtcatcttttgacaatttattggtaatttgcggtagtgagctaagtatggtccagcaaagccatcttagtttgaaacagatctaccatatattaaactaattcctatggaatcttgtatggatattggcgaaaacccgatacacgtagtagacggctagtagtcaagtaaatcaactccggtcgatagttatccattgatttgggtagcggtcc

SEQ ID NO: 2922 - DNA, 761 bp, Wilkes virus
  misc_feature 1..761: note = isolate Antarctic11 polyprotein gene, complete cds.1
  source 1..761: mol_type = genomic DNA
agcatacatgctatacccaaattttaacatcttttcttatttattctagaacaacccgtgagacggctaacccccgttgatcggcatccctagaatttagtacataggggatgaccccctatggaaccccaagggaaccctacccttacccaacgcacctggtcctcatgcgtttaatgatgttggcaccgcaaccttgcggccttgctggtatcaatggacccctaccacctaacccactcacttgacacatgtggttcgcccacgaaaccccctttgtgtggctagcgccatctgagaggagtgcggaactcccccacggtaacgtggcccgcactggcctaaagcctagtgtgcaaggacacatgctggtcggttgtacccacggcctgcctaccatgtgtcctgaagctcaccgctcagacctcgatcccggagacacactggggctagtactgtgcgcgccgcctggaccaccaagtccttgggcagtgcgtaggactgccagccttagtagacccccagcaggtacccccttggatctgagctgggccctgtgactataccgttccggtaatgcagggttagaaaaatgaacgggttggcaccacttctcttctctttttcacctttttaatgcagacatcaatggttgtattggtttttgcaatcttcaccttggctgtgatattcattgctatctgcaatctcttgtgcattatcctctggtgtgggttttgtgctgaacctccgctttcact

SEQ ID NO: 2923 - DNA, 764 bp, Macrophomina phaseolina double-stranded RNA virus 2
  misc_feature 1..764: note = isolate Mp32
  source 1..764: mol_type = genomic DNA
tttggaatgctgcgctagctgcgactgcccgtgagcattccatcatcattttctctcgggtacttcagctctttgaagaacctgttaaggcagccgttacagacacgttggcccgtaggagctttaaattgaggggccgaatcttttatgcattctctgaaatttgtgcagagtgggacctggctactgctcctaatttagccacgcatgagaatgagaaagtggtgaaagccattttaacctatatctttattcaccccactcctatccaggtatatgaatatataccacgcttggccgtgaatcactcaggactgtcatctaattttaaacttagttatacgagaaaagccattgaacaggtaaattctcacacacacacacaggtgggcaaatattcttattataccaacgattcgggcgtattgtccagctgcgcgactcgagtttttaccttactcggtattcaatgggagcactcgatctatgatgctgttgatcctgctaagtttggggtgatagctgatacttttaacaaatatattcgtagcagctggcatccaaagttgcaaatcctaacatattcatattgctacgatggggaagtaccaccgtttgaagggtgggagcaaggtgacaaagaacttttattatttgtgtataatgatcatgtagcctatgctttgcggcaggacatatgcgccaaattacaaaagttggatagtgatctacgcacatacaagtctagacttgctattaaagag

SEQ ID NO: 2924 - DNA, 767 bp, Beihai picorna-like virus 5
  misc_feature 1..767: note = strain BHNXC41415 hypothetical protein1
  source 1..767: mol_type = genomic DNA
cctgcagctcttatcgatgttgattacttggtgtattcacccaatgtattttgaatattcagaatctagcggtgtacgtcaccgctttattttggtataatattcaagatcattgttatagtagttttcgttgatttgaacttattttacctccttatatttctgattgaggagatctttagtcaagatttatcaaaacgaaaccttatttgtcttgtgcattcaggtacaccccctgatgcgtattcatttttgtatattattgaacatattttatattttatatattgcgtatccgacgatcttcggtttacatatatagtaaaatcacaacgacggtatctactgagactgtctttgtatgacagtgtctctttaggagtccgtgtctagaatttgttctaggaaattcctcgttaatttgttacgaggtcttctgtttttagatgatttttaatttggatggatcacctcttcctatcttgtgatggttcactgtcctgaattcttacaataactctatgagtactattggttttcattatggatataactacagaacttgagaagtcgaggtttgtcacgcagaccaactgtaagtcgtgtgtgaaatctgatgatttttgattcttttaatggaaaagtgaagcgttacagtgttgttatgatacttggaccctgagaagtccacatacagctgaacgtgtataatgctcgttacggagcatggagagatccagtgaagtaactattcggttggctccggt

SEQ ID NO: 2925 - DNA, 768 bp, Biomphalaria virus 2
  misc_feature 1..768: note = complete genome.1
  source 1..768: mol_type = genomic DNA
cggagtgatcttttaataatatagctaggtatgcttatactaccgaacagtaaggtactactttacaggcttttaatagtgcgtattaacacgtcgctactatttcataataatatgtgttacacaggtttagtgtagataaactttttatagtgcgttctagattatcgctactatatcatatgaaaatctatttagttgattggacgtaatttattttaacaatcctatttttagttttagttttaactatatatttattttattttattctacaactcgtttgtagatgtcgacaataattcattaatggctgcgtttcctttcagtttaagcatgtaataaagtagtgacagtgatttacatgatactttgggttatgttcccctcttttcggattaagtcaaaacacgttttgcgactctgccgtgtaagcagaagcccactgattttctaaattttcttttgattaatcacatacaaattttatacaaacatgtcgactcgtgtatatcacctgtctgttaacctctatgatcttgcctatatttctagcgtctatgaccacttaattgtgagcgatataggtatttttgattatgttagccttatttgtataatagctgttgagtttaaactttagtggagtatcccctaacgttctgaggattctttaaagtgaaggccgttcgcttttatgcgcgctatatgtggtagtaccaacttagtgttaaataacggaggtccacatgggagaacgaacaatca

SEQ ID NO: 2926 - DNA, 770 bp, Trichosanthes kirilowii marnavirus
  misc_feature 1..770: note = strain pt111-mar-9, complete1
  source 1..770: mol_type = genomic DNA
agacaataacacatgcgtgcggaactaccgcacgcatgtattattggcgaccttggaaggtcggccaaatttggagtctgtgactccctctttgtttaaatgttagaattgaacctgatttgtttaccccgagacctcacttgttcaagtttacatttgggcattcttgggattacacttcggcagcctttctagacatcactttacactgaggcaatagctagctccatcttttctaaatccgatgatggtaaaccatcacccatttatatgtatagtagcgtgtgcccttaagcaaggcaagtcaaagtttactggttatctttaaaacctttattaggactatttcgtcgttgacgcttgcagtaaatcgagtacgcttcggcggtaaatccgtacatctgtcaagatagttcctgttgtaggagacaaaagctacaaacaaactctagaaaaatcttcaaacacaataagctcctataacgaaagcttaggtcaaatattaagcctttccccaaccctactagcaatccacgcaaacacctctccgctcctattggacgacgtgaaaagttaagtggtggtaaggtacagctgcagttgcagccgaggcctgcctggcaaggtaataaggattggcccaattgtggcctatgtccggtactccggtagacttcctggtttgttgaattaaaaccaggtgcggcaatctaggggccaaagaaaacaacctatttcagaaacagagacaaccacaaacgacaacgcaa

SEQ ID NO: 2927 - DNA, 781 bp, Pineapple mealybug wilt-associated virus 2
  misc_feature 1..781: note = strain HTS 2, partial2
  source 1..781: mol_type = genomic DNA
gcgagtgtcatttttaaatatttttatttggtttaagccgatgtgtagctatttttagagccaatactttattcgtttctttgcgtaattgcctgatttgttacaatgcgcaattttgtttagcgtattgtcattttttgattctttattgcttgtaccgtcatgtgaatattagttgagcttggttttcgggttttaggttgtttctaattaatgttcgttttgttttgtacagcttcatacagaccctccgattatatcgcttgcaaggcggttagtgcggggacacggggggggtcttagtggtgatgttggcctgacacagtaggtctcctcacagcatcacacttttggttgggagaggagtttgcgagtgaggcgcatctcctttgtatatatacgcgttatattgttgttttaattatagcgttggtattactattataacatattctcagggttttttagtttatgttagtttataattaggttttcttacagttaatataattctattttttcacgattaggtattggctctatcttgcgtagagtggtagtattgtatattatcgattgtagattgtcagtaacacgagatgatatgagtgtatacattaacagatgttagacgctttcacagccataactatcatagcctctttaatcttagcttttctttttctgttgatactatttatagtggtactagtgtataattattattctagaatgcacagttcgatgcgatcgtatggagcggcgtaagtagtcacgacgt

SEQ ID NO: 2928 - DNA, 787 bp, Atlantic salmon paramyxovirus
  misc_feature 1..787: note = isolate ASPV/Yrkje371/95, complete1
  source 1..787: mol_type = genomic DNA
accgacctaggatagtccctccactggagacctcaacacacataatccgtcaagcatcacaccgaggaggtctccaggaacacccagactatatgaacagctgatccacatgtctcgttctctgctctgtcacattttcttataaataaaatatatctactgtagttctatacttgaattatttagcaacaactatctcatcagaggcttattcttagcgggtctagatatttgtgtgtttattggaaattgggtcagggttttagtagaacactcgcgaaaagcctctgagagcctatctctaaaagaacgtggaacaaagccagcaatctccagaaggcacacgtgcaatgtccattccaagcttgtaattgctcaggaatcgtaaagcatacatgaatcagtccatgagtgtcaggacatcaggtgatctctgtgttgatatatctgtcggttgtacttaaattggtgaccttcaacgaacacttaaagacccggatatttagtgactttgcacattcactaacgggtaactcaagccagtatataaaggtcttactggaaaatagttgtatgataactcgcacttatcatgtattgtctaaagccgttatagattacgaaattatttcggatatgtttgttagttttttgtctttatagattgagatatcgttgcatctcgtttatgtcacttgtcaatggattaaagaaaacttaggatcaaagcaattgatatctactctagttgataccgactactttgatctttttcccatattagcaa

SEQ ID NO: 2929 - DNA, 804 bp, Wenzhou picorna-like virus 16
  misc_feature 1..804: note = strain WZFSL67369 hypothetical1
  source 1..804: mol_type = genomic DNA
gcgtagaattcctctacggaattctacgcatgtgatacgattttatcggtcatccctgcaaagggtttatttctagtcatgatataattcatgatattgcgccgctttgtgtgttgaaccaaattggcgctcccaatttgcttctatttcacatgaaccgccgtaggtatctatgagttatattatgcaaaattcggccaggcccgatccacctggccgtcttatatacggatcaccccctatttgttatttgttcactgtatgtgttataaaactaaacaatagtggtgttggattatatccattattttaaatcataaaaatgtgtgttgtatatcatcattatatattcgatttggcacatctttttaccatttctttgattgattatttgttagttgagtaatttccaagggccccctcttcggaaagacgcttaatgagcatacgaattctacaattgagaatcgtttgaagttgtttgattaactgatcgactagctcttgcttttccctctaggacctgacgacctcctattgggaactgtaagatactcgcaatactttttcatgggtatgtgtgagtttttgatgatcctgtattttgtggctctatctagagtcaaccccctgaccccagttatgtgagtcaacttaaaatgacaaactccataacatttcttatgtaagcctaagttggcaattagtgaaataatctttttcgcttggtagaatttcacacacgacaagtttgtctactaaagcaaacaatactgatcagcttgcagatcataatcccgatca

SEQ ID NO: 2930 - DNA, 805 bp, Plasmopara viticola lesion associated totivirus-like 1
  misc_feature 1..805: note = isolate1
  source 1..805: mol_type = genomic DNA
tctcggcagctcggtttataccgcccgccggggcccctcgtaagaggggtgacagggacacgatatgtgtagcgggactcgttcgcgggtctcagaggatcggtgatctgatttcccctttccttctcgaggtttcaagacgcacaatacctcgatgcgatacgtcataaccttggcggttgttcctttctgacagccggggcataatttgacgtgttaaggccgcaagcgttgttccgggcttttggctgtatctttggatcggtactgatacaggtgatgagctcgttaaccagataggaggtgggttcacgtgaatgcgtgtgtccacgcctaggctggcaagtggcaatttatttacagtgatctagtcgtctaagtggtgataatcctccctaacccacacctcggagcgagctgaaattagacgagtagagcatatgtttaggatacaggcgacgggctacccgcccggcaaggaaatctcttcggagaggcccgccttgtagaggtatagttacgggcccgagcgattccgacgaagtcgcgcttggctgcctcccatgccttctcatcctcaggctataacggtaaagatcacccgttgttgttaagtgataccgataaaagagcgacggtacgcgtatctgaggaatcatagtcgaatgtaccccgcgtgaaactatgtcgttcgaggtccgaacatatgtaaagctcgttttctagaagttcgtgtctatggttaggttagtagttaggttagttggtcgcctcacccgttagttggggcaatctcccaaaaatc

SEQ ID NO: 2931 - DNA, 827 bp, Halastavi arva RNA virus
  misc_feature 1..827: note = complete genome.1
  source 1..827: mol_type = genomic DNA
aaaatgcgaggcatgggttaccttcccatgccccctccattttaaacaacattatttcaacattttgtgttttatcagactcagtttattgcgttactaattagttttgcgtttatctgcccccgtggtttagcactttatgtgtaaagactcttgattctaaccttgccgtatggtgccctaacgggttcatttaatcatgcgatgagggttgctataccgcatccattctaaggcgattcaatgcttcatttaggaattttgttgacgattaaaaggtacccccacaaaaacaaaaccaatcttacttgattttcgttttaactgaccactgcgatcccaaattttcgccttcttatcaaagtatgttgtgttctttgggtgtacaacctgagaacttgtctacaactacatattactcgaggaagaaattcggtttaagccgtgccttctcacgtttagtatatctatctagacacaccttcttcatcttctaatccccatctagtctcctgatcagagacgtcgttattaacaaataaccccccttgttaataagagacaaagtacaatcaagctaagttctcttggagttcctgtaggaacttagccattgtgatagagtcataagtctatgtgcatagacagctctagctcaccatttccttcccaacccatcttttcatcagcttaactctatgaatccgatgcaaaaaccattctaacatcttatggtgctttccaagccaaatgagagctcactcttttgagccgctatttaatggacaataaacgttttatagtgtacatcatattgtaaaaacaaa

SEQ ID NO: 2932 - DNA, 828 bp, Sanxia picorna-like virus 6
  misc_feature 1..828: note = strain SXXX37597 hypothetical protein1
  source 1..828: mol_type = genomic DNA
catatgcggagttctgattttagttgtcatatatagtttgggtaaaaacccggtagtagctattacgatggctattacatggtttttgcttaaccgactgtatatgggtactaatgacgagttcccataagtttacatttttatacatacgtcaatcccacgacacgggatagaattttcgaattcttgttaaaacggcttaattggctgtattgttcatctacagtggataaacgacccagcgaccctacaatttcggttcgtcttcgatatagactgataaaaatattttagtaattttaagacaaaattactgcaacgcacacatgtggttgcggcgcactgcgccatttgatatagaccattagcctcaggtctagaaaatgagggccatgtcaccggcaaggagatattctatggggtagcatagcccatagtcttaaacccgtgctttgattttagatcacaactacaggcaataaaggacatatacagttgcctgtacccacgacggcgtagaatagtgaaaatgcctaagtaactattcgtaggagcgtaatgaacttgaggttgatgtgataggtgtgattggttagaatcacattgtaagcacacgtacctcccgtccgaagccatgccaaattgagtatggtggaaaagtgggacaacaaggcgtcaacaacaaaaccaaagatttctctttggcttgttgttgactctttgttgtgtttgtggtctgcgaaatttagctgaataatagtaggttattaaagtagcagacctttacaaatacaacaagagtcaataacagccataaagtacagcgta

SEQ ID NO: 2933 - DNA, 833 bp, Wenzhou picorna-like virus 10
  misc_feature 1..833: note = strain WZRBX43164 hypothetical1
  source 1..833: mol_type = genomic DNA
agagaaccatggaacatcccgttccatggctctcccttgctgattgtagtgtgtcgttttaccgcgacacccggctacatcacatatattcatctaagcttaattgctccttttataaacagacacaagaactgataaacaggggcaacccccttgtttactgcgtcttaccctgtaacaggagaccgtacaggcaactatttgttggctgtacgaacctagcatttgaattatatgatatttagtcaccataccggattaaaaacccgttataagtgacaagcgcttgagtgtagatagttgtggctactatttactatacttttgcccttgcccaagagagtcaactctttttcaaatcaagccccttctggcacatttgtgtttaggatatgcggaacgtatcccgaatcactatgtgtcataaactattgctccgattaagatgtcaagtatattaatcgcataattaagcagtgtttggttttgttagcagaagaatcccccctactagagaatgatttcgttttaacgactgtgcctccgcagaggactcgcacagatctagatctaacaactcttttaggaagaattggtcttttggtacattttggatgctgatatacgcatcacaaactatactgtcgcaatataactctttataagtatgtttacttcctgacaacctgagggaagaggtttggacacctaaattttccataccgctgtactgagtttgaggttttgctatgattatttatttgatggactttttggactatagttttggttttgtttagcctgttgaggttagttctacgcctactaaaatt

SEQ ID NO: 2934 - DNA, 838 bp, Gysinge virus
  misc_feature 1..838: note = isolate OTU22 hypothetical protein and RNA-dependent1
  source 1..838: mol_type = genomic DNA
gataagaacgttatctttttccttctttgacaattttcttaagtttgaacaatcactattaaaaacttgaacaatgagaaaagacactcctctaagtttacctctctttaagatcttcattatcattatccactaaccaaccattagttggaaagtcacaaggtgatatccttgatgtgtcgtaggtgtgtattgttagcctcattcactccgcattatcacagaattgtattaatattagctaaattgttcttgggtcatcaattgtcctgtctgaactgtttaactctagtcgtccatatcctagaagttacaactcgatcctattattcatccttatctcaatatttctttgtggtgtccgcgtggagtcttatattggagcatttattgtcgaatccaatttccttacagcttctagacaatcttgatctctttcttcttgtatccgatttggctcaccatttgctagtcaaacatgcttgtgctgggattggtatcgctctacgtatacaataaaattacaaggatgaccatgtttgaagtttttgaaggatcagaagttgatgaattattacgtcttaaaatagagcaagggaagcttgaccatcatgatcagattatggaagaaccaagtgttactcttgaagattacctccgttccagactgttactaccattccgtgtggaaaatgatattgttactgtagtcaatgatagaaaactcagattattccatcacattcagacaaatccgatttctgaaattgaactaactgccttagaactcttgcaatttttctctactctttaatgagaaaagccatcattttaaagt

SEQ ID NO: 2935 - DNA, 838 bp, Beihai picorna-like virus 73
  misc_feature 1..838: note = strain BHJJX25960 hypothetical protein1
  source 1..838: mol_type = genomic DNA
ctgggggccaaccccaggaggatctcacctttagaagtgcgcgaagcgctgtaacggcgttagtgaaccttgaggataatttctatttgtcaaacctaatcattggagtgtgacggagccttaggccactagtccctctttggagcggcgacctggtcttgaagtcctcacctttgactcaatacagtgccttaggccactagtctcctacgtgttgcgactcactgtgacggtgttagtgactgtagacggcaacctggtcttgaagtctggagaagttaatccaacatagttcaacggaagaaggtgtgatgtgtcttttaaacccctattgtatattaacgtgttacaaagtaataatgtgatgtataaaaagctcttcaaaatggacacctggtccaccaaaaatatacgtgtaatctatctatgttttcttttcttgtttccgaaattccagttagtgctacaccttagacctaatctatcaagtcggagtcggaagtaacgtgtttagtacagatttctggaacgaccgaagtcgactaattctagtccggatttccgcctacacgaaagtggtggttggatacgggaaacaaagtaagcctttagcgaaagcgacgaaagtcggcctctgctctagaattgtcggagttactgagacgtgtagtattttctggtcataccctatgggactaagaggcaggtgtccccggtttcaaggctaccgaaaaagtccttttgataaaactccccaaagtgatgaaatattttaactcgaatgttttcttctcgcacatgatgtgactttgttaatattgaacgaataactgacaaa

SEQ ID NO: 2936 - DNA, 839 bp, Wenling picorna-like virus 3
  misc_feature 1..839: note = strain WLJQ100015 hypothetical protein1
  source 1..839: mol_type = genomic DNA
gggtgttttcacccacacacttttaattagggacttattagcaaacctctcatttcgctccttttcgctatatgccattacgagccatttcatgttaattgcttttattttcttgattgattgtgtaatcacatcttatttatacccattgactccctttctttgtcaatttctctttctcatacttcatttgtacatagttatgcttatatagaggtgttctactccgacctttctatgtacccttcttctagtttagtatttctagtcagaaaaataccttatataccgttccctgtatctcttgggaatttctacctgtatatttttccgttttaaggcttaggctttatatacagtgtatttctttcttcttcctaattgtatattttctccgttttatgtttcgtttgtctccgcacgagatgtttagctatgggattttccgaattaacgttgtgaagagcgtggtggtttttaccgaccatttcacgtttcatttcgacttggattttctctacggcgactattgtgttatatgtattttcctgtttgtatgaatgctatgtttttgtttgtattatgtttctctgtttgtaatttcaatttctagacaatcactttttgtttcattgtgtactttagcggttttctgcccgccatttgaatttagacgatataagttagtaagattttgtcacaaatgctttattcccgcgtgttatcgcttcttagccccgtgacttaaaaactgctttcttcagtctttgttcttatgtgaagctattgtatgtgtgttaactggataattttgctagcccagttttcatacatacgag

SEQ ID NO: 2937 - DNA, 850 bp, Kornilov virus
  misc_feature 1..850: note = isolate Antarctic39 RNA-dependent RNA polymerase1
  source 1..850: mol_type = genomic DNA
gaataaagcagttgatgccccctctcagtatgagggagggtgtgcccccccggtaaaacggggaagaggatctgccgtccagcagactctggaattaaacatcgatgagatgaagcccaaacttgaaggccccaacaacagcgtagtgttggtggttagcaaggatgtaggcggtcaaatcgattttctagagccgactggtttcgcgggtcttaagcagaagcttagtgattggtcatcacaacgagtggaagcaaaacatgatgatgggttagtaaccatcatctcaagtgcccttcacaatgcgccacgcgctttcgtgggattgtgggggttgaaggatgaagtgacaagtgatagtgtcattcaatcgatcgtggacggagaagtcatggtcacgcacttggaggagaaagatgaggaatctcctaacactactaagaaggtcaaatccgttgacctttgcggagacggcgtaattgtcgttagaaccaacacccacaagcgtacgaacaaacgcacagggttccgcattccagtgctagctggagacgtcgctgccaaccttaaaggtcggcacggattcctggaatacaatccagacaacgtaaagttgatccgtgctgatgctgcgcgaaaggttgaagcatggcgcaaggaaggagatgcggaatggttaaacttgagaggagttgaagccacccgaatcatcatgcatgcggctaacatgtactggcttttgtctcaagatgaggcagatgtccaggaaatgtacaacacaagccacatgcgtgcctcgcgcgccgcccggtccaagatggccggtgcggcccctagatgctagggccgc

SEQ ID NO: 2938 - DNA, 853 bp, Beihai picorna-like virus 43
  misc_feature 1..853: note = strain BHNXC41212 hypothetical protein1
  source 1..853: mol_type = genomic DNA
gtgtgcaatatgcgtaacaccgcatattgcacacattaaaagttatatcatacgtttaaattcgataaacctcaatttacatgtgttctttggtaaattgatgcacattttaaagtattatagaatcatagtttatatgatctgaaatatcaaaataatttgtaatcctcacagattcttttattatgatacatgtaagaacaaatatgtatgtacttctagatattttaatctacacaactttacacatttataggatggatatcctttaaatatccaaaacaaatatacacatataaacacgcacactcattcatgctaacttaacttgttagcaatcatagtcgttacacattatatgtataaatatttgatttatgcacatcagaattggtttttactaggttcgattcctagctgatgttttaaagttaaaatttttatactacatcacatctcatgctgtattttaaagttcacaattcacatattcatctttattttggattgtttaacaaaattccgatttttaccagatagttttacggaaattaaaattagcaatcataccgtccttgattgttatttaaaataaaactactgactgctcaagcttcgagcgtccataaggagatcatgaaaactgttgaagtaattcatataaatttaagtagaagatcccgactgtgtatggtggtaaagatcacccatcatatatggtaggaaaattacctactttatttgtacggacagaaaagacagcgcagggtgatgcctgatagtgattggaggccgatgattataagccttctcgaaagagagtaaattatggatataattggacaaaataccc

SEQ ID NO: 2939 - DNA, 856 bp, Wenzhou picorna-like virus 9
  misc_feature 1..856: note = strain WZSBei69430 hypothetical1
  source 1..856: mol_type = genomic DNA
tgtatgggtatttacccatatagagtctcctacttgttggcatttcgttgtctgtttgaccgcagactcggctttcttgtcaacctattcagtcttctgagaatgttgagcttcatgcgaattttcttagaagattcgcatgctagatttcgcagctcctagacgcgttgattaatacgtctagagacacattttgagtagtattcatacatcctaggtcaccacaaaatctttgtttttgatacgttagcatattaggatgttatgctgtattttaaaaacagagtgcgcacctggcgtttccaggtccactttcaccgcgtggtcacattaaccgcgggaaccaccttatttggtgtggcattatacgccctcgagagtattttgctttattgattaattcaattacaatatcaaatcgcattaagcgatccgagcactcaagtttaaaaaggaacccagagcgccttgagacattaatattttagaacctccttttggagtggcttagcacgctaaaccgtaacggttgtaggccccaacatcaagcatatatcattttctcttgataaattacacagtgggttaaattcccagctggaagaaatgatatttagaattttgtgaggcaagcctcccgagcacattacgttacgtcctaagtaaaagtattatgagaattagccttcgaacgtcgtacaaactataagctacgatatttgaaattgttttaaatctttaactgcaattattctttgtaaattcaaaatgaacatacttgattaaaattgttctgaagctgtacccagcagcactaccagcctgaaggtagtgtgttattataaggcaccttttc

SEQ ID NO: 2940 - DNA, 858 bp, Picornavirales sp.
  misc_feature 1..858: note = isolate brb030urn1 genomic sequence.1
  source 1..858: mol_type = genomic DNA
tggccactttagcagcactccttgctggtggttttggcagcgatatactcggctcgtatatcaaaggccaaattcagctcaacaatgcagagagtctcgagcagttcaaacaacagacgatgacaaatgctggaatcaatcccatgttggctgcgatgcaagctgctggcagcggcggatcagtgatgtccgaccagatgaccagtggcatgctctccaacatgtccagcgcagtgatgttgggaggtgtaacaacaaaaggaatcctcccgtggatgcaaggtggtcagcttggtacacctacatctgtgacagccaattatggagggatgcgtgtgacagcttcaggaagtccctcctctggcacctcttcatcgaaccccctaggggcttacagttcgatgcctcctcccagtcgaccaacttctgggaatacttatttcaacaacccatccaatacgacgaatgtcagtggcaattcagttgccttcgttccatcaagtgcaggaaccgcagctaatgaaagtgctgcacttgtcactggcaatccccaaccgtctatgacaaattctgagtttcagactgcgaacccatataacagcgctttgacgtcgtggggttctgaaatggatgttcgaaatcctggcggcctcgacacctctgctgtcggagccagtgatccatccacaaccgacgtcatgtccagtgatgacgcagtcgcggcttctggatcgggtttagtttctgccattggctaaactacgttttctagaaactgcgtttggcgacgtagttttctcaatacgatattgagcgtttcttagtgataccagaaaaaacaagaaaaacacaaaaaac

SEQ ID NO: 2941 - DNA, 860 bp, Hubei coleoptera virus 2
  misc_feature 1..860: note = strain QCM76287 hypothetical protein gene,1
  source 1..860: mol_type = genomic DNA
tgagccccggggggtcatcccccccggactccgttcacttaagtgtgggcttgccgaagcagggactcttttcaccgtctgtaaaaagacaaattttagtttgtaaggaccttagttttaagaccgaggccgtaatctcactggataatcgtagtatatggatcaacttaggattgagatgaatataaaataaatgaagttggacagtgtctctatattaatatagctgtagccaacggacttgcttatatgattgccaattctttgccatagcagtattaaacctgcacagattattatcagtattatctagacttagtttgcggattcgacacccgtgtggcgacggctctaggtatacgtaaacgcccatagtcagtaatacggctattcctttaaggacatgcactgtatcaagaaaggaccagtgtcaagtgtgatatatatcccaacgaccaaacccccacgatacacaccccaatgtgcaaaattgtattactagctgcttatgctaattttcccaaataagctattttctacttatataaagtagatcgttgttagagaactaactaggatcttagtatgtagatgggatgatacgggaacgctgtatttcaaaggcatgtattttggtacatagtccgtattccttgaatctatttacgctaatttctgaaaagaggacctgtctctataaccagtagtacctacagtgccttacgggttaccactatgaggacagagggatttgacccgcagtgtggtaatattgggcgtagtcacgagagtcacttggcttcatatcgtgcttaattccgttaaacggtcgccctcttagatatttaaaaccatatacc

SEQ ID NO: 2942 - DNA, 865 bp, Soybean dwarf virus
  misc_feature 1..865: note = isolate IA-1-2018, complete sequence.1
  source 1..865: mol_type = genomic DNA
acgtcattcccgactttatctcttgctgtgatgttgtccaggtggacactggtgaaaagctcccttctaagaaagataaagaagggaatgaattgccgcctgagcctaagcttaaaatgtttagaagggtgaagcctgagcatgttggtgatgccaggaaatacatctgtcaacatattcgcaataataatatgaggttgatagacggctctgatgtttctcatgcaaccatcaaccgatatgcgctcaagttttgcgaagacttggagcttgatatgaccagcactgaaatgctcatcaaatatgctatggtcatggtcccactccctcgaaaatctgatattgaggctgctaaaatcgtccaatctcctgctgccaggcaaataaggcatgagttgggcgtgcttaacgccgaggttttttagaggggctctgctccgactctggttttgaatccccgttttctattttggggttgccagagatcgtggtgcgaagtggggctatccctaggaagagtcgtagtactattaattatttgagtcagtttagtttaggtctagattaccaatgccctaatcccagtttgcacaacgcattggtggcggttgaacgtagagtgttcaccgttgggaaaggaaatgaggtagtgctaccttacaagaacataccaggaatcttctctaatcttgattatttccgcaaatctattgtggataaggttggttgccccaggacgttctcccctgaagaacttgcagcgacgtatcactctggtaagagaacgttgtataatgctgctgttcaaagtcttaaacgtaaggctgttgagaggagtgacgcgaatgtgacagctttccttaag

SEQ ID NO: 2943 - DNA, 870 bp, Hubei picorna-like virus 27
  misc_feature 1..870: note = strain QCM155345 hypothetical protein1
  source 1..870: mol_type = genomic DNA
atctcatagggtgaacccctatgcacattttgaaatagtttcaacttatgttggatttgtttgacttagtaatgaatttgtcaaatttaaaaggtcggaagcatgaaatttattggcgtatataattatataattgattggcgttttatagaattcgtagctatatcactgatttcaattatactttgtatacaggaactctcagtggttggttaactgagctgcggcgatactaaattgatgatattttgattactgattgttgtaaatatttccaatgtaaggctttatatttcaatgactcctggaaagacaggtatggtttgaaaaccaattttaggtttaagatacttagcgttgctggaagtgagtactattagtgaagtactggacttttagatgcttattgagatatattagaatatgtactagtacctctatctgatattttcaacacataagttctctctaagaaaggtatggatcttcctcatggaaaccaaggctaaactgttaaagtcagtctgtactgaggtacagaagatctagtcccgtttatggttagcatatacatatgatgccgctttgtaacccaaatgcgtgcgcgtgattactgtatatgtccggaagcggaaaacacactctagatgattctcgtctggtgaagtacgtacgtctgatcatcctatgagcatgagctatctggcaatagcgtaatggtgcctcctaagtgctactttgtgggagtgaatctcaatgtcccgtaaaacggatacagtgaaactacacatcgacaataggcattgcggtacggagtataccttgagatccgcgtcggagcggtcttcagtgtgactttcattttattcc

SEQ ID NO: 2944 - DNA, 877 bp, Picornavirales sp.
  misc_feature 1..877: note = isolate trb102shi1nc genomic sequence.1
  source 1..877: mol_type = genomic DNA
tcctgcaaacgcggggggcaaccacccaactgctacaccctgcacaaacaacaactaaccagcaaaagagcaaattaatcaacgccaagcatgtatgacagtctcgaggacgcgtaggggtggaaacccctacgcgccctcgagactgtcatacatgcttggctttgattaatttgctcttttgcttgttagtttttgtttttgcatggtctagaatttgactacttccccccctcttttgcactacgtgccactgtttttcaactttggttagttttgcatcccctttctccgggaacttgtttcccaccccctttttgttgttttggcggctatgttgtggcttttcaaccgcagtagcagtagacagaagaagttgagaaaacgtaagatttattagtaggacctccgaaagtaaacccctgcgcactactctgtgatgtccggacgagctatgtaaggagattcatctaaattatcgatttggacgtttagtctgccgataagcatttgtttttcccaacgtttgtaggtattcacaccccagacttctgaccgactgaattacggatttttctttttgaacaatggaattgacttgacgaagcttggctgctctttgttgtccagtgtggcatttgtaggtgtacttaagtgtatgtttacatttgtgtgatatcaaattcacagcgcaaagacaaggtttttcaaagcgtgcagtttcctaaaaactgatcacaaggtagactgggcatgcctctattattaggccaccataagtccttttagtatgcgtgtcacgacgtaccgtccatcgcgagcgaattccggagacacctcgtggatgatgtatgcaacttccggcccaaggtgaaag

SEQ ID NO: 2945 - DNA, 883 bp, Pingu picornavirus
  misc_feature 1..883: note = isolate 991, complete genome.1
  source 1..883: mol_type = genomic DNA
gtttacgtttcttttacctgcacgttcgcgtgtagggttttcttgcaaccactatggttcgccatagttggatgcgatccccgtcctcgccaaccgacgttaaactgttggtatatgtaacctccaatcccccctaacctaagttttaccagtttctcggtatctgtaagaaccgagcgcacaccacaagtggcgacaagacttgtggaggtttgtacactaaagtacacgtctcttatagattttatctagagatctataaatagatgtaaaatattatctagacccccaccacccctgtgccatggtgcaactggcctatgagtcggattcccttttgatccgtcagcacccattctaaagactgttagcatggtcattagtctgtgaactctcgcgaaagcgttagtgttttctagcgatgcattgattgcgcgtggattccccatctggtgacagatgccccgcggcccaaaaggctagtgtgtcacaacacaccgtcaatgtgccagaaaccccatctggcaacactaattgttagtaccgattggtaaccactaatcgtccattctggctgaacattctttgggatgagcatagaagtgagtagaccccctagcgctaccttcgggcgtgactagggccagttgactataccgctccggtaataactggttaaaacaatgaaagcttactatgcgaactgccctacccaaggtagctgtacccacggctatcctgaacgtcggcagcctttcctttttattctttaaaatgttttatggtgacaatattgtgttatttagtttgttaattttgtttcttttgccttttaatttaactattgttaagcaaaacccccttgtctaattaaactgaaacc

SEQ ID NO: 2946 - DNA, 886 bp, Bidens pilosa tombusvirus
  misc_feature 1..886: note = strain pt033-tom-24, complete genome.2
  source 1..886: mol_type = genomic DNA
tcgtcaacgggaagagtgctgccgaggttgaatcgggcattgcaaagcactgggaaatcttcggcttccaatgtgttgtcgaacccaccgtccataccctagaacatattgagttttgccagatgaagccggttttcgatggtaaatcctacgttatgacacgtaatccgcatatttgtctttccaaggatgcatatagtatcggtccatttaacacgacactcggggctaggaaatgggggaaagctgtcggtgaatgtggtttagcattgaccggtggtcttcccatcatgcagagtttttacggcatgttggtacgtaacgcgggtgatgttgggggaaaggtttcacgtgatgttgcatttgctagcggctttgcagcattggctaagatggggaaacgggtgaagagtgatgtcagtgaggaagctaggttttctttctacctcgcattcgacattagcccggatactcaattagccgtagaacgcatgtatgatgacatggttcttaacatggaattcgtcccccagggatcaccagccattgattcagacttaacatggattctcaaacacctcaaacagtaaaccgcggtaggtcaaaggaaagagctcagggtaaagatgatagcaagggatctttgaagaggcgtgttgccactgatgcgatcgcagccggggagggttctgctttgggcactatggtcatacaagctgaaacggtcactatgaccattaatttcaacttctagacatgcagtgtacctgtgtagtgcccagggatagcctcctcgacactctcaaagcttatattgtacttctcatagctttcattctcttcttcatcacaatcctttcagctcaccaaacacaatacataaata

SEQ ID NO: 2947 - DNA, 889 bp, Wenzhou picorna-like virus 15
  misc_feature 1..889: note = strain WZFSL85504 hypothetical1
  source 1..889: mol_type = genomic DNA
acgggagcgagagctcccgtgctttgattgtctatacgtcgttcactgatactttgcgtgtgaaccacgtatcgttgaagtgttacttcttattggcgattaattacacaggatattaatcccgtgcattattggatctgtttagtctttacgacttcttttcgcaccagagagggcccacttacctctttggcaaacatttaggttggttttgtttacaagaccatattctaaatgaatactgctttgtttatcacactagaagaagaatccctcagattgctgttggattctactctagcataacttagcccccctccatgttttatgttttatgtcaccatgtcgaaggaggatgtacctcctgccggttgcgtaagaatgtaggctaccgaaactagtacatactaaactctcattccattaggggtgttagtatatgatttttaaaattgtctgtaaatagttatacccataaaaccaaataaaaattagtctagatcatttgtcaagtcagcaacttcttcactgagggtacagctatccctatatgggatgttgcgttaccgaaatcgaggagactggaggcgtcttattagagattaggagcccaccgcaacagctgattgattgaaatcttatttagagacccctgatgataactaatattaactgtattcgatgtcgcatgttttgcgtctagtagtaggttgtgataccttcaggttatagttattgtgccaggccacctgaatagacggattgattgaagcgccatgtgtagtgaacaccacaagcttgcatggtttgccgaggccacagtggagaggccaagcccacaacccgccgttatatgtgttatagaggtttttaaaatttagcaccaaaa

SEQ ID NO: 2948 - DNA, 890 bp, Macrophomina phaseolina fusagravirus 1
  misc_feature 1..890: note = complete genome.1
  source 1..890: mol_type = genomic DNA
atggggaggaaaagagagatatagagttgtaccggccttcgggctggagggacactacatctctccggacctccaccttccagctgccggcctggggctggagagtgtattttgccgggcccccactgcctccggggagggggtgtaatcagtttcctcgggttgaaactataaaacgaggagggtgcgcccttgacagcgtgatggtgcatgggtacgcggcgtgattaaaactgagctatggtggttgtctagtcgtccaactgctgggtggatcgtcaaaagttcacgccccttctagacatcctaagtagtaggctacccgactcctctgtgagagggccgtgcaccaggtccgaagtggtcttccagaaggctttttgccgaggtaggtgaccggaccacaacgcctctattctctgttcctcctgcttcagggggagaagattaaatagaggcatccttcgcgccgcggattgctctgcgtgagcaaagcgcactgcgtcgcgggtagcttgcaactaccgaagccctagtgaagcaggtcctagggcaccttccgctaaagcctgtgagactaatggtagcaggggccttgcctatgaacctctacgctctcgggcggtatgtgacggtgagtgacctttgtggctggtggtcctttgcggctatgaacctctacaccttcgggtggtatgtgacgctgcgcacggggctattggcctgccaggtcgaatcctcctgtgtgatcacttgctccctgagtaagtgtgaagcgagtagggaaccagcatcgatggacgtaagctgggtgtggtgtggcttggtgccatgctgctaacgtagtctgcgtaggaggcctttatgcctatgaacctctacatcttcgg

SEQ ID NO: 2949 - DNA, 891 bp, Beihai picorna-like virus 45
  misc_feature 1..891: note = strain BHZC37433 hypothetical protein1
  source 1..891: mol_type = genomic DNA
tgataggatttcctcacggaaatcctatcatatgctagattagcaaatttttgttattctggaagctcggaaaattctcattgtattagtgttctgggcaaatggactttgatcggtccataccagaacttaaattagtcatatgcggactaagctactactatgaaaatctacgcaaaattatttctgtagccctaacttcgggtgaataaatagaagtgttcgattgtcgaatcgaactaaaataaggcagacaacagataaaactgtttgtttaaaacttcagtcagcactgaaggatactcttatatttgagatcgaacatgctgatcaggttcttatattataaaacataaaaacattgggaaagttaattttgatcaacctctcgttcaagttaatgatcattatcacctctcgaaccccaatggcctgattttattttgtatatctgctctagcttgtggcagatcgtgtctacaacaagcttttatttctaaaaccatagaaaaagtataaaatgagccaaaaaaaaacacataaaaattttgtatattatgctcagaaagactctttttaatggaaatgattctagatgtgacgatggaaacctctcagctgtaaagtgctcagctcacgtttacctgacttaacatggtcaagatactgccgtagcccctcgatgggtagattcttttgagtcgcagatctatgatgtcatcggttcccatgccggtggataggccttgctagatgatttgaaattaacaagatatatccctaggtaaaagtcccaagggagagaatcagaactctaaatactgatatggcgtgacggacgcatgaataaaatatccaactacgaatcagatacgaccatcgaatttcacc

SEQ ID NO: 2950 - DNA, 896 bp, Bremia lactucae associated fusagravirus 2
  misc_feature 1..896: note = isolate DML-A_DN432391
  source 1..896: mol_type = genomic DNA
cgagcgtacttcttccttagcagctgatgcttaacgacattaaactggtcggtatcagagatcgcgctaattagacggggtgtgtgcgttgggcatacagagtctagatgggggagagacatcaatgatggactcgaactcagccaggtcgtattgcaataaggacggttttgaaaggatctggcaaattcttttgagaatccgtgaagtcagtagaagggatgagtcaatgacgtaagcccgggccactggtttcaaatatatcaaaatctcatgtagctggctccggtcggtgcaaatcttggcggattgcttgaggtggaggtagagtagatgcggggactgtagtttcgtgacttgatcatggctcagtctgacagttaccgcggaaaattcagggctatgctcggatgctcttgctaacggctaacgccgtgcagtctagcacaagactgtgtcacagggatggccccacacatcggtaacttcatacgatgtgttaaactattacgtaaactcgtggtgcgatgtataagcattagaagcggggtgtggtgttaggaggaattctaacattgctaacgtatgctcaaccggcgaaagcagcgtttaagtagcgtatgggttgggtagaacgtgccttgatgcataagttatcaaggtggaacggccgggtaatagtattcagcgattaggcgcggggaacgaatggcctaccataactggtgtccgatagtgacgatattttatagatttaccgttgactatcgcagagaacagagaagtctggccgaatatttaatattctaatatctttctatagtagtagctgcgtttattttataaacgtgaaggccaagcatagttagacggtgacagtacattcctcaaacatc

SEQ ID NO: 2951 - DNA, 896 bp, Picornavirales sp.
  misc_feature 1..896: note = isolate H2_Rhizo_Litter_49_scaffold_571R
  source 1..896: mol_type = genomic DNA
ctttgtcccgtccgtaatgacattaaactaagtctagctctcgactttaaattgagcaccaaatccacacgcaagtgtgaagagagaatgcatggacgtggagtaacccctaggactccatggatcgcgctctctagaaataggggttcgagcttgagcacgttgatcagctaaactcaagcctatcgtgaaattggatcgccgaaaatacatttgaaaacgaacccaaaactaccgtagacagtaatggactcgtagattttatcgaagagtctaaaactgtgcgtactgctgtcccgagattaccacgacctcgtgatatctcgccttgggcagatcaaacacctgtaaagatacttgaacgtgagtatgctttggatgatgttgtttatagcacttcttcaaattccgtgctgagatatttacctaatatttttgcacaaactgcctggaaaaacgcaatgtcttcgtttcgttatataaggtgggattttcttgaatggcgttatcaaataatgtcagttcctcaggtttggggtgctgtaggatttacatgcattccaatggacccgcgtcgtcgcactgtactatcagaagattatggtttgctatctcatactgattgccaaattgccgatttttccactgctaacagcggaagaataatggttccttggtgctctttgaataagtggcttgactggtcttctcgtcaagaggagggcttcgacgctcaaaccttcaatgagctgaagattgttggtggaccttggatatattcagccgattcctcaatcccgactagtgttaccataaatttgtggtgtagcttgcatggagtgcaagtagcaggacctcgtgtccctaatactgtgacggatgaaggagaagctcag

SEQ ID NO: 2952 - DNA, 901 bp, Beihai picorna-like virus 39
  misc_feature 1..901: note = strain BHSC164089 hypothetical protein1
  source 1..901: mol_type = genomic DNA
cccatggcaagttatggtctgaagctagataagcctctcgagaccggtgtgtacaagtactgtgctcttttacctattacgatatcactagaatttcgtgttttaaagagcacgatcacactagattatcgttttcgatatttagagattttactttgcacatttgttgtgttaaatcaaacctgcatctttctttttagatgcaagctcgtcattgactttgagctagttggcaacaaattgtcaccaacgaatcaaaacgacggtataccctgtggtgacacacaggggaatccgtgcctcatttgaggaattagtcaatgtaagatagttccattaactattaaaattctcccactgggagtgtcagcagaacgactggttctgccacgcttgtttactgtcaatccgaaagcgtaatagtcggatagaatatcccattgaaatgggcggtatgaggaccaagacttcgtgttttgagcctcgctctccgatatgagccaagctatcttttaaaatagcccaattgacatcaatttacttactccacttgtggagagtccccctattatgatttttaggctgggcatgtagttgatggcttttgtcacgggccacattgtatggatacatccaggacgaaacgttctggacatgagaatcatcacacatcccgggcagtcttttgactgtttaccattgggatgtgtgggtgcaagcatgctttgtggtaggctgagggcgtctcatctagaccatgagacagcgccctatgaagcctgcggtagctggatttaatcaccagtgatggtacgtggcaccctgcagcagcagtttccaatacccggtctattccggatattggtagtgttgtgcaggaccccgggcgatctatatcaaa

SEQ ID NO: 2953 - DNA, 911 bp, Beihai picorna-like virus 13
  misc_feature 1..911: note = strain BHZC37435 hypothetical protein1
  source 1..911: mol_type = genomic DNA
ctgcatgggcgttccccatgcagacttttgcatttagttgtgagttttctaactcaccaaatatcgagcgtaaatcgctccttacaactcagttagagatatgtggattggagcgtacatcgctcctctatcactgtttcaactaagttcttacaggcgtacatcggttgtatgtatctttttaatagcttagttgtatgatttgtatatctacagaagttctgcaagattctttattaacgcaatatcttgtaaccaggatttgatcacctgaaattttagtaatgaattgtttgaattatgtgatcgataattagattcattacggtgcattaagataccaatatgatatagctcctattaagttagttagagcgtcattttggtggattttttgtgccagctccttttaattattaacttcgaaataacgtaaagtgactacgagcattcttggactcacaaggtaataagagactcgaaccccgaagcgcgaggaggcacacgcattctctattctcgaaaggaatggaggcaatatatgttctgaagttattggttagatagcccgaggcacacgactagagatggttactataggaagtaattgtatagaaaatttgttgatatgagaattgttctaacatccatctcgcttactgctgtgtagtagcaagctgtctatctagactaaaactatattgttctgctaaacggattgacacccggccgacaccttagttaatgcaaaacgtaggtaattgaaatgattcggtgaacattttaagttgagcaaagttctgatgtgcgttatagaacatatcaaaatcacgcacagaccctgttatagatcagtaaaactagacctcttcatgttatttgatcacatcatgaagattctttgatcagcc

SEQ ID NO: 2954 - DNA, 913 bp, Wenzhou bivalvia virus 1
  misc_feature 1..913: note = strain beimix75829 hypothetical protein1
  source 1..913: mol_type = genomic DNA
ttgatgcgaattagctattgacagtttcgatcttgtaacgatttcttttgagaattttgttagagatctagatttcaattaagtgccagttgtggcgattttaattgtgatcgactccaacgtctcagttttatagatccagttgtggatgagacttgtatataaatgtcttacactttccatgtatgtttattttgtcttttgttcatagtttccgttgtaccagttgtggaggaaatttgacgataaagatttatgtgtgcgtgttctattgtcttatatatataggttcattcatacttgtttgctaccattttagtttcatgcaattgtaccatatcattcacgaaacttcatgttaggaactttcaacttagttttgattagcacgttaatgttttgaaagcgttgagcaattgaggttgttgggatcgcgtaaagcggctctacgttgttactctttccgtagagattttgttatgttccgaccctagttaagctttttggtggttcttaaagccggttaggttaggccctgcaaagaagcttcatatctgaaacgcccttactttgattctcgaaggcgcgcaagctaccggatgatgataagtaacatgttggcaatgtatttgtacattgtagggagatcactgaagcactcaggcattctgcatagctgtcggaatggcctgttacccgtatcagcgaaggtttgacgtattaattaacctcttttcgtgcaaaagattctattttgatatcaacccggtgaagatgcttaatccactgttccttttaggggagcaacattttgcgttcgatccaccccttatttgtgcgttgatctatcagtatgatctcgtagtgatgcgcgtatttaaggtttttccaccccaggtggcttattttaacc

SEQ ID NO: 2955 - DNA, 933 bp, Beihai picorna-like virus 116
  misc_feature 1..933: note = strain YYSZX16386 hypothetical1
  source 1..933: mol_type = genomic DNA
tgtgggtacaaacccacatacatctgtcgtagatcgcgacgtaaaataagcgatcattcgtagctcacgaatttaaataagcgagcagtcgtagatcgcgactctaaataagcgatccggagttgatatgcttacgtgacaaaaatatattcatcttttcatgatgtaaactgaatttgtgttttataacacacttctataactcttttacttattttatatttacttgagtttcccctcattttctatgaggatctaacctgtatttataccgtctagaattttataagtacgggccattgcctattttctgaaggtatacgtttacgcctatagccctatagtattcgtgtatctttctttcctttcttaatagcactttgcttagtaagagtctatctctcttagctactcctgctataaagaggatgtcgttgtcacgactttaaatgaaagacagacctgtgtgaagacacaataaaatacttccttatatatcgttttagtatttgaaatgttgttcttaggtagtagtacgttcggaggtgtgaaaacctctttcgcggaacctactggtatgagcttcaggacattgaacgaattatatatatgagagttggtagactactctactcgtcagactcatgacgttaattatgatagctagcttgacatctagtgaatgattttctgtataaagatattgtttcattgtgctaagtactcaggtaagctgtacagcaatgtatagtttcagagagctgtttcacaaccagttcttttgtgagtatgtcgagagtaaatcttagtgcgcctacgtggacaataatcttgtgatgaaggattttcattttatggtcggaaggtatccatatgacttccctctattgatgttccccgttcgattggattaatcaactaccatttctttat

SEQ ID NO: 2956 - DNA, 934 bp, Hubei picorna-like virus 29
  misc_feature 1..934: note = strain arthropodmix14031 hypothetical1
  source 1..934: mol_type = genomic DNA
cacggggggaacccccgtgcgtccttttcttctatagacactttgttgtttgctttgaactaacttctgcaagtgtattttgaatttcgatttgaagtgattcattgagatttcattagtgctttgctggagtttttcgagaattgtgagtttgtgttggattgtttagtgtctctagaagagaaggtaactttttcataacataggttaattatgaatgaatgtgtgtatgtttggttgtgaattgaaagctcagctctgcacacaattgttattcttgtgttatgagttttgtttcagtttgcttgaaaccagttattttgaaagcagttatgttagtaagtatcctcctcccagaaggagcctggtgaaagcaaccgctaattgtaagtaaagtaactagtttagtaaattaatgttcgttttattatgtgcttcgaatgttttttagtaaagaaagcatatacctcatgtacttgacatgtacttgttgtatgtatctttaagatacaattgtcccatagatctgttgttctctagtagttgagaccttatcagtatgagcagagcgtagcctatacctcaaaacacacactgtatctgtttggagcagtggaaagaagttagggttttgcagagtgatatgatctgcaatgtcagctagccggcaggtgttctgtatgctagtgattacgcgtagtcctaaaccgctgataagctttccgaacgatgaactaagactgtgaagaatctgtgggttgaccgaccatggattgtaaagattgctatggtacgcccaggcatgaggttggccagttcggggtcgctccgttcatttccttaattacgataattacgatttttgttttgttgtttccttgtactgtctctaatcttgatatttttgaatttattgtaatttaatttttattgt

SEQ ID NO: 2957 - DNA, 940 bp, Citrus tatter leaf virus
  misc_feature 1..940: note = complete genome.1
  source 1..940: mol_type = genomic DNA
aaatttaacagcgcttaatttccgcgcattacgtcaatggctttcacttacagaaaccctctagaaattgcaattaacaaacttccaagtaagcaatctgatcaattgctttctttgaccaccgacgagattgaaaagaccttggaagtgacaaatcgcttcttttctttttcaatcactccagaagatcaagaactgttgaccaaacatggtttgacacttgcaccaattggatttaaatcacactcccatccagtatccaaaatgattgaaaaccatcttctgtatatatgtattcctagtcttctatcttctttcagatcagttgccttcttttctttaagagaaagtaaggtcaatagttttattaagatgcattcagtcttctcacatggaaaaatcaagtctttagggatgtataatgcaatcatcgatggaaaggacaaatataggtatggtgaggtctctttcacttctttcagagacagagtgattggtttgagagaccaatgcttgacgcgtaataaatttccgaaagtccttttcatccatgacgagttacactttttaagcccttttgatatggccttttttatttgagactataccagagattgacagagttgtagctacaactgtctttccaattgaactactttttggtgataaggtttcaaaagaacccagggtttacacttacaaggttcatggtccccctttctccttttaccctgatggtgttgcctctgaatgctatgagcaaaatctcgctaactcaaaatggccttttacctgtagtggtatccaatgggccaacaggaagatcagagttaccaaattacagagcctttttgctcaccacgttttttcatttgacagaggaagggcttgcaatgaattcaatcacttcaataagccgagttgcctacttgcagaagag

SEQ ID NO: 2958 - DNA, 957 bp, Rhizophagus sp.
  misc_feature 1..957: note = HR1 mitovirus-like ssRNA putative RNA-dependent RNA1
  source 1..957: mol_type = genomic DNA
tcggcaagggctcgggaaggtgccgaccttcctcagagtcctgatcagactctggaacaatctacagactactctgttgttaaacactgtacgtagtggatatcggcaagggctaatttatagatctgatcaatctatatctaatagtaacagcttattcttaagactgatcatcttaagtagaaagctttctcataatttcactctctactaaccttcaaattgttctcataatcttaaagcgctatatctaactcttcttcattaataacattaccaactatggttaaatagtaaagtatacactatgcttgacactaatccaaccttaatgtacagtaaggccattagtgatgtggacttcactcagtttctcttacattccttccaatactaaatcggatacttgttactctatgataagagttgtcttggtcacggctactagcagctgagtggcgaaatcctctcagggcgtgtacacccaccaaggttaagcaattctaggattagggagcctaacaggttcaaattcgatggacaatctggaaaatagggagacgatccaacatctaacgctaccgcggcacaggttcttctgtggaaggtttgcagtcacctaccacggtttgtcaccggtctctctaataaactctccccccttcaatttaccattttcccttccattggtatctttgtaacctatcgcagacactgtgtgggtagagcctcaaaaactgaagcacagatgataggtaagtttaacctagcactttacaataactaggccgtgcttatgcatgcaaatctttatccttccactcctcttcgtgcaagcatggctgacgcaacgagtgatgtaacacttatgcttgaatcagcttaatagattcttgtatctaggtttctagattttattggacttcttatgattagtaaacatacgcctaaagtgct

SEQ ID NO: 2959 - DNA, 969 bp, Ebolavirus
  misc_feature 1..969: note = Mutant Zaire ebolavirus, isolate Ebola7
  source 1..969: mol_type = genomic DNA
taaggctgactaaaacactatataaccttctacttgatcacaatactccgtatacctatcatcatatatttaatcaagacgatatcctttaaaacttattcagtactataatcactctcgtttcaaattaataagatgtgcatgattgccctaatatatgaagaggtatgatacaaccctaacagtgatcaaagaaaatcataatctcgtatcgctcgtaatataacctgccaagcatacctcttgcacaaagtgattcttgtacacaaataatgttttactctacaggaggtagcaacgatccatcccatcaaaaaataagtatttcatgacttactaatgatctcttaaaatattaagaaaaactgacggaacataaattctttatgcttcaagctgtggaggaggtgtttggtattggctattgttatattacaatcaataacaagcttgtaaaaatattgttcttgtttcaagaggtagattgtgaccggaaatgctaaactaatgatgaagattaatgcggaggtctgataagaataaaccttattattcagattaggccccaagaggcattcttcatctccttttagcaaagtactatttcagggtagtccaattagtggcacgtcttttagctgtatatcagtcgcccctgagatacgccacaaaagtgtctctaagctaaattggtctgtacacatcccatacattgtattaggggcaataatatctaattgaacttagccgtttaaaatttagtgcataaatctgggctaacaccaccaggtcaactccattggctgaaaagaagcttacctacaacgaacatcactttgagcgccctcacaattaaaaaataggaacgtcgttccaacaatcgagcgcaaggtttcaaggttgaactgagagtgtctagacaacaaaatattgatactccagacaccaagcaagacctgagaaaaaacc

SEQ ID NO: 2960 - DNA, 975 bp, Subterranean clover mottle virus
  misc_feature 1..975: note = complete genome.1
  source 1..975: mol_type = genomic DNA
acaggcatggggacctagtgtacatagcagtagcggaaagaatatgtatgttggctgaggctgatcttgcagatgctccagatccagtggaccttgtgaaagctggatactgtgatccgataagattatttgtcaaacaggagccccacccactcaagaaggttgtggaagggagattccgtttgatttcttcagtatcactagttgatcaactagttgagagactgctcttcggcccacaaaacgaaaccgaaatcgatctctggcaatcagtcccgtccaaacccggaatggggctgtcgcaaccgtggcaggtgtccgctctgtggaatgacttagagcataagcataagctcagtcctgcagcagaggcagacatctccggctttgattggtcagtccaatcatgggagatcttagctgatgtgtgcattaggatagatagagggggttttaaaggtaacctccgtaaagccgccctgaataggttcaaatgtttctccaatgctgttttccaactcagcgacggaacattgataagtcaaggcttaccgggtctgatgaaatctggaagttattgtacctcgagtaccaacagccggataagatgtctaatggctaaaatcattggagccccgtggtgcattgccatgggcgacgactcggtagaaggatatgttgagggcgccagggagatgtacgactctctcggccacacttgcaaggattatataccttgcaaagctgatctagacaagttagaggaagtgaatttttgctcccacactataaggaaagacagctactacctccaatcctgggcgaaaaccttgtttcgattcctcagtcaacctgaagatgtcaatgaacttgctgtggaattgaaaggatgtcctgaatggccccggatatccaagtacctccgtcggattggaaagatctccgacaaaacttcagaaggagagggaaaacaaa

SEQ ID NO: 2961 - DNA, 988 bp, Nilaparvata lugens honeydew virus-2
  misc_feature 1..988: note = genomic RNA, complete genome,1
  source 1..988: mol_type = genomic DNA
attgaaagagcggcggcgcgtgtttttcacgcgtcgtcgtcttattcgggttgcccaagtgcctgctacattgtttatttgtaaattctttaccaggcctactctcgaagtacactgctaaagttttgcatctcgccttgtacctcgtcttggttttcttgagtagatttcgattgttgtgttttacatagttgccgtctctttcataccctttattggaacttattttataatttatattattattatacattatctggttataaatgttaatattctttgtgaagggccgcattacactaatttagtgttgattcaattatatttttgctttgttacattatttatcgtgagggaagtagtccatgatagtttaatgtgatttggccggggtatttattgaattaggaatcttttacagcaatatgtgtgatagcgtcaaaattttgtttattgttctcattctaaattatgtttatatctttagagcgatgattctatcatattgtaatgtaatttgtgttagagcctgctgagtttcttttcggacattcccaagaagaaagatcaactcagtaggatagcttttagtagccagtacatacttatttagtcactgtgcgtatggtgaagaagcctctacaagatttcagatgtgtataactggtgctagtcattttccgccagcctgtcttaacttagcgattaacctctttatataccaagcgctgattctgtattttagtagtgtattttatttaattggttgggcttagttataagctaggatattcaattgtctatctagatattttcttttatctcaaacggatatgatatcaaattgatgattttccaatttaccgtcatatcgtctgtgtgtgatctatatcccagtgtccttattcatccagtctaaggaaggtaagatatacgtagaaattattttaactgacaattgtctagagttggaaattttattttaaaa

SEQ ID NO: 2962 - DNA, 991 bp, Yili teratoscincus roborowskii picornavirus 1
  misc_feature 1..991: note = strain LPWC1754991
  source 1..991: mol_type = genomic DNA
ccggggggaatccccggtaatccacttttcggccagcgtctgttgctggcactctcgcccaatcttataacactaggtattgggtcttacccgaaaggagaatcccactacaatagattataatgataaagagatagatcgacggttgcgggtcttaccttaaccgggaatcccaaaacaagcgtctatactccagagagagatcaaataagcagcgtaatggtgatacgttaaacaatccgtcatgagaagacgtaaaaatccttgtactgcaagtaaaattgcaacttttgtaattaagtaaatatgtacctcacacatgtgagcactctctaacatcagagaggaaataatcttaaattgtaatacgtgttctggtgaaccgtttagaaaccacgtccgactagagagactagtccacggagaaatccagatgttcaagttcactacgctttcctgcggaaacaatggttagctgagatttgaacgggcgtttaagttctagacacctcacagtggagcgatccacaacagagctacaatcttcagggctaactctggtgcgccgaggcatagcggcaactgtgtattaggagcatttcagggcttgaagagcaggcacgtgcttaaaatgtagcaaaactcaagatgttgagcaatgcgttctgtttgaaaaccatgagtacatggtaacctaccacattgacctatagtgcataacgagtgaagatgtagtttgaaaacatgcagcggatcatggaattgatcgcggtgtttcagatgaaattttcattgcagtgaacattatagagggctcgtttttcgataaccctttgtcagataatgttggaggtgggtacacccacttacagaaggtaccgttttcgtgtgggttgcgaaaatggcgttattagttaacacctaataatgttgtgcagggtgacagcctgtcggcgggtgcacatcttgttttaatccgttgtcttgccat

(The sequence listing continues in the following parts.)
